United States Patent Application Publication US 2005/0228172 A9 - sequence listing, part 115

SEQ ID NO: 536685 - DNA, 567 bp, Homo sapiens
aaattacacactccctgaggatgatacccatttcttttccatcactccctcccccacagaaatcctacatagcaggacatgaaaagtcaacgcctgccacccctgggtcgtgctgtcatttcaatcacagtacctgagatgcataggtgcactggtatattcacttaatacagcactgggcctggcatacagaaagcagtaaggagacatctgaaacaaaaaaattcagcacactcaaacaacagtaacagagcacaggtgcctagatagaacaacttaaaattttagggctctaggcacagagaaaccagtttgagcctyctaaaaaaaaaataaaattcaacactatgagccccagtagcaggctggattgcagttagatgatggtgagctctccaaatgagtagttctcactttcacaacctgcttggcaaataaatgagagtaaagagagaacagaggtcaaaggtgagtcaaactttgagttatgtggaccctccaagagggacagccttagtgaagatttattcaagcaaatgccaactgaagagataggcgggtggggga

SEQ ID NO: 536686 - DNA, 512 bp, Homo sapiens
cattggattttgagtcggaaaacttgggttcaaactctgacttttccacctagaagccatgtgaaccatagacaaatctttttatttctctgagcttcaatggcaaaaataggactcagttgcctacttcatatggttgttttgctgtttaagcaaaatgttggttgaaaaatcacyttgtccattgtaatgtgctatatgaaaaccacttgtagtggttgtcattattgcgctattattatcgccccctgcagtggatacctttttaaaacactttttgatatttgtcctgtggcaccagagcccttatccgtagtgagaacacttacacagcagcccatgtctgggcttcagtgaactaaatagcccaaagcaacaaaaacccagtggagagaaagtggttaggttgcccctcctctgcatctttaggaaggaaggaaaggatgatccaagagattttgagtaaaaaacatagtcagggtagaggacttagtgggaccaacacgagcatg

SEQ ID NO: 536687 - DNA, 620 bp, Homo sapiens
gatagtaattgcccactgtgttatttagcaggataatatggaaaaatatctggcatatagtaggttctcattaaatatagataactgttaggaactacagtggactaataggtgctgagagaagaacagtgacttgcttagttgtgggtactgcccactgtggaaaggaatgacttagaggaacgagcacttggaaggagcatacaagtttaaaatttaacttgtgtgtgtgtgtgtgtgtgtgtgtgtgtgtgtgtgtgtgtgtgttttaaatcctcctgggacttgacctaagcatgaaaggcttactattaatatttccctccctgtgtgttcctctgcgaccctatcctgagggcatttattgtgttggcarcagccctggtgaggcacatggaggcagctagacaaatggctccatagaatgaacttcccagtttattctgtgccccagtcctgtaccaaggccagagaggtggtgggagcgagaacaagaagacctaatgaaacctggcaagcaattccttctctccctatgtggatggcctcagtagggcatttcttcaaacatgcccacgtggaagaatcttctagctcatctactgttaccctacattaca

SEQ ID NO: 536688 - DNA, 557 bp, Homo sapiens
tttttactggtatcaaatctcagcatgactgagtttgagggacctcagtgaacaagtggtccaactcgctcatgttacatgaggaaattcaaacccagaggatggaagaggcttgcccacggcatgagtctgaggaacagcygggagtgggaaagaggcctctggcacctcgcccactgcttacgtgtgctcacgacacatactgaatgtaaagtgctacacaaatataaaaggatattatttctactcattttctcattctttaagctcaacctaagataatctgtttctttttctgcacagatttcaaactggactttccagatttgtctctcactggatatgttcaaaaataaaagttcaaacaagagggctccagaggcaaaaatctgaatcatctctggactgtccccttgtggtaaaatactttgtgttcagggcttaaactgacactttagagattgctgtttctcatagtcctcaaaggttcccactggtgtatcccaaatgcgttttgtagcatgttgcccaatgttggatgtagcatatggccaggt

SEQ ID NO: 536689 - DNA, 643 bp, Homo sapiens
atattacagccttgtgacacaccgcatagtgcctgacattctgttaatgcttgattactgttagctcctgttcaacatcatgtaatggaggagctaagacagggttaactttggcttttaactcgggcacccccagccagtagttggctatatgaccttgggcaggttaactaacttctctgcctcagtatcctcttacaatattgaagataagaggggttatatatgtttgttcatttgtttattcaatcagtcagctaacattgaccaaatgctttctgagcctaggaacttagggagatacaaagaagattaagacattgggaagtagggagagggtagtgatggaggtaaacatgttattaaaacgcagagtgccagttctgggagagagattagcrtctgaagggagaagtctctcttggaaagtctggtaagatatccccttgctgtaacagatcctgatctataaacaccactaagaaggcagagaacaaccagaaagcgaatgagagacccttgtttgactctcggcttcagttgccctctgagaaacatgtcctgggttagggttgatgtagggcccaggctttgccgttctctgccccctgggcctcatttgagtgttgctcctggaggcata

SEQ ID NO: 536690 - DNA, 638 bp, Homo sapiens
ctgttaaaccatcaccattacatcacaggcttcttcagtctaaccttatagaatcacggttggctgtggggtgagaaaatcaacagcaatgagttctatggcttccttgagatatcatttacataccaaataattcacccattcaagtgcatgattcaatatttttgactattttcatggagttattcagtcatcaccacartctaattttagaacatttttgcctgcaaaaagaaatgacattcaattattcactagcagccactccccattccacagtaatgatttttaactatgccattgttggttccttctaaatcagaactaaaccaactagtgaaatcaattgccttaggtgtagaaaagcagagaatgataaagctgaggagactgaggttcagagaggttaagttacctgcccaaggggacccagatagtggcagaaccaggtaccctggctttccctccaatgccctttcactttctgaatgggaattccataagtactttttgaatgaaagttacagggtaccatggtagaataattatctttttttctttttaacttttcatttagaaataatttcaaacttacaaaaatgttgcaagaatgctacaacaaactcccatatgccctt

SEQ ID NO: 536691 - DNA, 615 bp, Homo sapiens
tcatgccctttttaatagtaaggtctgtttcctgttgcatttcaatgcatggtacagggtgagttgtttatgaagagagaagactgagaaagaagagttggaaaaggaagagaattcttgaggtgtgcacagatgcatatagcagtagtccccaacctttttggcaccagggatggattttgtggaagacaagagggcaggtggtttcaggatgaactgttccacctcagatcatcaggygttagattctcataaggagcgtgcaacctagatcccttgcacttcacaatagggcttgtggtcctatgacaatctaataccactgctgatctgggacagagctcaggagctcacaggagcagggctcagggctggggtccctgccgtagagtgattgagagacaggactgccacacatgaaagagagagaaccgttatgtaagtcagcactaaatcgtgtgctcagaattgttgctgcctcaggaattcaggaaacaggaaagatctgtgaggcctggagttgagagagaggccagtgcttcctggagatgggagctagcccagagggatggtgagatttgaacagaaaaaagtgagagagatgggcatttggca

SEQ ID NO: 536692 - DNA, 520 bp, Homo sapiens
agggaggaagggaaggagagagtgagaagcctcctgggcatgcctgttattcctctcatggccttttagtcaatcaattagataataaattattcataaccttctccgctggcattcaggtacctgtagtgagaaatgatggatgttctggtgacccatgtaaatttgcttggattcagaaccattgtctcagcctgttgctcaaattgctctctctattcctagcatcacgttgggcctggctggaggagggactgttaagtcaatacatacctctaccgtaatgcctaccaccaggggttttagtcgtctttgttgcaaaaccratgagtagcaatcaagtcaatgagaatgagttgaagggacaaaacagatacacgtattgtcacactgtcttgggcggatgggaaggaagagaagaggtgactttgctaggggaatgagctaggagcaaggtatgtggtgaacccacaagctggactgacccctcactccacaaggaaggctgaacagggcagcc

SEQ ID NO: 536693 - DNA, 656 bp, Homo sapiens
gattataaacattgtaacatgatcttgtagtttgtgccatgcccctatactatgctaaatggcatcaaattttgttatgaattgcataacatttctcttcccttttatgaggtcagagatgacatcttctcctgtctccactctgttctcagtaccataaatagagtttggaacatagtaggtggtcaataaatatttactgaatagagtacctagagctttttatcctataaaagaaaaattcatggaaccttgatttttttcccccaaatatttgaagggttaaacttaaaatatgttgcatatttttaagaaagccctgaaatgctaaagagttagttaaggatccatgtgtgactaccacagaggccattattttgactccttacaatcaagtattaaaaaacaaaatctaacagctctcaaagttgttaggagttgccttggaagacagtaagtctctcaattctgtggtgttcagccyggtgattattgatattgtagagaaaattcaagtgtcatataaagatttggactaattgacctatatggaatttcatctttaaattcattgattctaagtagcctattctctacagctacccaatcattcaaagtgatcttttgcttaaataactttattaaagtataattgt

SEQ ID NO: 536694 - DNA, 580 bp, Homo sapiens
tttttgagatggagtttcgctcttcttgcccaggatggagtgcaatggcatgatcttggctcactgcaacctccgcttcccgggttcaagcgattctcctgcctcggcctctcaagtagctgggattgcaggtgtgcacgagcacacccagctagtttttgtatttttagtagagatgagatttcaccatgttggccaggctggtctcaaactcctgacctcaggtgatccatccaccttggcctcccaaagtgccgggattacaggtgtaagccaccacaccyggcctcctatacatctttgtatcttatacaagagaggtttgaatccgcaaagcaaatccttagcaagggcctactatgttccaggagatgtactagatactgtgatagtgaaccatggcacggccccttcctcatggagctttcagtctagaatcttcatcggaggaggagctgaaggtcataggcactataggggtggggctgggatggcaaaagggctcagaagttcagaaacctccaaagctaagtcatacagtttgactgggatggggttgtttacttgcaagtgttttctg

SEQ ID NO: 536695 - DNA, 580 bp, Homo sapiens
tttttgagatggagtttcgctcttcttgcccaggatggagtgcaatggcatgatcttggctcactgcaacctccgcttcccgggttcaagcgattctcctgcctcggcctctcaagtagctgggattgcaggtgtgcacgagcacacccagctagtttttgtatttttagtagagatgagatttcaccatgttggccaggctggtctcaaactcctgacctcaggtgatccatccaccttggcctcccaaagtgccgggattacaggtgtaagccaccacacccggcctcctatacatctttgtatcttatacaagagaggtttgaatccgcaaagcaaatccttagcaaggrcctactatgttccaggagatgtactagatactgtgatagtgaaccatggcacggccccttcctcatggagctttcagtctagaatcttcatcggaggaggagctgaaggtcataggcactataggggtggggctgggatggcaaaagggctcagaagttcagaaacctccaaagctaagtcatacagtttgactgggatggggttgtttacttgcaagtgttttctg

SEQ ID NO: 536696 - DNA, 527 bp, Homo sapiens
ctgattgtggattcattcataaaacagatttctttttgttgttgttgttgatggctgctttaattccctttaggtatmttgcaaggaaatttagaaacagcaaaatccagattccaatttgatatgtataatctgttgatactttgggggcacggtttggtccttccatttctccatggtccttcttcacctgcggctctggaccttctcaaaggcgtgctgtgggtctgttcccctcgttcagctcattgtgtgctttcccttcccatccacatccccagtcatgataggagacatttcaggacccacagagcctgggctggcagtaccagttgacaaggaggagtgtgagagggagtctttcatagacaatgaagaggaagaagtaaaagtggcaggcgaggagagcagaaaaaggagagaaggaaacagggaggaaggacaaagccgacaatgaaggagaggcggctgcagcagcagtcttggttctaaccagatctcttcaagacctgatgctgagcaatttc

SEQ ID NO: 536697 - DNA, 349 bp, Homo sapiens
gctgggagaggcttggagggagattgacacaatgagggagcagggtaccatgctgtgtgccccacccaccacccatgaactaagggtaggggcaaggtggtagaaacagcctacataggtagataggaggtagaaagtagaggggcctgccgcctacttcccatttggatatctgggaagagagtcccttgcaggtgtctgcagggcagccccggcatggtggaaatgctggcaaattgtgtcctgtcagaggaagggctgagacagtggcccttgcttctccacgacctgcatgaaggtgtatccgcgacttcccaggtgccycctgcggggcataaggaggctggga

SEQ ID NO: 536698 - DNA, 501 bp, Homo sapiens
tttcctcccttttccttctgccaagacgtattaatggcatcaactccaatctctatcccaggcaggttttcaaaccgggaaaagcatggcttcacagtaaacctgactctgccattctttccatgtctmaatggctttccatcacctttcagggtctcctgaacatctcccttcttctctcgtcacatcctggacgtgatctcacacactcatgggcctaatccatcattctttcattttttttcattcctcaaactatttttgagcatctactgtgctccaggcactattataaaaaaaaaaaatgcaagcatgaacattgcactgcttttgtcttcccaatgtcccagtggagaagggagacttctagattaaaaaaaaaaaaaatcattacaatcctacgtgacagaagtcacaaaacaaggcacacgtccaacttcacagggcagggagtggctatgttagcttggtgcagacagagaagattttacacaggtggtg

SEQ ID NO: 536699 - DNA, 518 bp, Homo sapiens
ctgccagctccacgcccgaacctacccatattaagagaacagctcgctaggcgtggctccagggccaggttccgcccttaaaagaatatggaagaggctggccaatcacgtacgttattcggcttcgagaccccgcgccacgctgaggttaatttatcgccgtggcgaacactccgcggtttggaactctgattgggccgagcttggcgcgtgcgcgcgatgtttggcgcgtgttcagttgatgggtcgaagcccagagggctgtgggggaaagcagrgaagtttatggcgcgactgcgcaagggagggtaatggctgagggtgggtgttgcgaaagctggaagtaaattgccttcgaatgtttcgcttctgtaactgcggctccactcgccagaagttgctaccctgagtcccacaatgtgcctctgaaggaccttgtggggcacgcagcctctcgccctatgaagagcttctccagacaggaattctggcgtggtctacgtttctccagcgccccg

SEQ ID NO: 536700 - DNA, 518 bp, Homo sapiens
ctgccagctccacgcccgaacctacccatattaagagaacagctcgctaggcgtggctccagggccaggttccgcccttaaaagaatatggaagaggctggccaatcacgtacgttattcggcttcgagaccccgcgccacgctgaggttaatttatcgccgtggcgaacactccgcggtttggaactctgattgggccgagcttggcgcgtgcgcgcgatgtttggcgcgtgttcagttgatgggtcgaagcccagagggctgtgggggaaagcagagaagtttatggcgcgactgcgcaagggagggtaatggctsagggtgggtgttgcgaaagctggaagtaaattgccttcgaatgtttcgcttctgtaactgcggctccactcgccagaagttgctaccctgagtcccacaatgtgcctctgaaggaccttgtggggcacgcagcctctcgccctatgaagagcttctccagacaggaattctggcgtggtctacgtttctccagcgccccg

SEQ ID NO: 536701 - DNA, 518 bp, Homo sapiens
ctgccagctccacgcccgaacctacccatattaagagaacagctcgctaggcgtggctccagggccaggttccgcccttaaaagaatatggaagaggctggccaatcacgtacgttattcggcttcgagaccccgcgccacgctgaggttaatttatcgccgtggcgaacactccgcggtttggaactctgattgggccgagcttggcgcgtgcgcgcgatgtttggcgcgtgttcagttgatgggtcgaagcccagagggctgtgggggaaagcagagaagtttatggcgcgactgcgcaagggagggtaatggctgagggtgggtgttgcgaaagctggaagtaaattgccttcgaatgtttcgcttctgtaactgcggctccactcgccagaagttgctaccctgagtcccacaatgtgcctctgaaggaccttgtggggcacgcagcctctcgccctatkaagagcttctccagacaggaattctggcgtggtctacgtttctccagcgccccg

SEQ ID NO: 536702 - DNA, 676 bp, Homo sapiens
cagctgcccccgtgcagacccgaagtcagcgaaggagaagaggccccaggtaccttgcagcttttgttgttgttgttgttgttttgttttttgaggcagggtctcgctcttttgcccaggctggagtgtagtggygctacctctgctctctgcaccctctgcctcctgtgctcaagccatcccccggcctcagtctcccaagtagctgagactacaggttcactccatcaggcctggcaaatttttgtatttttggtagagatgggggtttgactttgttgccctgagctcaaagcgatccgcccgcctcagcctcccaaaatgctaggattacacgcctgcaccaccatacctggccactctaaagtcttatttccacacagctaagacatgttttaggaagtctgctaaaatacccctggagacctccttattgtggtctcccttttgtcgtgttaatttgattgatcttttctgccctcctgcttttcagaaatttaaaggctaaaaagaggacctaaactttaaaacttctcttttagtctcccattaaactaattgtaagaaccaccaaaaaagggaaaagttctttggaaaaattatttggaaagcagtaaaatgatatggactgttaggatgtaaaacataggatataagtcattatatgttagtggtg

SEQ ID NO: 536703 - DNA, 676 bp, Homo sapiens
cagctgcccccgtgcagacccgaagtcagcgaaggagaagaggccccaggtaccttgcagcttttgttgttgttgttgttgttttgttttttgaggcagggtctcgctcttttgcccaggctggagtgtagtggcgctacctctgctctctgcaccctctgcctcctgtgctcaagccatcccccggcctcagtctcccaagtagctgagactacaggttcactccatcaggcctggcaaatttttgtatttttggtagagatgggggtttgactttgttgccctgagctcaaagcgatccgcccrcctcagcctcccaaaatgctaggattacacgcctgcaccaccatacctggccactctaaagtcttatttccacacagctaagacatgttttaggaagtctgctaaaatacccctggagacctccttattgtggtctcccttttgtcgtgttaatttgattgatcttttctgccctcctgcttttcagaaatttaaaggctaaaaagaggacctaaactttaaaacttctcttttagtctcccattaaactaattgtaagaaccaccaaaaaagggaaaagttctttggaaaaattatttggaaagcagtaaaatgatatggactgttaggatgtaaaacataggatataagtcattatatgttagtggtg

SEQ ID NO: 536704 - DNA, 676 bp, Homo sapiens
cagctgcccccgtgcagacccgaagtcagcgaaggagaagaggccccaggtaccttgcagcttttgttgttgttgttgttgttttgttttttgaggcagggtctcgctcttttgcccaggctggagtgtagtggcgctacctctgctctctgcaccctctgcctcctgtgctcaagccatcccccggcctcagtctcccaagtagctgagactacaggttcactccatcaggcctggcaaatttttgtatttttggtagagatgggggtttgactttgttgccctgagctcaaagcgatccgcccgcctcagcctcccaaaatgctagrattacacgcctgcaccaccatacctggccactctaaagtcttatttccacacagctaagacatgttttaggaagtctgctaaaatacccctggagacctccttattgtggtctcccttttgtcgtgttaatttgattgatcttttctgccctcctgcttttcagaaatttaaaggctaaaaagaggacctaaactttaaaacttctcttttagtctcccattaaactaattgtaagaaccaccaaaaaagggaaaagttctttggaaaaattatttggaaagcagtaaaatgatatggactgttaggatgtaaaacataggatataagtcattatatgttagtggtg

SEQ ID NO: 536705 - DNA, 593 bp, Homo sapiens
tgacaaaattcaatgtttggggaaagcaacatctggaaagtttgaacagtcagcagaagaaacacctaagaaaattatgaggactgcaaaagaaacatctragaaatttgcatggccagcaaaagaaagacctaggaagatcacatgggaggaaaaataaacatctgtaaagactgaatgcgtggcaggagtaatacctaataaaactgaagttttggaaaaaggaacatctaagatgctcacgtgtcctacaaaagaaacatctacaaaagcaagtacaaatggtaagatgcttgagtgaactttgtaaggtttattggcatttcaggtttcttagtgaaaaaagtgtgatatgggagtagctgggaatgacttgaatatctaaataaggcaagcttaggcaacactttttcatagtatagaaataagtagatattattccgtaggccctggaaaaattctcacaatacttctggctgtaaatactaagtgaactaactaacaatggctaaaaccataggaaccaaagttgttttggtggtacagggatattataggatcccacatttttttgtttgtttttcatttgagac

SEQ ID NO: 536706 - DNA, 593 bp, Homo sapiens
tgacaaaattcaatgtttggggaaagcaacatctggaaagtttgaacagtcagcagaagaaacacctaagaaaattatgaggactgcaaaagaaacatctaagaaatttgcatggccagcaaaagaaagacctaggaagatcacatgggaggaaaaakaaacatctgtaaagactgaatgcgtggcaggagtaatacctaataaaactgaagttttggaaaaaggaacatctaagatgctcacgtgtcctacaaaagaaacatctacaaaagcaagtacaaatggtaagatgcttgagtgaactttgtaaggtttattggcatttcaggtttcttagtgaaaaaagtgtgatatgggagtagctgggaatgacttgaatatctaaataaggcaagcttaggcaacactttttcatagtatagaaataagtagatattattccgtaggccctggaaaaattctcacaatacttctggctgtaaatactaagtgaactaactaacaatggctaaaaccataggaaccaaagttgttttggtggtacagggatattataggatcccacatttttttgtttgtttttcatttgagac

SEQ ID NO: 536707 - DNA, 593 bp, Homo sapiens
tgacaaaattcaatgtttggggaaagcaacatctggaaagtttgaacagtcagcagaagaaacacctaagaaaattatgaggactgcaaaagaaacatctaagaaatttgcatggccagcaaaagaaagacctaggaagatcacatgggaggaaaaataaacatctgtaaagactgaatgcgtggcaggagtaatacctaataaaactgaagttttggaaaaaggaacatctragatgctcacgtgtcctacaaaagaaacatctacaaaagcaagtacaaatggtaagatgcttgagtgaactttgtaaggtttattggcatttcaggtttcttagtgaaaaaagtgtgatatgggagtagctgggaatgacttgaatatctaaataaggcaagcttaggcaacactttttcatagtatagaaataagtagatattattccgtaggccctggaaaaattctcacaatacttctggctgtaaatactaagtgaactaactaacaatggctaaaaccataggaaccaaagttgttttggtggtacagggatattataggatcccacatttttttgtttgtttttcatttgagac

SEQ ID NO: 536708 - DNA, 506 bp, Homo sapiens
ctatctcgagtttttaaaatattttcaaattctgcattaccatraagccattcaatagacttcactctatctcaaggaggttgcttagattaaacagagctaagcctcatccatcactgatgagtcttcacatataaaagtagggatttgtgctggcttcaggggtacatatactaaaattgaaacaatgtcgagaagatcagcatggtccctgcacaaggatgacacagaaatctgtgaagtgttgcatatttcttgcagtccccaaaaggacatttgactactttctaactagctccaaggaaatggtgtgagtcaaagcaaaatgggtgacagccagtattgcaattgtgattttcatatgaaaaatatttatgtaaggtgatctatgaaatgagatatggtaacacataggatcttgtgtgcaatatgttgttagtaggccaatgagaaaataccaactggcatcttctttgtggaacttacaaaaaataaaggtaggtttt

SEQ ID NO: 536709 - DNA, 506 bp, Homo sapiens
ctatctcgagtttttaaaatattttcaaattctgcattaccatgaagccattcaatagacttcactctatctcaaggaggttgcttagattaaacagagctaagcctcatccatcactgatgagtcttcacatataaaagtagggatttgtgctggcttcaggggtacatatactaaaattgaaacaatgtcgagaagatcagcatggtccctgcacaaggatgacacagaaatctgtgaagtgttgcatatttcttgcagtccccaaaaggacatttgactactttctaactagctccaaggaaatggtgtgagtcaaagcaaaatgggtgacagccagtattgcaattgtgattttcataygaaaaatatttatgtaaggtgatctatgaaatgagatatggtaacacataggatcttgtgtgcaatatgttgttagtaggccaatgagaaaataccaactggcatcttctttgtggaacttacaaaaaataaaggtaggtttt

SEQ ID NO: 536710 - DNA, 506 bp, Homo sapiens
ctatctcgagtttttaaaatattttcaaattctgcattaccatgaagccattcaatagacttcactctatctcaaggaggttgcttagattaaacagagctaagcctcatccatcactgatgagtcttcacatataaaagtagggatttgtgctggcttcaggggtacatatactaaaattgaaacaatgtcgagaagatcagcatggtccctgcacaaggatgacacagaaatctgtgaagtgttgcatatttcttgcagtccccaaaaggacatttgactactttctaactagctccaaggaaatggtgtgagtcaaagcaaaatgggtgacagccagtattgcaattgtgattttcatatgaaaaatatttatgtaaggtgatctatgaaatgagatatggtaacacataggatcttgtgtgcartatgttgttagtaggccaatgagaaaataccaactggcatcttctttgtggaacttacaaaaaataaaggtaggtttt

SEQ ID NO: 536711 - DNA, 644 bp, Homo sapiens
atggcaaacatgctcataatcaccatcacctgggctgaccatcacctccagacacctatgtatttcttcctcaacagtttttccttctgtgaatgctgttttatcaccacagttattcctaaacttctggtcatctttctttcaggcaggcaaataatcccctttactacttgtctcatgcagtccttttcatttttatttcttgggtcaacagttttcttccttatggctgtgatgtccttggattgatacctggccatttgcaagcctctgcattactccaccatcatgagcctgaggactagcttccacctggtcactgtctgctttgtcgtgggcttcactctcatcactggtctcatggtgaaggtttcccagttatctttctgtggaccccatgtcatccctcacttcttcygtgacctcggccctctgatccaactctcctgttctgacaccagatctactgaaacgttggcctttgtccttgtttcattcgttctttttacatccctcattataaccatcattgcatatggcaacatagtagtcacaattgtacgactcccatcagccaaggagcggcagaaagctttctccacctgctcctctcacctcattgtcctctctctggtgtatggcag

SEQ ID NO: 536712 - DNA, 325 bp, Homo sapiens
gtcttggccccaggtgagccctcacctgtgcctcaggccccagcagcccaaccactattgctgagtctgtcttaaaagaggccattaaacaagacactgcccacttccaaataaaagacagcatcgcagagamaaacatatttatccccactacccccacggcaaacactggaaacatatttcctcctctgtgcaggggtcaaactggggcctggagggttaagataaggatttccttgaaatgctacagaggaaaattggccaaggtctggcttggacagagggtcttggtgccccagtgctgaatggaatgagtaggtggcca

SEQ ID NO: 536713 - DNA, 671 bp, Homo sapiens
ctgccaccaccattgtcttccctggactaatgtagtaaccaatcttgctccacgtgtccttaccccctgtattagtctgttttcatgctgctaataaagaccagagactgggtaatttacaaagaaaaagaggtttagtagactcacagttccaagtggctggggaggcctcacaatcatggcagaaggcaaaaggcacgtcttacgtagcagcagacaagagggaatgaatgagagctaagcaaaaggggaaaccccttataaaatcatcagatcttataagacttattcactaccatgggaaccgtatgggggaaactgctcccatgattcaactgtctcccaccaggtccctcccacaacacgtgggaattatgggagctacaattcaagatgagattgggtggcgacacagccaaacatatcacccactaccccttagtctcaactcagcagacaccttaggccttctcggtttttctttctttttttttttttaattatacttyaagttttagggtacatgtgcacaacgtgcaggttagttacatatgtatacatgtgccatgttggtgtgctgcacccattaactcgtcatttaacattaggtatatctcctaatgctatccctcccccctcccacttctcggtttttcaaagcactttggcat

SEQ ID NO: 536714 - DNA, 595 bp, Homo sapiens
gggcagggaccttcctccccgggtctctttgttcaactccctgcacccagtggtrgacttggaatgaggggcgagggagggcctgggaggagcagccactttggagtcgctgtgccttggcacttaggggagctgcagaaagcacaggtccaggcaggagttggtagatttccccctgggagggcactcagggctggattaattgggacaaaaggagtaactggagtggccaatgacaacactgccttctcctggcacctggcctgcgccaggctgcggagttgctcaaggcactttttgctcaagtacctgcaagctcctgtgctcctctcctttgcgggggagcaaaggcagcaacttgagaggctacattgtctctgggaagcagggactggagcccaggccctgctccatcactgttttgttgtgtccttgggcaagttctttctgctctctgggtcttgatttcctcgtgggtcagatgagaggactggattagataatctatagggtgttttccagctttaacattttagagttttgaaaacagtcctgagtcagacaggcgtgggatcaaagcctagctttatcctta

SEQ ID NO: 536715 - DNA, 439 bp, Homo sapiens
tcaatggatgtagcttggacatcttggaatagaggctctggggtcctccccaggatacagtgacagcccttgtggcacctgcccctggaggccaacacggtagccttgctggcacagcctagcaattgctccagttagtaaatcagggattgcacttcagtgagtaacctgccacccaggagcagttatctgctgctgccaccacacaaaggaagctctgttcaggcacaaagcgactgctygggatgctggcaagaccagagcttcccctggccctcaggccaggacttgggactgggtgtctggccctgaaggtgggtatcagcttcccaaaggtgactgccaagctcagaggcattaggacgtgctcatttctgagctttgagacagcttgtcttccacccacccactctgccaggacccaggctcgctttcctgg

SEQ ID NO: 536716 - DNA, 496 bp, Homo sapiens
actttttaaattatttaagctccttgggaagctggctttatccatacagctaactattctccagtgataaccctccatgcttcattttaagtgttctactaaatcttccctgaatgtcttagaaatgtgcattcttttggtttcgtcttgttgcttctctgtgcttagaaggccctctcctaaggctatctaaatgttaaccatgcttcaagatccagttcaaatccctttttctccattagtcattctcttactactacttttaggaagattctttcatggccattgcgaataaactgcttctgaggatatctacctaatatattgtgttacttttgtattgttaaaaattcttctttgctgtaaatttattaacctaacytttttttgccatgtcaagagtgaatcatatcatagttttccttaagtggaaattatagtcttatagaaagacgacatattgttttgctaacatgttagaggatcccatacagaa

SEQ ID NO: 536717 - DNA, 205 bp, Homo sapiens
ccttcccttccccacagagaccccgcatcctagtgcaggtgagagctgaggctggggccgggctgatggaaggaggggagttggcatcattaccctgagccgtggctcttcttccctyccagatgtctccctatgacaacttgctcctctgtcagcctgtatcctcacccctgcccctcaggtatgtgatcagattgtggggagg

SEQ ID NO: 536718 - DNA, 472 bp, Homo sapiens
tatacaaacactaatttgtttgctctctgattatgccattgaaaactgtccatacacagtcagaaactgaaaggaagcaggccaggcgtggtggctgacatctgtaatcctagcactttgggaggctgaggtgggaggatcacttgaggtcaggagtttgagaccagcctggccaacatggtgaaactctgtctctactaaaaatacaaaacattaaccaggcatggtgtcgggcgcctgtagtcccagctacttgggaggttgagggaggagaatcgcttgaacccgggaggcagaggttgcagtgagccgagtttgcaccackgcactccagcctgggcaacagagtgagactcagtctccaacaaaaaagaaactggaaagaagtagggttttcaggggtggtgggattatggtgaatatttagtaaaaatcaaaagaattctagagggaggctcacaccctaaaccca

SEQ ID NO: 536719 - DNA, 512 bp, Homo sapiens
cagccatggacccaggtgcagctcacctggccggcagagtgactccgccatagtgtctttcaggattgacaagcagcccccagaccccatgtctctgaatagaagacacacagtccccatatccagaactttgaatcaaggtcttcagggcctccatggtagaactggagaaagggccgaaaacagatacgaagtcattcaccatctgcgctcctctccctcactggccacctgcccgactcccaaagctttctcaggatcatgaactgctggtggtgggacagcctccagagacccaggctaatattttacaagtgaagcaactgaggccaagagagatgtggcatctgcaaggtgacacagcgagccagcagaagggtaggaatgcaatccaggtctgtggayccagatgtgtgttttatccacagtattgatctcattttggtgcagaatctctgcatcagcctagtaggccaggtttaaagaaggagtcttttctaaaaagtccagac

SEQ ID NO: 536720 - DNA, 341 bp, Homo sapiens
cctctgatgcctctatgctgatctcgtggttgcagcccatgacgaacaggccgaagatgctcatcagtttcccactcattgagaattcctccatgtgctgcccagaagaggaaactggttaactccccatcaccccaaaaggaaattccccatactgtggccaccatccctctccaacctccccacccctctacaccactaaatcatttgcctgcaggtatcccctcaccacaccagctccacactctttccctgcccaagaaaacctttcaaagcagcacccagggaaatggggcagccagatccctaaaatatgttagccagtrggaagctgtggaccc

SEQ ID NO: 536721 - DNA, 609 bp, Homo sapiens
tcccactctgaatccagtgtcagattcccactagccttcagggcatctcttgttggctcctctgcagatgatgaggtgacagtggggaagttctacgccacattcctcatccaggagcacttccggaagttcatgaaaygccaagaggagtattatggctatcggcccaagaaggacattgtacagatccaggtaagcccaatccaggtatgttccaaggggctcccccactgagccaggtctccagactctagttatccttccatgtccttgaggggccaatgatggagacatagagggaaaaaggaagcccagaagagtgaaaaaatgtcaagacagttctgggtagtccatgattgaagatgtttcaacctcaaaaaaagaaccagggcgcttcatctctggatgataggaccaaagaaaataggatttgttcaagggagagacaagttagataagaacagtggtctctaggccaggcgcagtggctcacacctataatcccagcactatgggaggccaaggttggcaggttacttgaggtcaggagttcaagaccagcctggccaacacggcgaaaccccatctctaccaaaaatacaaaaatta

SEQ ID NO: 536722 - DNA, 671 bp, Homo sapiens
  misc_feature (1)...(671): n = A,T,C or G
ggaaggttcctgcctctagtttgagatgtattaaagctaacattttctactccccttcctcaataaattcttcagcctttcttgatgtttaaaggagcattaaagcctctaggctaagctttatttatttgcaagctccattactaagccatccgtgtgactcagtgaaagccttttattgaaaaagtaaacatcttaaaccaaatcaatcacttgctttttctcagtctatcaaaaacttcatatcattttkttgtccatcagatataggtgaaagaaagataataaaaagatatgttgaatgggggctgtggatgggaagtagaacaagctaatattttgtagcattccctataagattcaaggagcattgggaatataatgagaaatgagcttccttccttcatggagcttacctgctcatagaggagggaaataaaaatcgatcaaacatagacattgataaagtaaatgtaaattgtcatagatgctatgcagcagacaataannnnnnnnnnnnnnnnnnnnnnnnnnnnnnnnnnnnnnnnnnnnnnnnnnnnnnnnnnnnnnnnnnnnnnnnnnnnnnnnnnnnnnnnnnnnnnnnnnnnaatgatttgagctgagacctaacgaaggaaactaccaaacccataaagattggaagaagcaat

SEQ ID NO: 536723 - DNA, 671 bp, Homo sapiens
  misc_feature (1)...(671): n = A,T,C or G
ggaaggttcctgcctctagtttgagatgtattaaagctaacattttctactccccttcctcaataaattcttcagcctttcttgatgtttaaaggagcattaaagcctctaggctaagctttatttatttgcaagctccattactaagccatccgtgtgactcagtgaaagccttttattgaaaaagtaaacatcttaaaccaaatcaatcacttgctttttctcagtctatcaaaaacttcatatcatttttttgtccatcagatataggtgaaagaaagataataaaaagatatgttgaatgggggctgtggatgggaagtagaacaagctaatrttttgtagcattccctataagattcaaggagcattgggaatataatgagaaatgagcttccttccttcatggagcttacctgctcatagaggagggaaataaaaatcgatcaaacatagacattgataaagtaaatgtaaattgtcatagatgctatgcagcagacaataannnnnnnnnnnnnnnnnnnnnnnnnnnnnnnnnnnnnnnnnnnnnnnnnnnnnnnnnnnnnnnnnnnnnnnnnnnnnnnnnnnnnnnnnnnnnnnnnnnnaatgatttgagctgagacctaacgaaggaaactaccaaacccataaagattggaagaagcaat

SEQ ID NO: 536724 - DNA, 154 bp, Homo sapiens
ctgcctctcattgcttaaaatttcagcccataccaaatcatctctcctgtgctattctgatccttctaggcctcagcatcaagcatgccccgggagcwagagataagcactctgtggcttaggtatagagctgctgtcaggttgcacctgcatg

SEQ ID NO: 536725 - DNA, 612 bp, Homo sapiens
acttaaaaattctacatggcaagcaatgaagttcacattataatagtaatatgatgcttcctgtatgccaggcactatactaagggytttatacagattaactcattcaatttgcacaactactttatcagatggatattatcatcattttcttcatttgacaaatgaggaaactgaggcacagagaggctaaatactttcccaaagccactcagtaggtaaacagcaaagggaggatttgaactcaggcagtctgtgcttcctggacccatgctttaaagcactgtgctataattctgcctttcagacaggccaaactctgtagaaaaatatctttccagagctaaaagaatttggatatggacatatttttcacagatagctgggtgctgatcctgctgtctttcctacaatgatgttgtcttagaggtgctaaacttggctcaagaaccaggagagactgatgtttgtgaaaattgccctaaactgaactacacagattcgtggtgtatgttcttccagaatagttatataagccacagtataaatgacttgcagcatggcaacaaataagctgttttgtcaattttgtaccctatcagggcacctcag

SEQ ID NO: 536726 - DNA, 547 bp, Homo sapiens
ctcaggggtcactgggtctggaggggatcaggggcccctggacggggtctggctggggccctctttgacctcaggggagaataggaacagggkaacgttggggaagcgaagtagagtaagcccagccccaagctcttgggtgtcagcctccttcttctcgctgattgggtgacagcctccttcttctccctgattgggtgtcagcctccttcttctccctgattgggtgtcagccttcttcttctccctgacatgcccccagtctggttgctggcctgggcctgtggctgtttgcaacgctatgtcaaggaggccagggctaggatgaggaggcagcgtggaggagagaatactagaatgagcaaatgtcagtgcttagagggaccttagagattttccagtctaaccccccatttgaaacatggagaaactaaggcacagtggaggaagtgacttgcccagggctgcagagtcaatcactacaggagctgggacctaaacagagatctgcttctgatccctttgaaaatctgatgaagccaggagc

SEQ ID NO: 536727 - DNA, 631 bp, Homo sapiens
tagggccggctaggggagggcttggggctggggatgtaacagccccgtggctcctatgggctgagctcctttaactgttctgactgtctgtccctagagactggctaatggctgacggggcaccacgcatttaacggcatcagacccaaaccagccttgcctgcccttggcttgtttcgctcctcaccccaggggctgggggctcccctgaaatctgcatggaagggacagccaagctctggggaacttgggctgggttttggtcaacagacccaggcagcgggtgaggaagggctcctggctccgtgggtggtgggggtcggagcagcaaggtcactggccacaatcccttagaccctcgccccgcctttcgggtcctgggtaatcagattagcgttctccctgctggcctacctctggggcttgtctgtgagtgaggacgatggcaaagcactttataccctttggaaggaagtcsgtggtaacccaagcttagagtatcaatacgattggtaacaacaataaaattgagccctgacatttggcactgtcctgccgagtcacaaagaacgaagctctctcacacgcattgctgtgctgtgacggggcctcggaacaagcccaagggtag

SEQ ID NO: 536728 - DNA, 578 bp, Homo sapiens
tgcttaatacatatttattgaatgaataactgaatgaaaggtgtctgaactgagtttagatggatsaataagactcacccagtctaaaaatagtgggaaagtaaagagaatagcatgaagggaagacacagaggcatgaataggcatgggacgggcaggagtataagcagctcagtgtcattagatggtagtgtcagcagagagtggtggatgtggctggtgataaagacagaaattagctcacagaggccattgtattccatgaccttggactttttggtttagagacagggagacctgcagattttggcttaaatctgtgcttctcaaacattttaacagtgactcacaagaaacacattttatgtatctgaactgagatccatccccagcttttagaagctgtcacattcattggctcgtggctccttccaccacttcagagccagcagcagcagagcgagtccttggtacctcatatctctctgacccactctcctgcctttcttgtacacttttaagggctcctgtgactatattgggcccacttggttaatccagaataatcttcccatctc

SEQ ID NO: 536729 - DNA, 468 bp, Homo sapiens
ctgtcatgtagagcatctgcctgaagacacttttaaaaaaaacatttccaatttttgcccacttattttagcctttccttcattatatagatttttttggtatagtaaatagagaaagaaatattaaatcagcatttaataattcatggacacaaagaggggaaygacagacactggggcctacttgagggtggagggtaggaggaggaagaggatcagaaaaagtaactatttggtactaggtttagtacctgggcaacgaaatactctgtgcaaccaacctccatgacacaagtttacgtatataacaaacctgcacatctacccctgaatccaaaataaaatttttaaaaaagacggcagaaaagtaggttaaataaagttaaatagagtcttgactgcaggactatagtgaaccttaattataaactaaggctctccaaataagtgatgtttatagcatttata

SEQ ID NO: 536730 - DNA, 633 bp, Homo sapiens
gcagagccctgtgtcttcagcaccccatgagttctccctcaaggtaggcaagatgagatttcagaaaagaatatgggctcccatcactgacattttaggatttgtaaatgttatatagccagaaaaaaagatmtcattcagctttcattttcagaaatgtgaagacacattaaatgacttgccccacattgcctagctagactgtggcaaggccagaactgagattcagatattttaatttgctgtttagcattatgactacatgggaaaatatataacacttcgatgtcctcttctccatcaaagatgaagcctaacctactaacaggaagcaattacatcaatctctgtgaactgtctttttaaaaagttatcttctggatttaaaattcagaataattcccaatgatgtcattatgagtttgacagataccatctgtcaaataccatctgtcagataccatattactttgctgtaatatgttcaggtaagatcaactcccgcattagattaatatgcttgtgaatactgtagagacttttttaggagagagtttatggcaataaactgattggttcaatcccccacccattcctttttattttattccttttattttttagctttctgca

SEQ ID NO: 536731 - DNA, 634 bp, Homo sapiens
ccagaataaaagtaaatgaagaatgaaaatacatgctttataaaaatgtattaactgagaattttctagatctcttaatgactttagagtctcattaaaaactacaacccccaaataaggtaaactacaagttcaccctgggcaatatcatgatcatcctataaaataccaaaagaaagaggaaaaagaaagattacttaygagattagaattttgaaaaatactagatgtctcaatagaaaaatagaaactgaaataaaaatgtgtaaagtttaagaaaaaatgagtttaaattagaattgtatatctggtaaaataaattgaagacagtaggtgaaattcattttacaataaactagaattgagtttactgatgacaaattttcacttataagcctatagaatgcaatttagggaggatgaatttgaaccccaagaaagaacaaaaaaatcaagcactaagagtacgaaaaatattaagcatgcataatatatacagtaattggctttataaaaaaagaagggataaaaaaagcttctcttattcttcaaaggaaaagaaaaggtacaaggaccaaggcatagcatcacactctatattactgatacattatttacttttttaagaaaagcc

SEQ ID NO: 536732 - DNA, 634 bp, Homo sapiens
ccagaataaaagtaaatgaagaatgaaaatacatgctttataaaaatgtattaactgagaattttctagatctcttaatgactttagagtctcattaaaaactacaacccccaaataaggtaaactacaagttcaccctgggcaatatcatgatcatcctataaaataccaaaagaaagaggaaaaagaaagattacttatgagattagaattttgaaaaatactagatgtctcaatagaaaaatagaaactgaaataaaaatgtgtaaagtttaagaaaaaatgagtttaaattagaattgtatatctggtaaaataaattgaagacagtaggtgaaattcattttacaataaactagaattgagtttactgatgacaaattttcacttataagcctatagaatgcaatttagggaggatgaatttgaaccccaagaaagaacaaaaaaatcaagcactaagagtaygaaaaatattaagcatgcataatatatacagtaattggctttataaaaaaagaagggataaaaaaagcttctcttattcttcaaaggaaaagaaaaggtacaaggaccaaggcatagcatcacactctatattactgatacattatttacttttttaagaaaagcc

SEQ ID NO: 536733 - DNA, 482 bp, Homo sapiens
caatgcctctcatcttccaatggttgccttttcttctgttattactggactgttgggactggtagcactggtcatataagatgcccacagttgctaaaggaggacactgttagaaataaagtgacggccgggtgcaatggctcatgtatgtaatcccaacactttgggaggttgaggcgggcaaatcgcctgaggtcaggagttcaagaccagcctggccaacatggtgaaatcccatctctactaaaaatacaaaaattatctgggcatggtggtggttgcctgtaatcccagctactccagaggctgaggcaagtgaatcacttgaacctgggaggcggaggttgcagtgagctgagaccgggmcattgcactctagtgtgggcgacaagagcaaaactccctctcaaaaaaaaaaaaaaaaaaaaaaaaaaaaaaaaaaaaaaaaaaactggaaagaaaagaaataaagtgactactgc

SEQ ID NO: 536734 - DNA, 604 bp, Homo sapiens
aaccatacctctgaggacagtccttggatgatatctgcaaaaattgcctctgtaattattatgatttttttcaatctaagatccattgttaaccagctcccatcttgactgccgtttttttttgtttttgtttttgtttttgtttttaatggagtctcgctttgtcccccaggctggagtgcagtggcgggatctcgtctcmttgcaacctccacctcctgggttcaagcaattgtctgcctcagcctcccgagtagctgggattacaggtgcttgccaccacggccagctaatttttttgtattttagtagagacagggtttcaccatcttgaccaggctggtcttgagctcctgccctcgtgatccacccaccttggcctcgcaaagtgctgggattacaggcgtgagccaccgcacccagccgtttactgccgtttttttatattaatataatcaactacttttgactaagtcaggtaactggtctccctttgtagagaaactttgaaaacatcttttctcatttattttgctcttactccaattttgctctaagaagacaaacacattttccttattttgaacttggcagtaggagaagt

SEQ ID NO: 536735 - DNA, 523 bp, Homo sapiens
tacagccggtaggttatctacatatatatttgcttctttctctcttctatgccatcattgttctcataacctcaacaagaaacctgctaaagcccatcaagcaaacttaataaattgacaagtattaattgatcatctataaaagtgcaaggatctcattgttaattagctgattcacaacatgatttgagtcagccatggatkgtgaggctgagtgaatgggtaatgatgagggtccctgagtgtaagtctcatcatcttcagtgatggcaaagccctatctacataaatcatcacagactcagctctattaccaagatgccttgattaagccctgtaaatggcagaatgcagagtccaatccaattagccttacattggtctttattacatatcaggaagcccatgatttccaatgcacatttgacaaattatactttcttgtcttctgataataaggaaaggaaatgtgaaatgcccatttttcctgttccttcttgcatcatagttgttgctctagtgg

SEQ ID NO: 536736 - DNA, 638 bp, Homo sapiens
acaatgctgtaacggactaccttttaactaagcctcttctttttttttttttgagacacagtctcactcttgcccaagctggagtgcaggctcggctcactgcaacctccttctcctgggttcaagctattctcgtgcctcagcctcccatgtagctgggattatagggatgtgccatcatgcccatctaattttttttgcatttttagtagagatggggttttgccatgttgaccaggctggtctcgaactcctgacctcaagtgatccacctgtttcggcctcccaaagtgctgggattacagtgagccacygctcccagccttaactaagtttcttaatatactcttataattacattcttgattattttcttaactttccagaagtgaaatggctgggtcagaagacaataaatagcaatctcttttaagtaaaatgatgcacttgcttttggttctgtttctgctactttgagtaagtaatcactcatttattcatcatccattcacttaacaagcacaagaagcacagagtaaaatgtggtcctcgtcttcaaggagctcataatggaatggcagaggcaggcagggcaacagttaatgagaaggagtgacagttgtggtggcggctttcga

SEQ ID NO: 536737 - DNA, 504 bp, Homo sapiens
ctggcaagacgagtacccagggtcccgttggcctccatctggctgtgtggctcagttaagtctctgcacctctccggcctcagtttctccatctgtcccagaagcccttggcctggataatccctggttccttagtagttcaggcagcctttgtcttctgaaccccatgctgccttgggttccacggaygcaggtaagtcttgggggttcccgccccacctgcatgctcagggaaggctctccactgccgcattcccccgctgccagtggctcccacctgctcccctcccagagggctgactccaaaggaagcctgtcctttgtcagcagagctgccttgcccggcaaagaggctttcatctctgtgcataggacttcccgccgcatcagcagaaacttctggctgcttagtgcagggactagggggtggctcagttgttgagggcgcaaactttggagtaaagcgaccctggccttgaattctggctttgccatttattctgt

SEQ ID NO: 536738 - DNA, 504 bp, Homo sapiens
ctggcaagacgagtacccagggtcccgttggcctccatctggctgtgtggctcagttaagtctctgcacctctccggcctcagtttctccatctgtcccagaagcccttggcctggataatccctggttccttagtagttcaggcagcctttgtcttctgaaccccatgctgccttgggttccacggacgcaggtaagtcttgggggttcccgccccacctgcatgctcagggaaggctctccrctgccgcattcccccgctgccagtggctcccacctgctcccctcccagagggctgactccaaaggaagcctgtcctttgtcagcagagctgccttgcccggcaaagaggctttcatctctgtgcataggacttcccgccgcatcagcagaaacttctggctgcttagtgcagggactagggggtggctcagttgttgagggcgcaaactttggagtaaagcgaccctggccttgaattctggctttgccatttattctgt

SEQ ID NO: 536739 - DNA, 504 bp, Homo sapiens
ctggcaagacgagtacccagggtcccgttggcctccatctggctgtgtggctcagttaagtctctgcacctctccggcctcagtttctccatctgtcccagaagcccttggcctggataatccctggttccttagtagttcaggcagcctttgtcttctgaaccccatgctgccttgggttccacggacgcaggtaagtcttgggggttcccgccccacctgcatgctcagggaaggctctccactgccgcattcccccgctgccagtggctcccacctgctcccctcccagagggctgactccaaaggaagcctgtcctttgtcagcagagctgccttgcccggcaaagaggctttcatctctgtgcataggacttccygccgcatcagcagaaacttctggctgcttagtgcagggactagggggtggctcagttgttgagggcgcaaactttggagtaaagcgaccctggccttgaattctggctttgccatttattctgt

SEQ ID NO: 536740 - DNA, 625 bp, Homo sapiens
catggcctcccccagagtcaatgtgagaggggacttcaggagggcagaaacactgagaggcatggttcactgggaccaccagcagatgtgctggtctgccgcagatccataggtagtttgagttgttactgtggttattatccctataatgaaaggcctggattgatgatctctgaggtcactcccttccagtgcctgtattctgtgattcaggaggatgaatgactcacccagggccacatagggaggtgggagaagaaccagataaattgtggaagtcacataaacagcactattgataaaacaatcagtaactgagaaatgacagaaacataaaacawtctatatctagctgtttgttaggagttttaaatgtggcaggaccatcgcaggggcaagctggtctgtgcctgcatcattgcagacagtgatgggctgggaaaagagtcagagggacctgaggccatgagggtgatgcacacagatcctactgagcaaaggccttgccagaggggacttgccttcaaaccaagagtgaaagaatgtgtacaaattgaggctcagagagctcaagccatttgcccaaggccacacagctaggacatggtagagctgggattcaaac

SEQ ID NO: 536741 - DNA, 625 bp, Homo sapiens
catggcctcccccagagtcaatgtgagaggggacttcaggagggcagaaacactgagaggcatggttcactgggaccaccagcagatgtgctggtctgccgcagatccataggtagtttgagttgttactgtggttattatccctataatgaaaggcctggattgatgatctctgaggtcactcccttccagtgcctgtattctgtgattcaggaggatgaatgactcacccagggccacatagggaggtgggagaagaaccagataaattgtggaagtcacataaacagcactattgataaaacaatcagtaactgagaaatgacagaaacataaaacaatctatatctagctgtttgttaggagttttaaatgtggcaggaccatcgcaggggcaagctggtctgtgcctgcatcattgcagacagtgatgggctgggaaaagagtcagagggacctgaggccatgagggtgatgcacacagatcctactgagcaaaggccttgccagaggggacktgccttcaaaccaagagtgaaagaatgtgtacaaattgaggctcagagagctcaagccatttgcccaaggccacacagctaggacatggtagagctgggattcaaac

SEQ ID NO: 536742 - DNA, 532 bp, Homo sapiens
actgggcttgtctgcagcctcggcctgctcaccaggggtagagaaagtgattctcccccttgggcaagggcaaggggatgaaggcccatgaactgataaactctgggccctctgagctgtggcttgcatggctggggcatctgtcacggcccctccttccctccaccgaatcactggggcctgagaaccacccaggaccccgctgctcacatgctcctctcccagaccctccctccgcatcctcaggcttccccgccaccacttctgcccacatacctctcgtaagggcacagaaggcctccgtgtggctaaatccaaggtaggcctcaggctcctccttaacctcagcagcattcagcacagatcaccccctccccttccaaccctcaccctgcccttccgktcttccaccttcatccgggcatctcagcctcccccgtgcttcctgatcagctcctggacctcccgacactggccttccctggactctgtcctcacacctcctccgtctactctgctcccttggaggctg

SEQ ID NO: 536743 - DNA, 492 bp, Homo sapiens
ttttctaagtatatgggttcagatggccttttacatgattgaaaactgtaaaggaaaaaggtagtagtcaacagtacaatcatggctttaataaccctttattttatgtgacaccaaaaagaattgaaaaatacaaggattgcaatttttaaattatgacgtaggcagctttgaatacatttatgtgttttccctatcaaatgaaaatataaccatatattgtatatatatatatatccttaaaaattggtttttcttacttgaatgttaatttttaamaatttataatggcattgattaatgttgatgtgatttattgaatctaattcatgtaaaaatgatatattgtgaactgtgatactttcattatcacatcctgtgacatacatggtagttatatgttgaatgttgttgactgacttttattgactaggttactaaattttatctgaatttcatcttaactttgtggcctttatatctcctaagaca

SEQ ID NO: 536744 - DNA, 489 bp, Homo sapiens
ttaaatcacattgaggtgaaaataaaagctaaaagtcasaaaatggtagtgaaatactaccatatcagacatgattgaattccaaagccatatactgatcaaaaaacagattatcattcaagtctaaatagaaaaaaatacttatgagtagaggcatatgtttttcaaatgtatttgtaatcaatttcatgtataatttgtgacaatttatgtattacacttttgcattttcccctaaaagtgaaaaaatggtcatttttttccatatataaaatagtattcgattatttaaaaatccatacaaatgatatttattactatttcttgtttaagccctcatgtatcttctctattgtatttttggattctgtaaacaaattactgtatcatgaccaatacttgctcaagatcaacattgaatcatggatttggtgtcactgagtgcaagccatgtgaggtctacatgtgctgggacataccattcaccaa

SEQ ID NO: 536745 - DNA, 489 bp, Homo sapiens
ttaaatcacattgaggtgaaaataaaagctaaaagtcagaaaatggtagtgaaatactaccatatcagacatgattgaattccaaagccatatactgatcaaaaaacagattatcattcaagtctaaatagaaaaaaatacttatgagtagaggcatatgtttttcaaatgtatttgtaatcaatttcakgtataatttgtgacaatttatgtattacacttttgcattttcccctaaaagtgaaaaaatggtcatttttttccatatataaaatagtattcgattatttaaaaatccatacaaatgatatttattactatttcttgtttaagccctcatgtatcttctctattgtatttttggattctgtaaacaaattactgtatcatgaccaatacttgctcaagatcaacattgaatcatggatttggtgtcactgagtgcaagccatgtgaggtctacatgtgctgggacataccattcaccaa

SEQ ID NO: 536746 - DNA, 439 bp, Homo sapiens
tgcctgtcagtcagctgcctcagttcagtatagctgtaaaattggaggtttcttcattctgttgtcatctctccttgctgctcaaaggtttgtgtttgtttgtctgttttattttcatttcctggaacagacatgttgtgtcacaagtttctgtatttctatgtattgggcacacagtctaacataaatttactattttgttgtttcttacctttcttttaaccctgattaaagtaaaggatctcactcaagctaatggcatgatttctcagtctcactaatgtgtgttctctgctacatgtcttctctctgctacatgtcttcctcctcycccacttacttcttattttcttcttcctcttttcttccctctactcttcctcctccatgcaaaaactaggaatagcaggaaattcatggatttttccataaaatagat

SEQ ID NO: 536747 - DNA, 455 bp, Homo sapiens
gctgtaaaattggaggtttcttcattctgttgtcatctctccttgctgctcaaaggtttgtgtttgtttgtctgttttattttcatttcctggaacagacatgttgtgtcacaagtttctgtatttctatgtattgggcacacagtctaacataaatttactattttgttgtttcttacctttcttttaaccctgattaaagtaaaggatctcactcaagctaatggcatgatttctcagtctcactaatgtgtgttctctgctacatgtcttctctctgctacatgtcttcctcctcccccacttacttcttattttcttcttcctcttttcttccctctactcttcctcctccatgcaaaaactaggaatagcaggaaattcatggatttttcyataaaatagatatgagtatacattttcattcaatcactcactaaacaagtgaacattgc

SEQ ID NO: 536748 - DNA, 574 bp, Homo sapiens
tttaccacctaggtttgtttaagtacactctgtaatgtccatacaatgaaatcacctaatgatgcatttcttgtaatccatttttgtcactgagcaccacatgactatatgtaagttataatcaataggggatcagaaaatgtctttcacttactctgtagagccaagaattgagatgaaataaatatggcatagacactgcaaatttttcttacatgggaatttcctgcaaaattttcttacatgggaatcaagtccttgacttttttcaatcatatccaaatgtctaaaaggaggtataaattcaccatctggaattcttgtctagttgatgtatttgatgaagttttgttttgctttaccagaaaactttttccaccctggcctgtgccctctgtgtattgctaaagttgaagaatgtaytgtgccttctgctgctttcatttcccgggtcccaagtcccgtctccagaatatactctttatttgatgcaaagacactgggagcttgagtggtgctggcagatctgtgattcatgcataggagaaaatggccatctttcccaggtaggaca

SEQ ID NO: 536749 - DNA, 552 bp, Homo sapiens
acccgtcttctgcatcaatctctctgggaggtgcagactgaagctgttcctatttggccatcttggaagtgacctcaagtgatctgctcaccttggcctcccaaagtactgggattacaggtgtgtgccaccacaccaggctgacagccatagttttgtggctcctcacatggcctttcttctgtgcttgcaaacaaaggatgttttttaaaggtcaataaagtctacartcctctagaaagatagctgaaaatgacataaattactcatatcataaaggaaccagaatattaatatagtacctgactatataaaaataattaataaagggatactaaatcaaccctgcaaacataagcttgaaaacataaacaaaatgcaccaaatcctcaaaaaatacaatcgtaacacacccaatataaaatgcataattagaataaaccaattactattacttaatttgaatttgtaattcttaaattttcaaggaaacaaatcttcagtaacatatggtttcacaggaaaatttgtgccaaacattcaagtaattgc

SEQ ID NO: 536750 - DNA, 436 bp, Homo sapiens
gttgatctcactgggagctgtagaccagagctgttcctattcagccatcttgccagcaacccccaattttgcctactttaatgttacaaatatattggcctaagctttcttgtagaactatgttgtccaaaatgatagtcactagccacatatcactgtttaaattttagcattaattaattacatttaaattatattaaaattcactttctcagtaatactagccacatttcaagagctcagtacccacatggtggctagtagctaccattttggacagtgcagatatagaacatttcaattatcacagaaagttctattgcatagtattgttctatagagcagtgttcagagtgggtgcttttatgcataagtcgatggtctatcttgaacttacttttgtataataaagttastgagtcaaggtttaattttt

SEQ ID NO: 536751 - DNA, 566 bp, Homo sapiens
tatgcattcctacttttgtaaaaatctatgcttgttgaggagatagatatttatcacgaatccattagcccttttgagagaaacaaggagaaagtgattctccagttgcagtgagaggggagtgtccttgggtgtacaaactggtggggaacagccacatgcttcttgataaggtggcaagatttcagagggaagaaatacacaatgaccaagggaaggagggccagaggtacagaagatagcggcctcttcaaaggatcctatgacacaaatctggttttaaaagggcccatccagaagtattgatatgacatacagattggaacaacatctaatgcaagagtttccaatgagaactggtaactacctaccatacggaattctccaaaatgttggacctcagggcattttccaaatttgaggggacattgagtcccaaaagtgacaaaaaaattacttttcatttatttagtggagtgtgtgtgtgtgtgtgtgtgtgtgaygatcagagtcatacttaaagtacgtaatgtgaagctatttcagccttaaaaggtgaaaaactc

SEQ ID NO: 536752 - DNA, 601 bp, Homo sapiens
acttggctctagttctcctattgcatttagtcatcccaggagcagccaggggaagcattgcctcccctagcctcatgagtgaacacctggatagatctgaaggtgggttcatggaggctgtcagtcaatcacaccttcaaagcaagttttcttgaagggaggcttaatatctagcattttatcttcagtgaaggagaatgatagattggaggacaggcatggttttgttttgttttgcttataaattgaaggtatagttttggacatgataagtttgaaatacctgagacattcaggtggaggtggatacactggagagaagctcagagaagggagttgcgccggagatatcagtcttggagttgccatcgtttatggaaagtatttaaagccaaggaagtagttgtgatcattttgggggagactgtgtagagaaagacgaaagtgtccaggactcagctctgaggaactccaacactaagagttcaggcaaaggagaaggagacagtaggagcagccagaaaggtaggaggaaagccagaaaactgtgcraaatgagaaggtttgacagcagggatcaagtgagacaactgtgtccaat

SEQ ID NO: 536753 - DNA, 365 bp, Homo sapiens
ctgatgaaaggatatgtgctgtctgaagcctccctttactaacagaacaaatcattctctcatatatgtctccacagcacattttwtctacttttattatatcccttaataaactgaggtttcaaatgtatctagatatctgtctgcctgctagtacatgaggtctgcaagttcagaaaatgttctagtcatctgaaagtaactgcttgtttaactgttaatgccaaactcataagataggtttttagagaattttttctataggtttacaaaggccatttgatggcatccggtgggattcatttttcacaaaagggtaatgacacagcagttctgcattgggtctggtatttgggtggaaatgc

SEQ ID NO: 536754 - DNA, 532 bp, Homo sapiens
ttctaacagtcagtaagacagttagtgacccaaaagcaagacctgctgtgtgatttgtggggcccaaaacacaagggaattgtggtggcccttgttcaaaaaatattcaaaatktcaaggtggtgacaacagagctttgatctaagtgctaggcccttctgagcatgatgacctgggtgacttcacaggtcacaaacccaagaagtcagccctgcttctgtattccagactggccatacatatttttccttatttgttctatctgaacaaataagagagtaaaaacaagtgtaaactagtctgtgtctttaacaaaggcataccctaacacgtgtttggatcattgtattatttagagctctaaggaattcttaaagtactagtggccaaagaatgcataatgccccattgttaaccaacatacctcatgattaagacatagttagaggaacaacttctaatttgtcaggagcttccaaagaaattcacatgaagatggtacgtgaagatgtagcagtcttctaaataaaaa

SEQ ID NO: 536755 - DNA, 532 bp, Homo sapiens
ttctaacagtcagtaagacagttagtgacccaaaagcaagacctgctgtgtgatttgtggggcccaaaacacaagggaattgtggtggcccttgttcaaaaaatattcaaaatttcaaggtggtgacaacagagctttgatctaagtgctaggcccttctgagcatgatgacctgggtgacttcacaggtcacaaacccaagaagtcagccctgcttctgtattccagactggccatacatatttttccttattygttctatctgaacaaataagagagtaaaaacaagtgtaaactagtctgtgtctttaacaaaggcataccctaacacgtgtttggatcattgtattatttagagctctaaggaattcttaaagtactagtggccaaagaatgcataatgccccattgttaaccaacatacctcatgattaagacatagttagaggaacaacttctaatttgtcaggagcttccaaagaaattcacatgaagatggtacgtgaagatgtagcagtcttctaaataaaaa

SEQ ID NO: 536756 - DNA, 532 bp, Homo sapiens
ttctaacagtcagtaagacagttagtgacccaaaagcaagacctgctgtgtgatttgtggggcccaaaacacaagggaattgtggtggcccttgttcaaaaaatattcaaaatttcaaggtggtgacaacagagctttgatctaagtgctaggcccttctgagcatgatgacctgggtgacttcacaggtcacaaacccaagaagtcagccctgcttctgtattccagactggccatacatatttttccttatttgttctatctgaacaaataagagagtaaaaacaagtgtaaactagtctgtgtctttaacaaaggcataccctaacacgtgtttggatcattgtattatttagagctctaaggaattcttaaagtactagtggccaaagaatgcataatgccccattgttaaccaacatacctcatgattaagacatagttagaggaacaacttctaatttgtcaggagcttccaaagaaattcacatgaagatggtacrtgaagatgtagcagtcttctaaataaaaa

SEQ ID NO: 536757 - DNA, 587 bp, Homo sapiens
agatggtaattctctacaaagcacaataaaattctgcaaatgttaaagaacagcttgtttgcattactttaaagcatcatgcctctcaaatataacagtaccaaactattaattttcagaaaaattacatgatggtctctcagactcattagtgaaactcatcttttgtatatcatgtgtcttaaatggtaccttttccattgaccctctgattcatgtagaattactccaaaattatttgaaagttgtctttatattatcctcaaacttcttcattaagttcagtcatacactttcttaagaaattttctaaatatgtttgctaaaatgtaagctaagttgtcagctcttcaaaaagaagcttgtttctcttatttctttactttctctgcagctccagaaagtcagaagataattagtaggcattttcaatattttcatttacaactcaatrtgtaatttatgtgcaacttttcttttattctctccccaaaaaaagaagatataaaagtaggttatcaataagtaaataaaatgcattttttatgttctgattacctcctctgtctatgatgctatatgcagtt

SEQ ID NO: 536758 - DNA, 544 bp, Homo sapiens
ccagcccctgagtgcagatgtttgcatgtcccaggctacttaggacccagggctgcaggctgtctgcaaggcccatgatgttctttgagagtgtttstgtgcttgagttaagaaaggcctagattttttgaggggtctgcttctgtggtcctgtttacaaagtaatttgagagaagtgtctaaaaacatgtccttacttgctgtcagaagttttgcccttaggcatttgtttctttgggttaaagtattctcattttcagatgttctctttcaaaataaaaaaattcgtagagggctatgaataaaaaaattcatacagccgatgtttgtcttagtccttaatttagtcttactatgcaagtagggcatcaaggtgagcctaggctttgtcccctcccagggttcaggcatgctggacatgtctgatgagatagtgggacagttgacagaactgtttgtacaggctgagcatgtctgggtggaaaatttatcccaaagcaaaaagccagaccccatgcttggttgagccataaagccttagacg

SEQ ID NO: 536759 - DNA, 609 bp, Homo sapiens
agaaacattgccttcttttatatatatttccctcacttacttacaataaaattgtctgaaattttttctctacctgcatttagagccacatcacatttttgcatctatcaccaaacataattttgaaagctcaagaggagaaggaaaatattgtattcaccatatttttgtttaccatgttctttcttcctgatgttccaaggctctttaaaaaaaaaaamaaaacaaaaaatcagtttctgtctgtttagataatttaatctattttttttacagtatatatctgttaatgacaaattctcttagtttttttttttcacctgagaatgtatggatttgctcttcatttctgaaggatatcttctccagatataggatctaggttgatatttctttattttcagtacttgaaaattgtgccactttattctgcctctgtggtttctgatgagaaatccactgtcattcaaattgtttcttgtctatacataatatgtcattttcctccctgcttccaatatatatatatatatattttctttagttttcacaagtttgattacaatgtatcttggagtaaattttcttaggttgatcttgtttggggtt

SEQ ID NO: 536760 - DNA, 540 bp, Homo sapiens
agattacagagtccctaatgcagacacaatcagttttctggcctagccagagttgtcaggagaagtgaagagcctttcacacaacaaactcagcctccatgtcttttccccaatactgtagctagacaaaattatcctattaacaatgggctgggcagaggtggaatttattaaatgaaactattcattaaagtggtattatattttaaaggcagtgctatcaaagggattagaacagagaaggtcaaggacaaatcaaaagtgctcaatcccactactgtttrtgggcttctaatgccctctagaacattgttccaagtcacatatgctctaaagcaacatcaaagtcagacaacatcatcttgaccttcttcattgaatgcattcgaaatccagcactctaaccatataaactctaaaagaatatgctaaatgaaaaatcagtttaagtttttgtaaactgtaagaatcaaggaccctgggatgagacatagacagagtacgaagacagacattcgtagattagagcagtagttctca

SEQ ID NO: 536761 - DNA, 512 bp, Homo sapiens
ctaatgcagacacaatcagttttctggcctagccagagttgtcaggagaagtgaagagcctttcacacaacaaactcagcctccatgtcttttccccaatactgtagctagacaaaattatcctattaacaatgggctgggcagaggtggaatttattaaatgaaactattcattaaagtggtattatattttaaaggcagtgctatcaaagggattagaacagagaaggtcaaggacaaatcaaaagtgctcaatcccactactgtttgtgggcttctaatgccctctagaacattgttccaagtcacatatgctctaaagcaacatcaaagtcagacaacatcatcttgaccttcttcattgaatgcattcgaaatccagcactctaaccatataaactctaaaagaatatgctaaatgaaaaatcagtttaagtttttktaaactgtaagaatcaaggaccctgggatgagacatagacagagtacgaagacagacattcgtagattag

SEQ ID NO: 536762 - DNA, 540 bp, Homo sapiens
agattacagagtccctaatgcagacacaatcagttttctggcctagccagagttgtcaggagaagtgaagagcctttcacacaacaaactcagcctccatgtcttttccccaatactgtagctagacaaaattatcctattaacaatgggctgggcagaggtggaatttattaaatgaaactattcattaaagtggtattatattttaaaggcagtgctatcaaagggattagaacagagaaggtcaaggacaaatcaaaagtgctcaatcccactactgtttgtgggcttctaatgccctctagaacattgttccaagtcacatatgctctaaagcaacatcaaagtcagacaacatcatcttgaccttcttcattgaatgcattcgaaatccagcactctaaccatataaactctaaaagaatatgctaaatgaaaaatcagtttaagtttttgtaractgtaagaatcaaggaccctgggatgagacatagacagagtacgaagacagacattcgtagattagagcagtagttctca

SEQ ID NO: 536763 - DNA, 512 bp, Homo sapiens
ctaatgcagacacaatcagttttctggcctagccagagttgtcaggagaagtgaagagcctttcacacaacaaactcagcctccatgtcttttccccaatactgtagctagacaaaattatcctattaacaatgggctgggcagaggtggaatttattaaatgaaactattcattaaagtggtattatattttaaaggcagtgctatcaaagggattagaacagagaaggtcaaggacaaatcaaaagtgctcaatcccactactgtttgtgggcttctaatgccctctagaacattgttccaagtcacatatgctctaaagcaacatcaaagtcagacaacatcatcttgaccttcttcattgaatgcattcgaaatccagcactctaaccatataaactctaaaagaatatgctaaatgaaaaatcagtttaagtttttgtaaactgtaagaatcaaggaccctgggatgagacatagacagagtacraagacagacattcgtagattag

SEQ ID NO: 536764 - DNA, 671 bp, Homo sapiens
gctgaaatgtgcacatcaggaattccaatttttcagagctctgcacatatctgcgaataaccaagaaagcacagtgagtcttgatttggggctacaaacacattttagtgagtaggcaaatttgcaaatacagaatccacaaacaatgaggatggactgtmttatcatgattaatcacccaaggaagtaggcaaaagagttattactactgccagtttgcaggtaagaaacagacccagtaaggtattagggtatagagtgagctaggtctggatggatctcctgtgctgcatactcctgaaggcagctctctcatcctagtgtacatgaaggtacccctagacttggtgcagcagccctggatctgaaaccacattgactatttatttctcaatatgacttctgtaaactggagagcctccatatattgaaaacattcaaccagttatttgtgatctttactcccagatccactaaactgattatacttacaggcatttaaaaactgtgtcataaaacagaattggtctctgcccttaaggaatgaataatcaatcacagtttctataaagcaaataattccactgacataaaaacaatgtgtagtcagaaagaaaaacacctttttttgtatcctgggaaggaaactctcatagaaccagttgcttaca

SEQ ID NO: 536765 - DNA, 671 bp, Homo sapiens
gctgaaatgtgcacatcaggaattccaatttttcagagctctgcacatatctgcgaataaccaagaaagcacagtgagtcttgatttggggctacaaacacattttagtgagtaggcaaatttgcaaatacagaatccacaaacaatgaggatggactgtattatcatgattaatcacccaaggaagtaggcaaaagagttattactactgccagtttgcaggtaagaaacagacccagtaaggtattagggtatagagtgagctaggtctggatggatctcctgtgctgcatactcctgarggcagctctctcatcctagtgtacatgaaggtacccctagacttggtgcagcagccctggatctgaaaccacattgactatttatttctcaatatgacttctgtaaactggagagcctccatatattgaaaacattcaaccagttatttgtgatctttactcccagatccactaaactgattatacttacaggcatttaaaaactgtgtcataaaacagaattggtctctgcccttaaggaatgaataatcaatcacagtttctataaagcaaataattccactgacataaaaacaatgtgtagtcagaaagaaaaacacctttttttgtatcctgggaaggaaactctcatagaaccagttgcttaca

SEQ ID NO: 536766 - DNA, 632 bp, Homo sapiens
ctggtgagtgctggcaatctttggcatttcttgatgtgtagctgtctctacctccaatctctgtctctgacttcacatagtcttttcctatgtgtttatgtgtctaaaatctcactctcctttctcttataattggattaaaggctcagcctaaatccaggatgataccatcctaagatctttaacttaattacatctgcaaagaccctatttttacataatttcacatctgcaggtactaggtggtgaggacttggatatattttttaggaaatattacccaaccattagaccatgtgtatatccttwgtctcaatagttcaatagtgcctatttattatttttaatgtgttatatgatttaactctcttaatctacaggtctccctccatccctttcttttcttcagtaaagaaaatctgttggtattgatttattaagggtctctacaaaccactttcattgcaatacattggtagtctagagagaataataaaactagaggtgagatgagcaattacattcagaaaaggaaacaagctgttctaagactctcatgttacaaattagtgctttgtaacagcttattaaaagggctaagccctttaacctgtttcccaccaccttgatac

SEQ ID NO: 536767 - DNA, 632 bp, Homo sapiens
ctggtgagtgctggcaatctttggcatttcttgatgtgtagctgtctctacctccaatctctgtctctgacttcacatagtcttttcctatgtgtttatgtgtctaaaatctcactctcctttctcttataattggattaaaggctcagcctaaatccaggatgataccatcctaagatctttaacttaattacatctgcaaagaccctatttttacataatttcacatctgcaggtactaggtggtgaggacttggatatattttttaggaaatattacccaaccattagaccatgtgtatatcctttgtctcaatagttcaatagtgcctatttattatttttaatgtgttatatgatttaactctcttaatctacaggtctccctccatccctttcttttcttyagtaaagaaaatctgttggtattgatttattaagggtctctacaaaccactttcattgcaatacattggtagtctagagagaataataaaactagaggtgagatgagcaattacattcagaaaaggaaacaagctgttctaagactctcatgttacaaattagtgctttgtaacagcttattaaaagggctaagccctttaacctgtttcccaccaccttgatac

SEQ ID NO: 536768 - DNA, 415 bp, Homo sapiens
agcacaaaaatgctagatgtggctgttacacgtcaaggcattctaactcattagacatcagagaaattcaagttaagaaccacagtgagaggcaagaagccacaaaagaacattacttcccttctatcaacaagaaaaaaagccagacaatagacagtcctaacttcctttaacccatcagagagccgagattacaaggcaatcaggagaactgaattccagagtgacaagcccctccatagagacagaatatacatactctcccacctttgccagagcctctttggagaaagcggtggctgcatatgaaagaagaagagctaacactgtaacaagttctttttttaaaattgatacataattaytgttcatatttctggggtacttgtgatattctgaatacacatatacaaca

SEQ ID NO: 536769 - DNA, 602 bp, Homo sapiens
gactctacaatcaaagatgaacccaattcagataatggactgtattcaaatttttttaagaaaagatatatcaacttctatgtttctcaaatgcaagtacatatgtagatagatatgtccaaattaacatttatatatatatatccttctctgtgggtccaggaaattattgtgaatttaggcacatgtatgatatgcattgagtttaattamatgtgattatttactcagtgaggaatgcctaatctacacactattgtaaaaagtgctttagctttgaaaacaaagctgcttgcaaaaggaaaatcctctttagcaaatagagattgaaatatattcctaatgtccacttacttctgcatttattgtaaaaaatcagcactttcagtttttaaagtgaagggccatgaaaatatgaacatatttgtctttacttatcccatatgaatgtgctagatttacctttagatgctctattttgatttattttcactgtattttatgtttcaataccattgcaattcagtctgacctctttcctctggagcgaagtaatgcacacggcatttacagtcttttaaatggttagctgggaaatgcaa

SEQ ID NO: 536770 - DNA, 678 bp, Homo sapiens
tgggcagggacagccctctctggtccaagggccccaggcctctgatcagcatccagcgccactgcttgcttgctttctctctctctctttttttttttttttccaggaggggcagggtcttgctctgtcacacaggctggactgcagtggcgcaactgtggctcactacagcctcgacctcctgggctcaagcaatcttctcatctcagcctccccagtagctgggactaaaggtgcacaccaccatgctcagctagtttttgtatttctggtaaagacagggtttcactgtgttgcccaggctagtctcgaactcctgagctcaagcgatccgctcaccttggcctcccaaagtgcagggattagaggcgtgagccactgtgcacctggcctagccccattgctttctgaagaagacagtgatgcccagcgaggccttggtcttgtccaaaatcactctgtcatcccacagcagggcagggacaacggacagatacatctactgttgacttcatctcacttcattctcaaaataacctgggaagtaagcagtacccayttcatggccaaggaatctggctctagaaagccaaagtaaccgacagtggcagtgtgcgagaaggtttgaacccaggccgctgagctctgcagactgtctggcagcctctatgcaatgac

SEQ ID NO: 536771 - DNA, 452 bp, Homo sapiens
acatctactgttgacttcatctcacttcattctcaaaataacctgggaagtaagcagtacccacttcatggccaaggaatctggctctagaaagccaaagtaaccgacagtggcagtgtgcgagaaggtttgaacccaggccgctgagctctgcagactgtctggcagcctctatgcaatgaccccagtttcctgagatctggctctggctccagctccctccgggttgcagggagagcagaggccgccttggccccagcgttcgtggccttctgagtcgcccgtgggctctgyacctggcatgcaatgccagcagcctcggtaaacaggcccggctgcagccggactcacccggctcgcttgtgccgaggaagccaggtcggaggaagggttccttggcatttccagcagcagcgctctcttactcaattaggccctttctgtccaaaggg

SEQ ID NO: 536772 - DNA, 598 bp, Homo sapiens
  misc_feature (1)...(598): n = A,T,C or G
gtggcagcacctgtggccccagctactcgggatgctgaggctggagaatcgcttgaacctgggaggcaaaggttacacgccccacaagataagcgcctctgcactaaaaaaaaaaaaacaaagtgaaactccatctcaaaaaaaaaaagttctttgtgtcttgatgtggaataaactttgagatgtatcatcaagaggggggaaaaraaagcaacatccaaataatgtgtataaaaagagatgtttttatgttttannnnnnnnnnnnnnnnnnnnnnnnnnnnnnnnnnnnnnnnnnnnnnnnnnnnnnnnnnnnnnnnnnnnnnnnnnnnnnnnnnnnnnnnnnnnnnnnnnnnggggtctggacccaggactcgatatctttgtggactttctgatttttgaaccatgcaaatgaattacctgttcagacacacatggagcaatgagaattgcaccaagagctacacatcctttaaagcaattggaggaggaacaggactttcttccaaaggctggggccaggcaatggtgttgggtccctcaacaagcgtgtgtagaaggcagacaggcagacaggcaggcagacacaacctac

SEQ ID NO: 536773 - DNA, 323 bp, Homo sapiens
tcctaggagacacaatgccagtgaacaagcaatgggaaggtggagggttagaggcctggggttaaggcaggtaggaaaggcagataaaatctaatctaacacactaagaagttaaaaacacttaacaaaacaaagaacaaccaaagcagtgtttactaaccctccctgcctttttggcatgagaaattcaaataaaaggagaggcagaattatttgctatatggagtccaaaagagaaaaaaatagttgcacrgaccaggtaaataaaagaaatgcaaaaatgcaattcaggaaaccctggttttaaaagaaagagattggcc

SEQ ID NO: 536774 - DNA, 509 bp, Homo sapiens
tgctgactgtctcgcctactagaatgtaagcaggtcccctgtcaaattcaccaatgtatccccagggcctggaagagtgcctggcacatggaaggtgcttgataaacttgacaaaggaatacatgaatccaccttccttgggtagctgggcgaggggaggcacaaaaggaccccagactctgccctccccagggccagagtgctggggactcaagcccagccaggaagccttgttctcaggctggcacgaggccccaccagcaggaccctcccagcccattcagtgcatgggctccccagaactggaagygacgcagggcctggcagaggtctagaggagccctgagggaaaagtagcagttgctactctgcccattgtcccccatcgtccttcactccacacaaagcctgggaaggccaaggacagcctcgggcgcaaagggtggaagtagggggagaccaagccagtgaggctgggaggacatgggatcctgcctgcagctctgcag

SEQ ID NO: 536775 - DNA, 593 bp, Homo sapiens
ccctatatcaccttatcctggtttatttttcttcaaagcactgattataactcaggcatgatgtcatgcattaagttgttgacctgctgactgtctcgcctactagaatgtaagcaggtcccctgtcaaattcaccaatgtatccccagggcctggaagagtgcctggcacatggaaggtgcttgataaacttgacaaaggaatacatgaatccaccttccttgggtagctgggcgaggggaggcacaaaaggaccccagactctgccctccccagggccagagtgctggggactcaagcccagccaggaagccttgttctcaggctggcacgaggccccaccagcaggaccctcccagcccattcagtgcatgggctccccagaactggaagcgacgcagggcctggcagaggtctagaggagccctgagggaaaagtagcagttgctactctgcccattgtcccccatcgtccttcactccacacaaagcctgggaaggccaaggacagcctcgggcgcaaagggtgraagtagggggagaccaagccagtgaggctgggaggacatgggatcctgcctgcagctctgcag

SEQ ID NO: 536776 - DNA, 647 bp, Homo sapiens
tgccagggaagtaggtctggatgagagcagcttcagcaaaatgcttctagcacttgcaatctaaaccctttgtgttctacccattctgtacccagagcctcccaggccttcaagggacacatgcctaggggactcatgcccacatctgcctcattctcccagcaaccaagtgggatcggaggagttctgccctcagacccattttacagatcaggagactaaggtccagcacaggagagttactggcccaacacagatagcaagcaacagcctcctgacaccttggtcctctygcccatctcctccggtaatagggagaccctctcaatcatgatggggtctagcctctccccagagcctatgcctaggactgcttttctcagcctcctcccttcatcctctctaaaggcagggcccaacctcagaacgccccggagcttacagccaggtggattgctgcctccccatcctgagggactcttaaggacaaagagcactcccccaaagggcatgagcagagagcactatatcctgctaagaggtcagagctgtcgccaggcaaggctgcagcagtgtcctgggtaatcgtggcagcctggcctttgttgtccacacaaaatctaaggagcctcataaagaccaggcag

SEQ ID NO: 536777 - DNA, 634 bp, Homo sapiens
ctgccagggaagtaggtctggatgagagcagcttcagcaaaatgcttctagcacttgcaatctaaaccctttgtgttctacccattctgtacccagagcctcccaggccttcaagggacacatgcctaggggactcatgcccacatctgcctcattctcccagcaaccaagtgggatcggaggagttctgccctcagacccattttacagatcaggagactaaggtccagcacaggagagttactggcccaacacagatagcaagcaacagcctcctgacaccttggtcctctcgcccatctcctccggtaatagggagaccctctcaatcatgatggggtctagcctctccccagagcctatgcctaggactgcttttctcagcctyctcccttcatcctctctaaaggcagggcccaacctcagaacgccccggagcttacagccaggtggattgctgcctccccatcctgagggactcttaaggacaaagagcactcccccaaagggcatgagcagagagcactatatcctgctaagaggtcagagctgtcgccaggcaaggctgcagcagtgtcctgggtaatcgtggcagcctggcctttgttgtccacacaaaatctaaggagcctca

SEQ ID NO: 536778 - DNA, 640 bp, Homo sapiens
accaggatgctgacccctacttcccacagaccaggtaccacctcctccagaaagccatccatgactgcatctgagactgtcagaccaggagaggctgcaaagagacattgtatgaaagaccaaaagcaagacatttcatttcattgttggatggatgggagtccatgagagaaaatgcttcagagagcatcttgcacggggccgagccttcagtaaatgctggtttccttaacgatcagaaggaatgggcttcattatccccattttatgccggggaaaatggaggggctaagaaaacctaagtggtgggcctgagggggcacggcttgtgagtggggagctgaagtgtctcatttctctacccttgcccacatcccaggaccatatgacttcacaacaggaaaaccaaggcccagcgagggcaagtgactgtccaaggtcacacagtcactgtcagaactcagacttgaccccagtctcctgatgccaatgctgacccctcccaatgagcctcagcctgggacgtcactctgaggcccasactccaaggggtgaaggagcccccagcaaggcctggctctgcctgctgccacctttgggagcagtacacagctttagaaggcccacggcaggctctgca

SEQ ID NO: 536779 - DNA, 365 bp, Homo sapiens
ctgcctccaaaagctttctatgaactctgtttctttcctcgaaggccacctggaccagctgctcaggtgagggagggtggtgagctttctctgcagaccacagcagagcctgttacagtaaacrctagtgggcatctactgtgagccagcctatgaggatgaaacagtgaaggggacactagaatgtccatgcattgtcctgttggcggccctgtcctgaaatgggtatcatgcaaccctcccaatagaggcagagggatcagctaggggagatgctatggagaggctgccatgctaggaagctagctcctggggggttcagatctagtgagggtgcctttctgaattcttcctgaggatgtgtg

SEQ ID NO: 536780 - DNA, 250 bp, Homo sapiens
cttgggatgcataaagtgacgccggccccatcagctcaagctgggggagaaaacagaggctcatgaatattctagatagcctaagcaagggcctcataagatctttggaatcccatgtggattctgggattggagaataggtcaggtcgtttcctgagatgggtttygaagcttgctctgagcttggcagcagatgagcacctcgagaagacctggcgacagaacatggtagaaaagaccccaagtgcag

SEQ ID NO: 536781 - DNA, 250 bp, Homo sapiens
cttgggatgcataaagtgacgccggccccatcagctcaagctgggggagaaaacagaggctcatgaatattctagatagcctaagcaagggcctcataagatctttggaatcccatgtggattctgggattggagaataggtcaggtcgtttcctgagatgggttttgaagsttgctctgagcttggcagcagatgagcacctcgagaagacctggcgacagaacatggtagaaaagaccccaagtgcag

SEQ ID NO: 536782 - DNA, 250 bp, Homo sapiens
cttgggatgcataaagtgacgccggccccatcagctcaagctgggggagaaaacagaggctcatgaatattctagatagcctaagcaagggcctcataagatctttggaatcccatgtggattctgggattggagaataggtcaggtcgtttcctgagatgggttttgaagcttgctctgagcttggcagcagatgagcacctcgagaagamctggcgacagaacatggtagaaaagaccccaagtgcag

SEQ ID NO: 536783 - DNA, 250 bp, Homo sapiens
cttgggatgcataaagtgacgccggccccatcagctcaagctgggggagaaaacagaggctcatgaatattctagatagcctaagcaagggcctcataagatctttggaatcccatgtggattctgggattggagaataggtcaggtcgtttcctgagatgggttttgaagcttgctctgagcttggcagcagatgagcacctcgagaagacctggygacagaacatggtagaaaagaccccaagtgcag

SEQ ID NO: 536784 - DNA, 458 bp, Homo sapiens
cctgtagtcccggctatttaggaggctaaggcaggaaaattgcttgaaccggggaggcagaggtcgaartgagctgagatcgtgccactgcattccagcctggtgacggagcgagactccatctcagaaaataaatgaataaaataaataaatcaataaaaatattgtgacaggaaccaacattgctcaacttgtacactaatgtcttacaaaatcctttccttgtcaccttcaaatctccatttcaaatgctacactctgcataactctaccactttgttgccattttctgatgatggagaagaccatacatgtgtgtgtgtggcatcagaactattgactcctcctattgatgtttaagatattccattacacaaacctgggttcatactttttgttgatagatcttatgccaaaaatgtaggcaaaaaatgccaagcaggaaatgctatcacttc

SEQ ID NO: 536785 - DNA, 458 bp, Homo sapiens
cctgtagtcccggctatttaggaggctaaggcaggaaaattgcttgaaccggggaggcagaggtcgaagtgagctgagatcgtgccactgcattccagcctggtgacggagcgagactccatctcagaaaataaatgaataaaataaataaawcaataaaaatattgtgacaggaaccaacattgctcaacttgtacactaatgtcttacaaaatcctttccttgtcaccttcaaatctccatttcaaatgctacactctgcataactctaccactttgttgccattttctgatgatggagaagaccatacatgtgtgtgtgtggcatcagaactattgactcctcctattgatgtttaagatattccattacacaaacctgggttcatactttttgttgatagatcttatgccaaaaatgtaggcaaaaaatgccaagcaggaaatgctatcacttc

SEQ ID NO: 536786 - DNA, 458 bp, Homo sapiens
cctgtagtcccggctatttaggaggctaaggcaggaaaattgcttgaaccggggaggcagaggtcgaagtgagctgagatcgtgccactgcattccagcctggtgacggagcgagactccatctcagaaaataaatgaataaaataaataaatmaataaaaatattgtgacaggaaccaacattgctcaacttgtacactaatgtcttacaaaatcctttccttgtcaccttcaaatctccatttcaaatgctacactctgcataactctaccactttgttgccattttctgatgatggagaagaccatacatgtgtgtgtgtggcatcagaactattgactcctcctattgatgtttaagatattccattacacaaacctgggttcatactttttgttgatagatcttatgccaaaaatgtaggcaaaaaatgccaagcaggaaatgctatcacttc

SEQ ID NO: 536787 - DNA, 593 bp, Homo sapiens
aatcagctgctcctgtcctcagtgctccctgttctctttgtcttttctcaatccctgttcccttttgattctgacttttgattccccacttctattccctttaccttccactgagtaaaggcaggtttctgttcccacagtggaccctgtatggtgagcastcctttctctgaggatctggaaaatggccaaagcctccctgatcttcctcgccaacaccatcagaagactctgggccacacttgggctacttctctgcctgaccctgctgttctttccctggacacctgagccctatctaccagccctcctgggtcacctcacctggggcgatccttctgtgtaagcagcatatgaagcccttccagcaatgcttttaaggtctccaaatgaagcgtcttcatcagtgatcccagagggaggcaggtgaagggccaggcctgaaccatcaccgtcagagtctggaagtgtctcctgctgaaggcctccatgaagagtgggagatagagcaccctgggcagctcctccatggcagagatggacaaggcctggtctctcagcaggctctgccctgccagctccaggagtctggg

SEQ ID NO: 536788 - DNA, 593 bp, Homo sapiens
aatcagctgctcctgtcctcagtgctccctgttctctttgtcttttctcaatccctgttcccttttgattctgacttttgattccccacttctattccctttaccttccactgagtaaaggcaggtttctgttcccacagtggaccctgtatggtgagcagtcctttctctgaggatctggaaaatggccaaagyctccctgatcttcctcgccaacaccatcagaagactctgggccacacttgggctacttctctgcctgaccctgctgttctttccctggacacctgagccctatctaccagccctcctgggtcacctcacctggggcgatccttctgtgtaagcagcatatgaagcccttccagcaatgcttttaaggtctccaaatgaagcgtcttcatcagtgatcccagagggaggcaggtgaagggccaggcctgaaccatcaccgtcagagtctggaagtgtctcctgctgaaggcctccatgaagagtgggagatagagcaccctgggcagctcctccatggcagagatggacaaggcctggtctctcagcaggctctgccctgccagctccaggagtctggg

SEQ ID NO: 536789 - DNA, 593 bp, Homo sapiens
aatcagctgctcctgtcctcagtgctccctgttctctttgtcttttctcaatccctgttcccttttgattctgacttttgattccccacttctattccctttaccttccactgagtaaaggcaggtttctgttcccacagtggaccctgtatggtgagcagtcctttctctgaggatctggaaaatggccaaagcctccctgatcttcctcgccaacaccatcagaagactctgggccacacttgggctacttctctgcctgaccctgctgttctttccctggacacctgagccctatctaccagccctcctgggtcacctcacctggggcgatccttctgtgtaagcagcatatgaagcccttccagcaatgcttttaaggtctccaaatgaagcgtcttcatcagtgatcccagagggaggcaggtgaagggccaggcctgmaccatcaccgtcagagtctggaagtgtctcctgctgaaggcctccatgaagagtgggagatagagcaccctgggcagctcctccatggcagagatggacaaggcctggtctctcagcaggctctgccctgccagctccaggagtctggg

SEQ ID NO: 536790 - DNA, 593 bp, Homo sapiens
aatcagctgctcctgtcctcagtgctccctgttctctttgtcttttctcaatccctgttcccttttgattctgacttttgattccccacttctattccctttaccttccactgagtaaaggcaggtttctgttcccacagtggaccctgtatggtgagcagtcctttctctgaggatctggaaaatggccaaagcctccctgatcttcctcgccaacaccatcagaagactctgggccacacttgggctacttctctgcctgaccctgctgttctttccctggacacctgagccctatctaccagccctcctgggtcacctcacctggggcgatccttctgtgtaagcagcatatgaagcccttccagcaatgcttttaaggtctccaaatgaagcgtcttcatcagtgatcccagagggaggcaggtgaagggccaggcctgaaccatcaccgtcagagtctggaagtgtctcctgckgaaggcctccatgaagagtgggagatagagcaccctgggcagctcctccatggcagagatggacaaggcctggtctctcagcaggctctgccctgccagctccaggagtctggg

SEQ ID NO: 536791 - DNA, 644 bp, Homo sapiens
gcaggttctcaagggcagccatggagatgaggttcccacagaagctgaaggtgctgagctgggagcagcggctcaggacaggcaggatggcgctgagttgggaatccatgatcccacagtcctctaagtccagggtctgcagggtggccacarcttgctccagcagacctgtgaggggctcagggctgaaatgggtcagcgtgacacccctcaggtccagctcctttaattgacggatgctcgggcaccaagagagatgcttcaagtccgactctgacagcaggcagtcggtcataacgaccatctccaaggaggcctggagacacctgggagagaacaagaaggagttagaggagagaggtggggatgacttcagggtgagagatgatgctctccataacccagggctgctctgctcatctgaggatagtcagcacctggggtgtgggaatggagactctgttccttcagtgcagtcccaatcgaggctcagtccttcaccatcaccgaggtgattggatcaagtccatgaactctaagtctccctttcctcatctgtcaggtagaaaaccacatctctgggccacaggagcccgatggagacacaggcataaatgacaaacccaggcaggatcctgcaacat

SEQ ID NO: 536792 - DNA, 644 bp, Homo sapiens
gcaggttctcaagggcagccatggagatgaggttcccacagaagctgaaggtgctgagctgggagcagcggctcaggacaggcaggatggcgctgagttgggaatccatgatcccacagtcctctaagtccagggtctgcagggtggccacaacttgctccagcagacctgtgaggggctcagggctgaaatgggtcagcgtgacacccctcaggtccagctcctttaattgacggatgctcgggcaccaagagagatgcttcaagtcygactctgacagcaggcagtcggtcataacgaccatctccaaggaggcctggagacacctgggagagaacaagaaggagttagaggagagaggtggggatgacttcagggtgagagatgatgctctccataacccagggctgctctgctcatctgaggatagtcagcacctggggtgtgggaatggagactctgttccttcagtgcagtcccaatcgaggctcagtccttcaccatcaccgaggtgattggatcaagtccatgaactctaagtctccctttcctcatctgtcaggtagaaaaccacatctctgggccacaggagcccgatggagacacaggcataaatgacaaacccaggcaggatcctgcaacat

SEQ ID NO: 536793 - DNA, 632 bp, Homo sapiens
ggtcagccagaagagtgactcgtccaaggacatccgaggcgataagatcacctggatcgagggcaaggagcccggctgcgaaaccattgggctgctcatgagcagcatggacgacctgatacgccactgtaacgggaagctgggcagctacaaaatcaatggccggacgaaagtaagtgtgtgctgcgggtttgtgctggacaggcccttctcggcgggcagcccctgcctgcgactgaaactgcctaggctgagaagcagcattcctctatatagaagggactcgctctttcttgtgtagctccccgtaaggaagacggacagaatttgtagtagctgtttatctagttagcccctttgtatccactgttttccacttactgcccgttcacaaacttctccggctaattgcatggttttttgactcaacgtaggcgctttaactttcctattttcttttttccattccactattggtcacaattcaaaccttagtggcgttttagccacccagtgaaggrgtgttagagtaccacccaaagcaagtcctggttctgcatctgccttgtgtttgcataagctgttaaatttcctatggtgtctgaaccactcatcacatttcgattgagagt

SEQ ID NO: 536794 - DNA, 571 bp, Homo sapiens
gctaattgaccacctatttggcttccctttgctcttctggcagtatttagttaagctataaagaagtagccactgtgaactgacaagaactaaaagaggcaaagcttatgttaactacaagaacagaattgaaggaggaaatgaatttagaaasgactgtgttgactcttgaggaaagcccactgaacaacagtctgccttccaaggagtagccctatttctcctttaaaaatgtttttaaaaacacaacagagtatcttttctgctcaagaaatcgaacatctgattgttaactaatgacctcttgtttccccatctgtgacaatcttgttttaataggttacagagaacagaaaaatcacaagtatagcataggcattccaccaagataaacaggaagacaatctttgagttctgggaaaagcaactcaaaaatctgagccattttctaactatagtattaggacacacacaagtaggtgtcattggaaaacagcacctgcttgtctctgtactgggggttctgccagatgcacacgtgagctatgtgcttctccttgtacatggagac

SEQ ID NO: 536795 - DNA, 571 bp, Homo sapiens
gctaattgaccacctatttggcttccctttgctcttctggcagtatttagttaagctataaagaagtagccactgtgaactgacaagaactaaaagaggcaaagcttatgttaactacaagaacagaattgaaggaggaaatgaatttagaaaggactgtgttgactcttgaggaaagcccactgaacaacartctgccttccaaggagtagccctatttctcctttaaaaatgtttttaaaaacacaacagagtatcttttctgctcaagaaatcgaacatctgattgttaactaatgacctcttgtttccccatctgtgacaatcttgttttaataggttacagagaacagaaaaatcacaagtatagcataggcattccaccaagataaacaggaagacaatctttgagttctgggaaaagcaactcaaaaatctgagccattttctaactatagtattaggacacacacaagtaggtgtcattggaaaacagcacctgcttgtctctgtactgggggttctgccagatgcacacgtgagctatgtgcttctccttgtacatggagac

SEQ ID NO: 536796 - DNA, 606 bp, Homo sapiens
tggcttgtatgtgaccttgatgtttgtattatacccaggaaacaggagacttacgatgggactttgaccagggccagcattataaccacattaatggagaatgcaaattcaaattgaggtggggctggcaggagttcatcattgaaaggctgcattcatcacagatgtcaagtacaggctgggtcttcatatttctttttctcatacaatgacttcttctcctgtggctctttcacatggactgtgtattcaggggacaaagcttctgcagtaggctttgagtaaggtcaaactccatggtgcctaagagtctaggacactcactaaaattgcccartaaaatgtctggacattaaataaattgtattatatgaaattcatgagtgggaagggcaagcactaagggtcatttctgtattatggtatttaacaattgcttccattcaaatgctacaatattatgcagtctgtagtagatgtccatgcacagcattcacattcaactttaatatttaggaaagcttttgttaggcagacgtgggagtggtatgctaatcaatatgaacttttctcaagtgttcttaatagggtaataacactgatgcc

SEQ ID NO: 536797 - DNA, 341 bp, Homo sapiens
gtccctagaccacagggcagggactcacttggctgttttgtgcttaatgggaactccctaatgttgagaggctttcagtataacacatctgggcacattttcttaagttccagcctggtggtccatctgrctcactgataaattctataggcatattttatctgccttctggatcagtgcatcaattattgaactgattatcttaaaagccccttgaaagagaagcaaagtccccaagtgtactcattttgtacttattcttgactgataaatgaagtcattcataagttaaaaggtagagaaaatgcagtacattcctcttgcacactcctgagtaaggt

SEQ ID NO: 536798 - DNA, 340 bp, Homo sapiens
ccaatgcctcggccccagaccaactgagcttagctttagcctggaacagagtcgacatcgctcgcagccagatctttatttacgggcaacagtggccggtagagtatatatcgtctcccatgaaaagcccactttggttggscaagggtatttgtttaaggagcctctgaggtcagctcagaaaacgattgctttttctttaagatggaatgtgttccttggtagcaaagtctgtatcctgagctccctttctcatatttaggaaagcaccgccatctagtggaaatttcaactgaacacaactccaaatatttccatctctatgagttgtctttaatag

SEQ ID NO: 536799 - DNA, 340 bp, Homo sapiens
ccaatgcctcggccccagaccaactgagcttagctttagcctggaacagagtcgacatcgctcgcagccagatctttatttacgggcaacagtggccggtagagtatatatcgtctcccatgaaaagcccactttggttggccaagggtatttgtttaaggagcctctgaggtcagctcagaaaacgattgctttttctttaagatggaatgtgttccttggtagcaaagtctgtakcctgagctccctttctcatatttaggaaagcaccgccatctagtggaaatttcaactgaacacaactccaaatatttccatctctatgagttgtctttaatag

SEQ ID NO: 536800 - DNA, 627 bp, Homo sapiens
aaatgatgccatttatttgaatacatctgaaaaaatataagacaaatctgtattaactaaaattaaggaaggggtagaattattaatttgcttctgattgtctttgatggggcaaagggaagggtcacacctcaggatgcagaattagcaggcttccctctgcaggcgccatctggtcctggtgactgagcacaggtcctccctatttgcaaagaacaacaygaggaaaccaatgctttatataactgttcttggtttgcttccctcaattgactctaccaaaaataaaaatttgagagattggccatcaggtgggatatgtatgcatccacaggaggcagcccagcagcctgaaactcggtttctgtgcctggaatcacagcactcaccggcaagccttatcttactccttcctttcccctagagagtttctgcctgggatggagcccctgtcttcattcagtgctggtggattgctaacatggaaagatttgtcagagtctagaccctgcaacatttttgtttaatggattaaataaaaatctaagctattggcaaatccagaaagtaggctggttgttctgttttgttatgtttttgttttgttttcagttaagtgacatcttt

SEQ ID NO: 536801 - DNA, 522 bp, Homo sapiens
ggtgactatggtccacctgaggtctagacaactcgctgatgaggtcagacaccagcagaggcacaggtgactagaagaacatcatatcacaggatgactggcattcagatagtactgtgggatcccaacatgtacaggtatgctttgctgtccaaattctccacaatccaaacttttccaaacttgagtattggaaagcattgtagaggtagtgatttttgtatcaggaagccagtctaatggagatggggctccatggagtagattatcctgaagctggaaggactggagaaaaccttggtgccaggctagtacatataatgccacaaattaagtgctacatggccttttcttgtaggatctcagccctaagggcaggtcaaacaggctgtaatgtcctgatccactggttggagtcgatatttcagctcctagttccctgcccasttgctctccataccacaagaggccccacacagcaagggatgagcccagcctgctgaaaagtaattatacgccagg

SEQ ID NO: 536802 - DNA, 582 bp, Homo sapiens
cagacaggtaaagtttaacttgtttcatttccaactatgcagtttgaatccaactgtcattttaaattaatgagtgttccttctttcatggctcaaatgtaaaactgaagttataaaatcatttgtctgcattttatccatgtacrtatacatgtctgtgtttgtatactgtatacatggtaccaaattgacttataaataaacgagtgctcataaattaagtaaataagtccaaatgctttccaagtttacaggacatattagtaatcttcagtaaataaagctagctctaaaattattggtaaaataaaactagaatgtattcagaattgtgttaaatataattcagacattttgccttgggtctcctggttagacaagtttaggctgcctcttctagctgttttaaggtcataaaactgtttcttccatgatattttggatacttgtttgatttgtctatgagtttatatctttgattttgatgcagattttcaggttctgtgtaagcagccacagtgaggcctggtggcctagaccatcatctgcaggaaagccaagcccagtacgtcctccctggcc

SEQ ID NO: 536803 - DNA, 627 bp, Homo sapiens
ggactttgaaaagaaggggtcggaacttaggttttgccctgcggtttttgccaggccttagtttttgccctggagtttagagagagaattcaaattccctggcaaaagcaagacagagactcaatctttgagaggaatacaactttagaacaagttttatttctttttttacttttactgtttatttatttacttattttccagccagggtcttgctctctcacccaggctggagtgtaatggtgtgatcatggctcactgcagcttctgggcttaagagatccttctgcctcatcctcccaagtagctgggactacagggacaccaccatgctgaccttattcctcttctgtgagacagacaagttttgaattaaatgaccagagcttcagaccctttggagcaaaggagtcttaacgatgagttcagagaataggccaggawctcctgattcctttttgcttaagtttaggatgaatcttgagaacagagtgggtctgggtctggagtttcaggtcaagtatctccataagtagttaggtccaggatatatgttatttgatgccaccatctttgtaccttgccaagtctcttctcatctcttgatttctaagtcattccttggga

SEQ ID NO: 536804 - DNA, 521 bp, Homo sapiens
ttttactcagaaagggaaaagggaaaatgagaaaagataagcaacggacaaagaagagaaagagaagaggaaatgtagagaaaaataaaaagctgtatattccaagaaagaaaaaagagaaaaagcatctagtctcacaagtcctttcctcttagtctgtattagacgtagatttcaggacaaattacaattggcaggggtctacttgccttttgagtctctctgtcttatctcaagctagttttctcctrtatttagttcttcatttccttcaggaggcaatctgagttttggtaaatttccgtaccaatatggtcaacaaagtaggcatcatagttcaacaaccacattgattttaaggtcattgtaataaatacactagtagctgcataagtcagttccttgtaggagaatgattaaatgttgcagtgttcaaccatagcactttttatcttgagtccatgcatgtggcatagaatgacctccagtggttctggtttcttcatggtcagtgcacactg

SEQ ID NO: 536805 - DNA, 521 bp, Homo sapiens
ttttactcagaaagggaaaagggaaaatgagaaaagataagcaacggacaaagaagagaaagagaagaggaaatgtagagaaaaataaaaagctgtatattccaagaaagaaaaaagagaaaaagcatctagtctcacaagtcctttcctcttagtctgtattagacgtagatttcaggacaaattacaattggcaggggtctacttgccttttgagtctctctgtcttatctcaagctagttttctcctatatttagttcttcatttccttcaggaggcaatctgagttttggtaaatttccgtaccaatatggtcaacaaagtaggcatcatagttcaacaaccacattgattttaaggtcattgtaataaatacactagtagctgcataagtcagttccttgtaggagaatgattaaatgttgcagtgttcaaccatagcactttttatcttgagtccatgcaygtggcatagaatgacctccagtggttctggtttcttcatggtcagtgcacactg

SEQ ID NO: 536806 - DNA, 608 bp, Homo sapiens
cttgtcagtaaaatggggacacctggtctcctcagcgagctgtggggcggatcaaatgagataatgggatgaggaaagcgcctcataaactgcaaatggcagggcaaaggtcagcacgcagcgggcagcacctgcccccagccctccagaagagggtgaaggggctgagcgccatattcccagccctcctccctgctaggatctcctttagaagctgaagaggctgggagtcaagggaggctgaacaagcatgtcccrggctccagaggcccctcccccacttcttggctaggtgacttcaggccacactgggtcacctctcttcttttttttgagacagagtctcgctgtgtcaccaggctggagtgcagtggcatgatcttagctcactgcaacctccgcctcctgggttcaagtgattctcctgcctcagcctcctgagtagctcggactacaggcgcgtgccagcatgcccagctaatttttgtatgtttagtagagacggggtttcaccgtgttggccatgatggcctcgatcttctgacctcgtgatcctcccgccttggcttcccaaagtacgaggattacaggcgtgaactaccgcgccc

SEQ ID NO: 536807 - DNA, 609 bp, Homo sapiens
cttgtcagtaaaatggggacacctggtctcctcagcgagctgtggggcggatcaaatgagataatgggatgaggaaagcgcctcataaactgcaaatggcagggcaaaggtcagcacgcagcgggcagcacctgcccccagccctccagaagagggtgaaggggctgagcgccatattcccagccctcctccctgctaggatctcctttagaagctgaagaggctgggagtcaagggaggctgaacaagcatgtcccaggctccagaggcccctcccccacttcttggctaggtgacttcaggccacactgggtcacctctcttcttttttttgagacagagtctcgctgtgtcaccaggctggagtgcagtggcatgatcttagctcactgcaacctccgcctcctgggttcaagtgattctcctgcctcagcctcctgagtagctcrgactacaggcgcgtgccagcatgcccagctaatttttgtatgtttagtagagacggggtttcaccgtgttggccatgatggcctcgatcttctgacctcgtgatcctcccgccttggcttcccaaagtacgaggattacaggcgtgaactaccgcgccca

SEQ ID NO: 536808 - DNA, 593 bp, Homo sapiens
tgttgcctgggactgtcttcattcctaagagaggaaccaatagttggttgggttgtttttccttctttttttttcctttttctcttttgagacagagtcttgctctgtcgcccaggctgcagtgcagtggcacgatcttggctcatggcaacctctgccttccgggttcaagcgattctcctgcctcagcctcccaagtaactgggattacaggtgcgcaccaccgtgccctgctaattttttgtatttttagtggagacgggrtttcgccatgttggccaggctggtctcgaactcctggcctcaagtgattcacccatctcagcttcgccagagtgctgggattacaggcgtgagccactgtgcctggccagaaccaatatctgtaccccttgctaggctaatgcttcctaacacgtttgctcttttaatccttccagctctacatggcaggtgatgttatcacattttatagacaagggttctcaggccccaaagggttaagttacctgtctaaaatgctctggcagggaggagatgatgtcaggatttgaacccagcttcctatgactcaaaccaatttattccattta

SEQ ID NO: 536809 - DNA, 640 bp, Homo sapiens
tgctgtccggtcaaatgtctctgctgttccccaaggcagtggtgttatttgtggaagtgaagtttgctggaggctcgacatatgctttttatttgttcgagtaggtgtctgggccttggcattcactttcctggctttctaagtgttagaatttcactaccttttttccagtccaaatgaagctcagtcttcagctcttgcccagtggataccagacagtctcagatgaggctgctgttggaatttgccaaatgactcagaarggtcaactgcctgcctgcttatccatcccagatgacaaatgccgaggaggagggagactgccttgctccagcagggctgcccagacaacagtagcacttctgcgggcctgaccctatgaatccctcgccttggttgcccctaaggcaaaaggcactcacatttagaaggatggaatagtttccactgagatggctcacaggcccgtcatatttacctgatccaaaactggagtgatgatttcccagccaagcctgtttctcccctcagggtttctagctccaagatgatagcccacctgccattctctgcccacttgctcaggtcagacacctgggaattgtcacagacatctctctctctaaccgtcaaccactca

SEQ ID NO: 536810 - DNA, 647 bp, Homo sapiens
tagcttttcaaaattaggaaaggcaactatcgcttgagaakgtacacagatgctactgttcagcatttgagtctcaccatgtcacattcctcaaatgccatgtcaaaggattgtgcaactgctaaaactcagctattctaaggaaaacatcagataagaagtcccacatcatccagcttgtgctgaaaattaagcaacagaaggttataagttcttctaagcatgtgatgtctgtcaatggtgcctgtaggagaagccagaaaaggtcatgttgctcttgaaagctaaaatgtaaaccagggaagcaacacatacatgattgcttcaaagttttattaaaactactgacacatatgaaaaaactggtacacacaccacacatgaatgaagttcttcaatcaaagtttgctgagtgcttactctaagccaagctgggatacaacgtggaaaagaacaacactgcatggtacggaataacaactcttatctgttgagaaccaggcattgtgctaaaatttataattattatttctcatttaattctcaacaccctattattacactgggctctgcaaggacaggaatgtttttcctttttccctgctattatatactcaggaaatgaaataatgcccatcacaatgtca

SEQ ID NO: 536811 - DNA, 577 bp, Homo sapiens
tttcacccaagtcaatttcctcatttgtaaaatggagataatacttcattcagccatttgagatttaaacaaggtgattcatataaagccccagcccctgtacctggcacagaatacataggtaagtaataatcatcaccatcatcatgatcaaactgtaaaatcagcacaattactgtctcaaataaagccaagagtttcctggtagccagagaaaaaagacaatcacagttcgaatccagcctgggcaacacagtgagaccttgtctcttggggaaaaaaaaaaggaagaagaaagaagacattcacatatactaatataaaggtggcttttcttcccacattcagaacattctatttcctcctctttaataaagaacaactcagactwattctctacagctatatacaggaaagtcttcaatacagaagttcttaactaggaaggacaattttgtttcttttttttttttttttttgagacagggtctttgtccccaaggctgtagtgcaatggcaccatctcagctcattgcaatctccgcctcccaggctcaaggaatcctcccacctcagg

SEQ ID NO: 536812 - DNA, 581 bp, Homo sapiens
tgaggccatggttctcagctgtgctgaagtaaattatgaggtcacttataagtgaggccttacaagtgaccataaccttgcttgatttacaaacrtaagcaaagcttaacttgagctatttcttgtaaatgcctattttaaagaaaactgaggccaggcatggtggcttatgcctgaaatcccagtgccttggaaagccaaggtgggaggatcacttgaggccaggagttcaagaccagcatggacaacaaagcaagaccccattcctacaaaaaaaaaaaaaaaaaaaaaaaaaagagaaagaagaagaagaaagaaaagaaagaaaaatgaaacttaaggataatcaatcagaactgtcaactcactgacaattatataatgagaaactttccaacaggataaatcaaataaggcaactctataactgtagcatatcaacttgtatgtatataacttgtatgtatataagtgtaacaaatcaaacatttcctttgctttacttcttcattcaccatttaaaaaagcctttcccttgcatctcctcagtgcagcctgaaaccacctttggattagtactt

SEQ ID NO: 536813 - DNA, 605 bp, Homo sapiens
ctgtgctgaagtaaattatgaggtcacttataagtgaggccttacaagtgaccataaccttgcttgatttacaaacataagcaaagcttaacttgagctatttcttgtaaatgcctattttaaagaaaactgaggccaggcatggtggcttatgcctgaaatcccagtgccttggaaagccaaggtgggaggatcacttgaggccaggagttcaagaccagcatggacaacaaagcaagaccccattcctacaaaaaaaaaaaaaaaaaaaaaaaaaagagaaagaagaagaagaaagaaaagaaagaaaaatgaaacttaaggataatcaatcagaactgtcaactcactgacaattatataatgagaaactttccaacaggataaatcaaataaggcaactctataactgtagcatatcaacttgtatgtatataacttgtatgtatataagtgtaacaaatcaaacatttcctttsctttacttcttcattcaccatttaaaaaagcctttcccttgcatctcctcagtgcagcctgaaaccacctttggattagtacttccaaattcatgaattgctgcttgctccattaaactctttaaa

SEQ ID NO: 536814 - DNA, 521 bp, Homo sapiens
cagcaaaggtacttttaaatatgaaggagtgataaagtatttttcagataaacaaaatctgaggattcaacagcagcagacctgacttacaagaaatgctaaagcgagttcttcagaaggaaaataaaaaaatacaaaaaaccacatacacattcaaaaagaaaacttttcaaggcataaaatccactggtaacattaacaacatggacaaaaccagaatactctattattgtaatgatggtgtgcaatccatgcctaactctggtatgaagctgaaagataaactcataaaaagccgtaatagctacagcaacctattaagagaaaggtaatataaaaatacacaaatttagataataagcagttgaaatgtggtggggatggagttaaagcatagagwatttttttaaaattttttctttgtttctattctttactttgtgatctaagataagttgtcacttctttaaaatagcttattgagatccactcaaggcaaaaagaactgggaagtccccaca

SEQ ID NO: 536815 - DNA, 624 bp, Homo sapiens
gagcagggttttttttttaatttgatgaagtccaatttattttttttcttttacaatttgagggttttgtgtcctatttaggaaaaatttgccaaagccaagggcagtaacgttttctcctagggtttctttcagaagttttatgtttttaactctaatgataggtctataatctattttgagttaatttttatataagttgtgaggtaagaatcaaagttcatttttggtacatgaatatgcaactgtccagatgatttgttgaaagattatcccttccttattgtcttgcattaaatttagatattatcatcttctctgttcttctcacatgatcatacagaacactcaatgagaaatatataagcatgctctgaaaagtgagaagctaacagaaacctaagtcactaccttkattagttctgaataggtccctgatagataagtaacagaaaaaatattaggccaggagttggggaacctgtgtgactcgctcttttattagccttcaaactgctttgtaagttgtgaaatggtaaagaaatggaagatattgtctttatacctaaaaattcctatactacataataaaggccattcttgcttggcatgatggtacagggc

SEQ ID NO: 536816 - DNA, 583 bp, Homo sapiens
acaagacatctgcacctccagaagctgcagacaaagtcaaaggtactgcccagtcctgccctgtcttctgatccaattctgaacccacctagaaacacaaagctagggggattttccaggtttctgatttcactgcraaagtgcctgtgtgcctcagttgaattgtgtaggtaatttgactttaagatggctttttgaaagaataaatcagtgacacccaataatttctttaaaggaacatggaatctaaaagaaccaaaatatagtattagccaaagaaggcactcctcagccaagccttccatttggggttctaactctttgtcagaccttgggacatcagagattgctcattctaacttcagtacagcctcctgccctgagaaaggaaccatcagaacattcaatcacttttatagaacaactgcagtgacttaaggtgtaaatggattggaaacaaaaggcttgcattttccttgatacacaaaaggggttaaaaattaagaggaagcctgtagggaagggtttttgctgaatctaatgcatttttcaaaacactctaaaaagagctatgggcccagag

SEQ ID NO: 536817 - DNA, 445 bp, Homo sapiens
tgttttaaaattcaggttgcttgtctccaagccatcccttcaggagctttagggactgtctccagccacctagtgtgtggtgtgtaaaaaagcatatcccatacccagcctctaaccccagcttttgggatgcaaggcctataatgtctcacagggtggaaggggmagtagctaacctaatggaatctggcatgaagagagtccttcctggatgcaggggctttgtccctccaatacctgctttctgcttctcaaatttgggcttcaggagtgtggcttgctacccactgaaaagcctgcctgctgtcacagagacatctttatgggcccaagtctttacagaccctggacccagggtagggggcatttcagaacaggtatcttaggcacaaaaggtgtaattcccttcttgagtgtcaggccatcctcatctccatcctttcaa

SEQ ID NO: 536818 - DNA, 436 bp, Homo sapiens
acagtatcaccaagcattcaaagcccttaactctgtgtgtgaattacatttctttctttctttctttctttcttttttaattttttttttttttttttggagacggagttttgctcttgttgcccgggctggagtgcaatggcacgatctcagctcactgcaacctccacctcccgggttcaagtgattctcctgcctcagccttccgagtagctgggactacaggtgtatgccaccatgcctggctaatttttgtatttttagtagaggcgggatttcaccatgttggccaggctggtctcaaactcttgaccttaggtgatccgcccacctcggcctcccaaagtgcwgggattacaggcgtgagccaccacgtccggccctgaactacatttctcacctgacattctgcttcactccgacatacacacgcaac

SEQ ID NO: 536819 - DNA, 436 bp, Homo sapiens
acagtatcaccaagcattcaaagcccttaactctgtgtgtgaattacatttctttctttctttctttctttcttttttaattttttttttttttttttggagacggagttttgctcttgttgcccgggctggagtgcaatggcacgatctcagctcactgcaacctccacctcccgggttcaagtgattctcctgcctcagccttccgagtagctgggactacaggtgtatgccaccatgcctggctaatttttgtatttttagtagaggcgggatttcaccatgttggccaggctggtctcaaactcttgaccttaggtgatccgcccacctcggcctcccaaagtgctggkattacaggcgtgagccaccacgtccggccctgaactacatttctcacctgacattctgcttcactccgacatacacacgcaac

SEQ ID NO: 536820 - DNA, 596 bp, Homo sapiens
ctggtggcctgagtcctgagtttaagtaagagaacggttgagttgaatttgtctctgtcattttcatttcctttctctgcaatcaagttagtgatcgcttggtcaagctgcagtgtaatgcaattaggtttgtgtgttcccatctccttcaaatgccttgggagcaacttctgctactgttggaagcagctctagtcaataggcttaaagaagaaaaaccaaaagccctttctcccctcttgcccaccccctttgcagcttctttcatataggaaattaacctgcttggattgtgagcaaagggaagagtgatgtagacccaggacattcacaggtgctttctgaagcagggtatattgcaaatgatttctttaatccttgctcaggttgaagtgaaaggcacacgcatactattggagtagcacagtaaggattagttaaacattyatcttgtttctgtttggcttgagatccagatcctggcataatatctgtacttgtttctttgcacattgaataaattattttatggtcaatgaggagtgactgatgtcatatttataaagaaggaccccaagggcaagatagcctgtgaa

SEQ ID NO: 536821 - DNA, 625 bp, Homo sapiens
cttttgtactctaaaaatctgtgctttagaatgacttagcatttttctggatcccttctttgcttctaatagaaacagtttttttcccccttccacattatgcccctttatgtagaattggtgacattatttatttctcatatcctcaggacttaaatccccgaattattctaaatcttgcccagacctgacaccacaaataaattctcaatctcagggggattgagacaaatggggrcttgccactcctgtgacctccatcagggatttggctccaacattctactcaaggaaaatgttgcaccaagtcaggctagaggggaaaggagaacattttttaaaaaacagccgagcatttgtgaaaagacaaaagaagtggctttcccctggatgcacatccaagacctccagcagattggagagcatttaattttgagtctttgcttcttgttctcaaaaggaaacaggattcacctaagtgggaggcggccagcatagcaagtcgctcccatgcatggggtcgtgtagggccgacttggaatcctagctccaactccaccctcattaaattctgtgtgacctggacaagtcatttcattgtctcatagactcagtttccccagct

SEQ ID NO: 536822 - DNA, 576 bp, Homo sapiens
aatgaggggaaacaaagggagaaatccaaggattacaagagatacttctaatccttctctggaagcaaatttaaatctaccctgcagataggcacaaaggttactagcttattttcttttctgtcatggtcttcttttctctttcttctttgttttgtactgtttgtttgtttgttttgtttttgaagtaagagctcctcttaataccgattactattttaagggattactaaactcttacaacctaattgggcatakgcctttaaggtcaaactcaatctcctttgcccacatcagaaggctacatgatattttagggatatgttagcttagctcaaatgcttttcattgtcagttacaaccaagagttgaaattttagaagggatagtctcttaagagagtttatcagtcttgaaagttttcttctgaaactacccagcagatgtttcctatgccatgagaaaacaggctttaagaaagagctggtgatgaatagtgcaagagcagcagaggaggttgagaaaaaggagcccaccagagttacagaaaaagagctttgcaaaacaggaataaga

SEQ ID NO: 536823 - DNA, 657 bp, Homo sapiens
tttcctttacgcacacctctaattttaattgtcagcaagtgaggaaaaaacatcacccaatttgtggattttagaattctatatctggaaggaacctcaaagttcatgcttgctttgaacttaaatgttgaactgtattaaactggcatttgattgatgcctacaatcccagcactttgagaggccaaggtacgaggatcacttgagcccgagagtttgagatcagcctgggcaacaaagcgagaccctatctgaacaaaaagtaaaaaaaaacatatctgggtgtggtagcacatgcctgcagtcctaggcatgtgctttgggaggccaaagccggagggtcacttgagtccaggagtttgaggcttcagtgagctatgattgtgccaccacactccagcacctgagcaacagaataagactctatytctaaaaaaaaaaaaaaaaaaaaaccagaaagaaaaaagttcatgcttagtcaaacaggcttgttttacagatgaagacactgagacccagagagacaatttaacttgcccagatgacctacacatggagtagcaattcttactattactatgatttgtttctgtttgtttaagtgagcccaggaccatggtgggtgttcagtaaacatttgttgaaccgtattaaact

SEQ ID NO: 536824 - DNA, 657 bp, Homo sapiens
tttcctttacgcacacctctaattttaattgtcagcaagtgaggaaaaaacatcacccaatttgtggattttagaattctatatctggaaggaacctcaaagttcatgcttgctttgaacttaaatgttgaactgtattaaactggcatttgattgatgcctacaatcccagcactttgagaggccaaggtacgaggatcacttgagcccgagagtttgagatcagcctgggcaacaaagcgagaccctatctgaacaaaaagtaaaaaaaaacatatctgggtgtggtagcacatgcctgcagtcctaggcatgtgctttgggaggccaaagccggagggtcacttgagtccaggagtttgaggcttcagtgagctatgattgtgccaccacactccagcacctgagcaacagaataagactctatctctaaaaaaaaaaaaaaaaaaaaaccagaaagaaaaaagttcaygcttagtcaaacaggcttgttttacagatgaagacactgagacccagagagacaatttaacttgcccagatgacctacacatggagtagcaattcttactattactatgatttgtttctgtttgtttaagtgagcccaggaccatggtgggtgttcagtaaacatttgttgaaccgtattaaact

SEQ ID NO: 536825 - DNA, 536 bp, Homo sapiens
ctaagcatacacctacaagaggcaggatagtgtactagcttagactgcagacttgcctctggaactggaatgtttggggccaaatccctggttgacctccaccaggtctctgatgttgggtaaggaacttgccttctctgtgcctcagttttctcatctgcggaatgacaataatagtgtagtttctgtcgcataggtttgttgtgaagattaagtgagttgataagggtaaasgattgacaagctcaccaggcatggaacaaatgcttgtaaatgttcacctctctgctttctcctgggcagtatattatgtgatggggctgcagggatggaggaggcccagtctctgccctaacggtgctcatggtctagtggctgagacagacaaatcaacattcatgccaggaagagcttgattctgtgcccctttaagagcgtgtttttgagtgaagatatgtcattcattgattcttttaacttcacataataaagatccattaaaaatgaaaattatgttttatttctctcatcaagaa

SEQ ID NO: 536826 - DNA, 630 bp, Homo sapiens
tcactctgagttcacatgacttccggttgtttaaagagcctggcacctcctcctctctctctctctcgctccctttctcacgatgcaatgtgcctgatcccccttcaccttttgccatgagtggaagcttcctgaggcctccccagaagcagatgtcatcaccatgcttcctgtacagtctgcagaaatgtgagccaattaaacctcttttccttataaattacccagtctctggtcaggcatggtggttcatgcttgtaatcccagcacgttgggaggctgaggcaggaggatcacttgaacccaggaatttgagacttgggcaacatggcgaaaccttgtctctacaaaaaattagccaggcatagtgctgtgcacctgtagccccagctactcaagaggctgaagtgggaggatcacctgagcctgggaggtctaggctgcaccgagctgtgatcgcaccactgcactcaagcctgggtgacagagtgagaccctgtctcaatcaatgagtcaatgaatcaatcagtaacccagcctcaggtatttcttyatagcaacacaaaaatggactgacacgcatctcaattgcagagtgtaaacatcccatccactacagagcccaagact

SEQ ID NO: 536827 - DNA, 565 bp, Homo sapiens
tgtctgctatttctggtttccaacagagtgagtggaaatgaatgaatatcacatgcaacatagaaactgggaccaccctcccaccccccgcagataactctaaagcccatggtgttaataatgtaagtggtcaacttgtacagtattggtgaaggttacagaattgaggaggatcaccaatggccaccaagattaatcatgtatcttgagcgacgaagagacctcttggtctagttaagacaactttgacatttaagaagcttccctaggcataaaaagcagatgagaatttgctcttgaattgttcagagtcatccttgattttccaatttccctctgtccatacctcccagtccattagaagctctgttgagtmtgcctccaacgtgtatcttgcatcagtatactctctgagctcacagccaccccctaagccaagccatcatcatcctttgcatgatcaacattgactctctcttgcttcttatctttcttcaccacaatccattttacacacagcagccaggataatctttaaataatgtaaattagttcatgtcactcc

SEQ ID NO: 536828 - DNA, 589 bp, Homo sapiens
ttctccctctttggttctctcttccttccagtctctggcatctcctggtacaatagatgttcactagactgtgagctctgagacagtagagatggcacctgacttgttctgtgtcatagtccagcactagcgtggtgtcttgcatmcagaaggtactcagtaaatatttgttgagtgaacatttttcttatgctgatggataaatatccacaaacctccagtttacactccaaataaccgtccacagagcctgaattttgagacagttcctaaatcaagatgtttccaattctctccaaacatcagggagccatactccttcaggaccctgctgaacccatgcaggctaccactatccagcaaaacgttgagcaatgatggaaacgttctacatctgccctgtccaatactgtagccactaccttcatgccactcttgagcatgtgaaacatggcaatgtgactggggaaatgaatgctgaattttatttcattttaatttttacaactttaaatttaaatgcattgccatcacggctagtgggtatgatcttggacagcacagacttagtctgatgggcactaaccag

SEQ ID NO: 536829 - DNA, 502 bp, Homo sapiens
agtagagatggcacctgacttgttctgtgtcatagtccagcactagcgtggtgtcttgcatccagaaggtactcagtaaatatttgttgagtgaacatttttcttatgctgatggataartatccacaaacctccagtttacactccaaataaccgtccacagagcctgaattttgagacagttcctaaatcaagatgtttccaattctctccaaacatcagggagccatactccttcaggaccctgctgaacccatgcaggctaccactatccagcaaaacgttgagcaatgatggaaacgttctacatctgccctgtccaatactgtagccactaccttcatgccactcttgagcatgtgaaacatggcaatgtgactggggaaatgaatgctgaattttatttcattttaatttttacaactttaaatttaaatgcattgccatcacggctagtgggtatgatcttggacagcacagacttagtctgatgggcactaac

SEQ ID NO: 536830 - DNA, 319 bp, Homo sapiens
ttcctaaatcaagatgtttccaattctctccaaacatcagggagccatactccttcaggaccctgctgaacccatgcaggctaccactatccagcaaaacgttgagcaatgatggaaacgttctacatctgccctgtccaatactgtagccactaccttcatgccactcttgagcatgtgaaacatggcaatgtgactggggaaatgaatgctgaattttatttcattttaatttttacaactttaaatttaaatgcattgccatcacggctagtgggtatgatcttggacagcacaracttagtctgatgggcactaa

SEQ ID NO: 536831 - DNA, 559 bp, Homo sapiens
agctgtgacgccccagggaacttagttaccctcttcatacttcatcttcctcatctgaaaaacaggcgtgtaaacagtcttcacttcacatggctgttgtgaggaattaatgagttaattgcaagggacttaccacaattcctgacccatagtctaaatgtgcaaaaaataatgcaagctgtggggattgttatgttcaaggtcatgggtgtcctggggggtgtcagttatggtccctgcctcctgtcctcctttgtcatagaccctgcatctcccacggcatatagsctgcctcttcctgcttccctgagttcagatgaaacaccatgccctgtcctgttctcattcccagccttggaggtggcttgtccctgctgagcctctgccatttgtttgccaaagggctccttacatgggcagaagttacactcagaccctgtgggctatgaaagttccctcagtaactcccttttttggagagctcgtgttctagacattgggctgagtagttgacaaagatctcattgaatttatagaatggtcccattttacaggtgag

SEQ ID NO: 536832 - DNA, 565 bp, Homo sapiens
aatcctcgaagggggctggcaattaggatctgtgagttggtagccctcccagtagctgggtgcccagtctcyccagtctttcattcctgaaggattgcctgggtagcacatcacagagcttagcccagaggctttcggaagtctcctctaggtcagtcctaccctgaccactctgggacccaggtctgcttctcctggctctgctgttcctgaccccacttcctgttggctgcatcttttgtccccagggtcctgatctcttgccttcagacccaacctgacaattggatgtggttactaagtgcctggggaatttctcccctgtttctgggcttccctctgaccccagtaaagccttctctagaggaaggacgtgagcccttgtcttcaccagccagctcctggtttttgcacttatggaagggagccatgtcgctaatcatgcaaagcagcagataatacaaaatcatttacatttgtccttcagttgcattacgtgattgcaaggggatggaagaagtgtgatgacatcaagtaagtaagggcactctggatacagactgcc

SEQ ID NO: 536833 - DNA, 650 bp, Homo sapiens
ctgggtcaggggctgggtggggctggcagaggggacaaagggaaagagcccccaggcaacccatccccagttctgaggatacagtcctgccaatttctgctgccaaggctggggcttagtacccttgcatctgggtgtgggtagggtttggatgcctgagttccccaagataaccctggcagaaactttaggttctgctgatgcagagaaccaagtcgacattgacactgagcaccctcctggctctagaggagaagtgtgtggcctctcccacctccagggccctttcttagacagatggtaaaatggacaagggcatgagctctgaagccagacttcatggactgcagtccccgctctgctgctttctggctctgctaacctccctatgccttactttgcctctctgtaaagtgggcccaataaagatgcctacctcagggtggcttagatgattgccatatagttttagtgagttaacrtacataaaacactaagcgaacaccaggcacatgaaggttagctattatttcgtacacaccagcctctattggccaaatccctaggcacacacctggctcattttatatgtacttgttcacaggcagatagatgctagtgatacaacatggttaaaacataaagtgctg

SEQ ID NO: 536834 - DNA, 360 bp, Homo sapiens
gggaccgctgagattatgccaatgccctgctatcggatttgagcccctatcctgatccacagcccccacataggaggaggtgatggagggaccctaatgctgtgattcagtgattaaggctcaaraagctgtccccaccatcactcctttatgacacccaggatgctggtgaataaacctagaaattggctgtaggaaaatcacagctatctaaccagcagagagggtcagtagtccacctcatgtctgcctcctcagtgctgtgcaagtatatggattggtggaaacttggttttatcctgaatccaagctacagagaaatctgggagatggggatttcagccttccagaccatgagtt

SEQ ID NO: 536835 - DNA, 363 bp, Homo sapiens
ctgagtgaccaggaagcttgagatctgtggctaccatcactctattggtagaagaagccagtaagtttaccttgggacaacaagtagatgccataccacccccgccccccaccaccccatgaagtacagtacagagggtcctagaggcaaaagtataccmatggctaatagggggccagttacttaaatatcaggctcttctgcttgacaccccagatgttacccttaaagtatgctgatttttaaaccctgctactctgttgctggacctcacatcccaagaaacagatccccaactcattgactcctgggtggaaaccatggaagagatctactctagaaggtccaaccttgaagacaagc

SEQ ID NO: 536836 - DNA, 599 bp, Homo sapiens
aaaactgtaaaagttacatacayacatacctaatggcactaagaatgtacaatatcaattattggaaaaataagtgagtgactcacagtcataagaaataatttaatattagtatttttcttttatagacaaacataacatacacatggtttctaccttttataaggcaaagtagaaaactaaccgttactgcatttacctcaaacacagcactgactgtgccacagataacatggtccaaaatattcaattctatacataggccatggtagtggatgtgtggttaagttttaggaaaggcatatatttccagaagtaagtatgttaaatacacaaatgtctataaataacaaaaagttatcagcaaaaacgcttaggttataacattcccaaacgttctaacattttaagtgttttagatatgagttgtctgaccagttcatttggttacagttttaaactagcaaaccattgccctataagaggagctaaactaaactgtaacactacacaaacttcccaaggaaggtaacttgaaaagtctaaaaagtgattccaattattctaattaacatttgagatgctaaaagaatcaatga

SEQ ID NO: 536837 - DNA, 611 bp, Homo sapiens
ccatgactcccaccagcttcccagcagcaatgccttcctctttgatgcacaggaaggcccctyggctgtggaaacagccagtaagtgctcctttgataagaaaaataaagctccatcaatctctcagtagctcctacattctacatgctcaccactctgtctaaactgagagatgttattctctgcaggcaggccctaaacattcactttaaaaaagtgattaggctgaacacagctctgggatcaactctcaagtacaggtccctggtgggtcaggtaatttgctctgttcctgtcctcacctcagtccctctggtccagaccggcatctgcaagccggtatactcaaagcaggccagaatggagagagtgaagagattatggcagactctctgccactactgccgcgcatgtacaaatctgtttaacagatcttcttctttaaaatgggacatctcatctttcctgaaatatatatattttttgagacagggtctcttgttctgtcacccaggctagagtgcagtggcatgatcttggctcaccacaacctaaaacccaggttcaaatgaccctcccacctcagcctcctgagtagctgagaacacaga

SEQ ID NO: 536838 - DNA, 606 bp, Homo sapiens
actcccaccagcttcccagcagcaatgccttcctctttgatgcacaggaaggcccctcggctgtggaaayagccagtaagtgctcctttgataagaaaaataaagctccatcaatctctcagtagctcctacattctacatgctcaccactctgtctaaactgagagatgttattctctgcaggcaggccctaaacattcactttaaaaaagtgattaggctgaacacagctctgggatcaactctcaagtacaggtccctggtgggtcaggtaatttgctctgttcctgtcctcacctcagtccctctggtccagaccggcatctgcaagccggtatactcaaagcaggccagaatggagagagtgaagagattatggcagactctctgccactactgccgcgcatgtacaaatctgtttaacagatcttcttctttaaaatgggacatctcatctttcctgaaatatatatattttttgagacagggtctcttgttctgtcacccaggctagagtgcagtggcatgatcttggctcaccacaacctaaaacccaggttcaaatgaccctcccacctcagcctcctgagtagctgagaacacaga

SEQ ID NO: 536839 - DNA, 611 bp, Homo sapiens
ccatgactcccaccagcttcccagcagcaatgccttcctctttgatgcacaggaaggcccctcggctgtggaaacagccagtaagtgctcctttgataagaaaaataaagctccatcaatctctcagtagctcctacattctacatgctcaccactctgtctaaactgagagatgttattctctgcaggcaggccctaaacattcactttaaaaaastgattaggctgaacacagctctgggatcaactctcaagtacaggtccctggtgggtcaggtaatttgctctgttcctgtcctcacctcagtccctctggtccagaccggcatctgcaagccggtatactcaaagcaggccagaatggagagagtgaagagattatggcagactctctgccactactgccgcgcatgtacaaatctgtttaacagatcttcttctttaaaatgggacatctcatctttcctgaaatatatatattttttgagacagggtctcttgttctgtcacccaggctagagtgcagtggcatgatcttggctcaccacaacctaaaacccaggttcaaatgaccctcccacctcagcctcctgagtagctgagaacacaga

SEQ ID NO: 536840 - DNA, 519 bp, Homo sapiens
tgtctgctgctgtacactgcctgctgtctctctgcttcttatgtgattggcattcagtagaacccaggtttctgagcacctcacataacagaatgagtctcctctgctgccatcctcatcakcttcccttatgtcttggtgactcttcattctaccaccccaaggtggttctctccaacccccctcctcttagattgttctcacacagaggccatcatttcataacattgtgctgggccagaagaaccataagcaggtcccttcccataccaaagccgtaactattttggaaaagcctccttcatattgcagccattggacatgataatacatgtgatgtgctggcatttgttgagaatcatgtgaaaattaagcttccaccccatcacactaacgttccagccctccacggttttctccctaggctaagatagagaggaagaacatgaaatgtgcagaaagcattctcttaagcaaatgtgtataacttgcataaattgtaataatttcctggaacag

SEQ ID NO: 536841 - DNA, 519 bp, Homo sapiens
tgtctgctgctgtacactgcctgctgtctctctgcttcttatgtgattggcattcagtagaacccaggtttctgagcacctcacataacagaatgagtctcctctgctgccatcctcatcatcttcccttatgtcttggtgactcttcattctaccaccccaaggtggttctctccaacccccctcctcttagattgttctcacacagaggccatcatttcataacattgtgctgggccagaakaaccataagcaggtcccttcccataccaaagccgtaactattttggaaaagcctccttcatattgcagccattggacatgataatacatgtgatgtgctggcatttgttgagaatcatgtgaaaattaagcttccaccccatcacactaacgttccagccctccacggttttctccctaggctaagatagagaggaagaacatgaaatgtgcagaaagcattctcttaagcaaatgtgtataacttgcataaattgtaataatttcctggaacag

SEQ ID NO: 536842 - DNA, 519 bp, Homo sapiens
tgtctgctgctgtacactgcctgctgtctctctgcttcttatgtgattggcattcagtagaacccaggtttctgagcacctcacataacagaatgagtctcctctgctgccatcctcatcatcttcccttatgtcttggtgactcttcattctaccaccccaaggtggttctctccaacccccctcctcttagattgttctcacacagaggccatcatttcataacattgtgctgggccagaagaaccataagcaggtcccttcccataccaaagcmgtaactattttggaaaagcctccttcatattgcagccattggacatgataatacatgtgatgtgctggcatttgttgagaatcatgtgaaaattaagcttccaccccatcacactaacgttccagccctccacggttttctccctaggctaagatagagaggaagaacatgaaatgtgcagaaagcattctcttaagcaaatgtgtataacttgcataaattgtaataatttcctggaacag

SEQ ID NO: 536843 - DNA, 519 bp, Homo sapiens
tgtctgctgctgtacactgcctgctgtctctctgcttcttatgtgattggcattcagtagaacccaggtttctgagcacctcacataacagaatgagtctcctctgctgccatcctcatcatcttcccttatgtcttggtgactcttcattctaccaccccaaggtggttctctccaacccccctcctcttagattgttctcacacagaggccatcatttcataacattgtgctgggccagaagaaccataagcaggtcccttcccataccaaagccgtaactattttggaaaagcctccttcatattgcagccattggacatgataatacatgtgatgtgctggcatttgttgagaatcatgtgaaaattaagcttccaccccatcacactaacgttccagccctccacggttttctccctaggctaagatagagaggaagaacatgaaatgtgcagaaagcattctcttaagcaaaygtgtataacttgcataaattgtaataatttcctggaacag

SEQ ID NO: 536844 - DNA, 529 bp, Homo sapiens
aaaaactgtttcagctatttttctctgaaagtgtctttattttgctttaattattggagattatttttactaagtatgtaattctggaggcagttattttctttcagcatattgaagatatttrcatttgattgtttcttttcagaaggcagccaattgtctcgctgctgcttatttgaatgtaatgttcctttttttcctctgttttttgtctttgctatttttgtctttgtttttttttttattgtctgcagttttactactctgtctttaggtatggagttccctttatttatcttctttgattggtaggccttctagaatctgttgacttttgagtttcattttgtctggaaaactctcaagtattatctcttcagttattgcctctattttctctctcttctacttttgagcctctaactaaaaataaagtagactttctcactctatttgttatatttttgtgtttgtgtattaaatattattttttctccttgttatatattctgaatttttttcttcttcc

SEQ ID NO: 536845 - DNA, 529 bp, Homo sapiens
aaaaactgtttcagctatttttctctgaaagtgtctttattttgctttaattattggagattatttttactaagtatgtaattctggaggcagttattttctttcagcatattgaagatatttgcatttgattgtttcttttcagaaggcagccaattgtctcgctgctgcttatttgaatgtaatgttcctttttttcctctgttttttgtctttrctatttttgtctttgtttttttttttattgtctgcagttttactactctgtctttaggtatggagttccctttatttatcttctttgattggtaggccttctagaatctgttgacttttgagtttcattttgtctggaaaactctcaagtattatctcttcagttattgcctctattttctctctcttctacttttgagcctctaactaaaaataaagtagactttctcactctatttgttatatttttgtgtttgtgtattaaatattattttttctccttgttatatattctgaatttttttcttcttcc

SEQ ID NO: 536846 - DNA, 638 bp, Homo sapiens
ggtaatctcacacatgctcagattttactttgtgaaagagaatcaagccacatcatataaaattaaacatttattatttttcttaatagtctaatagagatatacatttgtgtatattggccrgaaattgggctaaaattttcacaaatggaaatcaagaatgttaccatagaactatcaatgccaactttaactatctgaatcagatggcatagcctagtttcctctacaactgacagcacactctttggtattttggtatttttcagtgtccttgaaatgtttaactacccactaaagaacaggtcacatggaattaataaacaaagggcttcagtttccatcaagcaccttcaagtgacaggaacagggatttaaataaaaggatctaagtcagcacaggaaagtgactgtgctgccaaagtgactcaaactcaaaaggacaggatgagacttactcagaacttcgaggaagtgtagagaaattatccaccactttttatcctagaggtgcctttgtggttgtgaccatgccgtagaatgatttggggatcccttccaactggaaggacatcttagactgagggaacccaagaaacctgatttcggtcacccctgaccatcataaatcccatgca

SEQ ID NO: 536847 - DNA, 638 bp, Homo sapiens
ggtaatctcacacatgctcagattttactttgtgaaagagaatcaagccacatcatataaaattaaacatttattatttttcttaatagtctaatagagatatacatttgtgtatattggccagaaattgggctaaaattttcacaaatggaaatcaagaatgttaccatagaactatcaatgccaactttaactatctgaatcagatggcatagcctagtttcctctacaactgacagcacactctttggtattttggtatttttcagtgtccttgaaatgtttaactacccactaaagaacaggtcacatggaattaataaacaaagggcttcagtttccatcaagcaccttcaagtgacaggaacagggatttaaataaaaggatctaagtcagcacaggaaagtgactgtgctgccaaagtgactcaaactcaaaaggacaggatgagacttactcagaacttcgaggaagtgtagagaaattatccaccactttttatcctagaggtgcctttgtggttgtgaccatrccgtagaatgatttggggatcccttccaactggaaggacatcttagactgagggaacccaagaaacctgatttcggtcacccctgaccatcataaatcccatgca

SEQ ID NO: 536848 - DNA, 573 bp, Homo sapiens
tggaggagggtgttttgtctttaaaaagatacagctccaggttacccctttggaccagttcctgttcttaggtmtcagacttcctctattcatgaatggtggatatatatgatttcctgtgatgtttctttacattatgaccataatgagcgttgatttttagttcctgatcccctcatgtaatgactgttcaattaatgactttttgccataatggctattataaagctatgtcactttttggacaactccttttttattataatgatttgtcaccccaaaataaataaacatgctataagaaattatattttgacatcatggtttcaagcagacactatatagaaggatgtgtatgaatgagcatgtagggaagtggccaaagaggggcccaccctctgtaatctgctttttgatgctaaggtgaggactctgcaaaccacatcttttttttgcttgctggctttattagtttctgtcagtaaggggtgttaaaaagagactgaaaggctggaggagggatataggtctggctgcttcctattttgtttcttgtttcaattagcatcatcc

SEQ ID NO: 536849 - DNA, 573 bp, Homo sapiens
tggaggagggtgttttgtctttaaaaagatacagctccaggttacccctttggaccagttcctgttcttaggtctcagacttcctctattcatgaatggtggatatatatgatttcctgtgatgtttctttacattatgaccataatgagcgttgatttttagttcctgatcccctcatgtaatgactgttcaattaatgactttttgccataatggctattataaagctatgtcactttttggacaactccttttttattataatgatttgtcaccccaaaataaataaacatgctataagaaattatattttgacatcatggtttcaagcagacactatrtagaaggatgtgtatgaatgagcatgtagggaagtggccaaagaggggcccaccctctgtaatctgctttttgatgctaaggtgaggactctgcaaaccacatcttttttttgcttgctggctttattagtttctgtcagtaaggggtgttaaaaagagactgaaaggctggaggagggatataggtctggctgcttcctattttgtttcttgtttcaattagcatcatcc

SEQ ID NO: 536850 - DNA, 573 bp, Homo sapiens
tggaggagggtgttttgtctttaaaaagatacagctccaggttacccctttggaccagttcctgttcttaggtctcagacttcctctattcatgaatggtggatatatatgatttcctgtgatgtttctttacattatgaccataatgagcgttgatttttagttcctgatcccctcatgtaatgactgttcaattaatgactttttgccataatggctattataaagctatgtcactttttggacaactccttttttattataatgatttgtcaccccaaaataaataaacatgctataagaaattatattttgacatcatggtttcaagcagacactatatagraggatgtgtatgaatgagcatgtagggaagtggccaaagaggggcccaccctctgtaatctgctttttgatgctaaggtgaggactctgcaaaccacatcttttttttgcttgctggctttattagtttctgtcagtaaggggtgttaaaaagagactgaaaggctggaggagggatataggtctggctgcttcctattttgtttcttgtttcaattagcatcatcc

SEQ ID NO: 536851 - DNA, 618 bp, Homo sapiens
cattgtccatcaaatgctagaagactactctgcttttgttactatgtttgccccatttttctagctcttcttacatgaatttaaacctacatcaatggctatttcctcaacatttggaaacaacaatacttattagaaagaaagtattttatccttccaggctatagatcttacattcctcttacacaacaatcctaattccctcatgttatcctgatcaatgaaatgatttcacttatttttcaaagaagtagctattttactacaaagcaggaatcrcaaggcatggggtgggcactgttatactccatcagtgagtatgtaaaggaaatcaaactgtctgattttgaatcctgcttctatttttcacaaccttggacaaattactgatttcctctttcactaggtttatcatttgtaaaatggagatactagtgtctactcatggattattgtgaggcttaaataagaaaacatgtatcaagcatatttgtctggcttgtaataagcactctaaaatttatgcagtgatgaggataatgatcatagacaatctgatagcatcttatccaaaggaaaaaatgcgcatttcctttgagtaagcactactgattctag

SEQ ID NO: 536852 - DNA, 618 bp, Homo sapiens
cattgtccatcaaatgctagaagactactctgcttttgttactatgtttgccccatttttctagctcttcttacatgaatttaaacctacatcaatggctatttcctcaacatttggaaacaacaatacttattagaaagaaagtattttatccttccaggctatagatcttacattcctcttacacaacaatcctaattccctcatgttatcctgatcaatgaaatgatttcacttatttttcaaagaagtagctattttactacaaagcaggaatcacaaggcatggggtgggcactgttatactccatcagtgagtaygtaaaggaaatcaaactgtctgattttgaatcctgcttctatttttcacaaccttggacaaattactgatttcctctttcactaggtttatcatttgtaaaatggagatactagtgtctactcatggattattgtgaggcttaaataagaaaacatgtatcaagcatatttgtctggcttgtaataagcactctaaaatttatgcagtgatgaggataatgatcatagacaatctgatagcatcttatccaaaggaaaaaatgcgcatttcctttgagtaagcactactgattctag

SEQ ID NO: 536853 - DNA, 618 bp, Homo sapiens
cattgtccatcaaatgctagaagactactctgcttttgttactatgtttgccccatttttctagctcttcttacatgaatttaaacctacatcaatggctatttcctcaacatttggaaacaacaatacttattagaaagaaagtattttatccttccaggctatagatcttacattcctcttacacaacaatcctaattccctcatgttatcctgatcaatgaaatgatttcacttatttttcaaagaagtagctattttactacaaagcaggaatcacaaggcatggggtgggcactgttatactccatcagtgagtatgtaaaggaaatcaaactgtctgattttgaatcctgcttctatttttyacaaccttggacaaattactgatttcctctttcactaggtttatcatttgtaaaatggagatactagtgtctactcatggattattgtgaggcttaaataagaaaacatgtatcaagcatatttgtctggcttgtaataagcactctaaaatttatgcagtgatgaggataatgatcatagacaatctgatagcatcttatccaaaggaaaaaatgcgcatttcctttgagtaagcactactgattctag

SEQ ID NO: 536854 - DNA, 618 bp, Homo sapiens
cattgtccatcaaatgctagaagactactctgcttttgttactatgtttgccccatttttctagctcttcttacatgaatttaaacctacatcaatggctatttcctcaacatttggaaacaacaatacttattagaaagaaagtattttatccttccaggctatagatcttacattcctcttacacaacaatcctaattccctcatgttatcctgatcaatgaaatgatttcacttatttttcaaagaagtagctattttactacaaagcaggaatcacaaggcatggggtgggcactgttatactccatcagtgagtatgtaaaggaaatcaaactgtctgattttgaatcctgcttctatttttcacaaccttggacaaattactgatttcctctttcactaggtttatcatttgtaaaatggagatactagtgtctactcatggattattgtgaggcttaaataagaaaacatgtatcaagcatatttgtctggcwtgtaataagcactctaaaatttatgcagtgatgaggataatgatcatagacaatctgatagcatcttatccaaaggaaaaaatgcgcatttcctttgagtaagcactactgattctag

SEQ ID NO: 536855 - DNA, 361 bp, Homo sapiens
ggcgaaagctgtcgggcgcgcgcttctccgcagctccgcgcccccgccaaaacccagtgagaaattatttgcattcctggagsctgcaggagcgagaaatgagctgtaggagtcggtgggcagcaacggcggcaggcggatggaagagagcaaggggtcgccgttcgtgtcccattcgcccgagtcaaggggcggccccccaaaatcccaacgtcattgtttcctcggggccggcaggtgtgaaaacccggcggcagaatggaagttcggtagtctgcgagggcccgcggcctccccaggcgcgtagctgagtccctccaaccccgccccgggcccgcctgctctcgggccccggcgtggc

SEQ ID NO: 536856 - DNA, 361 bp, Homo sapiens
ggcgaaagctgtcgggcgcgcgcttctccgcagctccgcgcccccgccaaaacccagtgagaaattatttgcattcctggagcctgcaggagcgagaaatgagctgtaggagtcggtgggcagcaacggcggcaggcggatggaagagagcaaggggtcgccgttcgtgtcccattcgcccgagtcaaggggcggccccccaaaatcccaacgtcattgtttcctcggggccggcaggtgtgaaaacccggcggcagaatggaagttcggtagtctgcgagggcccgcggcctccccaggcgcgtagctgagtccctccaaccccgccccgggcccgccwgctctcgggccccggcgtggc

SEQ ID NO: 536857 - DNA, 409 bp, Homo sapiens
tctgcagccagaaagcaggttttaccgctggycccacagcgccatacggtctggggaaaagaaggaaacccaatagtacacaaacaaaggccaaaagagaaaccttccaagtgctctatgccttacggtttagcagaaaatatcaaacaactctcaacctagctggtctgtagcttccacaaatgaaatactgtattcattgcagcctttctggttgagatatttcaaatatttggtggagcttttaatgagacggagagacactctcgagtgtggaagaaaaaaatgagggggtgtgaggataaggcgactttaggacagaaaaaacaaagagacaaggaagccacgtaaacgttttcgggtaggcgtgaggcgatgtcagttttgaaccccgtttatgttaggtaga

SEQ ID NO: 536858 - DNA, 409 bp, Homo sapiens
tctgcagccagaaagcaggttttaccgctggtcccacagcgccatacggtctggggaaaagaaggaaacccaatagtacacaaacaaaggccaaaagagaaaccttccaagtgctctatgcctyacggtttagcagaaaatatcaaacaactctcaacctagctggtctgtagcttccacaaatgaaatactgtattcattgcagcctttctggttgagatatttcaaatatttggtggagcttttaatgagacggagagacactctcgagtgtggaagaaaaaaatgagggggtgtgaggataaggcgactttaggacagaaaaaacaaagagacaaggaagccacgtaaacgttttcgggtaggcgtgaggcgatgtcagttttgaaccccgtttatgttaggtaga

SEQ ID NO: 536859 - DNA, 409 bp, Homo sapiens
tctgcagccagaaagcaggttttaccgctggtcccacagcgccatacggtctggggaaaagaaggaaacccaatagtacacaaacaaaggccaaaagagaaaccttccaagtgctctatgccttacggtttagcagaaaatatcaarcaactctcaacctagctggtctgtagcttccacaaatgaaatactgtattcattgcagcctttctggttgagatatttcaaatatttggtggagcttttaatgagacggagagacactctcgagtgtggaagaaaaaaatgagggggtgtgaggataaggcgactttaggacagaaaaaacaaagagacaaggaagccacgtaaacgttttcgggtaggcgtgaggcgatgtcagttttgaaccccgtttatgttaggtaga

SEQ ID NO: 536860 - DNA, 409 bp, Homo sapiens
tctgcagccagaaagcaggttttaccgctggtcccacagcgccatacggtctggggaaaagaaggaaacccaatagtacacaaacaaaggccaaaagagaaaccttccaagtgctctatgccttacggtttagcagaaaatatcaaacaactctcaacctagctggtctgtagcttccacaaatgaaatactgtattcattgcagcctttctggttgagatatttcaaatatttggtggagcttttaatgagacggagagacactctcgagtgtggaagaaaaaaatgagggggtgtgaggataaggcgactttaggacagaaaaaacaaagagacaaggaagccacgtaaacgttttcgggtaggcgtkaggcgatgtcagttttgaaccccgtttatgttaggtaga

SEQ ID NO: 536861 - DNA, 603 bp, Homo sapiens
actgactattgtttaattgagtgccaagctggcattatttgtaaaatttatagaaataattcgagagcagagtgatggtctttttatgcggtttagtttgtgcctcacaactagagacaaaaggtrtcacagatattagggtttaagataatttggcatttgtgctaagttctgttgaactctgagtcactgttatttctactgtgtagccctttggtgttacagcctaagggagaggttttcaccagggcactccttctctgtactccctggactccatttttgtcttcctatcttctcttggctacctcttcggggaatgggagtccttgaattctgtgctcaactctttggcttgccttcttgtggatgttggccccctaaatagctgatgccttgtgatatctgataaagattctctccttgataaaactttagccagccccctctgtgctccttttcaactaggtgtcaaccttggcctttaaagacttgaacaaaatactaacataatttctaacagctcaaggccacgtccctgtgatgaccctaacacctttaaagcatttgcctgagaaaacccaaggctgctaaaagaattta

SEQ ID NO: 536862 - DNA, 527 bp, Homo sapiens
atgacaacaacaataacaaaaaacgtaggaaataaaactcaaattaggatgtgttcacttctgttccttcagtctttcatgtatttcttctcattctataatccatagtcaacccagacacagtatgggatagaggcccagaaagcaggcacaaatataccgaatcctagcacttaggttctctcctcagagtcaagcacttcccagagtgtgaagaggagagctacatatttcatatcgtaagctagtggtctctgtatctctgggaagggtgtaaatagggggttggaaaaactmcctctgtgcccttagagtactgtcgtgggtcctcctgccctttgcattttgtcaaagtgcttgcttatcaacacctcctgtcctttgcaaagggggagaggatggtggtgatgggggagccaattatggcagcttctcgctgcagtgcgcagagtggctgagttgtcattcattaccgcctaatgtttagctgcagtatgcaaaccaacaaggctgctgcgaggagtcgc

SEQ ID NO: 536863 - DNA, 315 bp, Homo sapiens
tacgaatttaagtttgtgctcaggctttgaaaaaaatgggtttgcactstcatggggagaaaatgtgtggtcatctttcttctcctggctggcactccaagcaggcttcattttaaaaatagtgctagggagggaggaaaaaatataatgtattcttaaaatgtttatatgtcagcaaaatcctgaaaaccattcaatagattaatcctcctgctgacttaaaaaggatggatttccagctataactgagattgggaaaaattgatttccgtgtaccttatgactgaataagataaaagccactgccctgacaag

SEQ ID NO: 536864 - DNA, 630 bp, Homo sapiens
tacttcaagcatcatgtctgcaggccagacagaaaggaggagaaaagagcacaaggcaaaagggtgtgaatcaactttgtcctttttaaaagctttctcagaaacctcaaccagtaattgccactcgtatctcagtgaacagaatagggtcacatgttaatatctattttcaaggaagtctgaggatgaatcttttttaaccaggctgaataccccaccaaataaaatcagtttttcatcatcagggaagaaagagagactggaaactgaataggtaactagcactgtctgccaagaatagtgtttgaagtagtgaatagggtcatcaaagacatttgcataagaaaatttttaggtatgatttctaagaagaacttttgttttaggttgctggcacaatacaaaagcataacaggaaattacaggacattttcataagcaatgacttctaaggtcaaaggtgaaatgacagatttyaaacacaactgcattttaaagtgagattacggacattctgtgtaggttttgcatacggagtagccattaactggccctctgttcataaactgagcacacacctccagcctgcataaggagggtagaggtgttcccctcacctcaagtcaggtg

SEQ ID NO: 536865 - DNA, 672 bp, Homo sapiens
ggcaaaattctgtgttgaaagaataatgtactgtttgggtcaccggagagaactagttgaagagggaaaagaattggagatatggcctaaataaattgattcattataggcttcaaatactactctagtttaatctttatagttaggcaataaagtgttctttaaagtaggtataaactatcaaatgtggtgctcaattacccttttgtttttgttcataaacaatggtgggcttgtgccagataatgagtgatgatggccttactggagaaacaagagcaaggagagaatgtggagaaaaaatgaaacagagtgcatgaataaacacaggagaaaacataggtggaaagttaagctaggacaatattatggaggtcctcccatgccaggctaaggagtttatggtatatttaataggcaytggagttgttgaaagttactgatcaggaggatgaaatcataagaattggccacatataattagatttatggatttttctagtcttatttgatattacgttttgtttgaaccaatcactgtatcataatgtaccaagatattggtcttaaaaattgttataggcaaaatcctaagctttcctttcaagattcttggcctctggttgttgactcaaacactaatctatgtacagttgtaaagagattttgcag

SEQ ID NO: 536866 - DNA, 672 bp, Homo sapiens
ggcaaaattctgtgttgaaagaataatgtactgtttgggtcaccggagagaactagttgaagagggaaaagaattggagatatggcctaaataaattgattcattataggcttcaaatactactctagtttaatctttatagttaggcaataaagtgttctttaaagtaggtataaactatcaaatgtggtgctcaattacccttttgtttttgttcataaacaatggtgggcttgtgccagataatgagtgatgatggccttactggagaaacaagagcaaggagagaatgtggagaaaaaatgaaacagagtgcatgaataaacacaggagaaaacataggtggaaagttaagctaggacaatattatggaggtcctcccatgccaggctaaggagtttatggtatatttaataggcattggagttgttgaaagttactgatcaggaggatgaaatcataagaattggccacatataattagatttatggatttttctagtcttatttgatattaygttttgtttgaaccaatcactgtatcataatgtaccaagatattggtcttaaaaattgttataggcaaaatcctaagctttcctttcaagattcttggcctctggttgttgactcaaacactaatctatgtacagttgtaaagagattttgcag

SEQ ID NO: 536867 - DNA, 564 bp, Homo sapiens
gatttctatcattataaagactcgtctagtgtgaaagttgtggtcaaaccagatggttaaatactgtgcatgaacgagatgatgaaagaacaattattcagattagcttttcttctggtgatactaattcctaattcacccagaaaacagaagttaccaatgtcaaaagatgactatagatattatgaacaattcacagcactgagcaaaaaagtaacataaccagtattagggtgacagcaaagaaccagcaaatgcaaactaatttttaaaagccttaaaattaagatataaagacattcytcactaacatttaaaaattacattcagcaagaatatattttctttgtatttgttttgattcttatgaagataatggcaattcttaaattcaaaggaggtcctttaaaaggagataaatctaaattctttaacaccaaagacagaatgacactgtagttggatgggtcctgacaagctttttgagtagtcaactagttgatcacagaaattacatctcctggcatcattctaaggtcctcctagtgttactacaaacaacct

SEQ ID NO: 536868 - DNA, 528 bp, Homo sapiens
acaaatttatcctcacaatgattctaccttataggtattattatacccctcatttcctacwtgggcaaacaaaagtttaaaggcattaaatagtgaggcacagcaaacggaatgtaggcaccatgaagcccagcatatactctaatccccacatccatcaccttcctgcggataccacatctgtgtattcgagcccccgcttatccaaagttttgctttctgcaatttcatttactcttggtcaactgtggtctgaaaatattaaaaggaaacttccagaaataactcctaacttctaaatcacatgctgttttgagtagcatgataaaatcttgcactggaatatgaatcatccctttgttcggcgtacccatgttgtctatgctacccaccctttagtcacttaaccatctcagttatcagatggactgtcactgaattgccgttcttgtgttcaagtaccctgattttacttaatcatggccgcaatgtgcaaaaatagtgacgctagcaattaagatatgccat

SEQ ID NO: 536869 - DNA, 524 bp, Homo sapiens
acaaatttatcctcacaatgattctaccttataggtattattatacccctcatttcctacttgggcaaacaaaagtttaaaggcattaaatagtgaggcacagcaaacggaatgtaggcaccatgaagcccagcatatactctaatccccacatccatcaccttcctgcggataccacatctgtgtattcgagcccccgcttatccaaagttttgctttctgcaatttcatttactcttggtcaactgtggtctgaaaatattaaaaggaaacttccagaaataactcctaacttctaaatcacatgctgttttkagtagcatgataaaatcttgcactggaatatgaatcatccctttgttcggcgtacccatgttgtctatgctacccaccctttagtcacttaaccatctcagttatcagatggactgtcactgaattgccgttcttgtgttcaagtaccctgattttacttaatcatggccgcaatgtgcaaaaatagtgacgctagcaattaagatatg

SEQ ID NO: 536870 - DNA, 642 bp, Homo sapiens
tgtaatcatcaatgatttcaaatttgccagtgtaaccacgcttcatcatcacagtgagaaaccagatgatggctctggagcacggccccataagaacctgatgtttgcctctctttttagcattgttattgctcttgagagcatcagccaggacaatcatgagcaccattatggtggcatggaaagatggtggaaaaaggacagaagtacatgtttaaatgagagatcatcttgcttctaaatgaayggtgatttgattgcctgtaggccgcctgctaaggagtaaaactttttaccttatattcataaagcatgcatgtaagacttctgggttttcaaaagggtcatcttgtattaaaaccttgattattcaccagacctttaaaaaaatggaagggtgaacttgatgacggtaagtaattagatgtaatggtcactaagcctcatagtcttagcttgtaatagtagtgaatcatgcactccatgagaggtcactaagactggatttaccagctaaaccttacttttctcaagtttaaagggaggagttgtacattgaaatcttcatataccataacctaattgaatagtgacataatacctacttctaaggactatatattcaaagtattatgaaatgta

SEQ ID NO: 536871 - DNA, 411 bp, Homo sapiens
aatgttgactatgaggaggaagaagaaagaaagaaggaaggaagagataaaacacacttgaaacagcagcaagatcgtggaaaaatgtctgcttttggccaccttcatcacctggctgtagcgaccttttctgtttacacacattgttcagagaataagcatctatagcttctgaaagtaaatgttttccctcatatatccccagaattcaaaacaacaartacaacttttaagttgcaaatcacaccttgcatactctatttaaattgtaacaagagagttttattttttctttttaatttgtgagttcatgttcgccaacttcctttgttattaggtgacaaggaaaagcttcatgaaaaaaattattgaaaaaacccaagtgtaactaatttcttaatttgtattctt

SEQ ID NO: 536872 - DNA, 411 bp, Homo sapiens
aatgttgactatgaggaggaagaagaaagaaagaaggaaggaagagataaaacacacttgaaacagcagcaagatcgtggaaaaatgtctgcttttggccaccttcatcacctggctgtagcgaccttttctgtttacacacattgttcagagaataagcatctatagcttctgaaagtaaatgttttccctcatatatccccagaattcaaaacaacaagtacaacttttaagttgcaaatcacaccttgcatactctatttaaattgtaacaagagagttttattttttctttttaatttgtgagttcatgttcgccaacttcctttgttattaggtgacaaggaaaagcttcatgaaaaaaattatkgaaaaaacccaagtgtaactaatttcttaatttgtattctt

SEQ ID NO: 536873 - DNA, 442 bp, Homo sapiens
atttcatattttaaattcgagttgcttatgggtctcaagcagaaataaatgaggactttgctacagaaggagcaaagtagactattagactcacctctactataaataaatttagaacatattcttaactattttttgtgcctattatagtcttttcataagtagggactgatgagaattggccacagtgactgttttatttcaaaggagcataactttttgtttgtaaataaaagtcaacttagaaatcatttaatttaccttcttaaattacatagatttgacagacagttaaacacacttaagaggttaataacattaaaactatagctagagagagccatataatactagtatctcattttgtaactaactasatagccaaaaaataacatgaaagatagaaaaaaatggtttcaggttttctaaatatacataatca

SEQ ID NO: 536874 - DNA, 626 bp, Homo sapiens
cagtgacaaagttttcctgcctacaattgctgaatgacgtagagtaatgtactcttacacattttctttgtgtaatgtcragtaatgtactattacacattgtgtttgtgagaaacaaacagaaacactgttcttcctatgataatcttaacaaagtcactctctttctgaagcttcttcatgatcaaaagattgaggtgattttttaaccatcacttgacatcacataattttatggtctgagcactccatatcgggcagagggggataaactaaatcactggaagacaaatgtggatttagacacaaattcctgaagaaacagaaagggaaagattttctccacacagtatttgtcaactgctatgaaatcctatatttctactaactcagggaaactttaatgatcagctggagcaagtacaaaaaagaagtgtttggagaagaaaactacatattaaagaacctattcttcttctttcagggcatacaaccaaaatttaagctaatatcatgctgcattttaaagatcctaagtaatacaaacctatttttacaatttgcacgttttatgcattcttggaagaaacttcattcacactgtacgtgctcacagcctgtactct

SEQ ID NO: 536875 - DNA, 634 bp, Homo sapiens
tctgccataaatttaaatctttttgatgctcggtgcttgtcattgtcaaattctcaaaccccattttcaggagactatacttttgtttttgctttgtcttttaagaaatgatgataatcctgtagtgctatttttaaaaaataataacaaaaattaaccaccagctttcctttctatagtcgttttaataaataaacagcaagacagtggaaaagtcctggagttagttacattggctgtgcttttgatgggtgacgataataaaatctgaacaagtcaagtaagatcatttcaatctacaaagctggaaagtatgcaaatcctaaaaaggggacaaagtgtataaacgtgtgaagacatagagcagtagagtggaagcagcttgaagtcagcactttggtagcctctgtccccaacaatctaggtggccttggtcttgtcacttaatttttctagccttagtctgcatattcatgaaatgcaaaggaacaaataaggtaaaataaaagtttcatcaaaattttgtttttctaataaaatataagaagaagcacccatcccaaataacttaaaagagacwatcctcagagagggcagttatgattaattaagtagaatttggaatagagacatg

SEQ ID NO: 536876 - DNA, 603 bp, Homo sapiens
gaaaacagaatttatatatttttgatatacattagatagatcgtaaaatccacccaagaaaaagcaggtcactttgtggaacttcgtggaaatgacccaacttcactgatacctctctgctgaatcatctgaatgaaaggaaacataaacagaagaattctcagcatcctcaattctagaagagaattctaatataatttcctagtagagactagccacagcctggactgcataataactacccttcaaaatcacccacttccgttttctttacttacttagctccatgttatcaaggtataattctgattataatttcccttttcatgcatattatttaatgtgaacaaagtcactaccctaacattaaggtttgtttctcagtcatactttaatttgctaagtatgggtcagttcctctgaaattacacaactctggatgttctcacaaaatcagagtcccaacattctaggaggagtgtaagactgtaccatggccctcatcaagtaaggccatyatgatgtattcaccatgtggtcaacaccatctcattttgtctttgatttggctttattgttaaaatgtcaaagaattaaatttca

SEQ ID NO: 536877 - DNA, 630 bp, Homo sapiens
tgcacgccaccacacccagctaattaatttttgtacttttagaagagaaggggtttcgtcatgttggccaggctgatcttgaactcctggcttcaggtgatctgctcgcctcggcctcccaaagtgctgagattggagccaccgtgcccggccccaatcaayttctaatgggatttccagagttgaaaaagacaaatattcagctttaggaagcacagttgagtcctgagcagtacaaataaaaatataggctgggcacagtggctcacatgtgtaatcccagcactttcggaggctgaggtgggtggattgctggagtccagcagtttgaaaacagcctgagcaacatggcaagaccccatctctacaaaaaatacaacaattatccgggcatggtggcacaagcccgtagtcccagctactcaggaagctgaggtggatcgcttgagcccgggaggtggaggttgcagtgagccaagatcacaccattgcactccacactgaatgacagagtgagactgtcttaataaaaaatatgagtcagcgtataagttaaaaggagttttaaaagatactaatccaaaagaaggcagaaaaggagaaacataatagacttaccagcccaattta

SEQ ID NO: 536878 - DNA, 630 bp, Homo sapiens
tgcacgccaccacacccagctaattaatttttgtacttttagaagagaaggggtttcgtcatgttggccaggctgatcttgaactcctggcttcaggtgatctgctcgcctcggcctcccaaagtgctgagattggagccaccgtgcccggccccaatcaatttctaatgggatttccagagttgaaaaasacaaatattcagctttaggaagcacagttgagtcctgagcagtacaaataaaaatataggctgggcacagtggctcacatgtgtaatcccagcactttcggaggctgaggtgggtggattgctggagtccagcagtttgaaaacagcctgagcaacatggcaagaccccatctctacaaaaaatacaacaattatccgggcatggtggcacaagcccgtagtcccagctactcaggaagctgaggtggatcgcttgagcccgggaggtggaggttgcagtgagccaagatcacaccattgcactccacactgaatgacagagtgagactgtcttaataaaaaatatgagtcagcgtataagttaaaaggagttttaaaagatactaatccaaaagaaggcagaaaaggagaaacataatagacttaccagcccaattta

SEQ ID NO: 536879 - DNA, 630 bp, Homo sapiens
tgcacgccaccacacccagctaattaatttttgtacttttagaagagaaggggtttcgtcatgttggccaggctgatcttgaactcctggcttcaggtgatctgctcgcctcggcctcccaaagtgctgagattggagccaccgtgcccggccccaatcaatttctaatgggatttccagagttgaaaaagacaaatattcagctttaggaagcacagttgagtcctgagcagtacaaataaaaatataggctgggcacagtggctcacatgtgtaatcccagcactttcggaggctgaggtgggtggattgctggagtccagcagtttgaaaacagcctgagcaacatggcaagaccccatctctacaaaaaatacaacaattatccgggcatggtggcacaagcccgtagtcccagctactcaggaagctgaggtggatcgcttgagcccgggaggtggaggttgcagtgagccaagatcacaccattgcactccacactgratgacagagtgagactgtcttaataaaaaatatgagtcagcgtataagttaaaaggagttttaaaagatactaatccaaaagaaggcagaaaaggagaaacataatagacttaccagcccaattta

SEQ ID NO: 536880 - DNA, 614 bp, Homo sapiens
ttgttttctggggatcactgctagcttttatgatactgggtattaaggaatacgcttttgaaatttagacaggaatagtggctatgatcttattttaactttcggttctgtcaaataatttaagtgatagttttattttagagcagtttgattttaccacctgaggaataaatcaagaaaaagggaaaattttaaatgggctatrtagggggatagcaggcttaactaaatcattagcactctagtgactgcttgtattgattctggaaagtaaagatgcaactaaattcacgttaacttcaaattattacccagaaatttatacctgtttttatatcttcattgacaaaataatgcaaatgtgccacttaaattctaatggggacctgactcctttttcaaggaaattactgcttattttgtgggtaaagtttgtgtgcaattcacagaatacattgccttagtaattattagagcatatggataaagtagaaaagtgggaaccatgagtggtcccatctggacctgtgggccatttaatcaaggtcacatgttatgtgatgactaaatctggaagtacaattagtaaatagccttgatgcccagttttctcc

SEQ ID NO: 536881 - DNA, 614 bp, Homo sapiens
ttgttttctggggatcactgctagcttttatgatactgggtattaaggaatacgcttttgaaatttagacaggaatagtggctatgatcttattttaactttcggttctgtcaaataatttaagtgatagttttattttagagcagtttgattttaccacctgaggaataaatcaagaaaaagggaaaattttaaatgggctatgtagggggatagcaggcttaactaaatcattagcactctagtgactgcttgtattgattctggaaagtaaagatgcaactaaattcacgttaacttcaaattattacccagaaatttatacctgtttttatatcttcattgacaaaataatgcaaatgtgccacttaaattctaatggggacctgactcctttttcaaggaaattactgcttattttgtgggtaaagtttgtgtgcaattcacagaatacattgccttagtaattattagagcatatggataaagtagaaaagtgggaaccatgagtggtyccatctggacctgtgggccatttaatcaaggtcacatgttatgtgatgactaaatctggaagtacaattagtaaatagccttgatgcccagttttctcc

SEQ ID NO: 536882 - DNA, 627 bp, Homo sapiens
gtaaaaatccataactgctttcccacatatatctacataagtctaggctatgactctatacacaggctgagaaatgaaacagcaatcaaccctgcygtgttcccagaacttaagatgaaagatattaactaaaagagtcgtcagaggcctcactcctcaacccctcaatcaaacaccatgtcagacaagcaatatccaccatatgccaggcacagtgtctgggtcctacaagggaaaatgtcttaactcctgcctcaaggatatgactggcaagtactaaataatcatacgagaaacggtaactcctgcctcaaggatatgactggcaagtactaaataatcatacgagaaacggtaactcctgcctcaaggatatgactggcaagtactaaataatcatacgagaaacggtaactcctgcctcaaggatatgactggcaagtactaaataatcatacgagaaacggtaactcctgcctcaaggatatgactggcaagtactaaataatcatacgagaaacggtaactcctgcctcaaggatatgactggcaagtactaaataatcatacgagaaatggtaactcctgcctcaaggatatgactggcaagtactaaataatcataca

SEQ ID NO: 536883 - DNA, 608 bp, Homo sapiens
ataagtggagtatattatttcaagtgagtaaaacttttgaagagtgaattgttcatattctgggttatgtatgcatttgttacggtcaaggaagcttgaagcttcaaattcataaataaattacatcaaatgcaataagaataccacctactggacactttataatatgcattaatagtatatttatgactttatttaatttctaaaatggccctatgaagttatttttagaattttcattttacctatgtggaaactgagccacakagaagatgcccaaataacagtatttctgcagaaatcaaaacccaatttgcctgactccaacatttacactatatatattttatacatatatactatatatatatataacacatatattacactgtttaatataattacagtctcacatagggatgaattcgattattcagataattaaaatgttttttaaaagaaaataatattcagcatatttcttcgttagttatatgttaaaatacgaagatacacatcaaactactaaatcaactaagactaaatgctcttttgtatataactcccttattagacctgaatgttacagaattgtaaacttaatttgg

SEQ ID NO: 536884 - DNA, 608 bp, Homo sapiens
ataagtggagtatattatttcaagtgagtaaaacttttgaagagtgaattgttcatattctgggttatgtatgcatttgttacggtcaaggaagcttgaagcttcaaattcataaataaattacatcaaatgcaataagaataccacctactggacactttataatatgcattaatagtatatttatgactttatttaatttctaaaatggccctatgaagttatttttagaattttcattttacctatgtggaaactgagccacagagaagatgcccaaataacagtatttctgcagaaatcaaaacccaatttgcctgactcyaacatttacactatatatattttatacatatatactatatatatatataacacatatattacactgtttaatataattacagtctcacatagggatgaattcgattattcagataattaaaatgttttttaaaagaaaataatattcagcatatttcttcgttagttatatgttaaaatacgaagatacacatcaaactactaaatcaactaagactaaatgctcttttgtatataactcccttattagacctgaatgttacagaattgtaaacttaatttgg

SEQ ID NO: 536885 - DNA, 608 bp, Homo sapiens
ataagtggagtatattatttcaagtgagtaaaacttttgaagagtgaattgttcatattctgggttatgtatgcatttgttacggtcaaggaagcttgaagcttcaaattcataaataaattacatcaaatgcaataagaataccacctactggacactttataatatgcattaatagtatatttatgactttatttaatttctaaaatggccctatgaagttatttttagaattttcattttacctatgtggaaactgagccacagagaagatgcccaaataacagtatttctgcagaaatcaaaacccaatttgcctgactccaacatttacactatatatattttatacatatatactatatatatatrtaacacatatattacactgtttaatataattacagtctcacatagggatgaattcgattattcagataattaaaatgttttttaaaagaaaataatattcagcatatttcttcgttagttatatgttaaaatacgaagatacacatcaaactactaaatcaactaagactaaatgctcttttgtatataactcccttattagacctgaatgttacagaattgtaaacttaatttgg

SEQ ID NO: 536886 - DNA, 565 bp, Homo sapiens
catcattctcactcaaatcaaggactccattttgatggcaacatatgccactttccttcctgacttcagaggatagctatgactatactttctgaggatgttgttcctcagggggaactgttctgaggataaggtgttccttgtacaattcatttgtcaaggtctttgtgaagggaatgtgctttgggcctgggagatgtggcatgtgataggttcacttcaacatttcratttccctaagtcttacattctctcttatgtataatgctatacaaagatgtttccaacatcctcactaaatgattttaggactaaatgagtttaggtttcaggtaattaactgactacatgatgaaatttgatacaggtctggaagaaaatagggtgtggaaggagaagaattggcatgtttttacaaggtaatagcctcaaatggggacattatcaggtcttcatacaaggtagaaccagcctcatcagtcaggcagaggatctctgttgactggagaggtttggtaggatttgggggtgctatgtactcaaaaatatgaatgttcccaattgt

SEQ ID NO: 536887 - DNA, 637 bp, Homo sapiens
caggagcatcttgggcacagtgacagaaatgtacgccatgtccatgagagacaattgactgatgaaaaagtacatggggctgtggaggtgggcgtcacagtgtatcagaaggatcaggacagcatttccagacaacgccttcaggaaaaccacaaagatgaccacactaagtagagctggatgtttggatcgtctgaagagtcccatgaggatgaaatccaacyttccagtgtggttggccatcctggtgatgttggccatgaggtttcacctaggccaccaaggagagttttggagtcagtgtaacgcgtccctttgtaatgagtgtttcgtgagtactcacatttgtgtatgctcattgtgctaacctgagtcccgtgggtctggggatttgagtatataaatgacatataacaaattcacaaaacaaactaagaattcacaactataggccagaagaattggtaactgatagtaaggttgtcacggttcaaattcataaactttcctgatgataatgccatttatcaacaagtactgaaaatttgcagaacctccctcctctgctaacacaaacagtgactcattgaaagaaagataaagcaaactccttattgtagagtttttgtcatagaca

SEQ ID NO: 536888 - DNA, 475 bp, Homo sapiens
aagatgaccacactaagtagagctggatgtttggatcgtctgaagagtcccatgaggatgaaatccaactttccagtgtggttggccatccwggtgatgttggccatgaggtttcacctaggccaccaaggagagttttggagtcagtgtaacgcgtccctttgtaatgagtgtttcgtgagtactcacatttgtgtatgctcattgtgctaacctgagtcccgtgggtctggggatttgagtatataaatgacatataacaaattcacaaaacaaactaagaattcacaactataggccagaagaattggtaactgatagtaaggttgtcacggttcaaattcataaactttcctgatgataatgccatttatcaacaagtactgaaaatttgcagaacctccctcctctgctaacacaaacagtgactcattgaaagaaagataaagcaaactccttattgtagagtttttgt

SEQ ID NO: 536889 - DNA, 475 bp, Homo sapiens
aagatgaccacactaagtagagctggatgtttggatcgtctgaagagtcccatgaggatgaaatccaactttccagtgtggttggccatcctggtgatgttggccatgaggtttcacctaggccaccaaggagagttttggagtcagtgtaacgcgtccctttgtaatgagtgtttmgtgagtactcacatttgtgtatgctcattgtgctaacctgagtcccgtgggtctggggatttgagtatataaatgacatataacaaattcacaaaacaaactaagaattcacaactataggccagaagaattggtaactgatagtaaggttgtcacggttcaaattcataaactttcctgatgataatgccatttatcaacaagtactgaaaatttgcagaacctccctcctctgctaacacaaacagtgactcattgaaagaaagataaagcaaactccttattgtagagtttttgt

SEQ ID NO: 536890 - DNA, 525 bp, Homo sapiens
ctgcagtggctcacacctgtaatccaggcactgtggggggccaaggcaggccagtcccttgagtccacgagttcaagacaagccctgacaaaccttatctctataaaaaatacaaaaattatctgtgtgtgatggtgcactcctgtgatcccagctacttgagtggctgaggcaggaggatcgcttgagtgagggaggttgaggccgcagtgaaccaagattgtaccctgcactccagcctaagcaacagagatcctgtctcaaaaaaagaaaaaaaaaatagagtcaagaaaaggcatgatgatcataatattaataaataataagaatactcactatgttcatatactagatataggatcacgycatttaacaacagcttttgtcatataaagtgatcaaatgtagatcaaccaatttttcaaaggactgacagaaacatcagtgtttcttcatgtaaagacttcagtaggaattctattgtgcaactacagtcatcaggtttacgtttatataagtatgttg

SEQ ID NO: 536891 - DNA, 564 bp, Homo sapiens
aattacttttgaatcagaacatgaaccagagcattttgtttcatgtaaataatcagactccacaaggtattcaaagaggaggtaaaacactattgcctcaaatgtctatgataaaaggataagaacgttttcaactcctagatcttatcttactgtaggatcccagaagaggagagtaaaaaagctgaaacaggagaaagatatgattttagccacctcatttttatacaaccgagaccgtgttaaaaaaaaaaaaagaggttccttgtgagtgtgagcrttgtgtgtacatgtgtgtgtagtgtgttcatatgtgagtgtgtgagcatggtatgtgtggtgtgtgcatctgtgagtgggtggggatatgtgtagggaaaaggccctgctaaagagcagaactacactgcttggcacaaacgagcaattcacctcatttcaatgaagccaatatttagaaccaaatgtgacatgttcaaatgcatgcctaatgttattccataggctactgggcattgcaagtagacagggaaaatatctgcattatggacaaaacatgtcatc

SEQ ID NO: 536892 - DNA, 543 bp, Homo sapiens
aaagaaagaagtacatctggtttcctggagcattgagagtaaaaggtctaaattccaagctgccagcaggagggctgtgatgtggatgtgcaggggaatgcttctgggcagcagtgtcagttcgtgtggtggcaaatagaaatcaaaggatctggcatatggcccatccagtccaccctgctaacgctgtggaagaggaaatggagagtaagggaatggaggattacacaggagcagcagaggcgaggtgaggcgaggcgagcccatctagtccaccctactaatactgtggaagaggaaatggagagtragggcatggaggattacacaggaacagcagtggtgaggtgaggtgagctgaagcaaggggcagacacctgcaactataaacacaatgcactcattattatacccctacagcctgagcttccaacatgtccacatctccccctgggctccagttactcagctcaacaggcttttatatgccatgctaagatggcttctaggagacctctaatagttttattaaaaaaaaagatc

SEQ ID NO: 536893 - DNA, 543 bp, Homo sapiens
aaagaaagaagtacatctggtttcctggagcattgagagtaaaaggtctaaattccaagctgccagcaggagggctgtgatgtggatgtgcaggggaatgcttctgggcagcagtgtcagttcgtgtggtggcaaatagaaatcaaaggatctggcatatggcccatccagtccaccctgctaacgctgtggaagaggaaatggagagtaagggaatggaggattacacaggagcagcagaggcgaggtgaggcgaggcgagcccatctagtccaccctactaatactgtggaagaggaaatggagagtaagggcatggaggattacacaggaacagcagyggtgaggtgaggtgagctgaagcaaggggcagacacctgcaactataaacacaatgcactcattattatacccctacagcctgagcttccaacatgtccacatctccccctgggctccagttactcagctcaacaggcttttatatgccatgctaagatggcttctaggagacctctaatagttttattaaaaaaaaagatc

SEQ ID NO: 536894 - DNA, 543 bp, Homo sapiens
aaagaaagaagtacatctggtttcctggagcattgagagtaaaaggtctaaattccaagctgccagcaggagggctgtgatgtggatgtgcaggggaatgcttctgggcagcagtgtcagttcgtgtggtggcaaatagaaatcaaaggatctggcatatggcccatccagtccaccctgctaacgctgtggaagaggaaatggagagtaagggaatggaggattacacaggagcagcagaggcgaggtgaggcgaggcgagcccatctagtccaccctactaatactgtggaagaggaaatggagagtaagggcatggaggattacacaggaacagcagtggtgaggtgaggtgagctgaagcaaggggcagacacctgcarctataaacacaatgcactcattattatacccctacagcctgagcttccaacatgtccacatctccccctgggctccagttactcagctcaacaggcttttatatgccatgctaagatggcttctaggagacctctaatagttttattaaaaaaaaagatc

SEQ ID NO: 536895 - DNA, 439 bp, Homo sapiens
aatacattgtgtaggggtgaggctaggtcaaaaagtcttttcactaatagagtcccacatcccccaggaagaattcctgggttagcaattaatccaagttgactgrgtttaccatgaactttagaagcagcctgtcctttcttgcagagggtgcattgttttcccaagtgaaggactggaatcgtttcttggtatttcatcatgaaaatgtcttactgaatcttggcatctctccagagagattttaaaggcagtgatgtggggataagagcctcgctctaaattgaaaattagattttaaatttctttagaaatagaggctatgacaaactaaaaaagctctttctcaaaagtcactggcctcttgtttggggagaaatctttaaagttataaataagtgtgaaccaaaaagcattggagccaagtctcaatcaatgt

SEQ ID NO: 536896 - DNA, 439 bp, Homo sapiens
aatacattgtgtaggggtgaggctaggtcaaaaagtcttttcactaatagagtcccacatcccccaggaagaattcctgggttagcaattaatccaagttgactgggtttaccatgaactttagaagcagcctgtcctttcttgcagagggtgcattgttttcccaagtgaaggactggaatcgtttcttggtatttcatcatgaaaatgtcttactgaatcttggcatctctccagagagattttaarggcagtgatgtggggataagagcctcgctctaaattgaaaattagattttaaatttctttagaaatagaggctatgacaaactaaaaaagctctttctcaaaagtcactggcctcttgtttggggagaaatctttaaagttataaataagtgtgaaccaaaaagcattggagccaagtctcaatcaatgt

SEQ ID NO: 536897 - DNA, 472 bp, Homo sapiens
tatgtggatgagaatgatcttgaccacgttgctggctatggaggtcacaaagaccaggagaatgagggcaaagaagccaggggaaacgggcgttgctgaacaaacccagaaggataaagtcggcatacacggaataattgctctgctccatagctctgtagggtacacraaagagatatgataaagttggaaaggtatctgatttacataaaacattatgatgtagtcatgaaaccaaggtcaaaatcttatttcttgaagctcataatttccctgagagaactgcctgagcaggattgtgctacatctcattataccatcattgttcatttaaggattttcttgatttggtgattactatttagagttcatgatcaaacaatctttttgttcatgaccatttatttctgtctttcgagtaccaccttacattggtgaggatgcatataagacataagaatggaaccagcct

SEQ ID NO: 536898 - DNA, 472 bp, Homo sapiens
tatgtggatgagaatgatcttgaccacgttgctggctatggaggtcacaaagaccaggagaatgagggcaaagaagccaggggaaacgggcgttgctgaacaaacccagaaggataaagtcggcatacacggaataattgctctgctccatagctctgtagggtacacgaaagagatatgayaaagttggaaaggtatctgatttacataaaacattatgatgtagtcatgaaaccaaggtcaaaatcttatttcttgaagctcataatttccctgagagaactgcctgagcaggattgtgctacatctcattataccatcattgttcatttaaggattttcttgatttggtgattactatttagagttcatgatcaaacaatctttttgttcatgaccatttatttctgtctttcgagtaccaccttacattggtgaggatgcatataagacataagaatggaaccagcct

SEQ ID NO: 536899 - DNA, 472 bp, Homo sapiens
tatgtggatgagaatgatcttgaccacgttgctggctatggaggtcacaaagaccaggagaatgagggcaaagaagccaggggaaacgggcgttgctgaacaaacccagaaggataaagtcggcatacacggaataattgctctgctccatagctctgtagggtacacgaaagagatatgataaagttggaaaggtatctgatttacataaaacattatgatgtagtcatgaaaccaaggtcaaaatcttatttcttgaagctcataatttccctgagagaactgcctgagcaggattgtgctacatctcattataccatcattgttcatttaaggattttcttgatttggtgattactatttagagttcatgatcaaacaatctttttgttcatgaccatttatttctgtctttcgagtaccaccttacattggtgargatgcatataagacataagaatggaaccagcct

SEQ ID NO: 536900 - DNA, 472 bp, Homo sapiens
tatgtggatgagaatgatcttgaccacgttgctggctatggaggtcacaaagaccaggagaatgagggcaaagaagccaggggaaacgggcgttgctgaacaaacccagaaggataaagtcggcatacacggaataattgctctgctccatagctctgtagggtacacgaaagagatatgataaagttggaaaggtatctgatttacataaaacattatgatgtagtcatgaaaccaaggtcaaaatcttatttcttgaagctcataatttccctgagagaactgcctgagcaggattgtgctacatctcattataccatcattgttcatttaaggattttcttgatttggtgattactatttagagttcatgatcaaacaatctttttgttcatgaccatttatttctgtctttcgagtaccaccttacattggtgaggatgcayataagacataagaatggaaccagcct

SEQ ID NO: 536901 - DNA, 207 bp, Homo sapiens
ctgcattatgcaggctgttaagatagagatccagtgacaaatagagcttgcatcatggtgatggctagtactcccattcaggagatacattgacatcactgtctctggggtccttgtccctagcctgcaattacagttcatataaaatgtgacaractccttaagaaaaatgtaacctctcaatttacaaagtaaacacccaagata

SEQ ID NO: 536902 - DNA, 609 bp, Homo sapiens
gggcaaggatcaaaaactaactattgggtatatgctaggtgcctgtatgatgggatcatttacaccccaaacctcaccgtcacaaaatattaccagctaacaaacctgcacatgtaycacctgaatctaaaataaaagttgaaaaaaatttaaaaattaaaaaaattaaatacatacatgagtgggtattttatagatgaaacaacagaaaatgtacagccttcctcaagtgtttccatggttattgatgcccaactggtgactccatttaattgtaaaagttccacttttccctgaaaaatgtatttttaagtgtgctaaatgaagagtttgacagtattcaggaacagttcaacagtaacctatgtttttagttttgacaactaagtttttgtctagtctttcctttgttagttcagttaaaagtatttacctctgtactcctggattatgcttaattcatttccttcaatcaaatcttcttaaagtaaacatgccaattactcatacctccaccaaaattcctaccttccaatcccattcgatttaattattttgatcatcttacctaattccctgtaacttagaagatatcacatttgtgggaac

SEQ ID NO: 536903 - DNA, 268 bp, Homo sapiens
tgtagtctcagctacttggaaggctggggcaggaaccttggggattgcttgagcccaggggttcaaggcttcagtgagctatgactgtagcacttcactccagcctggcgacagarggagatcctgcctcaaaaaaaaaaaaaaaaaaaaaaaaagataaatactaatgctagctatcattttaaaaactggtaaaaaccttaaaaggacatgtttatctctatttgcccttgcagagaaacagtctcataatcacagggtattacat

SEQ ID NO: 536904 - DNA, 633 bp, Homo sapiens
tgcttaccggtagagctggtgtgagattctgagtcctttagtttctaatggaattccaagaaggtgactccaaacatgtttggggaataggaggatgattgcaggcaacatgtatcctcccaaaatgaggacatgcagggcaacactttaggaatttatggcgccagacagcctgggtgggaatcctgacrccaccccttccaggcttggtgaccttgagcaatcttataaattgattcacaccaatcacagggcattggtgatttatgtgatagctatcccagttgaacctacttttaaaaagagaatacggccaggcgcggtggcttacacctgtaatcccagcactgtgggaggctgaggcgggtggatcacctgaggtcaggagttggagaccagcctggccaacatggcaacatcccgtccctactaaaaatacaaaaattagccaggagtggtggcaggtgcctgtaatcccatctacttgggaggctgaggcaggagaataacttgaacccaggagatggaggttgcagtgagttgagatcgtgccactacactccagcctgggcgacagagcgagactctgtctcaaacaaaaaataaaaaagagactgcctagaaatctttagc

SEQ ID NO: 536905 - DNA, 633 bp, Homo sapiens
tgcttaccggtagagctggtgtgagattctgagtcctttagtttctaatggaattccaagaaggtgactccaaacatgtttggggaataggaggatgattgcaggcaacatgtatcctcccaaaatgaggacatgcagggcaacactttaggaatttatggcgccagacagcctgggtgggaatcctgacaccaccccttccaggcttggtgaccttgagcaatcttataaattgattcacaccaatcacagggcattggtgatttatgtgatagctatcccagttgaacctacttttaaaaagagaatacggccaggcgcggtggcttacacctgtaatcccagcactgtgggaggctgaggcgggtggatcacctgaggtcaggagttggagaccagcctggccaacatggcaacatcccgtcyctactaaaaatacaaaaattagccaggagtggtggcaggtgcctgtaatcccatctacttgggaggctgaggcaggagaataacttgaacccaggagatggaggttgcagtgagttgagatcgtgccactacactccagcctgggcgacagagcgagactctgtctcaaacaaaaaataaaaaagagactgcctagaaatctttagc

SEQ ID NO: 536906 - DNA, 623 bp, Homo sapiens
atgaaggacactttcaatctgtaccacagattgatgcaagtcctacttgggaygccccaacaataataaaaaatactatctttgcacaatttgcaaactttactgtacttattttgtggaaattatgcattagcctgattctctctcaactatatgacttgtactccaggggtgattataagagaaccatgagtgtttaaggaaacaccaccaatagattataaggtgactatggtgatctcttcaaatcaaggctacccttacttagctgagctttcaggaaggaaaagtaacttattaatatacaacctatagacagttatccctatgaagggagtcatccaataagaaagtggtaaaaaaattgttcttgacttcagataaagtcattaataacatcacctctgccctgaaagacattcaggtacacttcaacttattgaccaagattattacagacaccaaactgccctagactttctccttgtggacaagacagagtctgcacaatcactagaaaatttagctgtacctggattaatgctttggaccaagaggtaaggtcaaaataacaatttatggagaaacctgcatggctttctaaggtagactctgatgttttt

SEQ ID NO: 536907 - DNA, 606 bp, Homo sapiens
gtttttgagaattacaacctataaataactgagtgcaaaattactccagtatgtaccttcctctcagttttgtgcgtacatgtctgtattaagttggtgagcactttgtggatacagactgatttttacatagtctccttaaagaacacctagtcaagtttacatgagtttaaaaggcaatctttaaagcttcctctggattttaaatactgtaatcctgtgagatgctgaaggcacaactcaattttaacagtattattttttcaatagttgtggaaggaatgtattcttccttcagactatgtctaatttgagaaatgtttgggaactgaaaacaaaacaaaaaagacattttccaggatttaaaatccaagaaaaagtaggtgaagccaatactatgctttgttatctcaaattgcattagctgaaagttttaattaacatctatcacattttacatttaaacaacagaaattcaaaacatgtatgtatttgctaaaacaatgattgctacgtaaatatactcaacggaactaacaaacaacagaaatatgtttttaaaggtggyggtggcagtcaaagtagcctgacaaaaattactcatga

SEQ ID NO: 536908 - DNA, 610 bp, Homo sapiens
tcgtctctccgcgcctgcctgggtggaatgtgtgcaggaactccaggagaggcaacccatcctgggacggtggggattgtatccaaatgcagtcttccaggaaagggtttttcctcgagatttagtgccgcaggkgcccagagttgggactacttccctttcagttacaaccctggtttttactgccgtcttcagagcttcattgagtgccaactacaagtgtgcttctggtaccaattggtatcactgcccaccagatcttcagctctctttttcaaacaaaagggggaaaatgcaaataattggaaataaatgttcggtgctctaaattcaggagaggcttcttccaccacttaattgtgcccgtgacatttcatttcgaatgcagaatttattttctctctacttcagcttggcaataaatggctacccttccctttagcagtcacttccatccacgccaggaccaccttacagcaaccttaatgctgttctctcatgagcccttccactatcccaagcagtgcttaaaggcaacggggaagattaccactgcagacctgctgccccagcatgtgatctgagagccctttgcaaattagctccttat

SEQ ID NO: 536909 - DNA, 585 bp, Homo sapiens
actaggcattcatatccttcagtgaattgaattaatatgaaacacaaacaatcctaattcaatttcagactcctcttttggcttttcatttgctttggtgtgttcaagggaccaaagtagcaatcacaaaagactccagagatcagccctgtaaccagagacggaggagtcatacttacatcctcccattttggatctgcacttccagccagccaaattttcattaacattagcagaaatgaatctcaaagaaccaagattcaatgaaatggacctcagtgtgagcttaaaccaacccccttttctagaatgaacagtcwtcattcctctgaagtccccggcaatcctccaacttggtcccaaagcatctatagatagccacagacggtccccagacagcactaacattcacggccagaaagacaaggaagagctgcttttatcaggatggcactagagggccaacaaagattgatgcacctccctctgctgttcaaagtgcgactgcaggcccagctttcacctccacgttcagatctatcaaagtcttcacccagccttttctcatgacttgactccttgact

SEQ ID NO: 536910 - DNA, 595 bp, Homo sapiens
tttgacagaggagtgaacgttaaatccctagcgggcaggagcccgagcaccttttttgcacacagtaggaaatgcaaaaatgtctgtgggagtaaatgaagtggaaaagaattgcaaagagtgtatgagattctgtttattgtaatggaactacaaagcaaaacattccctgaaaaattgctatccctgaccctggtctccacaaatatcaatcatggaaacatctgatgatasattaatacatcacaaccgcctcttaaaagtctgaatttctgagactctggaaagaaaagttcacgaaaccatgcctatgttccaaccagcagctgtttctgaggaattagtagtaagaacacaccatatttgtgactctgatgcagaccaaacctttggatggcccctcacctgcccctgagttttccacctcaaaatccagagggctctgcactccatgcctcaggaaccgtgtagtttcaggtccatttgcatctggagctcctcctggaataatcaatctgtgcttaccgagagatggtgcagtgtgtggcacctttagtatcagaaaggtactagaacagaatgcggcctagggcct

SEQ ID NO: 536911 - DNA, 476 bp, Homo sapiens
tctgatgcagaccaaacctttggatggcccctcacctgcccctgagttttccacctcaaaatccagagggctctgcactccatgcctcaggaaccgtgtagtttcaggtccatttgcatctggagctcctcctggaataatcaatctgtgcttaccgagagatggtgcagtgtgtggcacctttagtatcagaaaggtactagaacagaatgcggcctagggcctgacatcacacaactctagatgcaccatctgcacagagrgtgttcacataggcatatgccacatgaccctgcctgggatcataacctgacactggatctgccgggctgcatgttaggtgctggagatatcaaaattaaaatgtctaagtcttctgagctccaaaacttcaaatcatattttttaagttaaaaaatttagtgcatgacttcagagtggtcttcaagacaatgaagtgactaaaccctgcagac

SEQ ID NO: 536912 - DNA, 416 bp, Homo sapiens
ggaaacacaaaatagtcacgaaggctcttgtttcttacatttctccagcctccaagaacacagccatctcatctcctgtagccaccccaagacccaagaactgtggcaccatcagtctgaytttcttcattgcactctctgcatgggtattatgggatggattctatacgattattgagtgcgcacctaccccatgcctattacagccttgtactaggcactgtgaagggatcaaaattattcttttccctcaaatggtcagaaaggctaactttatctttggtagagtagagatctactcacagagaaaagaaaatagacccaggaggatggaaaaaacgaaccatggtccaagacaaaccaagcacatccacccttttaagccataatggctataaaaggagttttgagggagg

SEQ ID NO: 536913 - DNA, 365 bp, Homo sapiens
cctatagtgtaaagaagcaaataatcttctagaatgatttgatttcatacttacttcaaaatacccctatttctaggttcttttccaaaggaaaaacaatggctatgaatttaagacagttgtctacatcactcagaaggagtgtgcccctaytggaaatcaacaaactttatttataagactagttgtgcttttggatcactttaatccttacaacccaatcaaatctggattacctaatgaaattgattatatttgaaaacttattgtggaattctggtgaaacactccccctttcttcctttctgctccaagcatttattgagcatgtactatgtctcaggcgtggtattaagaaccttata

SEQ ID NO: 536914 - DNA, 542 bp, Homo sapiens
tgggactacaggggctcaccaccacacctagctaattttttgtatttttagtagagacggggtttcaccgtgttagccaggatggtcttgatctcctgacctcgtgatctgcctgcctcggcctctcaaagtgctgggattacaggcatgagccaccgcgcctggccttttgtgtcttttttctaagcccaagatatactgccaagtctctctcctctgtctatataagcgcacatgcacacaacatgtaatgtatgtagtyctgtaccctgctttttcacttaacctaacactttgatgtcaaagtgacttttttttctacaatgagaaattccttctttttatagggaatactcttaaaccactggaaaaataaaagagcatcataggagacagtaataacttcctaggaaatatcattttacactgacctttcccatataataagattaatttttagtatttgaattgtaaagaggttatgataaagactaaaactaaatatttcctgtttaagtcataaaaatataaagacaatgaaa

SEQ ID NO: 536915 - DNA, 629 bp, Homo sapiens
gtgtgatatctagcttgctggaagagaatataattatgtttttacctaataggtaatctctgtgttatccaagagttctgtatggggaatatgaattatccatgtaccacattaacaaagcattcaattgcacttagcttgtgttcttcttttcaaatataagtagctattttaaatgcctacgcttgttctctctttctttttagttgtaagaatatctctgccacttacctaatttttgcaaactttttatttttgtgcatatatttgtgtacatatacacaaacacatgcacacatacacacacattctaaagcactcaaggaggcaccttcataaacttgccttgcayggttgttggtttatccgtcaaagaaatcattaccaagagaatgccgtgcttcacatgcttactaaattttttaaaaatgcttttcattatatttatgcaaacataacttggctagctcataatttaccaaatttaagcatttgtcagggttatttccaatcactcagaaaaatgtgcctttgtgtattttgattatttaaagcaatattgtttccattatgcatatctgttgccagaacagcatgactgtcttgactgaatgaggaagtgggaatgc

SEQ ID NO: 536916 - DNA, 625 bp, Homo sapiens
gattcaatcaaagggctttgcggttaaaaggggggtgtggtaggatctagttgggggatgatgaaaactttgtttattcaacaaatatatattgagaggcaatctgctgttccagggctgtgctagtgytgatgctgatgcttcatggaagagcttggaggaggagattagcacctgttctccccgccccacccctcccaaatatcaacgcagagctccaaacttttgtttctcttctctagtgtttatgagggagaccttctagtcctgtcattttttttccctaacacaaaacacattctgaggagctggagaccagtcctgtgtcaattcccctcagtactgcattctcctggattgcaaagctgatttcctttcagtagctcattaacattcacagctagtgtctgcttccactttcgtagtctcctgatgaaatgctgactgcaaaggtgagggctgctgacactgtttgccgtttggtttcttccaggatttttttcccaggaagccatcccgtcagaggggttcaagtgatgaaagttggcaaactgcagctacatcaaggcatgtttccccaagcaatgaagaatctgagactggtgagtgtgccaagatctcacat

SEQ ID NO: 536917 - DNA, 632 bp, Homo sapiens
ttctaaaaagagtgtactcttgaaaacagtttgcccatataagtctctttattgattgagcttttcatgctaccataagctcatctcaattatttctacccaggaaaattactactcctgccatccagcctttcagtgaagtatgctttgctatgtgatatatcatttagatttttttattaatttaaacgttttgtgtcaacagaaggtagatcattattaactggtgcaatgtggtgtctcacaaaatacatacatgtcatagaaaagtaattaactccctcattctattgcagaacagatgtgtaactgaataagaactgggacccaagggtacactagtgcatttatttatttattttgtagtcattaaattgttgactgagagacttcattgctagtttctcaaacttcattcrctttttcctctcaacacccctcacccccacatgattgaaaatagatttagaactattacccaaaattataaattgatttttggctcattgtagtgattcaagccacagataggctctcttttcagatgagatgaaggtttgatgacttagggagctgcgaatacataagatatatgggggatttttgttgaaaaccagaagaaggtttagcag

SEQ ID NO: 536918 - DNA, 520 bp, Homo sapiens
tatctcctcatacacacacccactgccccagcctcagaaggagagtctcaggatctgttttctgtggttcgtggtgctctgcccctccctttgtttctgccctggcacacttgagtgatatttcttcttcccaaaaacacagactgactctggcagtggttctcatggggtcgttctataaacctccttcaacgggcacatgacagtctccagggggatgtctagagtatgaaaatgtccctcgttcctcacccttatgtcatccttcacactggccctgctttcatgtaacttcctagggtggttcttgtctctgacacccgttgaaagtctcatggatagtgaacacctggttttgaatagtgtcttctaagagtgcttaccctttgactagccacctgaaagcagcactgtccaacaggactttctgcaatgacatagtgaactgttctgtatctgggttgttgagtgtggtagccacagccgcatgcggctrttagcttcttggaatgtggctgct

SEQ ID NO: 536919 - DNA, 583 bp, Homo sapiens
aaatggtatccaagttttaaagacatgaaatataacaagaacatatataaaatttctattcggatcaaaaagttcaaatatgtaaatatgcataagaacatgtgaaaaaaatttagggctttagtaaatagcaaaatttaacaacatttaagagtataatataatcttastactgtgatcttgggctgcattaatattgattataaaatgatagagatgatagtaccagtctgattatttctggaattttctattcagtttgaggtgggaagtattaaaaaggatatagaaaaacaaactagttttgaggggtggaactgaaattaaggagggatttgaaacgctgtctatgatgagatggaagatactaggaaaacggaaaacagtcaactctggaagcaggaggtccctgctcatgggctcaaagagcctttatgtgcagaggagtagacctgttctgtgtggtccctggcagcggtattggggcccatggataacccagccagagttcagtttcaactggacaaggttttactgaaaacggactgtgtgctgggtaccttgctggtcatcattcacctga

SEQ ID NO: 536920 - DNA, 583 bp, Homo sapiens
aaatggtatccaagttttaaagacatgaaatataacaagaacatatataaaatttctattcggatcaaaaagttcaaatatgtaaatatgcataagaacatgtgaaaaaaatttagggctttagtaaatagcaaaatttaacaacatttaagagtataatataatcttagtactgtgatcttgggctgcattaatattgattataaaatgatagagatgatagtaccagtctgattatttctrgaattttctattcagtttgaggtgggaagtattaaaaaggatatagaaaaacaaactagttttgaggggtggaactgaaattaaggagggatttgaaacgctgtctatgatgagatggaagatactaggaaaacggaaaacagtcaactctggaagcaggaggtccctgctcatgggctcaaagagcctttatgtgcagaggagtagacctgttctgtgtggtccctggcagcggtattggggcccatggataacccagccagagttcagtttcaactggacaaggttttactgaaaacggactgtgtgctgggtaccttgctggtcatcattcacctga

SEQ ID NO: 536921 - DNA, 583 bp, Homo sapiens
aaatggtatccaagttttaaagacatgaaatataacaagaacatatataaaatttctattcggatcaaaaagttcaaatatgtaaatatgcataagaacatgtgaaaaaaatttagggctttagtaaatagcaaaatttaacaacatttaagagtataatataatcttagtactgtgatcttgggctgcattaatattgattataaaatgatagagatgatagtaccagtctgattatttctggaattttctattcagtttgwggtgggaagtattaaaaaggatatagaaaaacaaactagttttgaggggtggaactgaaattaaggagggatttgaaacgctgtctatgatgagatggaagatactaggaaaacggaaaacagtcaactctggaagcaggaggtccctgctcatgggctcaaagagcctttatgtgcagaggagtagacctgttctgtgtggtccctggcagcggtattggggcccatggataacccagccagagttcagtttcaactggacaaggttttactgaaaacggactgtgtgctgggtaccttgctggtcatcattcacctga

SEQ ID NO: 536922 - DNA, 583 bp, Homo sapiens
aaatggtatccaagttttaaagacatgaaatataacaagaacatatataaaatttctattcggatcaaaaagttcaaatatgtaaatatgcataagaacatgtgaaaaaaatttagggctttagtaaatagcaaaatttaacaacatttaagagtataatataatcttagtactgtgatcttgggctgcattaatattgattataaaatgatagagatgatagtaccagtctgattatttctggaattttctattcagtttgaggtgggaagtattaaaaaggatatagaaaaacaaactagttttgaggggtggaactgaaattaaggagggatttgaaacgctgtctatgatgagatggaagatactaggaaaacggaaaacagtcaactctggaagcaggaggtccctgctcatgggctcaaagarcctttatgtgcagaggagtagacctgttctgtgtggtccctggcagcggtattggggcccatggataacccagccagagttcagtttcaactggacaaggttttactgaaaacggactgtgtgctgggtaccttgctggtcatcattcacctga

SEQ ID NO: 536923 - DNA, 663 bp, Homo sapiens
tggttcctcactcttggctagcgctgcactgattcttctgcctcatcctccctttcgacactcaggctgccctgctcgggccactcttaagcacagaaactttacatgggtccaccacatccataaagaagaccacacacctacacgggtgtctgttctgcacgtattttgcaaccttctcttccccacatctaccagggcctctttgaggcactaacttacaccttaagtagctggcagtttgactgactttaaacaaagaggcctttcttgtaagtgaggccaagtcctccaccagaatacagtccattatgtttgggaaacgtttggttatatttacatggtgtttggcaggtcacaatctctttaagtgtgtgctgtgttcttaygctgggtgacaaatttccaagcctcccttggtttctcttccctggcgtgtgttgagttgctttttggtggtatttcaagaaatccaatctgcattgatccacttcacatgagtgaggtacgaatcatttgcttttaaagctgtagttgaggaaaaggctataaataaaccagaaccaacaaagttgagagaaatgggcaggttagatgttgtcatactttgcctttttcccctttagctcaggcagaggtaaaaataaggaatgtatgcaaata

SEQ ID NO: 536924 - DNA, 642 bp, Homo sapiens
gtggaccaaccccacttattccccgtctaccttgcttggctcttgagccaccaacccaggccaggacataagaaataccttttgtgggcctagcacagtggctcacacctgtaatcccagcactttgggaggctaaggtgggaagataacttgagcccaggagttcaagacagacctgggtgacacagcaagacttcatctctactaaacataaaaaaagtagatgggcgtggtggtggttggtgcctgtagtcccagctatttgagaggctgaggcaggaggatccctcgagcccaggagttcgaggctgcagggaaccaccacatgctccaacttgggttaagagtcagtctctgtctcttaacaacaacaaaaaatccagtcawggtggctcatgcctgtaggccttagcactttgggaggccaaggtgggcagatcacttgagcccaggattgggaccagcctgggcaacatgatgaaaccctatctctaccaagaaatacacacacacacacacagaaaaaaataactcggcatggtggctcaagcctatagttccagctactcagaggctgaggtggaaggaaggatcacttgagcccatggaggtcgaggctacagtgaaccatgttcataccac

SEQ ID NO: 536925 - DNA, 593 bp, Homo sapiens
tatttgaaatgggagcacttacttaaaggtcactaggaaaccaagattttttctgctgccttactctattttgctagataaattgtaagcagaactgtctcctggtgggatgatgagcccaaccagctctgcgttgttctcaattttaacaatctaagcagaatgtttcccgtttctaaagttttcatcataaccaaactatgttgtcctcaggaagatttgacagggaactgaagaagtgtgtgcgtgcgtgtgcgtgtgttcattcccatttttaattagttgaaacctaacattgctgtatgttacctgtgtcttgcttctccagacaagcagaaaaatgggtttcccccagagtgaatgactgtctgtttgagttcatgtttaatcaaggaarggagttactgacttcataatcacataatcccgtctgcagtgttgctatgacatacggggagaggcttctgggcatgctacgatgggctgtaaagttggctgagagataaacaatgtagctattgtgtttgccttggactgtggcgttcaccacatcacaggatgtggcacttcttctctgccttctccccagagga

SEQ ID NO: 536926 - DNA, 416 bp, Homo sapiens
gctggcttcacctctcacgaggtactctgcagacttctctgtatgcctcatctcatttctctctacaaccatatcaaagttagggttactcttactgccgttttacagatgaggcaaygggagctttcaagagtatagccctaacctcttcactatgctgtttctatagtgataagagtaacagatagaccttccctatctttttaaagaattggagtgtaatttgcattcagtaaaattcaccctttttagtgtacagttctacaaacttggataaatgcagtctgtgaccacaaccaccaccaccaccatcaagatagagaagcgttctatcaccaccactcccaaattccttcgtactgcgttgtatccatgtctataccccactcccagcacctgctaacccaaatcttctt

SEQ ID NO: 536927 - DNA, 457 bp, Homo sapiens
ctggcttcacctctcacgaggtactctgcagacttctctgtatgcctcatctcatttctctctacaaccatatcaaagttagggttactcttactgccgttttacagatgaggcaacgggagctttcaagagtatagccctaacctcttcactatgctgtttctatartgataagagtaacagatagaccttccctatctttttaaagaattggagtgtaatttgcattcagtaaaattcaccctttttagtgtacagttctacaaacttggataaatgcagtctgtgaccacaaccaccaccaccaccatcaagatagagaagcgttctatcaccaccactcccaaattccttcgtactgcgttgtatccatgtctataccccactcccagcacctgctaacccaaatcttctttctgtcactaccattttaccttttccacaatatcatatacat

SEQ ID NO: 536928 - DNA, 497 bp, Homo sapiens
ggcttcacctctcacgaggtactctgcagacttctctgtatgcctcatctcatttctctctacaaccatatcaaagttagggttactcttactgccgttttacagatgaggcaacgggagctttcaagagtatagccctaacctcttcactatgctgtttctatagtgataagagtaacagatagaccttccctatctttttaaagaattggagtgtaatttgcattcagtaaaattcaccctttttagtgtacagttctacaaacttggataaatgcagtctgtgaccacaaccaccaccaccaccatcaagatagagaagcgttctatcaccaccactcccaaattccttcgtactgcgttgtatccatgtctataccccactcccagcacctgctaacccmaatcttctttctgtcactaccattttaccttttccacaatatcatatacattaaccagccatttcatttggcttcttttgcttagccatgtta

SEQ ID NO: 536929 - DNA, 544 bp, Homo sapiens
tggaaatgagttaaaattcaattcgactagattaccatgtgctaggttaagaygagcaatacttggtacctgcttttgggaaagttataatccatcaagatagagaaatacatggataacagataataatgcaatatgatatgggctacaggatgttctgcctgctataaaatcacagagaaaggagcaaccaatccctagggtcaggagaagggtcacagcagccttctccaaagatgttcacagatattttctaataggtacctgggtatatatgttcaggggagaggtggagtgtgatcttcaaggacatcttagaacaagaagactgccaggaaacaaagctgaaaggcctttaaaacccagtttcttggtatcaaacatgtagctgaggtcatccctgggtttcttcagaaggtgcttgagaactaatgtctgtagttttcatttcctctagcacttgactatgcaaagagctctatcaagtaaattacagaagacagaccccacctgttcagcctgaggtgctcaggtgccttcgaat

SEQ ID NO: 536930 - DNA, 441 bp, Homo sapiens
gaaaagtagccaacagctttaagacaaggtgcattatcttaatctcccaaaggaaatagtcaaaggaaagagaaaatgaggcagcttgagcaagaaggctgagaactgatgggaaaaatcatgagtttcaaatctggagatgactagtgaccttggagagagcaggtatagtaaaatgtttgccgtggaagttggccacaaagagctactacataactatatacacctaagaacatgcaccttgttagaaagaaggctcagtgtcctaaggaraaatgggcacttagataaaggattttttgtaaagcaaatttacttttgtgcagaagggtgtctcccatatggctggttgctactagagtacttagaacaaaggagagtagaagtttttatttttaacgtgacttttgcctttgtgtcttttccccagtggtggggttg

SEQ ID NO: 536931 - DNA, 512 bp, Homo sapiens
acagacacatgccaccatgcccagctaatttttttttttttgtatattttgtagagacagggtttcaccatgttgcccaagctaatctcraactcctaagctcacgtgatctgcccacttcagcctcccaaagtgctgggagccactgcgcctggcatgagccactatgcctggctccaacccaagtttagaatttattgtcatttggtcaggaatcacttagtttagaaaaacctcatgaactacaacattgcaatgtgttaaatatgcttgcataccttccttcttttcaaccttacagagagtagttaaatgctctattcttccacatgcacatatctttgtttctgctgcctttgagcaggaattgaaggatgctcagcttgagcagcttttccataagacataggggtttcctgtagctgaacacaaagggcatttactcaggccagttccatgtgttaaccaggccaggctgaatggaagtcccatagctccttagctgcaggtat

SEQ ID NO: 536932 - DNA, 512 bp, Homo sapiens
acagacacatgccaccatgcccagctaatttttttttttttgtatattttgtagagacagggtttcaccatgttgcccaagctaatctcgaactcctaagctcacgtgatctgcccacttcagcctcccaaagtgctgggagccactgcgcctggcatgagccactatgcctggctccaacccaagtttagaatttattgtcatttggtcaggaatcacttagtttagaaaaacctcatgaactacaacattgcaatgtgttaaatatgcttgcataccttccttcttttcaaccttacagagagtagttaaatgctctattcttccacatgcacatatctttgtttctgctgcctttgagcaggaattgaaggatgctcagcttgagcagcttttccataagacataggggtttcctgtagctgamcacaaagggcatttactcaggccagttccatgtgttaaccaggccaggctgaatggaagtcccatagctccttagctgcaggtat

SEQ ID NO: 536933 - DNA, 519 bp, Homo sapiens
cacctttaaaaaaaatgagtttatgctaataaggtgactcctggtgggctcttacacggttgggaggcaagggagcatatgggggtaggagagttgtggggggcaaaccagaaagacctcaaatgtgattggagggttggaactttcagccggacctctgacttctggtgaggggagaggaaccggaaattgcatttaatcaaatggctaatgawgtaatcaatcacacctatataatgacatcccatataaaaactctggatacaaaagaccaggggagctttctgactggtgaacattatatatatatagggagagcagcacacttcaactgcatgggagcagaagcttctgtgcttgggatcctccttgactttgggctctgtacctgttcgcctggctgttcatttgtgctctctatagtaaaatagcagtcatcagtatagcgttttcctcagttctgcaagtcattctcataaattatcaaacctgggaaggaatgaaaagctccacatttgt

SEQ ID NO: 536934 - DNA, 485 bp, Homo sapiens
atcttttttttttttttgtatagatggggtctctctatgttgcccaggctggttttgatctcctggccttcagcaatcctcccacctcagcttcccaaagtgctgagactacagkcatgggccaccacacccaaccttctctaaacgaaacctcaaattaaaatgaggtcctttctgaaggcttagagattgggtgcacgagggaaaatatttgatttctctctaggccttacctttgtggggatttaagttctacttattcagcctcagaaatctctctcaaagcgtggccttccccaccatccatacaaatttgaatcttcagcatctgtagccttgactactcacaacctctccctaacctcagcacctctaatctcagtctcttctcccattctcttgctgactaccctccatgctgctgccaagggcatgttttctaaaatgcagtactgatcatgcagggtaggcctactgttctaaca

SEQ ID NO: 536935 - DNA, 554 bp, Homo sapiens
ggccagctgtgtgattggggtcactcccttaacctctctgttctttaggttccttccctaaatgtggagctgaaataatcacatatatctcttgggcacacataataaaaacaaatgagataatgtctttggagggatttgagttccttgaagataattaccataacatacacaaacactctgcgtgtgtgtgtgtgtgtgtgtgtgtgtgtgtgtctatgcatgwtatcagtataacaaaggcagaaactgtaaccccccaaaaatgtaattctactccacccattctccttaacataaaagccatttctcctccacagagcggctgtgaaaattactgctaagttactactaatgctcccaacagattgcatttggaaaaggatgtttcgtgtcctgcagctagaattccatgtgtcctatgggaatgacccaggttgggctcaggaaagacctcagacatgttttccaatggccaccatcaaatccctgttgtgtattcttttccctgctaatcgctgtagtgtttaattgttaaagccatatgtgtttca

SEQ ID NO: 536936 - DNA, 628 bp, Homo sapiens
aggctcatccatgttgtaacatgtgtcagaattttcttcctctttaaggttgagtaatatcccattgtatgtatatatggaacattttgttgatctgttcatttgtcaataaagacttgggttgcttttattttttgctattgtattaatatataacactgctatgaacatgggcgtacaaatatctgtttgaatctctactttcatttcttttgtgtatatacccagcagtggaattgctgcatcatatggcaattctatgtttaatttttggaggaatcaaacttgtgcttttaaaattcatacattcagcaaatgttcattagactcctattatgtgccatgcagctatgycagaggtggggaatgaatgaacaggatgcactgccttccaggctgtctcatgtgtgagtagttgttgttgctgttgttctttctttagatggtgataatgatttactgtggaatcattaactctcttccccagccttcttgagactatgtagtgtataataagcatgccctcatcatcccaagcttcattaacttgaatttctgagccagagcctcaagctagatgcaaacattacattgtcatgtcatgactcaggctatctataatacaacc

SEQ ID NO: 536937 - DNA, 631 bp, Homo sapiens
ttatgaattagacattcaactgcagtttgtcctaacctgccttgtgttaatcattcatttaatgaatattcactgagaccgattacgtatctggtgttctacaaggcactgcgcatattcagaggcatattcatctttgtcacagctcttaagaagcacacagtccacttctggggatagatgtgtaaacaagtaactatactgggtggctgacaaatgctaaaatagccatttgtatcaagtcctagcaatatgctcaaaacacacaggatggctgggtggtggctcacgcctgtaatcccagcactttgggaggcagaaacgggtggatcacctgaggtcaggaatcaagaccagcctggggaacatggtgaaaccctgtctctaytaaaaatacaaaaattacccgggcatggtggcgggtgcctgtaatcccaactactcaggaggctgagacaggcgaatcgcttgaacccagaaggtggagattgcagtgagctgagatcacacgactgcactccagtctgggtgacagactgtctcaaaaaaaaaaaaaaaaccaggccaagcagtgattgattctacctagagataagagaaaattttactagaagatggcagtggcattgca

SEQ ID NO: 536938 - DNA, 632 bp, Homo sapiens
ttgctgtcatgcatagactgggtggtaaaagggagcgccacctagtggcctgcaagtcatttggtcggtgctgccctccaagggagagcagggctaaggaaaagcaaataggatttaaacttctcagccttctacgacctgccacaaaccagcacagtacctggttttatagaacagagtgatggttccggctccttccatgccagcccctccctagtcaggactggtgttaaactttgtctttacaagcctgtgcttgcaatttctagctttgccattgccactgacatcygcttaaaatgaaggctttgggggcctggatatacctctctccaaatggccagtcatagaaggctttgaaaatctggcctttgatgtattttatagggataaggagccatatattaaagtgagctctgctgcacactctaggccacataactgggtcaatactaaagttgtaatttcatcttcagtttttgagaagcttaactgttctagctttcctgttgctgatgacatcataggaagtcactgatgagctgacaaccttttatgatctagctgaggatacattactttttgtctttctccttcagtgtataatgaataccattgcttacataaatgtt

SEQ ID NO: 536939 - DNA, 653 bp, Homo sapiens
ctgccttggctctgacagagtgttagctaaacctcatatagtggtatagtgacaggtgatataaacagtatctggtgtgattatacagtgaggctggtgaagggagctggtgcatatatgagttactgttagaggatttcttagtctcaggaggaggagtgatggctggaggaaggggaagggcagagaaaatcatcatacttcctggctgatgtaacactttgtggatgtccagcctgatgactttgtatgaaaagccggactgctgttgttctttagataggaaaccaggctaaaaagcccatgtgctcctctctgtgcctgttacaatattttatcccttacaactttattgaaaaataatttatgtctaataaactacattaacttaaagtatctagttcaatgagttttgagagtcataagcattagtgaaaccaccatcatgatatggaacatgtctatcaccttcaccaaagattcctcatgcctttgtagtccttctctccttcctcctctgaccccagaaaaacagtgatatgctttytgtctatttgcattgtatgcaaatacagcatacaatatgcatttctttcgtgtatctgacttctttcactgagcagtgattctcagattcctccatgttggtgtgt

SEQ ID NO: 536940 - DNA, 531 bp, Homo sapiens
ctgctggtttctgtcagtgataacagaattctctcaggcactcaggtttggtatctttaagatatctttacctgttccttcttcttcacctctgaccatgccagtaaacagattatgcttcttctacctgtcttttatttcttgcaacctacagtcatccaggatagtgagrtggattcctgacaagtctttctacctctggagcatatgcttcaccaaaccatcatataaatcactaacagcttagtcctttcaaacaggctttatattcctatctcatttcttgtaagacaagttcaagcttcttagcagatatgtaggagcctccacataatcttattctactgatctgaacttatcccctcttatgcccgtgtaagaacattttatggcctggtgcggacgctcacgcctgtaatcccaggactttggggggccgaggtgggcggatcatgaggtcaggagttcaagaccagcctggccaacatggtgaaaccccgtctctactaaaaatgcaaaaaattaattacc

SEQ ID NO: 536941 - DNA, 450 bp, Homo sapiens
gccaagtacttaccctagtcatatataatccaactgtatggttatttggtattcattccacacttcattttacttgatctcccttaagattgcaagattgtgtttgcagtttttctgaaaatctggggctataaaagcatcaggacctcccccgtaggggaggtcgtgtgtttggggtccttacacaacaggttacccttgagcttcaggaaaagaactggctcycagttccccagttccagcttaatgggtctaattaggtcctgaccaaaaaggtggcagttcttttccctcatgtctcttcagcgctccccgagactctggagactctgtcatatccctagggctgagcctcccaggaaccattcggctgttgtggcatctgtgtatgccatgcccagtgctgaggacctagtaacaaacgacaaatgcacaggcacagtggcattt

SEQ ID NO: 536942 - DNA, 459 bp, Homo sapiens
atatagtaaaatattatggttgaaatagtacttgaaacattctgacattgggtataccagtgaacctcattatgatcctagggttattctactcatatttatattcataagtattataaacatgccaggcactctaaaattgaataaaataaatgactccataatgtaaaacaaaattattgggaatctgtttattgtagcttggtataaccacataacatctagcaagaaaatcatggaataaatgaactagacaggcaatcagctaccagctttggcctaccataaaccaaggagaaaagtaaaaataacgttaatcattgctaaggctattgtgaataagtaaacaagcaaacatactaacaaaattaggcyaggtgtggtggctcacagatattatctcagcacttgcactttgagagtctgaggcagaaagatcgttttagcccaggagtttaa

SEQ ID NO: 536943 - DNA, 428 bp, Homo sapiens
ctgacattgatcgagtctcttgtctgtgcttatcttgtcatgggaacaaattttccggcttatatatggcagcagtcctaatcaatcatggacccaggctccttggcttcccagtgtttgatagtggtggaaaatccattcatagaaacttggaaaggtggaagaagatgacattaaatagaggaaagactttactcagtatcccagatttttgataaagtaatctaactcttgttacacagaagaaggcacagagatttggcacttcttgsagaaataagtcactaaaaatttggaggaaatcagaaatgcaaagcctgtttatgatggctagaccaaggtcaacgcacttcaaataaatcttgtactgacttcttggtgcaagtttcagagaatgaagtggggaaaagatatttatcttccttact

SEQ ID NO: 536944 - DNA, 503 bp, Homo sapiens
tgacactagacaagaacaaaaagacacttgtactcaagcacccccactgacatgccgcagagactggcamcttgtcggggaggcaggatggcgagaaagccccacctctgaagttcagaagcacaaggcctgacgatgactaaggatggaccggacaatggcaccttccccctcccccaaaagacttccccccagaagcctctcattgagtaacaaacaacagcagtctactgtggggaaataattaggaacaaataggcacgctgagcattgagagaagggcgattaaaatgtgtccattgaatacgctaagaaagaaaagacaatgtcagagataaagaattcctttgacaggcatgccagaaagctagacaccaaattgatgtgcctagaggaagaaaatggaggaagctgaagacaggtcaatagaaatttttcaaattgaaactcagagagaaagaaggaataaaatggaacaaaaatccaagagccgtgtcaaaagg

SEQ ID NO: 536945 - DNA, 503 bp, Homo sapiens
tgacactagacaagaacaaaaagacacttgtactcaagcacccccactgacatgccgcagagactggcaccttgtcggggaggcaggatggcgagaaagccccacctctgaagttcagawgcacaaggcctgacgatgactaaggatggaccggacaatggcaccttccccctcccccaaaagacttccccccagaagcctctcattgagtaacaaacaacagcagtctactgtggggaaataattaggaacaaataggcacgctgagcattgagagaagggcgattaaaatgtgtccattgaatacgctaagaaagaaaagacaatgtcagagataaagaattcctttgacaggcatgccagaaagctagacaccaaattgatgtgcctagaggaagaaaatggaggaagctgaagacaggtcaatagaaatttttcaaattgaaactcagagagaaagaaggaataaaatggaacaaaaatccaagagccgtgtcaaaagg

SEQ ID NO: 536946 - DNA, 660 bp, Homo sapiens
tttataaccatgccaactgaattcaaagggaaaatgataaccttttccacaaatgttgcaatatgcaaacatttgcatttagttggaaaattagaaggctatatgcaaaaacaaaacaccctgacctttatctcataccatactaaaattatcttaaaatgggttagatgtttgaagttaccagataaaactacaaattgtctaaaagtaaacatgggagggaatatctgtgacaatatggtaagcaaaggtttgtcatgtcattcataagttggctggcttcagaattaaaaagtagtacttatctaaaaacagttaagaaaatgaaacaaaccagagactgggagaaaatattttcaaaacacatacctggcacagaagttctatctattatacatttaaaaactcttataagtcaacaataagacagacaatctgataaagagatggcaaaatatttgarttgctacttcaccaaagaagatatatgaatgggaatttgtacatgaaaatatgctcaatatcttcagttacaagtgaaatgccattaggatcaaaggaagataccactacacagacactagaaaggctaaaattaaaattctgagagtaccacatgctggcaggcttgtgtaggaattggggatgcaaaatggtgca

SEQ ID NO: 536947 - DNA, 660 bp, Homo sapiens
tttataaccatgccaactgaattcaaagggaaaatgataaccttttccacaaatgttgcaatatgcaaacatttgcatttagttggaaaattagaaggctatatgcaaaaacaaaacaccctgacctttatctcataccatactaaaattatcttaaaatgggttagatgtttgaagttaccagataaaactacaaattgtctaaaagtaaacatgggagggaatatctgtgacaatatggtaagcaaaggtttgtcatgtcattcataagttggctggcttcagaattaaaaagtagtacttatctaaaaacagttaagaaaatgaaacaaaccagagactgggagaaaatattttcaaaacacatacctggcacagaagttctatctattatacatttaaaaactcttataagtcaacaataagacagacaatctgataaagagatggcaaaatatttgaattgctacttcaccaaagaagatatatgaatgggaatttgtacatgaaaatatgctcaatatcttcagttacaagtgaaatgccattaggatcaaaggaagataccactasacagacactagaaaggctaaaattaaaattctgagagtaccacatgctggcaggcttgtgtaggaattggggatgcaaaatggtgca

SEQ ID NO: 536948 - DNA, 555 bp, Homo sapiens
ttcattctgtttctgtcttgctagaccatccacacttttgaaacctactgctcaaatttttctgtaaagttttcctaaggcttgacactctttcttctgttcagatgtaacagtgaattgcaactgcagcacctacttccttattcwtgaacattttattaataactttgatgctggtgaggaggagggaaagatgttcaattaatatttcataaaattgaaatctattcttttcttcaaaatgtgcatcataaaagaaatatgaagggagaagattccccacattaaccctcccactcctccttcttaagtgttcctcatgttaatttgttaataatagcagtgtctggagaaacctattagcgctttaacagcttagtggaggactctcactagagaaaatggaatataaagatggaactaacatcttgccacagaatcctacaatttatggacaaaatttgtaataaatatttgaaaagactgtaggattaccagaagtagccagatattggatctcctatagcattttttctcattactttttgtacctag

SEQ ID NO: 536949 - DNA, 446 bp, Homo sapiens
tggggaaagaagtaagaatgtgggtgagggggactctctgggctgttctctgttgggttaactggaaccagcagtgactagggatgacaatatggccaatattccacaatcagaatagactcaggtgctccagaaagaaaacacaaggtgtggagaaagaggcaaaaagcctgggcattgttgcagaatcatctagaagaaggttggcaggaagtccttcctcaacagactgaggtagaaatgtagaagaagaaggtgtccgtaaaccctctctgcagtcaggagtgaattgaagtgcaaggttcttagtagccttacagatcatcaggccctagaagcccctgccttacttggcattaattaaccccttagtttctgggtcatggggaaamctgggggcaacagaccttaataaaccactctagaaatattttagcattttaaca

SEQ ID NO: 536950 - DNA, 665 bp, Homo sapiens
ctgttttaaggggcaatttgaatcactgtagagtcagcataattgcttgtaagaaatgtacaagcattccagaaaacagaaaaatcctgctacagattatctgaaggttgccatggaccactgcctctgcggggattcgtgtgtatcttctgcagccagatgtctgtgttttcacaatgtcatggaagaaggaagtgcgatggctgaatcaggtgggaagcagccctaagtattcacaatccaccacacattttgatggttcacagggactttgtgaatcaaacgtgatttgaaaaacatttgtaaagctgaattagagccctcaaattttatttttctaggaaaggacaaataattaaacaacatctttggagtttgctgtgacttctgtacatctaacaagctgtactttcacaraagctttgggggggtgcccagttattaaaaccaattagggccttattttttggggaacaaaaacttacattccttagagccaaaggagaatgccccggactaagaaccacatttgcggcactaatttcatcagcgtttctgtcttcaggaattcaaggtctaattttgcttatctaacaagtaagacatgaaagaataaattggctcattactgggtcaattggttaaaataataattataaataata

SEQ ID NO: 536951 - DNA, 528 bp, Homo sapiens
tggtcaactttcctctgcttcagtgaagaaggcaaagctctcagactgttgccctttcttctgtaagaatgtgatgagaaggacttaaacctgtgatgccaacatctacactaggcatatttcaaatatctcattcaatttccttagcaatggcagcctcactgcctgtgccaggtaggggagattgggagcaactattccttatgaatactcctttagggaatcctcytgtgttttccttatttctaacagtttgatctctcaaacatatgtacggccatttctctgaagctcccttgtagcatattctgagcagtggctctcatgcactgtcttccctcaacatgctctacttaatgtgctttcataggtatgtttattacctgctggtctctaacctccttatctatcttacttgctttgctttttgtgtctattcttatataaatactagtatatgtttgtgtgtgtgcctgtgtgaacacacacaagtatatatatgcatatatatagtgcatattttatatg

SEQ ID NO: 536952 - DNA, 479 bp, Homo sapiens
taagccacaagcaataaagtatggccactcacatctagaaacacatcttsaatgcagaatcagtgcccagcagtcacaggactgaaaggaactttcatgacttttcttctctgtcaacagtaataggtggatctttgggatttctggtcatttaggccactcagtaactggatcccagtttccctaataatgtgttgcatttgcaaagtcgacccccagaataatctgcttcttctagtcccactgtccagtgtgccatgagatagatacctgctcttcttgtccttttttgtcttcatagataatgtttatgtatacactgtatataataaagggagattttaccagtgggttaggattggcacagatcatgctaaaactctttccataatttagcagatactctcagagcacctctcacatgccctcaatcctttgccagttaccagtcgtgcatacagtttcagatgtgcttcttt

SEQ ID NO: 536953 - DNA, 599 bp, Homo sapiens
ttaaagattaggaaatggagcccacggaggttatccattccataagccacaagcaataaagtatggccactcacatctagaaacacatcttcaatgcagaatcagtgcccagcagtcacaggactgaaaggaactttcatgacttttcttctctgtcaacagtaataggtggatctttgggatttctggtcatttaggccactcagtaactggatcccagtttccctaataatgtgttgcatttgcaaagtcgacccccagaataatctgcttcttctagtcccactgtccagtgtgccatgagatagatacctgctcttcttgtccttttttgtcttcatagataatgtttatgtatacactgtatataataaagggagattttaccagtgggttaggattggcacagatcatgctaaaactctttccataatttagcagatactctcagagcacctctcacatgccctcaatcctttgccrgttaccagtcgtgcatacagtttcagatgtgcttcttttcaggacagtcagtccccaactctgtccgaggacttccctcaagatccagaacttcagcttttctcgtgtatgcagac

SEQ ID NO: 536954 - DNA, 389 bp, Homo sapiens
gaaaactacgatgtgaggtaaaaaaaaaaatggtkcacacccaggagaggcacattgagtgcttggatagttcataaggggcacataagaaataggaagaatctgagaatgctgggtgaaagaggtggcatttgaaaaccacaaagctttgaatacctgtgatggggatcgggaatcttctagtttctgtttcccagttattttcagaataaaggatatacttttaaaagtggtaagagagttagcaactgaagccagaagagatctgtatagtctgtacctttcccccatcaaatatccattttccactttactctcatattaacctcacatttagctgagcactcttctcccctgaaataaagaccacatttgtcagccacccttgc

SEQ ID NO: 536955 - DNA, 441 bp, Homo sapiens
taaggaaaaacacactaaatcttttcacgtacytagaactctatgaggggctatacttaaacagatactatccctaacttcaacagcctattatttaaaaacaatgctaagccttgaacaaatgtaaaaatagcatgggtttaaattttgagtggagaaacactataaacaatacggctgtttttcaaaacagggtgagttttacattttctctagagtgcagtcatgcattaaaagtatgcttggagccccgctagtccatgcaggtaatattctgcatgctttgtggccccacgtcgcaagagcactttccaagaaaatattcataaggcaagttagagcaaaagggggatattgtcaaattcctttcttttgcaaaattcccactcctccccttttcagtcccaagttggctaaatgaggagagggcatctcccgggg

SEQ ID NO: 536956 - DNA, 510 bp, Homo sapiens
ctatttttaaataattgataatctgaattttattggctttgtttgtatttactttgtataagaactatgaggctatcaagattataactagttacgttcatgcatatttaaattttattaaaacaaaaataacttgagaagacattaagatgttagaatcatttttaaactccttgtctgaattttagatattgatgagtgataccagatataaaaattaggaaattaaactttttaaacttcttcccacttccctctcccaaacttctgttttgtcgctgttagttttgttatcttgtcttttataatatatttatgtcctattcagtgatcataaaccttgtggtcattttcttaattctaatttacattgttcacttytcaccacccacctctttcttttacttcaactttttcattcttgaatttgtcagatgagaccactattcaatatataagataaaaagacaaaactgaagttactgctttataagagacaactgtgctgat

SEQ ID NO: 536957 - DNA, 629 bp, Homo sapiens
ctgggggtctttttagaaacatggtgtcccaggtctctgttccattgcatcaggatcttcagggatatacgttttcaagagtttcttaagcaattgtgaggactgscaaggtttaaggactgactttactcccagagcaagaatcccagcccagcatgcacccatggcaactcactttgattggcctgtccattctccttttgtatagagtcaaagtcagaaagatcttactaaaactgaggttccttggaacttctgcccattcctgtaaattctactctgtggcactatagagagaaagggtaattctgcttccagagaaagtcttcagataatgagaagattgttgttacgttcttgctctcttgcaacaagacttccaggtccttgccatagatgtactttttctctgcatatgctcagttggccagcgttcccctttaatgtattgtgtccagtacaaaatgctgccttaaaaatacagaatgtggtacagtctatagggatacttactttgtaccaaaactggaagtagaagttcagaaattagggaaaaaagaaaagttgaggatgaatttgaccttcccaatgcttttccgaattatacagacctggctgggtgactccgc

SEQ ID NO: 536958 - DNA, 400 bp, Homo sapiens
agactcaagaagaccacactccccacagcttcttgcccatgctcctcacctgagaggggccctacctgctctagtcacaagtccacagatggtacctttttgagagtttagagacattgtttggtgacctggaagtggaggtcaaagcaggcattttagtttcagcccagagattggagtgcttgctctggacaggacaaaggcccccaaaggcagaactgagtggcaagtgtggagagtgcaccagcagtaggtgctggaattagactctctctcatcgcaggacaggaaaggagagtagctgaagccaaggtttctcccaggcagcaagacttgcagccagagacagctttktgacctggaaccagtctgtgtatgccactactggatgccccagcct

SEQ ID NO: 536959 - DNA, 587 bp, Homo sapiens
ttttgtgtccactatagttgagaaccactggcctcatggaaaggttgctcagtctactttactcatgctggtccctgaacatgccacatgcatttccatgtattctctaatacctctggaggcccgtgctatactttccactttcagactcagactacgaaactcctacttgtccttccaagcccagttcaacttctacctcctccatgaacatttccctgctcactccaagaagtctatagaaaaaggtacccacgttacttattgtcactagccatgcatttgtctcaccacatgtaacagaacattcctccaagacaaggattttctttatacccccaaagagattaagaccatgttatgytctggtgattgctaaataaatagatgccgcagtaatatccaaataaggtcaatgaacacaaggaagctaactaagcaaaaatgagagtaccttccaaattaggaactgtgacaaggaggtgtccttctaaaaaaaataaataaataaaataaagaatatttcatccatgaacaagcatttatgcctttatgtacgtataagtcctaactcagtagtgacagga

SEQ ID NO: 536960 - DNA, 583 bp, Homo sapiens
gctcctgaagagagtacaatcatgatcctgcagtctttttccattttctcttgaaatcctactgactttaataggaaatagagagactggctttaaaataaggcccagcatggctcccaagtgcctataatgaccccgtgcggtgaacaaaatacaaaggtctgcagggcaatcccaatgagaatcaaagtataaacatagcacttgctacagttctgaggttgtgtgtgtctgtgtgtctgctttgttaataaagcaactctgggctcatgacccttcctgccgatgctccataccctgaggaatgccatggggacacttgggaagaggccaagaaggaacagaagcaagggagcctgtgtgtgaggccagcagcatggagcagggccagaggctcagccrggcactccagagccctccctgtcaactgtcccagaggagcaggctatgggttgcaccgcagagaacccctggatcttaagggcccctctccagctcttacccttgcctcacctcctttggggaaggagacctgaggattcccagcttcaagtgtctatgggaggcatgcaccacacctgca

SEQ ID NO: 536961 - DNA, 577 bp, Homo sapiens
cacagcatggacacagacctgttcagagaaagactggcaggggaatacctttgtagcatgagtacaagaatggccaagagagccccactctgccgaggaggagctttgagaagccgtctttggagcaggagtggaatctctcaggcctaggtaggtggatccccaggcagcaagcgcagccacttggcatgagctaagaacagagggaaccagagaagctggacagaaggtggctgaagagcttcactgcccaccactggcaggacctacctgttcctgtgtgccttcctgtgctccacacccccaaccctgccccatctccaattttcaatgacatttcaaaaatgtttcaccagtggagcccattctacacatgactttttcctggagtaaagaataataaaaagttaacctaaccagatgagtatagctggcacttgggtyactattatttattttatgaatgtggacgctgaggcaccaaggtgtttgaggctactaagtggtagggccggctggaatttgaacctaggtatgagcccacaaacccaaggttattttgccttcctcctgacca

SEQ ID NO: 536962 - DNA, 539 bp, Homo sapiens
gctgctgctgtctgagcttcaatggtcaagtgtactgtggagccacacagccttgagttctaatgtccaatgagcgtttagaccttgggaaagctacttctcygagccttagtttccgtatctactaaatggggctggtgacacctgtgtgataaggtggttgtgagaatgagggatgtacccagccaagccacatgtaatgctcagtaaatgtctgtctcctctgctccatgcgtgagcacccaatttagtagaatgcccttccccctgcagattcccctacaacagtagttcccaaagtgtggttctcagaccagcagcatccacatcacctggaacttgctagagatgcagattctcaggcctaccccagatctactggatcagaaactgtggggtggggccctgcagtctgcgtttcagcctgtcctccaggtgattctgatgcagacttgctgttctgggattttctgcttcaatttcgaatagatgacaaccatctagtcctttctcctgagaggacgtgaaagtgaaagtga

SEQ ID NO: 536963 - DNA, 612 bp, Homo sapiens
ctgtgggcatttaccaggacactcatgagatttttactttgttggctaagaggaagacctcatgtgactgacagggaggctgactttggtggggaagggagaacaggtgcttctgaggagagctagtctgggcagggctgtgaaaagagaggtgtgggtagagaatataagctcatctggggtgcacaacaaaatggggaaggacacagaaggacaaggagaagggcaggtcttagccacttcattgttctttcttgttcaaggtctggtcacaagttctctttcacctttamtctccaataagttaatgcctggagcatcttcaattagtatgtctgtctgtctcacacacacacacacacacacacacacacacacacacacagccctcagaagtcacactcagctcccctagaattgattttaaaagccagtcctaattctgatggctctgtccatggttctagcaggcaaggttctgaaatcttgcaatacagaatcatagacttcaaaacttaaaattgacatatctatcattatttacgctacattgaattccaaatgattaaagatgattaactcataaaagagataaactaggggagtgacggc

SEQ ID NO: 536964 - DNA, 612 bp, Homo sapiens
ctgtgggcatttaccaggacactcatgagatttttactttgttggctaagaggaagacctcatgtgactgacagggaggctgactttggtggggaagggagaacaggtgcttctgaggagagctagtctgggcagggctgtgaaaagagaggtgtgggtagagaatataagctcatctggggtgcacaacaaaatggggaaggacacagaaggacaaggagaagggcaggtcttagccacttcattgttctttcttgttcaaggtctggtcacaagttctctttcacctttaatctccaataagttaatgcctggagcatcttcaattagtatgtctgtctgtcwcacacacacacacacacacacacacacacacacacacacagccctcagaagtcacactcagctcccctagaattgattttaaaagccagtcctaattctgatggctctgtccatggttctagcaggcaaggttctgaaatcttgcaatacagaatcatagacttcaaaacttaaaattgacatatctatcattatttacgctacattgaattccaaatgattaaagatgattaactcataaaagagataaactaggggagtgacggc

SEQ ID NO: 536965 - DNA, 612 bp, Homo sapiens
ctgtgggcatttaccaggacactcatgagatttttactttgttggctaagaggaagacctcatgtgactgacagggaggctgactttggtggggaagggagaacaggtgcttctgaggagagctagtctgggcagggctgtgaaaagagaggtgtgggtagagaatataagctcatctggggtgcacaacaaaatggggaaggacacagaaggacaaggagaagggcaggtcttagccacttcattgttctttcttgttcaaggtctggtcacaagttctctttcacctttaatctccaataagttaatgcctggagcatcttcaattagtatgtctgtctgtctcacacacacacacacacacacacacacacacacacacacagccctcagaagtcacactcagctcccctagaattgattttaaaagccagtcctaattctgatggctctgtccatggttctagcaggcaaggttctgaaatcttgcaatacagaatcatagacttcaaaactyaaaattgacatatctatcattatttacgctacattgaattccaaatgattaaagatgattaactcataaaagagataaactaggggagtgacggc

SEQ ID NO: 536966 - DNA, 538 bp, Homo sapiens
tgtggggagccggaggaatggttctggagccgttctgattaccctcccagatcatcaaggctctaattctcacagtacttacacctcttttttgggttttctgcacagcatgagcaactgctaggcataattacttaggctgggtgcctgggctgcttgcttaccaaagagkgttgactaccctctcttccccctcctcccaagcaacatcaccatttatgcagaattacatgattcagctcttgctaaaggaggttgtagctgctttctggtaaaggaacaaagcaaagaaggaaaggcagtcaagaagtagccaaagccacgtggtgatcagatcttttattttcaatctcatcatgccctaacttgtggattttcactagagtatttccagtggaaagtaaggagagagaaagggtagtcactgggcagccagaggacagggaaatggtctcagagctaagtggttcagtcacagagtaactacgaggaaagacacccaaagggaagagactgagggggaataaaagaaagtcat

SEQ ID NO: 536967 - DNA, 538 bp, Homo sapiens
tgtggggagccggaggaatggttctggagccgttctgattaccctcccagatcatcaaggctctaattctcacagtacttacacctcttttttgggttttctgcacagcatgagcaactgctaggcataattacttaggctgggtgcctgggctgcttgcttaccaaagagtgttgactaccctctcttccccctcctcccaagcaacatcaccatttatgcagaattacatgattcagctcttgctaaaggaggttgtagctgctttctggtaaaggaacaaagcaaagaaggaaaggcagtcaagaagtagccaaagccacgtggtgatcagatcttttattttcratctcatcatgccctaacttgtggattttcactagagtatttccagtggaaagtaaggagagagaaagggtagtcactgggcagccagaggacagggaaatggtctcagagctaagtggttcagtcacagagtaactacgaggaaagacacccaaagggaagagactgagggggaataaaagaaagtcat

SEQ ID NO: 536968 - DNA, 605 bp, Homo sapiens
gtataagcagacaaccagcacactaagagttccaatgtattcttagcttttctgctctactgtgggagaaaatctagttatactggagcaatttgaaggaagactcatatctgaacattaacacatacttaccatctcttaattctaaggggtttaaagatggtatgattgaaaacagccagatattgcgacaacctgtatcaacatagcttatcttttgagactaagaactgggaccacctatgtcaacgtactttggcagtttgttctaggaagataaaaaccttaaacaaatccaatacttccctgtttgcttcaagaaacttgcaaaccaatttttctaggctaacagtttgcttgtgtgcacaaatagctctcctactgagacaatagatygctcacttgagcaaacagctcttttctacttattacaacttgtgagaagactcttatcttgctatatccacaaattctatttatgccacgaatttgtccagtcccaatcagttccctgccttgaaagacctgccttaatccacttgagctcaaaccaccaaaccatgttcctacttctactcctgacttccttcttctgataaactact

SEQ ID NO: 536969 - DNA, 605 bp, Homo sapiens
gtataagcagacaaccagcacactaagagttccaatgtattcttagcttttctgctctactgtgggagaaaatctagttatactggagcaatttgaaggaagactcatatctgaacattaacacatacttaccatctcttaattctaaggggtttaaagatggtatgattgaaaacagccagatattgcgacaacctgtatcaacatagcttatcttttgagactaagaactgggaccacctatgtcaacgtactttggcagtttgttctaggaagataaaaaccttaaacaaatccaatacttccctgtttgcttcaagaaacttgcaaaccaatttttctaggctaacagtttgcttgtgtgcacaaatagctctcctactgagacaatagatcgctcacttgagcaaacagctcttttctacttattacaacttgtgagaasactcttatcttgctatatccacaaattctatttatgccacgaatttgtccagtcccaatcagttccctgccttgaaagacctgccttaatccacttgagctcaaaccaccaaaccatgttcctacttctactcctgacttccttcttctgataaactact

SEQ ID NO: 536970 - DNA, 621 bp, Homo sapiens
aatcattccaagagcaggttatttttcatatcttcttaggctttgtaccatatcttcattgcacataaattgcattaagccttcctacatacaagtcaactaaaatcagctaagtttttgacaatgttaagttgtcaggttggcaacactgtaatagttcactagtgtaaacaatgaattggaaattttagtgagtgaattgctagtcatgaataggwttaacaattccatgagcatttgagagtgtaattacttatgatctgcaatatttatgttccctttgggcatcattatgtttttctatgtgagtaattttaaacccatacatctataaaggtccaaagatattcacatatgtttatatttaatttcatttaaaatatctatattacactcaaaaattaacagaaggataaattagaataatgtgaaactggttactagaacagaaaatattaaatacaattcttcaaaaataagattggcttcaaatgttacatgataatttcacaaacatacactgtaaatatatatataatgttacataaaatatgaaaatattaactcttctataagtaattattactgctattgatttgctaattatttttaaatacttaa

SEQ ID NO: 536971 - DNA, 621 bp, Homo sapiens
aatcattccaagagcaggttatttttcatatcttcttaggctttgtaccatatcttcattgcacataaattgcattaagccttcctacatacaagtcaactaaaatcagctaagtttttgacaatgttaagttgtcaggttggcaacactgtaatagttcactagtgtaaacaatgaattggaaattttagtgagtgaattgctagtcatgaataggtttaacaattccatgagcatttgagagtgtaattacttatgatctgcaatatttatgttccctttgggcatcattatgtttttctatgtgagtaattttaaacccatacatctataaaggtccaaagatattcacatatgtttatatttaatttcatttaaaatatctatattacactcaaaaattmacagaaggataaattagaataatgtgaaactggttactagaacagaaaatattaaatacaattcttcaaaaataagattggcttcaaatgttacatgataatttcacaaacatacactgtaaatatatatataatgttacataaaatatgaaaatattaactcttctataagtaattattactgctattgatttgctaattatttttaaatacttaa

SEQ ID NO: 536972 - DNA, 663 bp, Homo sapiens
gtattagtcatttcacctttctctagagtcataaaaaactccatcagcgttggctcaagaaaaataaatcacaatcaaagtcgaagttcccaagtacaaccaaaatgaacggaaaacaaaaacktatgagacggtgcaggccatcaaattcaggtgtggagtcagagaacccgtgtctgaatcttggccctactactcaggatgtgtcaacgtggggaagttacttaactgatgaacctccctttcctcatcttcctttaataatgaacacgacttttcccattatgtaataaccttgtaaagctgcttccactggcttggcacttacaaaatgcttcagtacaactcaacacacaattgcgtcatcacagggcctgaccctggcaaggtaagggggaaaaggaatgcccctggcttcagagagttcacagtctcatccggctcccaccccacctttgacccttgccttcaaatcatggtgcttcccaatagatcacaaagaatgctgatgagtgatgttctccgggtctcatgtttgagaaagtcttgatgtgaggttgcagatgaaggtctatgatttggagaacattctattaatagcactgtaagcacagatggcccagagttcttttcagggacagctttctgaaccacatccatggc

SEQ ID NO: 536973 - DNA, 663 bp, Homo sapiens
gtattagtcatttcacctttctctagagtcataaaaaactccatcagcgttggctcaagaaaaataaatcacaatcaaagtcgaagttcccaagtacaaccaaaatgaacggaaaacaaaaacttatgagacggtgcaggccatcaaattcaggtgtggagtcagagaacccgtgtctgaatcttggccctactactcaggatgtgtcaacgtggggaagttacttaactgatgaacctccctttcctcatcttcctttaataatgaacacgacttttcccattatgtaataaccttgtaaagctgcttccactggcttggcacttacaaaatgcttcagtacaactcaacacacaattgygtcatcacagggcctgaccctggcaaggtaagggggaaaaggaatgcccctggcttcagagagttcacagtctcatccggctcccaccccacctttgacccttgccttcaaatcatggtgcttcccaatagatcacaaagaatgctgatgagtgatgttctccgggtctcatgtttgagaaagtcttgatgtgaggttgcagatgaaggtctatgatttggagaacattctattaatagcactgtaagcacagatggcccagagttcttttcagggacagctttctgaaccacatccatggc

SEQ ID NO: 536974 - DNA, 474 bp, Homo sapiens
atattttaatcttactagtaaagaaatggaagctaaaacaatgtgagataacatttttaaccgattgcaatagcaaagtgttagaagacatggacatttgcatccattgcttttgrgagtgtaaatctgtagtctttctctgcaagttgatagtatatgtgaaaaggtttagaaatgctgttagctttgcctctggaatcttctagaaatttattctaaaaaattataggacaaatgcacacatgtatacattataggatattcactgcaacattgtttatggaatgatactgggtaagtgacctccttttgtctggcaccctgtttctgtgtggaagaatagccacttctgtaatgcttctgaacccacttccaccacacaattctctccaggggaaaagaagtaacttgtttcgttgatgagtcagggctctgctctctccattcttccactttgggatctgtctgcttgca

SEQ ID NO: 536975 - DNA, 497 bp, Homo sapiens
tcagctgcttaagtgtataagcttcttaagaggccatttttgttttattcatagtgcctactatagtgccctgcatgtcagtgacagctaataatttatcacctaattagttaatatttattctggaaacttcagaggctcaactttgaatggatcaaacaagaagaacaaaacgaatgaaaatgcacaccctaccattgattatctgtgaccacggcagtatatttatattagatacttgccaaaaaaatctatatgatgtgtgtgtgtgtgtatatgtatgtttgtgtgtgtgtgtgtgtatatatatctatatatatakatatagatatagatatatctcctcattctcatatctttgcttcattctcatgactaaggtcttaaatccaatctcttaaaatccaatccttcaaatcttcagggggacctttccagaccacctgagtaacagtggtccctatagaaaatataaagatagaattttgttactaatg

SEQ ID NO: 536976 - DNA, 589 bp, Homo sapiens
ctagaaaaatagtcactagaaagaactaataattataaatagcctggtagaattattgaatttcacactgaccataagcatctttgcaacggtatgtgcatgtagaggataactgagttttgaggagttgggatccaggatttagagatttaccaaagtttattcacatgtaacgcagcaagactgtctcagataycaacgactcggtaagtattccacctgagatctcgccccgtgagaagtaactacaacatttctccagccaactaagaaataattcagaataataacctcaataagaaagtcacttatggaaggactgccactgagcaatgaatcttcagaaatggtccctgtaaggtcctccttgctcagcctcacaacatcaccacttcccagttttccacacactctcttttgctgcctctacctccacctgaactttcaatgttggaattccttgggatttgttcttggtcctcatatgtttacctgttgtcctatacaatagcaccctttctggtagctcaaaagaccatgtatatacttatgactgtcagtttatatctccagggaactctagactcac

SEQ ID NO: 536977 - DNA, 405 bp, Homo sapiens
attgtcacaaattgaaaagcatggatacaatattatgtagcatttcctatcaagaggtagagtcagtttctccacttcttaatctggggtggccttctgacttgtggaccacagatgtgtcagtgaagccatattacagatgctggcctcagccagtccaccaactgactgcaactgcctgagtgagcccagraaaaaccagcagaagaatcacccaactaacccacagaatcatgagaaacaagaagtcactgtttaagccactaagttctgaagcatattatgattcagtaataggtagctgttacaactatttgtatccccagttagagggcttaaagtatcttgtttagagagacaaagctggtggctgatttctaattcaagcccacattgcattgctgg

SEQ ID NO: 536978 - DNA, 553 bp, Homo sapiens
tttgttctcaaacagtaaaacaaactaggatatcttaatacgcccttgcaaaacttgctgaaacttggcatttgtgctttcagcacaaatatgacaatcaagaacccattctcctggcctccacttagagatgcccatcacccagcacccatttcacgtcaggtcctgccaattgygccctatggctgacacattagcccacacacacacaaccatggcacagtctctatgaaatcagaagacttcttttttatttttttctggcttcctcatcctccaagcaagaattcaaatgtcaatcacctttagttagattgcataaagtagcatcataaaaatggtaaccaatccaattgcaaatcacttgatgaatcttctttgaagagttgccaataatgctaatcgtcaaatggttgaatcccgctttgtaaagatgcgtttgtgaagaacagcaatctctgtgactttgacaaaggaactgctgacttgcatcactgtttgtcttttgatgtgaaagagcaaatcaatttatagagcctttgcttgcagatgt

SEQ ID NO: 536979 - DNA, 626 bp, Homo sapiens
ttacataccatataaaagctattagttgacatggctaaattcacctaagagccaacctaccttgtaactattaatttaatttaaagccttgctgtttactccatsatttctgccaaatgtagtccaaattgggtctcagcatattcaagaaatcaagccacagaaatgtgtacttgtattgctaggctccctgcaatattaaagattttgctttctctgaagatattctgaaccatgatcatctttaaggcacttcaaatacatttctgaccactaaatttaagtagatactaattaattactgccatattaacaattcatcacgtaagccacaggaggcaagagtctcataaggaattgccttcacaaccacagagattccagaggtgatctgaatgaaacacgcaccaatggccagatccaaaaggaaaactacctagacttcctcagataaaagtcaggatctttaggaattaaaacaggaagggacactataaaggaaaagtgaggttttttctttttctttaacgtacttcttttctttgagcttcttggtcaaataatttcaaggtacatgctaataaaaactacaaatcagatttttgcctttagtgaaggtgcctaaa

SEQ ID NO: 536980 - DNA, 626 bp, Homo sapiens
ttacataccatataaaagctattagttgacatggctaaattcacctaagagccaacctaccttgtaactattaatttaatttaaagccttgctgtttactccatcatttctgccaaatgtagtccaaattgggtctcagcatattcaagaaatcaagccacagaaatgtgtayttgtattgctaggctccctgcaatattaaagattttgctttctctgaagatattctgaaccatgatcatctttaaggcacttcaaatacatttctgaccactaaatttaagtagatactaattaattactgccatattaacaattcatcacgtaagccacaggaggcaagagtctcataaggaattgccttcacaaccacagagattccagaggtgatctgaatgaaacacgcaccaatggccagatccaaaaggaaaactacctagacttcctcagataaaagtcaggatctttaggaattaaaacaggaagggacactataaaggaaaagtgaggttttttctttttctttaacgtacttcttttctttgagcttcttggtcaaataatttcaaggtacatgctaataaaaactacaaatcagatttttgcctttagtgaaggtgcctaaa

SEQ ID NO: 536981 - DNA, 220 bp, Homo sapiens
atgtagtaattactactttgccaaagctatattaattcttcctcctgcattcccatttgaatcatccaaaactatattttaccacaatttgtgttatcatttcatgttatttttcatatttttcctactaatcatgaaattayatatcgttgtttccatagcatcatcatttagtattacagattcttattagaatataattgtttttgttatttttcag

SEQ ID NO: 536982 - DNA, 490 bp, Homo sapiens
tgctgctgaataaaatcatttttcacctgcctacgccccaccccgagtgttctttctgctcatctacgtgctccctcaggacttcaacatgacctttggtgtaattgtgaaccygacaacatgatagaaaaattcacaggacaaaactgatgaatttgcattatttcacaaagagttctgtgtagataactcttaaaatttatcaacaaacaatacacacacacaacttgctaataagtatgatcaaagatcgaagtgtgttctttttatgaatctaaaagtaaaccaaaatgtgaaactaaaggttttagagttaaagtaactcagatatcctcatcacctgtgaaccggatataaaacttcagaaagtctcataacttttcactttcaggattgtgttccagatggctcttctgtcctcccattaaacagggagattgcagaatgcaggccgtcaactgcacaaagtatttgttgttgttgttatttg

SEQ ID NO: 536983 - DNA, 639 bp, Homo sapiens
ccttgtatgtgcaggtcacaatagggttctcgctgctatgagaatctaatgcttctgctgatctgacaggaggtggagctcgagccgtgacatttgcttgccctccgctcacttccttctcagccacttggttcctaactggtcatggactggtactggtccatgaactgggggttggggaaccctgagttatagggttgaaaacccagtttttgtttgttttctggctatcacgtaagtatctccacattgccccctttgtcttcaaatcagcagtattgctttaaatcatcatgacttgattctatctgactttcctcactgctgaatctcttctgctacaggtaagagaaagttctctgttttaagggttgatgtacttagattgggctcacctggagtatccaggctaatctccctattataaggttcctgttatctgggaaactttttttttcctgtaatgcaatgtattcacaggtttaggtgaataaggcataaaaaactctggggaggaagtggcataatyctgtctatcatagtgtattttgctccaatccttaaaaaaaaaatgcttaaaaaaatacaagttttaacccttttcccatttgcctcaagaatactcgccggtggcagttg

SEQ ID NO: 536984 - DNA, 374 bp, Homo sapiens
ctgggcatggtggtgcacgcttgtagatttactagctactttggaggctgaggtgaaaggatggcttgagctcaggagttagaggctgcaacgaactatgatcatgccaccactgcactccagcctaggtgacagagttaaaaacaaacaaaaaaccatgaatgaacaccactgtcaggtccaacaaatgcaaataaagtaggagcactgaaatttgctaacaagaagagatgatgaacacagatggacccaaagtggtggaacaaatttacataagtcaatctataatgtgtaagacacatataaacaaagatgaattatttctttctacaataatytgaactgtaagtggcttctagaactagattctcaac

SEQ ID NO: 536985 - DNA, 531 bp, Homo sapiens
tctacatgcttactccttactacttgtaagactttggttaaatgcctttttctcttaagtcgtaccttgctgtcctatttgaaattgaaattcttttcacctctggcactcctgatgctttttctcctactttttaagaagcacttaagactttaggacataatacataatttacttactttgattattatgtttctttgtgcaagattgtaagctccattaaggtaagggcagggatttcgtttgttccctaatcttccccagtggttaaaggcctggcacatagctggtggctcagtaaatatttatcgaatttgttgaatgaatgaatattattgctaacacatttatacatactgaattcaatatgtatgggctatacctgtatggtaagaactgaataaatatwcaaatgaatgtctttttgattggatatcatgaattagaaggctttttagaggaattacttgcaggcattaaagaaaatattcaatatgctgtcttcaaaaaaagtgttgatattttgttgtt

SEQ ID NO: 536986 - DNA, 512 bp, Homo sapiens
ctccatttgaaagatactcttttataacgctttccatactgtactctttggaacaaagtcactgtgtgtagcccacacttaagaaatggaaagtatgttccatctacacttctaattagtgtgattttacctcagcagcaatgacaaaaaaaaaatggatgtccagtattttcctcctattggtataagaaatttaggccaggctgatgttcttccatctcactcatataaccacacataatgtcgatattttatagaatttccyttggtcttagttgtttgtttgatttcctgcttaataatgataaatattttttctaagacaaaataatatttggaatatttattatagcttttaaaggaaatgacactatcccaccttgcaatattagtcagcatgtaattccttttaaggataaattaaataggtgaaattttggatttgtaggaggactggaaactgagagttgatatctaccaagccacatattttagacccaacagagtagcaa

SEQ ID NO: 536987 - DNA, 508 bp, Homo sapiens
ttcccacttttttttgagtttatagccaatagactggttgttacgttgatgtagaacagcattagaagagtcaggtaaacaataaaagtaagtacaaaatagaagtcaagtaccagtaagagaatgctaacacaggttaacatgaactggaaatctctaagaaactagtataaattgggaacataaaaaatttaaaaaattgatttatggtctttggcatattttccatcttctaatttttgtttcttcctccctttctgcctctcatcttccccttccctctttatttctccctttccttctgccaaccgttgttctaagtagtttatatgcatttgtcacttaatacaacaagaactcatatggtggttctgagaatttagtaagatacaacatgtaagtatctagaacagtgtttcatgcacagycagccttatagtaacatgtgctgaattgttattattattattatgccatatttactggccatgaaaacataatttaaaaa

SEQ ID NO: 536988 - DNA, 603 bp, Homo sapiens
taggcatgtctaatttaaaaaaaaaawttttggtagagataggacctcattatgtttactaatatggtctcaaactcccatcctccaaggatcttcccacgttggcatcccaaagcactctgggattacaggcatgagctaccatgcctaactccataaagattaatttttggtgatgagaagggtaaagttactatcaaacatatattaatttcaggcatttttgtcaattatttttattgttaattgttttatctcaagcagtctgtaaatctgaaccactgtaatttcttgcaccacaaacaccttgagatgagcttataataaaggttgacttgtttcttactttttattttgttttgttttgttttagattttggtttgaaaatttgttttcaatcttgtatgctcctgagcttgattcaagtatttcaaatctacttgatccctaattcaaatcaaattttttctcaccatcttggaaaactaattctgactcctgattgcttctgttgtgtaatgattaattaccttgaactaattttgactgattgagtctcctaattattcagtagaatgaactaatgttaagcttataataag

SEQ ID NO: 536989 - DNA, 532 bp, Homo sapiens
gagtccaggacttactccagcagccacttgggttctcaagcatttgggtttggaaagartcacactaccagcttttctaagtcatctcctgcttgtacacagcctccataatcacatatgagccaattgctctcataaatcccctctcatatctatctttctattcatctatatctatctatctatctatctatcttctatcatccatctatatcctatagtttatgtgtctctaaagaactctatctaatacagtgtttatgcaccatcgacactttgtttgaggttttcagtcttatgctgttttagggcactaagccattaaataagagacaggataaatacattttctcattaaataaaaaatgtaaagaacatgtctgtcagtataagataagatttttacaaggaaagaacaaacacaatttataagaagagctgttgattgttcaacagaggcacagctctagtaaacataatgataaaattatagccccatgacctctattatttcagcagcactatcaacaca

SEQ ID NO: 536990 - DNA, 632 bp, Homo sapiens
agctgatttgactaccataacagtattgtacagtactgaggggaaattatcactttgtcttaaatttgaggttatttatgatctgaacaaatgtatctgttttaaaagacataccgtcactttttccaaattaacttccatgatctcaaaaattcatttcttactattttaaaayggcttaatattactacctatggttgaaaacaatggtcaaattctatctactttctcacacacccacaaattatctgtagcatggacataacctagaaaagaaagcaattgtacttcatttgatattgtattaatttttttaaaaaaactctgtcattagaaaacactaacatttggtgtctcatctactgacatttaattacctttttttagatttttatatttcacagaaaaaataccttaggttactgtgaattcatgagatttcaacagaatagctcctttttggaaattcagttacatagccaaattcattttactttcaccacttgattattctgtaagcaagttaacctttaattgcgtaatatctatttatgataatttgggatttagatgattcatctactataggattcactattttattcagaaatttatatgttaaaaaagcatgg

SEQ ID NO: 536991 - DNA, 632 bp, Homo sapiens
agctgatttgactaccataacagtattgtacagtactgaggggaaattatcactttgtcttaaatttgaggttatttatgatctgaacaaatgtatctgttttaaaagacataccgtcactttttccaaattaacttccatgatctcaaaaattcatttcttactattttaaaatggcttaatattactacctatggttgaaaacaatggtcaaattctatctactttctcacacacccacaaattatctgtagcatggacataacctagaaaagaaagcaattgtacttcatttgatattgtattaatttttttaaaaaaactctgtcattagaaaacactaacatttggtgtctcatctactgacatttaattacctttttttagatttttatatttcacagaaaaaataccttaggttactgtgaattcatgagatttcaacagaatagctcctttttggaaattcagttacatagccaaattcattttactttcaccacttgattattctgtaagcaagttaacctttaattgcrtaatatctatttatgataatttgggatttagatgattcatctactataggattcactattttattcagaaatttatatgttaaaaaagcatgg

SEQ ID NO: 536992 - DNA, 454 bp, Homo sapiens
gatgctgtgtccacatgctagtgtagacttaaatatgctactctttttatttgttttcacttgtttatttgttttagtgctctggttacaaatgctcgtgtttaactacaagacgatttacagggtgcaattttgtctcacataaaaggcttttcatgagcatatatgtagtatgggaagagaaacatgtgcataatatatattttgatcaagtctgtgaagtatatatacaactcagtaatagggagtcagatggggacattagaaaagaggacatgtttctttgaggacaggaaatttaagccaaggagtgaaatatgagacttaggatcatgcaattgaataaagaaataatgattataggagagatttttgamtagaaataaacatgggaatcatttggataagtgattcgacatgaataaaattatgagaataaatgaagccacctaag

SEQ ID NO: 536993 - DNA, 431 bp, Homo sapiens
aaaaatccaaggctgcaatgtcctagtagtcaagtgaagaaacagtcagaaggaatagttaactgtgtgtagtgatgctgatgggtcaaataagataagtctgattaacttgaaggtcacgtgtaattttgataaaaaacttttcctaattgagggaattcaaatcacatctattccacaaagcaaaactcgatgacacatctatgaaagtttccctgactttactactgccacagtagtgaatttaaatattttagcactatctttcacctttgttttaaagtggtttgtgagcttattttacttttcttaccagatttcagacttattatggatagagcttactttaaatttatctttgtgtccccaaagggcttaatatagtgycctaagtggttcatagtaaatattcactgaataaatgaatgaac

SEQ ID NO: 536994 - DNA, 636 bp, Homo sapiens
aagcaaaagatcgtgttctcatagcgtagggaaaaggtttgtagagcagtatttttaggcatgttcacaaagtatatatgctggcaaggaatagccaaagaaaatgaaaacactatttcagaaagatatctgtactcccatgttcatttcagcattattcacagtagccaagataaagaaacaaccgaagtgtctgtcaacagatgaatagattaagaaactatgatatatgtatatacacacacacatatgtatctcacactatatatatttatatctatatatagagagagatatatgtacacacacacaatggaatattattcagccttaagaaaataaacaaaatcctgctacttaggacagcacggatgaaaccgttcaacattatactaagtgaaataagccagacacagaaagacatatgctgtatcatctcacttaaatgtgaaatcttataatataaaattcataagaatggcaagtgaaatggtggttaccaggggcstgaggtggcagaaatggggagatggtagtcaaagggtacaagctttccatcatgagatgaatgtgttctggacagcaatatacggcgcagtggccatagttagtaaggatgcattgtatacttgaaat

SEQ ID NO: 536995 - DNA, 591 bp, Homo sapiens
tgcttttagaatctcacaaagtcaaactaaagctaactttgatatctggaacctaatgcatgttccaacccaatgtgccacgctcttatccggaagctcacgttaaacttgcaaacatcagggaatgtgcatgcacaaagaaaatagccattttatcatactgtcccttttaattaaggccaaaaaggagagtagaaaacaaataaaaatactatgaaacctagttaattagaagagaagggcaattttgagtcaaaagrgtttgagtatcaaatgtctgtatctcattaaacctgcatgagagctaagcatgtatgaaccttcaaagaaacacaataaattgttcagattacttgtcaatatgaggaagtcatctacaaaggttacttcctttatagtctaagtcactctctctcttatgctgttgacaagtaatcagagtggttcacagatcattccttcactacggctaattcatggctgcttagtgacattcacttcaagttatctaactaatttagcaactcaaagtacccttgggaaccaatttccacctcaaattatatatatttttgtactttggattaaatg

SEQ ID NO: 536996 - DNA, 626 bp, Homo sapiens
aaatacaatatattagaattatatttgctgtgtgttgaacaaaagggcattttatttttccatgtctggaagttgtctgcatgttggctctgcctccccagctcactaaataaccttgtcaaagtcatttaacctcttagtgtttgtgttctcatctgtaaaatgaggataattatccttacctatctcatagggatggtgttcagattaactaattaaagattagaaactgctacaaaaatgctcagtattattaaggaaaactgaagtattttcagtgccattgggtaagagtgctatttagcagcaatgactcccaacaagtgtttgatagcctgataagctgccagctccttcccagaggagagatgacttgccctgggaccttgcccttcattgctgttttgttagcgaaacagcatagaggctgcccatataatacccagaaagctgggatcaatgacacatttcctgactctgacacatttgaagagctgacaagtgatggcaagatgtgccacttcaacccaaagaaaaaattatacctgtcagaatgcaaaaatccctctgggatgcrgttattataattgcagtttataatatatccttatacaaaatgaacccag

SEQ ID NO: 536997 - DNA, 396 bp, Homo sapiens
tcaccaaacattaccaggtatttataggtggcctcaatttcactactattttttcacgtaatcatgtcattttcaccctttaaaattaatatttgaagatttcaaaataaatttgatcaagaattttgtcttcacaccaaaggccagggtaaattgccaccaaagaacaattcaggtaatacgagcatatagagaattctcctaagagaagaaagagaaacacagttgccaatcaggttgtcaggccactttaattgatttaagattacaaaacatttccaggatgcatagtggggwcatttcagtcccaaaaactacttttattttctacctctgtgtccatctaaatgatactggatctggagtgctctgaggtatagcttgattgaagtttaa

SEQ ID NO: 536998 - DNA, 615 bp, Homo sapiens
tgcttgttttgtcagtgactcatgagttctcttttcataccagcttcacccttggcattctttaccttaggagtaactccctctactctgtctccttgcattgacttttggaagacctctgcgttatgccaggtcaaagttcaaagtgtcctgaaaaaaaatttttttttttttttcagttctgctaccctttctcggattttttttttattcagtgactttactatatgaaggctcgtggtgtaccccagagagattccccttagctttcttattccaccttgccactgactaacactaggggagccctacaaattacaggaggagagctgtcaaaattcctgtcttgctctggcccttggggtgttgcatccatgtgcttagtgaggtgtcatgggaaagtgttggcaaggagatgcagattcacgctgtactttctagtgattctaatctctcacactagcccacatgtggtcattatgagtttgtaaaagttttgctgtttcatctttttaaaactcctctgcctctccaacagcactgtaaacakctatcagtttccttccctaaaattcatcacattctgaaattgtatttttcctcagttctcttatt

SEQ ID NO: 536999 - DNA, 290 bp, Homo sapiens
gggggagggagagcattaggacaaatacctaatgcatatggggcttaaaacctagatgacaggttgataggtgcagcaaaccaccatggcacatgtatacctatgtaacaaacctgcaagttctacacatgtatcccagaacttaaagtaaaataaaaaataaaatwaaattaaataaagagctttgctactgaattgaagacaggaaatacatgtgtgggcacaatagtcttgctaatactttaccttctacttagacaaacttagttcctagtcatggcatggctgaa

SEQ ID NO: 537000 - DNA, 617 bp, Homo sapiens
aggcaggaggcagacagagatgcagatgcagacagaggagcccacaagcccygtcacccagaggggagcaccggggggcagcaggtagatgaagggaaggccatgagggcctcccggaagcagggaggccacagtcagcctgaaaggcatagtgaatttagtttgagcatggggagggcactcctggacggtgaaaaaagaacgtacagagccctgcccctgcaccaggctctgtgtgaagcactggccactctttaacctttggacctcatgacaacactgggaggcagggatgactgctgtccccattgtacttaggaagaaactgaggcacaaagcggttaagtggctttcctccaagacacaaaacagggccaggatctgaactgggcacacagtaggtgctcaatagcagatgggtgggcaagaagcttgcccttccctttgggctggccagcctagagggtaggctgtagaaacagggcagggcaggcttcatggggtctgcagcatgcgtgccttcctgccacgcttcccactgcttgccccacctcgacaggctgccctgggtcactccgggctgcatttcctcgggctgggccgtgaggtcctaacag

SEQ ID NO: 537001 - DNA, 591 bp, Homo sapiens
  misc_feature (1)...(591): n = A,T,C or G
nnnnnnnnnnnnnnnnnnnnnnggtcggccttccctctacctccaactcccacctcatctccttggggaacatgcctcagctacagggagagacatgtcagtgtagtgacagggagctcatcacctgcctggctgctccatgccctctcggggcacggatgtcggctgtgaagaggaccttccgtctctggtcctgaaatctgtccccaggaggcttcatctctgctgggggagcccaactccacccagcctgctcccaggactgatatctgctcctckagggatgagggcccagtcccttcacgggctcctcgcaggacatgcaaggaggcctcactgctctctcttgtggccagactcccaccatccccagccacacccagaccgaagctgtccagagccgctctcaggggccgtgggcccaggagcaggcctgggaggtcagcaagcctgggaggcttccaccccagctcctccacccccgtttgaaggggatcaggttcccccacaaacataattgaacgaaaatatgagagagaaaaggtctttgttctcccatttacagcgtcagaaaatatgtaacaaattagc

SEQ ID NO: 537002 - DNA, 459 bp, Homo sapiens
aatggagaagagagatctcccactttccttttactggaatcatgtgtccctgtctaaaaygatggtgttggactggattcagttcaactccagcaggaagcacacaacatttgagacctgtggggtgaagacagtgcacacagccggagagaaggtcttggttgagaaccagaggactcatttcttctggaagcagggatttgagatagtttcttggcaggaggaggataagaggttgactttaatgggttctgaatctcatacacagaaaagtaagagtgtgtgcatgagacagacagagacagagacagagacagagaggggcagactgacagaggggtgtgaattaggaggaagaaacagcttagggaaagatgagtggcatgcaggaaagagctttccaggctagggtgcctgggataacggtgatgaggaagagaacgaggatcacggagacca

SEQ ID NO: 537003 - DNA, 606 bp, Homo sapiens
ctgcacaagctcaccctgatggtgtgcagccattactgtgacctatgtgagttgggtctacctgaacatctctgtctcctccttctctttgtctcttaatgagtgtctcctggcataggactgtacactcagaaaacatgcctcacagaccacccaggggcttgagtctgcttgagaaatggtcccaggtgccaaatccctgttacaaatgacatagggacctgggtgagtcctggattcctgaatgacttttctcctctgggccccagcatcttattagtaaaatgaggctgtgytatggtttgaatgtggtttgtctttgccgaaattcatgttgaagtttaattgccagtgtggcagtattgggaggtgggcctagtcagaagtgttttggtcatggggggtctctcaagaatagcttggtgccattctacagtaatgagttcttgctctcatgggttgttataatgcaaggttcctcctcccatttggttccttttgcacatgcctgctcctgttctgtctgccatattatgatgtagtatgaaagcccttgctagaagccagcaccatgtccttcaactccccagcctgcaaaatcgtaag

SEQ ID NO: 537004 - DNA, 600 bp, Homo sapiens
tggaggaggctagttaatgctatcactagagagtgggttttgaaaagtgtgctctagacatcagaatctgtgccgtgcccaccctcagtctgaatacgcaatgtcacctcccctgaagctacttcaaagggtgagtagatcatctggaagatgattaagacctcattagagtcrtctgtttcattgatactgtctgcttttaaatgacttcttttcaattttggctgagtggaattttaatgaatcttatcaaaatcattaaaaaaaaccatacataacaaagaaaaacccaagtattcggtcatggtcttacactaaatactgcgcgacaggaaatgttcttattcagcccaagaacttaacagataccctagtaaggtccctttaaaagaaatctggcagctaggtaccttagcattgaggggacacacagacagagcacttctgaaaagctgttcctcactccgccactcgccgctgcgcagcacacatctcagcgtgttgatgaataagattcccagcacgacagcggcaatgagtttcttaagaacagaaagacatggtaattgtcaccagtgagatgcatccggtcattctgtt

SEQ ID NO: 537005 - DNA, 600 bp, Homo sapiens
tggaggaggctagttaatgctatcactagagagtgggttttgaaaagtgtgctctagacatcagaatctgtgccgtgcccaccctcagtctgaatacgcaatgtcacctcccctgaagctacttcaaagggtgagtagatcatctggaagatgattaagacctcattagagtcatctgtttcattgatactgtctgcttttaaatgacttcttttcaattttggctgagtggaattttaatgaatcttatcaaaatcattaaaaaaaaccatacayaacaaagaaaaacccaagtattcggtcatggtcttacactaaatactgcgcgacaggaaatgttcttattcagcccaagaacttaacagataccctagtaaggtccctttaaaagaaatctggcagctaggtaccttagcattgaggggacacacagacagagcacttctgaaaagctgttcctcactccgccactcgccgctgcgcagcacacatctcagcgtgttgatgaataagattcccagcacgacagcggcaatgagtttcttaagaacagaaagacatggtaattgtcaccagtgagatgcatccggtcattctgtt

SEQ ID NO: 537006 - DNA, 617 bp, Homo sapiens
actctcagttgatacctttttcttggtatgtttgctcagggctccgaatccaaaagtcagcagcacacagtacccaaygctggggaggtagaggacacgctctgcgaccacgaagcccactcggaagaacaggttactcgcggggagaaatgggataacgagaaatcccaggcccagagtaaggatcctggatgatgaaaagtatttaaataaatggctatttccagacttctcaagaaaaacatcctactccacattaaattaatgctaaagaccttttcttttccatggcatcaactgagaaaagatattgttgtcagccaaaggatatcatcagtagagacagtttagcttggtagcatgtggataaggcacaaaaatattcctctggcacttcacagcgagtctaagggtaaaactcaaaagccatacaattcgtatggagaaaattagcatgatcgcatttctgaggccttattaattcacctactcctcactatgcctcaaaccatttaggtactgaacagttcagtggatattgttggtctcaattaattcaaaaactgtcccaatcagttttcacggggaaaaaaaaattcctccaaaatgtaatgaga

SEQ ID NO: 537007 - DNA, 617 bp, Homo sapiens
actctcagttgatacctttttcttggtatgtttgctcagggctccgaatccaaaagtcagcagcacacagtacccaacgctggggaggtagaggacacgctcygcgaccacgaagcccactcggaagaacaggttactcgcggggagaaatgggataacgagaaatcccaggcccagagtaaggatcctggatgatgaaaagtatttaaataaatggctatttccagacttctcaagaaaaacatcctactccacattaaattaatgctaaagaccttttcttttccatggcatcaactgagaaaagatattgttgtcagccaaaggatatcatcagtagagacagtttagcttggtagcatgtggataaggcacaaaaatattcctctggcacttcacagcgagtctaagggtaaaactcaaaagccatacaattcgtatggagaaaattagcatgatcgcatttctgaggccttattaattcacctactcctcactatgcctcaaaccatttaggtactgaacagttcagtggatattgttggtctcaattaattcaaaaactgtcccaatcagttttcacggggaaaaaaaaattcctccaaaatgtaatgaga

SEQ ID NO: 537008 - DNA, 617 bp, Homo sapiens
actctcagttgatacctttttcttggtatgtttgctcagggctccgaatccaaaagtcagcagcacacagtacccaacgctggggaggtagaggacacgctctgcgaccacgaagcccactcggaagaacaggttactcgcggggagaaatgggataacgagaaatcccaggcccagagtaaggatcctggatgatgaaaagtatttaaataaatggctatttccagacttctcaagaaaaacatcctactccacattaaattaatgctaaagaccttttcttttccatggcatcaactgagaaaagatattgttgtcagccaaaggatatcatcagtagagacagtttagcttggtagcatgtggataaggcacaaaaatattcctcyggcacttcacagcgagtctaagggtaaaactcaaaagccatacaattcgtatggagaaaattagcatgatcgcatttctgaggccttattaattcacctactcctcactatgcctcaaaccatttaggtactgaacagttcagtggatattgttggtctcaattaattcaaaaactgtcccaatcagttttcacggggaaaaaaaaattcctccaaaatgtaatgaga

SEQ ID NO: 537009 - DNA, 538 bp, Homo sapiens
tgcaaccacactggctccaaaaaagtctgaacccaacttttgaagagggatgcaccttccatgtctgcctctccttgggtaagctccctcagccctagagtacctttagagttctctttatatttttatagtctcctactatagcttaataattatttatttaaacctatctatttaaaataatgatgatgaagatgttgatgatgatgaccataataataatgatagttacaaaaggctttgagcatgataaatactaagttttaaaattatcctgagatacctattcatcataatatttgcagattcaaaatactgggacatcatgacctttgtagattcaaagaccaactctggtagtgaaagaacgtcatccttagattttgaaataaatagccttacattcatccctcttgggagatctgtgctgaatccccaaatgccaaaatttcctctgtatttcacaaattatattttaatttttggtatggagaytataacagcccactgataatattctacagcccaatggggtctc

SEQ ID NO: 537010 - DNA, 580 bp, Homo sapiens
tgttgcagccatgttttaaagggtccgcagcctgactctccagagcaagggcagagtcggcctcgccagcgcgcatgcgcgaggtccgagccacagctttggtaacagtgtccagcactgctgcccagaaataggttcctgagacttggcaaagtaggagccttgtgtgatagtgcgtcagagtcgagactgagagcagtcctggccagggtgttaacaggatggtctccagtgaccggtattctcggagggtcgacaaccaggragaaacctcaggagcaagaaacctcaggcagatcgcaggggaggcagcgcgagatcccagcctcaggccaggatttgcggagggttgatgaggcccctctcccaatcttcacttcaccagccaccgcccgagtccccgcagccgccgctccgccatcatttattttatcatttttttaatagtcggaatctcaccctgtcacccagtctggagtgcagtggcgggatctcagctcactgcaaactctgccgcctgggttcaaatgattctcttgcctccgcctcgcgagtacctgggattagagggattaatcag

SEQ ID NO: 537011 - DNA, 665 bp, Homo sapiens
ccgccccaaggttgacacccatactacaggtggatatcaggccccaggtgaatacctatgcttcaggtgtgcatcagtccccaggtgaacacaaggccacagatagacatcaggcctcaggtgcacatctggctccaagtaaacatcaggtcttaggtggatacccaatccccaggttgacatcagagaccaggttgaaacaaaaacatcccagtgggtatcatgtcccagtggacgtccaggcaccaggtaactgtaaccactgtaacgagaaatggtaggtctgagtaccatcatgctccttgctcacaaaaggatgcttagctattttattcaaaatacaactccatccatcactctgaacagcgatgtgtagaaaggaaaagaaaaaccaggccccaaggaatccmtcaaaaatgaggtagatattataagggacagaaatccccaaaggaaatgttatagttgacatagaatagtctttaaaacccattaattttctcgcacatttgatacaaagcattatttccagagactgaacctagaaagaattgcttaagactaggagtcttgtcccagcctggatcccacactgttgaacatctatacttagtacaccacattatacatagcactgacatgacctgtgtgcatttaattttcta

SEQ ID NO: 537012 - DNA, 608 bp, Homo sapiens
  misc_feature (1)...(608): n = A,T,C or G
nnnnnnnnnnnnnnnnnnnnnnnnnctgttagtatgcctcggttagtaacaaggagttaaaaattaaatctcagaccaagtagctctctgcactagggtgctatctgttttttctccacaacttctagaaagccctctctgtccccccatccacactgaccttcaccccactgtggtctctcccactggcctggggagcttccagaggggacrgctttgtatttcatccctctaccatcatgctctgaaaggggatctagcacgttgtagatgtgaaatgcacagctattgtgaacagtaaccctcctcttttaatggacaccatactgatcactacacaatggtcttttaccgcttgctgatgaaaaagacagagattgtggccgggcacagtggctcatgcctgtaatcccagcactttgggaggccgaggcgggtggatcacgaggttaggagttcaagaccagcctgaccaacatggtgaaatcccatctttactaaaaaatacaaaaattagcctgacgtggtggcacatgcctgtaatcccagctactgaggagactgaggcagtagaattgcttgaacccagaaggcagaggttgcagtga

SEQ ID NO: 537013 - DNA, 608 bp, Homo sapiens
  misc_feature (1)...(608): n = A,T,C or G
nnnnnnnnnnnnnnnnnnnnnnnnnctgttagtatgcctcggttagtaacaaggagttaaaaattaaatctcagaccaagtagctctctgcactagggtgctatctgttttttctccacaacttctagaaagccctctctgtccccccatccacactgaccttcaccccactgtggtctctcccactggcctggggagcttccagaggggacagctttgtatttcatccctctaccatcatgctctgaaaggggatctagcacrttgtagatgtgaaatgcacagctattgtgaacagtaaccctcctcttttaatggacaccatactgatcactacacaatggtcttttaccgcttgctgatgaaaaagacagagattgtggccgggcacagtggctcatgcctgtaatcccagcactttgggaggccgaggcgggtggatcacgaggttaggagttcaagaccagcctgaccaacatggtgaaatcccatctttactaaaaaatacaaaaattagcctgacgtggtggcacatgcctgtaatcccagctactgaggagactgaggcagtagaattgcttgaacccagaaggcagaggttgcagtga

SEQ ID NO: 537014 - DNA, 583 bp, Homo sapiens
ataagaagggaaggagtcagtgtagtatagaggagagagcacagaaccaggactcaggaggggctgcagcagcctcaggctgctgcaataacttggccaatgttctgttcctctcctctacaaaagaagagctttgactgcatgttctccgtgtttcttctctttctaacgtttttttggttctaaattacccaggacttctaaggaaccatgcactctggtgggtgtgagcagaataatagggagctgagagggagcccctatgttctggactctagaacycttacctggcctcctgggaaggagcccacctgctctgggaagggcactgaggagcatgtgtgacagctatggctgcagttcaccccccacattcagaggcaagatcccaacctccaggagaaagcatcatttcaccttttgttctccaggcttcactgtggcctctccatccatctcagtccagaaacaagatccaggtggacttttcttctccttatgagatgcaggtgtttggacgacttctagttgctctcctttaaacctggagactgagaagtcaaggtggtattttggaaagcag

SEQ ID NO: 537015 - DNA, 431 bp, Homo sapiens
actatatacaatataagtgatttagaagtattggtaggtattaggaagggaaagaatagggctctaaggaagcaatctgggatcattctggaatargagaatgtgctatgtgaccttaagattagttggccattctggtggtgagaaacccatctcccagttctaagtgatacgctccaagtttggccaactgtccagcactcaccagcttctgactggactcagagtgagaatctggttttagatggcgcctgacttgaagcaccctctagtgttaaggaaaggaaggtaacagcctgaaagagagggaattggggaaagacaaaagaaatgaaattgagacttgttttgggaacaggtgggctgaggagaagccccagaggcctgtgttaacagtgttggagttgggctttacagagtgtgtccctgca

SEQ ID NO: 537016 - DNA, 488 bp, Homo sapiens
tttgaagtttatctgttgtaaattccccttgggtagaaaacgacttcctcctgaggtgaaagggaggtaatcttctcagtgcacagactcgtagtcaatggtcttattttaagctgtgtccctcacgctcacctctgcrtaccatagtcctctaatcccggagccttccatggctttagcagctcaaacgcttgcttctcactgaattcctctccctgcaggcctgggtttccacatctccgccctgcttggtcagttacccctcatttcacctgcttctcattttccagtatttgccagttctccttttgcagtgagtgagaacctttcccatctctcatctgctatcatccgcttttctgtttcctctgtccttgtgaatttctcctttttttataaaaaattttgggactttttaatgggatttgaggacaaactaaagataaaatattatatctaatacaccatgtttaagtagaacttgagat

SEQ ID NO: 537017 - DNA, 488 bp, Homo sapiens
tttgaagtttatctgttgtaaattccccttgggtagaaaacgacttcctcctgaggtgaaagggaggtaatcttctcagtgcacagactcgtagtcaatggtcttattttaagctgtgtccctcacgctcacctctgcataccatrgtcctctaatcccggagccttccatggctttagcagctcaaacgcttgcttctcactgaattcctctccctgcaggcctgggtttccacatctccgccctgcttggtcagttacccctcatttcacctgcttctcattttccagtatttgccagttctccttttgcagtgagtgagaacctttcccatctctcatctgctatcatccgcttttctgtttcctctgtccttgtgaatttctcctttttttataaaaaattttgggactttttaatgggatttgaggacaaactaaagataaaatattatatctaatacaccatgtttaagtagaacttgagat

SEQ ID NO: 537018 - DNA, 488 bp, Homo sapiens
tttgaagtttatctgttgtaaattccccttgggtagaaaacgacttcctcctgaggtgaaagggaggtaatcttctcagtgcacagactcgtagtcaatggtcttattttaagctgtgtccctcacgctcacctctgcataccatagtcctctaatcccggagccttccatggctttagcagctcaaacgcttgcttctcactraattcctctccctgcaggcctgggtttccacatctccgccctgcttggtcagttacccctcatttcacctgcttctcattttccagtatttgccagttctccttttgcagtgagtgagaacctttcccatctctcatctgctatcatccgcttttctgtttcctctgtccttgtgaatttctcctttttttataaaaaattttgggactttttaatgggatttgaggacaaactaaagataaaatattatatctaatacaccatgtttaagtagaacttgagat

SEQ ID NO: 537019 - DNA, 608 bp, Homo sapiens
agccagtggtattcaggctcagcagaaggggaacaaaacaacacacaagtgtggccatgactgtggggccacatgtcccagggtgtgagaaaccttttactcctgaggacagtcccgctggtattggggctgcagttttgtgttgtttcatttagcaaatatttattaacaagtagttagaccttccctggagctagagctataaatggggacgtagggctttcctgctccatgaggctgattcactggcccagggggcctgatgtacctgcctagctcactggaaggaaaggagtcactttctggtgtggggacactatggctattacagaattatccacatgctcatagaaagtgcaagtagaaggcagaagcctggttgaatcaagagcaaatcacttattcagaggcttgcattgggctcagttatctgggaggcccaaaatagctagaaggaactgtyccaaatttatctccaaccctggtgcctctgtagaaaactggggagaggtcaagtcaataacttagagcaatcaggggtcactctcttgccgcccatcatgaaaaattaattctcagtcaaaaaaagatatgctattattatttgt

SEQ ID NO: 537020 - DNA, 557 bp, Homo sapiens
ctgctcttctgaattgccacacctgtgctacacttggaattctgtgctctgactctgcagggtaggaccacgtgccatctcacacagaggtcaaccgatgagcccactcactcgtacatgccttcttccacagtgggaagcatgatctggcaggggccgccctgtaggctggggatgggctgctgtgtgaatgttgacgttcgtttcatggagaaaggggaggtgaaagattgaagagcaggttcctgtcaatgttctgagttcgagctggaggtgtagattgaatagtctacatggtctgtgagtgtgtgagatgaacccttccatcctttgacacctggttgtatgtgtaggctaagaaggaaggaccctcctgtcagtgtgcaaagctgtaatctcatggactagaggagagggggccaaggggatggacaggagaagtcatgcagaatctaagcaggaatgcagatagaacacatctaggctcttttccccaggagagtgatgatggagcatrtagatctggctcaaattcagcctccatcacttaccagtca

SEQ ID NO: 537021 - DNA, 666 bp, Homo sapiens
gaaataactcatttagcaccaaggggatggtactaaaccattcatgactgatcctcccccacaacccaatcacctcccaccaggccccaccctcaacattgggaatcacatttcaacatgagatttggaggggacgaacatccaaaccaaatcaaggatattaaactgaactttctggggttcagacatcctaaagrcagaacagactgataggtgccaggcatccacatcctaccgcaagatgttgaaccacatgtacagggctgtagaaagacacatagagctggtcccagcaacagccccgcgggaagctgtccaggccaaatgaaggagggagagaatcatcagcggctgcagagctcactgtgagggctttgtcggagagatgtccctgtgttgtggtcccctccacttgtcccaggggacaggagacatcactttctcctcactttaagccaagtaagaggaggaacttccagaaagccactcaacaagcatgccctttgtcccaggttcttctgactgcaggacacaggtgtacttcctgtgttaaatgcagggcctccacctagagggccacccagaggggactatgaccacagagcagggcagatagccagaagtcataggcttgtgggtggtggccactaatggccagcagaagaa

SEQ ID NO: 537022 - DNA, 666 bp, Homo sapiens
gaaataactcatttagcaccaaggggatggtactaaaccattcatgactgatcctcccccacaacccaatcacctcccaccaggccccaccctcaacattgggaatcacatttcaacatgagatttggaggggacgaacatccaaaccaaatcaaggatattaaactgaactttctggggttcagacatcctaaaggcagaacagactgataggtgccaggcatccacatcctaccgcaagatgttgaaccacatgtacagggctgtagaaagacacatagagctggtcccagcaacagccccgcgggaagctgtccaggccaaatgaaggagggagagaatcatcagcggctgcagagctcactgtgagggctttgtcggagagatgtccctgtgttgtggtcccctccacttgtcccaggggacaggagacatcactttctcctcactttaagccaagtaagaggaggaacttccagaaagccactcaacaagcatgccctttgtcccaggttcttctgactgcaggacacaggtgtacttyctgtgttaaatgcagggcctccacctagagggccacccagaggggactatgaccacagagcagggcagatagccagaagtcataggcttgtgggtggtggccactaatggccagcagaagaa

SEQ ID NO: 537023 - DNA, 666 bp, Homo sapiens
gaaataactcatttagcaccaaggggatggtactaaaccattcatgactgatcctcccccacaacccaatcacctcccaccaggccccaccctcaacattgggaatcacatttcaacatgagatttggaggggacgaacatccaaaccaaatcaaggatattaaactgaactttctggggttcagacatcctaaaggcagaacagactgataggtgccaggcatccacatcctaccgcaagatgttgaaccacatgtacagggctgtagaaagacacatagagctggtcccagcaacagccccgcgggaagctgtccaggccaaatgaaggagggagagaatcatcagcggctgcagagctcactgtgagggctttgtcggagagatgtccctgtgttgtggtcccctccacttgtcccaggggacaggagacatcactttctcctcactttaagccaagtaagaggaggaacttccagaaagccactcaacaagcatgccctttgtcccaggttcttctgactgcaggacacaggtgtacttcctgtgttaaatgcagggcctccacctagagggccacccagaggggactrtgaccacagagcagggcagatagccagaagtcataggcttgtgggtggtggccactaatggccagcagaagaa

SEQ ID NO: 537024 - DNA, 528 bp, Homo sapiens
atgtcagaagaagtctcaggagaaagcctggaaacaagttgagctggttaaacagagcatgatgaaaaaacgcaggaaagggaaatgatgtcactcatgctggcagctttgaggacaaggaagcgaaaatgtacgcttctgatagtcaactaccccgcctatcccaccctgctgtctcccaggaaggtagctggaactgcaagtggggcaaagctcccagcactaccagccagtggcaagggccttcacctgcccaccttttgaactgaggtttttcctccagcagaaccgaaggcccatgtgcttccctgcaaagtgatgcaactgggcaggaagctcagatgccagcaactgtgatgtcctagatagggaaaaccctgcattgcaaactcaggtcttsctttggaaaaaaaggagtggctggatttccttcttgctgtctagaaaattgtttcctgcccaaaaatggcttaattaggaagctgagtttgtttcctaggaagggattctccttctcttccttctgcg

SEQ ID NO: 537025 - DNA, 534 bp, Homo sapiens
tcccagatcaaattcatattccttggtatggtattcttggtcactgatattatagccatatttccaatttgattctccatggcttctccccatgaaaccgagctccagccaaacaaatctatttgccagtcctcaagtaccttttgggtttttctgtcctctcatttctgttttgagtgtcctttgttcaacttcgccctcctctctatccctccctagcatctctgctcatttaaattctgcctacccttcaaggcttatctcaagctctgctatgtgatagtgccctcctctgtgccccttggcacttaactttctgcgcrctcagcagtactgatcttggttctgcaaacgtacctcttatcctccaacaaggctgtaggcaggtagtggccagagacctgcccggggcatctctgtaatcctcacagcattcagcacagtgtcttgcacatagtaggcatttaataaatatctattgaaagaatggcttttaagatctatcagacacaaggatgataaaaatgatcttat

SEQ ID NO: 537026 - DNA, 530 bp, Homo sapiens
tttaaaatgacagttgtgtctgctggcccaagagaaggsatggtttgttaatcacttgggtgtttcggtcagtgtagacgtgttttaggaagcacggaacagcactgccaccttccatgtggccttgggcagatcctgtgattactttgaacctcagtttcctcatctgccaattgggcagtcctcattctgccggtgacttcctacgcgacaaaggctgtcatgaagcaatgatgagataaccagtgggggcatgctgagcacatgggagcaatttttactgtggtcatttccttgaaattcataaaggagctcctctgtgattttctattattatttttgtcattaatcaggatttcctctctctgtaggagaataagccaatgcatggcaagcactaaatcttagatcctgaagactcagccctcgagcaaaagacatgcacctccccactcaccgggccctggaagaggagggtgctcctcttagaggcccctggaggccaggcgtgcctcagaggggcctttcga

SEQ ID NO: 537027 - DNA, 552 bp, Homo sapiens
actggggatcaaggtccaaggaatcaaagctcatgctgtgtttgctcctgagcaggagagagcrttgtttagagggagggagaaggggaatgcttgaggtcagaatcacaggacagcaaatccgtcttgagatttcagaaatcaccataaatctgtgtcccttcccagagaagagcgtgtcaaaatgcagcattcgtaattgaagaaagcaaaatcagctgactaagtcgtaagacctaggatggtgaagagtctcagagtgaccaaaaacacacagaccctgttctcagggaagctcctgtgcaccgactgcatgctctatagacccctgccctgtgggggcccattcatgcttacagggtacatcctctgggagaaagcatgacaagttggtaccggggaacctgagggccgggatgaatttcaggataaaaagagcagacttagggatgctgccatagtatatcgtctagatttgtactgccctattgaaattcaaataaaatacagctaaatgttccatttctcagtcaccctacctgtatttcaagt

SEQ ID NO: 537028 - DNA, 597 bp, Homo sapiens
ttggacgacgccattcgacacaagccgctgaacatgtcatcccgtttttcacccagggtggcaggggagaatgacttccttcagactgttataaacaaagtcatcgctgccaaagaagtcaaccacaaggggcagggtacgtattttcctattttgtttctatcagcgtgtatttgcatgcgytggggcagtgctgtctgggttggttttagtttgatgttgatcatgatggtggtgataatgatggggatgacagtgatcgtggtggagaatgtgtgtgacagttgcccctgtgtacagtgcatgatggttttcttgcccgtcacctttgtgaacattgctgagagcccactcctggatggagagtggggtcagattagaagtttagaggaacatgcaggcggaggcgtaactccctctgcccgtgttgtgtgctaatctttgcctgttctgggtcttccctgctggtctccctaagaaggtgatttcatttgtgcagacttgctcccctgagttctgtcatttaagtgatttctccgcccctacactccgcctcacactcactgtttttaatcctgcactgacacgtttctgagc

SEQ ID NO: 537029 - DNA, 597 bp, Homo sapiens
ttggacgacgccattcgacacaagccgctgaacatgtcatcccgtttttcacccagggtggcaggggagaatgacttccttcagactgttataaacaaagtcatcgctgccaaagaagtcaaccacaaggggcagggtacgtattttcctattttgtttctatcagcgtgtatttgcatgcgttggggcagtgctgtctgggttggttttagtttgatgttgatcatgatggtggtgataatgatggggatgacagtgatcgtggtggagaatgtgtgtgacagttgcccctgtgtacagtgcatgatggttttcttrcccgtcacctttgtgaacattgctgagagcccactcctggatggagagtggggtcagattagaagtttagaggaacatgcaggcggaggcgtaactccctctgcccgtgttgtgtgctaatctttgcctgttctgggtcttccctgctggtctccctaagaaggtgatttcatttgtgcagacttgctcccctgagttctgtcatttaagtgatttctccgcccctacactccgcctcacactcactgtttttaatcctgcactgacacgtttctgagc

SEQ ID NO: 537030 - DNA, 511 bp, Homo sapiens
tagtgagtctttaatataaagtattatactttctattatactttaaagtaatataaagaattttaatataaagtattaacgagtcaaaggtgttaagtattaaaaaaaaataaaagaagattctaagtctacatgaatggcaaattcagggagcagatttttctccagggcagaaggggactgtggaaggaaggaactaggaatttggaagaaggataacttcctgtccaaacaaaattgagaattagatcccattggggagggtctggctgcatgtcactgtgtggtggacaggtttgtgagttgctggtgggccagagctgttgaacaagaagctccctgcctgggtgtcagtgagccggggctgatccacggaaagatgcccgctggggtactggagaaacttgttgcascgtaagtgccactgggcgtcccacatgctgctgcagcagtgcaatgaaagcaagcagacaagcacgctagaacaaggatgagaattactccttccact

SEQ ID NO: 537031 - DNA, 602 bp, Homo sapiens
  misc_feature (1)...(602): n = A,T,C or G
gctttctgtttgccttccactctgcacactcaggaccaggaccagagtttggggtttgacccaggaagtgacattcctcatcccccaacccacacacacaaaaatccwgtgtgcatgtgtgttggggggggcagtcactcagggctttccagggcttctcatccccacagagtctggggaaccgggaaattcccaatacccgcagtgaatcccccttcttcccctcctccaggcatcccctgccccaggacatagacctcactcccgaagaagccggggactgaagtgctgcagcacccgctgctcctggccgggctggagcctctcttcagaagggcagcagctcgcttgtcacagaccctggactgcagaaaagctgattcagggatttccgggcggctcctcctgtgggggagtgtgcatctgcatacctgggtgttgggaagggtgtgtgtcttgtgnnnnnnnnnnnnnnnnnnnnnnnnnnnnnnnnnnnnnnnnnnnnnnnnnnnnnnnnnnnnnnnnnnnnnnnnnnnnnnnnnnnnnnnnnnnnnnnnnnnntcaaggtcagatgctcagcaggagggcaccaggggtttccc

SEQ ID NO: 537032 - DNA, 602 bp, Homo sapiens
  misc_feature (1)...(602): n = A,T,C or G
gctttctgtttgccttccactctgcacactcaggaccaggaccagagtttggggtttgacccaggaagtgacattcctcatcccccaacccacacacacaaaaatccagtgtgcatgtgtgttggggggggcagtcactcagggctttccagggcttctcatccccacagagtctggggaaccgggaaattcccaatacccgcagtgaatcccccttcytcccctcctccaggcatcccctgccccaggacatagacctcactcccgaagaagccggggactgaagtgctgcagcacccgctgctcctggccgggctggagcctctcttcagaagggcagcagctcgcttgtcacagaccctggactgcagaaaagctgattcagggatttccgggcggctcctcctgtgggggagtgtgcatctgcatacctgggtgttgggaagggtgtgtgtcttgtgnnnnnnnnnnnnnnnnnnnnnnnnnnnnnnnnnnnnnnnnnnnnnnnnnnnnnnnnnnnnnnnnnnnnnnnnnnnnnnnnnnnnnnnnnnnnnnnnnnnntcaaggtcagatgctcagcaggagggcaccaggggtttccc

SEQ ID NO: 537033 - DNA, 602 bp, Homo sapiens
  misc_feature (1)...(602): n = A,T,C or G
gctttctgtttgccttccactctgcacactcaggaccaggaccagagtttggggtttgacccaggaagtgacattcctcatcccccaacccacacacacaaaaatccagtgtgcatgtgtgttggggggggcagtcactcagggctttccagggcttctcatccccacagagtctggggaaccgggaaattcccaatacccgcagtgaatcccccttcttcccctcctccaggcatcccctgccccaggacatagacctcactcccgaagaagccggggactgaagtgctgcagcacccgctgctcctggccgggctggagcctctcttcagaasggcagcagctcgcttgtcacagaccctggactgcagaaaagctgattcagggatttccgggcggctcctcctgtgggggagtgtgcatctgcatacctgggtgttgggaagggtgtgtgtcttgtgnnnnnnnnnnnnnnnnnnnnnnnnnnnnnnnnnnnnnnnnnnnnnnnnnnnnnnnnnnnnnnnnnnnnnnnnnnnnnnnnnnnnnnnnnnnnnnnnnnnntcaaggtcagatgctcagcaggagggcaccaggggtttccc

SEQ ID NO: 537034 - DNA, 642 bp, Homo sapiens
atgaattatacatataaaatggcttgccttaggtattttatggaggccttagtatatccatatatttccttctacaatgagtgcattttgtgagtttccaaaagatcagaaattcttcagaagctgggaatattcacaaaagggaggtgcaggtctgcatagatgctaagagctttaaaattctaataatattaggtagcacaatagagacaacaaaagatgagtctatcatttaatgaacttaatggtttttcttttaaaatatagtgatatgtgctgcaatatgtgagatgatgttacatgatatcatttttacatgccttaaattgatagggtagtcacaatctggcatatgagatttttcagaaatatttataatatgaactgaatgtaaatactgtatttgactatgtttaactttttgttctatatgtattaagtagtcrgtaaagacaaatcaagacatataatatgatgaagacatatgtgatttaatacttgcttttaaaagttaatttttccttggaagtatactctcttacacatatgtataccaggtcacatggacgcctgtttttttccctgcataagacagcacttttggtattgccctgattctgaatgtatgtaatcacctagtgc

SEQ ID NO: 537035 - DNA, 616 bp, Homo sapiens
ccttcccttaatgaacttaccaatactggaaataaaaccactatcaactctaagagctcagttgctaaaatatgtcaaaattctaatcacaggcacagcagtcttgatgtggaatatggataagatggtagaaaactagctrtttgggcactgtgttggtatccctaaaatgtttgggattccagcaaacctgtagagcacctaaaaggcatacgtagcatgccctagtggccatttcattcctattcaacctccagctcagatctctaagtccacatgtttctgattcattgacagttcattgtaatcatttttccaagagccattgaaattcaagaaatctttacttttaaaagcacacttttgagggaagctgttcaatcctaaactaatatgaaaagctcttaagatttaagtcagcgcataggtccaaaccactaatttttcaataagcttcattcttggcaaatgatggtcagcctccctctccaagctcgtgcagtttagccctgaggtctgggaacgctggcagagagattgaaggaaagaatgttatgagttgtttctggccagggctccgaaatacttcttagaaaaggcgcaaactacccctgag

SEQ ID NO: 537036 - DNA, 499 bp, Homo sapiens
ctgatgatctcccacagaagttatatctcctgatgaagttaatttttaaaaataaagagaccacctagattgctgccagagtgaaaggcttcagacgctggaaaggctgtgtctggctgttagatcaatggctacagcaagtcccacagaaacacttgagcgttaagtacagagatgcttgaagcctaattttaaatgaattaggtagctttataatcttcacttaaaaggttaagccctgcttctatggaaacaacacatcagayggacaaatcaatcttctccgatgctgagcggctgcagccgcagaatcgctcgcttcccctctttgaacacaggagggcgccactcctcgccgggcacctgccccccgccgcctcccgcgggcgtgctctgtcccctgctctgagcgggccgcaccagcgggctggaatccagcttcttcggaggttcaattcagggtctgactctgggcccctggttttacaggggcctggga

SEQ ID NO: 537037 - DNA, 480 bp, Homo sapiens
aaagtgctgggattacaggcgtgagccactgtgcccagcaacagagtccattttaatctaacctaactgtgctgtcagctaagccttttcctggacaggctgtcttctaacatctcggcctttatattaacccaattgtatcctctgctcatttccattattttccctgtaacttcgtgatgacttctcaggttctatttggggtttccttgcagtatttaatctctgagcctacaccatccaatacagcagccattaggcacatataggtactgagcacttgagatgagctcttagrtgtaaaatttgcatcgtatttaaaagacctaataagacatttttaaccatttaaaaaatgttacttacacattgaaatgagactatttggagtgtattgggttaaataacatgtattattaaaactaatttcatctgtttctttttactttttcaatgtggctattagaacattttatttta

SEQ ID NO: 537038 - DNA, 433 bp, Homo sapiens
ctgctgcctaggaggagggagtcctggggctctactccacagcagggaatgatgagtgacaggctttggcagacaggaagaaagaggtttccttgcacatttggggcagrtggggcagaggatcagaaacgaggcctgaagactccaagtgacaatgacaaagaagctgagtcaacctaaataatctggggacagtgggtgctgggagcagatgagcaggccgagccgtagaagctcgttgagtgtggtgcagtgttagtgtgggacaggacaggctgggctattacacccacacctggtctcgcctcctaactacgcccacctgctactggatactagccaagccactgaatattctctggtttcctaaatcctaaagcaagagtctgaaccctaacccggggaggggcacatggtagtccaggaggggcac

SEQ ID NO: 537039 - DNA, 604 bp, Homo sapiens
ctctaaatatactacacagtattatgggtaggacattgttctttatcaaaaagaaaaacaatgaactgaaaatgcagcttccagcctgaaggtgaggccacagatgatcttaaagagctggactttccagtttgtaaataccagaagcagtgcagaagcatctgcaggagaggtgacaatgagaatgcatctctgtttgtggtgatgaaaaagctctggaggtggttgcacaacactgtgaaygtattttaaagaaaaatgctttaaaactccttgcattttttagggggcaggtaatggcatgttaaagagaaagagtttatcagtgagaaataataagatgaccaggattatactatatggtccaaaatatttcctcttaaaaactcatagaggttggcatggagccatgctgtggatagactgatgggcggcctgtcaaatgggagacaggtgggagcacggagccagggccttcaggcttgcgggcagctctctgcacaacctccacaagtgagctgaaagaagaggaatctgaaacagaccctgtgctttgaggacctgaggctggcacctctttccagaccccattaacatgcagatg

SEQ ID NO: 537040 - DNA, 604 bp, Homo sapiens
ctctaaatatactacacagtattatgggtaggacattgttctttatcaaaaagaaaaacaatgaactgaaaatgcagcttccagcctgaaggtgaggccacagatgatcttaaagagctggactttccagtttgtaaataccagaagcagtgcagaagcatctgcaggagaggtgacaatgagaatgcatctctgtttgtggtgatgaaaaagctctggaggtggttgcacaacactgtgaacgtattttaaagaaaaatgctttaaaactccttgcattttttagggggcaggtaatggcatgttaaagagaaagagtttatcagtgagaaataataagatgascaggattatactatatggtccaaaatatttcctcttaaaaactcatagaggttggcatggagccatgctgtggatagactgatgggcggcctgtcaaatgggagacaggtgggagcacggagccagggccttcaggcttgcgggcagctctctgcacaacctccacaagtgagctgaaagaagaggaatctgaaacagaccctgtgctttgaggacctgaggctggcacctctttccagaccccattaacatgcagatg

SEQ ID NO: 537041 - DNA, 583 bp, Homo sapiens
tgaagagttgataccaaaggaggcttttggatttccagtgccaaagaccattatatgtaagtgtttaagtaaaagactgtatttctcagtgtccattgaagatttttgtgaccatacaaaaaataagtgttgattggaatatctggttatattctttaagaagcaagcagaacaaataaattaagcaagcatttgttgccctattagggttttctggtggcttttttttttttttttttgagacaggatctcacttgtcgcccaggctggagtgcaatggtgctatctcagctcgctgcaactcccacccacygggctcaactgatcctcccacctcagcctcctgagtagttgggactatgcagcatgacacctggctaatttttgtatttttttgtagaatttttttttttgcagaagagtggtaagcatgtcaatgaggtgaggaagtgcacagcctaaaacataaggaaggagagctgctgcaggaatgaaaagtggtctggtttggctgctgcccatggaggcaagaggggagtgtcaggaatcagctcgaagaagtagacggaggcagttcacgcag

SEQ ID NO: 537042 - DNA, 617 bp, Homo sapiens
ctgatactttgaacattttgtcattttgtttggctatcttttggctaaatccaaaagattattagttcattttctatctttcaagtcactacaactacaacgtgtaattaaaaataatattttcccctgtattcatgrattcctattttcccagcctccccaaatgatgatttgattattatctgctatgtgtgccctaaatcaatgccacagcttttctttattgcagcaccttgttacttttgtcaaattccacacagttatccattggcacaatgaattttacatttactgatggaaaacatatgacagaggctttcaggtataacgtgattatgtgcaaaattttattattctacagggcagtcaaaggtttattcaaaacatagagccctctatagctttcctattttaattatctgttaaaagtcattgattttgaagtgtaggtaatgaagttaggaatgaaaagcaagtgggttattccatcctaggtagaacgttttaatttttggtactgagcaaaagaggatttttcttgggagatttttctctttctttcttgttttctctgtctctctctccctttctttttttttcctttaacttttacagcc

SEQ ID NO: 537043 - DNA, 620 bp, Homo sapiens
aacataaattggagtaatcataaggagcagcatacgagtttggtcagcaactgcttggtttgcaaattgtwtgtgaaagacttggagttataataatggctctaggcttaaaaccaccatattaaccctcttgtttttactatcttcaatttattatatggcttggagagtgtgttctgcatgtgtagctctgtctctttttcctataatgttctcaaccatctcacctaattcaattttgtcagcactttgtaaaggcctgttagaccaatcccactgaaatcacatgcctatttttatatctacagcattttatgccctttttttggtgtttgaaaccttatacacagagattttcctcaataaaaatttgttgaattcattaataaattaaaaaataaaccaattaatcaaatctaatgccaaagggccagagtaatgattttttttttttctctaggatttttggggcaaaaatgtggccatctcaagcagcttcaacattttaatttagggcaagcaagccccaaaatttgggcttggcccaggatggttcttgccatcacccaggaaagaatttaggcagccagtgttattagacaacaaattttattgaagta

SEQ ID NO: 537044 - DNA, 582 bp, Homo sapiens
ctcagataaccgaatttaagcaaaccattcgttcatcacattggctaggtaagtccttttaaacaatattgtgaagtaatgtcaccaggaagtatatgagatttttaataaagaggttggcatctcatgaaaagaacctaagtttcactgaaacgagattttcctattttaaaagaaatttaaaaattttcaagtgttcaacagaaaagaccttcatcagtgaggaaaaacacagtatttctgatttctgctcccagcaaattcatctcttgccctgacagagccagcacaattggtactttaaaactgctggaatcttgaataatatccaaatgcaatgaagtgcttcgaatctaaaaatactgttgtgcagaatgatattcaaggtcttaaattttatttgtgttatacctcatccaagctatgcygacattttttgggaaagaggaactccatataaaaatgatgggaggcagccatgaagtcttcgaagttcttgaactctccactgacctataccaggtaccgagaaaaggtaccaaaggatgatcactgcatgccaagcactgtgctgtgagcttt

SEQ ID NO: 537045 - DNA, 524 bp, Homo sapiens
ctgcaccatgttatactcccacctgcagtgtatgagggtcccaatttctccacatccttgctgatgcttgttattatttcatttcattccatttctttgtcctcaagggctaaggtctggtgatattactcagctccatcttgtaacttattagtaatctccattataaagtccatccctcctgcatggttttctaaatattttatttttcatttctagagtctctaattggttctttttcacaatagcttatccttatttcatgagtatgattttctccctttggggatataaataatattcacttaaagttttctgtttgctttaataactctttcttttcagaggtgatttactcatttattgagtaggtatttctattttatggtaactttttttagatgtttcatgatgtcttgttttgaggttctcttaaaatcttgtctgtctgtgaatgctgatctgatgagatgtgattggagcatcctaytcagttattgtagaaaaggagatctcacactgct

SEQ ID NO: 537046 - DNA, 656 bp, Homo sapiens
tcttttgatttgaaataatagcagattgccatacataaagacaaagttaacattttgttatagcacactgctgcataatagtagacttagtaaattatattttgaaaggacgttttggaatgtaggtcaggagctgactggattcttctggaaatcacatagcatgagaatcttgagtcaagtcagtacttgactttagaactcatgcagtccaacttcctacctgatgctggaatccatcttgctatcccaaataattcatttggttattaaagaagtatttattgaggcatagtgtgtgtagatactgtcctggggatgtgttggctaaaataaaaatagacttggtccctgcccatgtgcagataggtcttttttagaaggctattaattattgttgattcagtttcttgaaaaatayaggggtattcaagttatctgtgtctcctggtgtgaattttggtactttgtgtcttttaaggaactggtctccttcatctaagtggccgaatttgtggataaagagtctaacttgtagttgggtgttcagtgctcaatcagtctcaacaagttattttttgaatcaagtactcaagttgggaagaattgacaatttaacaactttgaatttcctaatccatgaacattgaatatct

SEQ ID NO: 537047 - DNA, 552 bp, Homo sapiens
ctctaatttccatattttgaacatttttcattktgtttccagactgcttatgttttccttaatttccgaattttctatacattttcagaacccatttgcttagagtataaccaaaaaacattcatcacatacacagattacttttaatttttttctttatgaatgcatcaattgattctgtgttgtctatcaaaatgtatgatattaactgattcacaagtaatagaaacccctatttctatgcacagtacatttgtaaaaatgtgtaaaaatataaaatgttcaaaatcatgttaaaaataggagttagttcccaaggagctcaaggcattttataaaaattccttaattaagttacattatgattagtatttaacctcctgtgtattgtataatgtaaagggaatcattataccattattaaacaataaatatagataagaatattaatgcttacttgcaagtatttaactttaattctattaacctagattatttgaaatgaacttccagtagacaaaggaagtgtatttatatttgtaaataaatcca

SEQ ID NO: 537048 - DNA, 552 bp, Homo sapiens
ctctaatttccatattttgaacatttttcattgtgtttccagactgcttatgttttccttaatttccraattttctatacattttcagaacccatttgcttagagtataaccaaaaaacattcatcacatacacagattacttttaatttttttctttatgaatgcatcaattgattctgtgttgtctatcaaaatgtatgatattaactgattcacaagtaatagaaacccctatttctatgcacagtacatttgtaaaaatgtgtaaaaatataaaatgttcaaaatcatgttaaaaataggagttagttcccaaggagctcaaggcattttataaaaattccttaattaagttacattatgattagtatttaacctcctgtgtattgtataatgtaaagggaatcattataccattattaaacaataaatatagataagaatattaatgcttacttgcaagtatttaactttaattctattaacctagattatttgaaatgaacttccagtagacaaaggaagtgtatttatatttgtaaataaatcca

SEQ ID NO: 537049 - DNA, 651 bp, Homo sapiens
gcaagaactctgtgcaagttcccttatctgagtatgcccaaaaaggaaaggaatgtcctcactgaagtccactgtgtataggtggagcttgctggttggacaagaaacraagtcattggaccttacttccttatcagcgcttgcagcttgatttcttccaggctgctcttttgttggaaagacttctactgagaccttgtcctaactatctgcctaacttgttcttttttctctcctttctcaatttctagaaatagatttttttttaattttcttaaaaagtcagtttagtggcagataatctgtatactgaatttctatataaataagttcacatcatctctactttctatttagtctgttgatctttttgtctattcatgtctctgaaatatattaatagaattctaaatttcttatatgtttttaaatccagtagattgagtctctcctcaatcatttttgggtttgtttttgtttttgtgtttacttttgaaacttatttttctatatgaaatttagagtcatcttgcactttcatttgaaataatgtttaaattatatactaacgtaggaacaatgtatatcttatgatgatggtgtcttcctattcaaatttatattatatttcaccattgattcaaatggtga

SEQ ID NO: 537050 - DNA, 578 bp, Homo sapiens
tttcctagctttcaggatggaaggactttcttgtcattgcctctcagagaattatgcaaccaacaatgaaaggaaacttaagcctcaagttacattctttggagcttgggcaagactttggggaaaattctggataatgaatgaattcaaaaacattagccttgtcatgtaggacaattaagaatcctgctgttccacacgttttatgatggctcagtggagctatggcaagacgataaatgataatctggttaggattctttccattctcagattctctagtacagtttatactggagagtgtactccagagaagttagtatctgagatataaaccatgtatcttaattatttcatcacttttaaagcttaaagtttaaagataatttaggagatatggatcatagaatasggtatcactgagttactaaaatgctgttagtagaagaaattgtgagacgtttgaaatataaaatctagattatcctgaacagaccaataatgaaattaaatcagtaataaaaaatgtcctaacaaaagcccaggaccagacagattcatagcccaattttaccaga

SEQ ID NO: 537051 - DNA, 633 bp, Homo sapiens
ttgcactgggataactactttagttagtgactcattctcctttgaagaatacctttggttactatccatgcattgtcatatgtttataatatggtttacaaaatgcctattgctaatcatttattgctctctcttatcttagggttggaatgctgtggttcttgacggtatcctaatctctcttcacttgtatgccccttggtctagtgcccctccttctgataagaaaaggaactgccttatttggtcctagttaaatgccaatatgcttgtatacatatggatgccatatcatttcttcagtcagctattaatgatagttgttattaagtgaacatctatttgataacatggctaggatttgccctttggggtccatggactttcctgtagttatataaaacttttgagagcattcacatacaattcactttctgggaggaatgtctctagctttcattagattatcagagttyctgacactgtgcttggtacagtgtgaatagctttatatgaccactaaccctcatggtagtgaaatccaggggccctatatccctaaagatagagaaaattctggttccctcccttaggttcaatcccattgctctgtatttaaccaagagaaattag

SEQ ID NO: 537052 - DNA, 537 bp, Homo sapiens
caaagcctggcaagaagtaaataacaagagtgaacatggaatgaataaacaaatgtgcctgagaagaaataggattcccctaggggaagacacttagaattgtggcggcagkagtgtatgctctgatcacctcctagctgcctactttcctggacacgcacacacaccttacccttattctggtcaagaggacagcagctctagtgtagaatgctctgtgtgagtctctattattgataactgtgttctggggctccttcctatggcaagcacttattatttaaacctaaggaagattacctattcttattccatcctccgtttattccctgccttttctccttctcccttaagctcaaagtagacactcaatacgtgttggtgccttcccctattctccacgtgatgagatctttaaactttccccaagttggtcaggctcctctgggtcagctccagttggggaacatctttcctaaagtcagatacctggttccatcaacagtgctactatgggcgtaaccactagaaagtaca

SEQ ID NO: 537053 - DNA, 537 bp, Homo sapiens
caaagcctggcaagaagtaaataacaagagtgaacatggaatgaataaacaaatgtgcctgagaagaaataggattcccctaggggaagacacttagaattgtggcggcagtagtgtatgctctgatcacytcctagctgcctactttcctggacacgcacacacaccttacccttattctggtcaagaggacagcagctctagtgtagaatgctctgtgtgagtctctattattgataactgtgttctggggctccttcctatggcaagcacttattatttaaacctaaggaagattacctattcttattccatcctccgtttattccctgccttttctccttctcccttaagctcaaagtagacactcaatacgtgttggtgccttcccctattctccacgtgatgagatctttaaactttccccaagttggtcaggctcctctgggtcagctccagttggggaacatctttcctaaagtcagatacctggttccatcaacagtgctactatgggcgtaaccactagaaagtaca

SEQ ID NO: 537054 - DNA, 632 bp, Homo sapiens
attgactcacattgtgtttgaaattgactaaaatgttctggtcttcagaaagtcaattctcccttatcctatacttatgcattttcaaaaacacaggtttaacaatttacatttcaccgggtggctcaagcctgtaatcccagcactttgggaggccaaggcaggcggatcacttgaagtcaagagtttgagaccagcctggccaacatggtgaaaccccgtctctactaaaaacacaaaaattagcggggcgtggcggcgcgagcctataatcccagctactcgggaggctgaggcaggagaatcgtttgagtccaggaggtggaggttgcagtgagtcgcaattgcrccaatgcactccagcctaggcgacagagcaagacgccatttcaaaaaaaaaaaaaagagtttacatttgtcttcacccttcacctaaaatcattggttactttttggatgctgttgcaacctgaaatttttttttcttaaaaaaatattgccaagcgtattggttcatgccggtaatcccagcactttgggaggccgaaggcaggcagatcacttgaggtcaggagttcgacaccaccctggccaacatggtgaaaccccatgatgaaatataaaaattagtt

SEQ ID NO: 537055 - DNA, 634 bp, Homo sapiens
gggttccacaaggacagaaaatatagtctgaggctgtaacctcaactttagcagctgcctgaatgggtgagggggttcagacagaaaatgagaagtggctgtgagtcacaggatgttctttctagatgggccttgggaaacattccatcggtgcctgaagccaggaagtggagtgaatctggcatttctttcagaagccctcttgtctcctttctcatcccagccagcccatgccccatgtcctgtgactttagggaagcttctggctactcagagctgctctctttaggatataacaacaacagagcaygagaaactggaattctggtcctattactgccccttgccagctgtgctttcttaggcaagttacttggcctctctgaacttcggctccttcatgtgtgtatcccctgcattttatgatgattgtaaaaatgcagtgagcttaagaacaagcctggtacctatgctgggccaggcactgtactaagtgcttccccttattcgtccattaatttgccacaatagtcctgagggaggtactattgttattccatttgaggaaactgaggcacagagatgtatggaattatccaaggttacacagctgataagcatcaagccaagattt

SEQ ID NO: 537056 - DNA, 207 bp, Homo sapiens
tgtacgtgggtgcatgtgagtatttggggtggtcagggagggcttcctggaagaagggccaatggaaatgagatttggaggatgaataggaatttggcaaatgaaggcagaagggccatcggtcctggccagkaagtgagagagggcagaataagggactagaaatggcatcagcttggctgcctgagcacatcgaggtggggagga

SEQ ID NO: 537057 - DNA, 445 bp, Homo sapiens
tcttactgagtttaaccccagttcttgcaaaatgtctaggcggggattacagcttctcagaagtgggcatcctcttggcaaagggtttacccgttgttgctgctttgatgtgggaagcacagaaatagccaagcacctaactgggaatcagaaaggatttgtttggtatttggcacttctccgcaccaggcaggcttctgagtgcttcacrtgtaataatccttttaatcttcatcacagccctacgaggtgggtattattaacacccccattgtatagatgaggatacagaggcacagtgaggttaagggacttgctgaaggtcacacaactagaagaagtagagccaggtttggactcggatgttttgattctggagtctgagttcctaattacagtgctaatttttatacctttgccctccctcaagtactacccaggctaa

SEQ ID NO: 537058 - DNA, 578 bp, Homo sapiens
atgtgagacagagaacacccaggaccatgctatcctgtagacgcttctatttctttttctttttctttttttgtgatggagtctcactctgtcgcccaggttggagtgcagtggcacaatcacggctcacggcagcctttatctccagggctcaagcgatcctcaagttagcctcccgagtagctgggacaacaggcatgggctgccacgcccagctaatttttgtattttttgtagagacagagtttcaccgtgttggccaggctggtctcaaactcctgacctcaagtgatccacccgcctcagcctcccaaagtgctgggattgattacaggcacgagccactgtgcctggaccgaagcttctgtttctttgctgattaaaactagggtctggatctgtgggctcacagacacttctctaaggatggggctcatggagagagctgtgctcccaggtctgcttggactaaatcttcctgaaaaggcaagctcgcccgtcctacatttgggagagtgaggygatgcaggaaaatttggaagaacttaggaggaagagctgcgaccagaggaacttgg

SEQ ID NO: 537059 - DNA, 612 bp, Homo sapiens
ctgcatccttagccaccagcctccttttgttcctatttgttgtctgggcctgtcctccagtcttctggttgaatctgcccctgttaactaactagtgagttcaatttttgcatcaggtagccagagttcatttctgttgctagcgaccatgagaaccctgcctggtacagaccatctgatgattcctctggtgattgtagtagggagtgtagagcagcgtagagtcagcattgttagagaaatgctacctcccctttcccaaaattaaaaagaaaagagaaagaaagaaaaaaagtgatatacagttccttccatatccagggcatcttgcccagggatctccagaagcggccacatctgtccaccgccccaagatcatgtttaggtccacagcacacttgattttaagattctcgaaggcagggactgtgtgtttgttcatttacctaacacatgttcctgaagggcccacagtgtgccagcctgtgggctgggtgccraggacacaaagagcaaatgacatcattttggtcctcagagaagctacagtccagttggagagatagagacagaaacagttgggaagcagtaggatgatgccatccttcaggc

SEQ ID NO: 537060 - DNA, 644 bp, Homo sapiens
ctactaggaaacatatgtgtaagagtagatttcaaaggccttaatgcatctcccagctccatctctgactctgtaatgttgtasaagtcacttaaatctctcatcccctgtcgacttaactactaaatgagaccagttatacaattgagtgagaggagaaaatagttgatatagatggaagagctttgaagattctgcactctctcatatgcattgtatcagtattactattaggtcacatggaccctcatctatgactgaccaagatgttgcgtacacgagctaaaggaatccaattcactatcccagggttgcatcgcagtggatttcatacaggctaagaaaaaacaaaaacgtttttaagcctccatcatcaggtcaaaacaataaacataaaattatgatatccttaacaatgtcctgggttaatattttattccacaaatcaagatttcagaactctttaccctctaagagatagagattgaacatgcctttataggctttgaatttcataacttctaatctatgctcataacctggaaaatgtcatcatactgaatgcgctcatgaaaaggtacttttaggacctgccagtgacagtttatacacacatcagtcccttttcaaatgtcatttccatt

SEQ ID NO: 537061 - DNA, 453 bp, Homo sapiens
ctgcaagctcacggcttcctcgggagggtctggttctgcttygggtgcttgaggtccttgggccgggtatcagagtcaggagcgtgaaattatgcaggccactggccccttttgttcctcatacccctttggacagagttggcagggatgatcaactcccttttgtgaatgaacagactgaagccaaactgccctcgaggcccttatgagatgggcggagcagggtagaatggagaagaaggcctccaggggacctggggatggccctggttctcctcctttataagggtaggtgagtggatggtttttaaataagcagcccataaatggcagcttcgctgagatctggcacaggggctaggagcactacatctgggatcaggccttgctttgtgactcccaggaagtcctgcaccctctctgagcctctgccttcttacttacaaagtagtc

SEQ ID NO: 537062 - DNA, 453 bp, Homo sapiens
ctgcaagctcacggcttcctcgggagggtctggttctgcttcgggtgcttgaggtccttgggccgggtatcagagtcaggagcgtgaaattatgcaggccactggccccttttgttcctcatacccctttggacagagttggcagggatgatcaactcccttttgtgaatgaacagactgaagccaaactgccctcgaggcccttatgagatgggcggagcrgggtagaatggagaagaaggcctccaggggacctggggatggccctggttctcctcctttataagggtaggtgagtggatggtttttaaataagcagcccataaatggcagcttcgctgagatctggcacaggggctaggagcactacatctgggatcaggccttgctttgtgactcccaggaagtcctgcaccctctctgagcctctgccttcttacttacaaagtagtc

SEQ ID NO: 537063 - DNA, 652 bp, Homo sapiens
ttacaaagcacacaagttcaaggataaaatgattaagaattttaacgtggttggtgatagtggagcattaaatcaatgggtagggcccttcagagcagggccctgtgtgactgcacaggtcgtatacccacacagccaacccgggtactgcatttgattttctgttgtcttctattttattaaaaataaccccactagttgcaccccgttaaactgatgttaccatctactaatgggtcatggttggcagattagaaaacactggtaaattcatgaaacgcatggactgtgtgtcaggctgctgtattagagtcctgcttctaccacttgctgcctgtgaacttgaaaatatctccgtttctcgtgtaaaatgcaggttctagtagttcataaagttgttatgggaactaaattattaaatacatgtaatatgcttaaagtggtgttcattatrtaataaatatcctctaagtattaatcatcatcatcattattgacttatatcttgctgtaggtaaatgttgaataaaaaaatgtttcttgactatatcagcattcccacttatcctaaaacagatattttcttaagtttaccaacatctgtgttttcttgtgtctggaagtatataaaatataacaacaaaataaaagt

SEQ ID NO: 537064 - DNA, 526 bp, Homo sapiens
actaacctcacaacaattatttaagaaaaacacgatgatgatcctaatttgcagataaggaaactgaagcacagggaattaggtaaacttgtccaaaattctccaagtagtgacaaaaggatttgaattctttgaccattggattgtaataactattttcctaagataaagtacagagcaaagacatatttatgttaaattcaatgtatgttcaagagttacttccagcctagtggctccaagaccagtgcctcrctgtcacctggggaccttgtcaaatgcaaagtgtgagtcatgagttcagagcctatgcatctctctcagctcctgtgatgctgacaatgctggtccccaaatgacactgtgcacagtagggctgtaaatcacatataatgcatatgctcatgaatatgccacttaaaaaatcattttgggttaacagttctcactgtaatagtgccctgaaatcatgcctctttaaatgaaggtggtgtttttatcttaaaagttaccaatttactgaaag

SEQ ID NO: 537065 - DNA, 519 bp, Homo sapiens
ctgacagacactggttgcaggaacggcatgggataagcactcatgtgcattatcctttccgcctaagaaaagtactccccaaaaggctgkgcacagtggctcatgcctgtaatcccagcactttgggaggccgaggcgggcggatcacctgaagtcaggagttcgaaatcagcctggacaacatggcgaaaccccatctccactaaaaatacaaaaattagccaggcaaggtggcggggggtgcctgtaatcccagctactcggaggctgagacaggagaattgcttgaacccgggaggtggaggttgcagtgaaccgagattgcgtcactgaactccagcctgggcaacagagcgaaactctgtttcaaaaaaaaaacaaaaaaggtccccccgccccgaacaaaggagaaaggcagagcagtccctgagacaagatggggcgcaggcacaccaaggcccccggaaacctggtcagagtgtctgtcccaactggcctgccctgttcagagagatggaa

SEQ ID NO: 537066 - DNA, 519 bp, Homo sapiens
ctgacagacactggttgcaggaacggcatgggataagcactcatgtgcattatcctttccgcctaagaaaagtactccccaaaaggctgtgcacagtggctcatgcctgtaaycccagcactttgggaggccgaggcgggcggatcacctgaagtcaggagttcgaaatcagcctggacaacatggcgaaaccccatctccactaaaaatacaaaaattagccaggcaaggtggcggggggtgcctgtaatcccagctactcggaggctgagacaggagaattgcttgaacccgggaggtggaggttgcagtgaaccgagattgcgtcactgaactccagcctgggcaacagagcgaaactctgtttcaaaaaaaaaacaaaaaaggtccccccgccccgaacaaaggagaaaggcagagcagtccctgagacaagatggggcgcaggcacaccaaggcccccggaaacctggtcagagtgtctgtcccaactggcctgccctgttcagagagatggaa

SEQ ID NO: 537067 - DNA, 519 bp, Homo sapiens
ctgacagacactggttgcaggaacggcatgggataagcactcatgtgcattatcctttccgcctaagaaaagtactccccaaaaggctgtgcacagtggctcatgcctgtaatcccagcactttgggaggccgaggcrggcggatcacctgaagtcaggagttcgaaatcagcctggacaacatggcgaaaccccatctccactaaaaatacaaaaattagccaggcaaggtggcggggggtgcctgtaatcccagctactcggaggctgagacaggagaattgcttgaacccgggaggtggaggttgcagtgaaccgagattgcgtcactgaactccagcctgggcaacagagcgaaactctgtttcaaaaaaaaaacaaaaaaggtccccccgccccgaacaaaggagaaaggcagagcagtccctgagacaagatggggcgcaggcacaccaaggcccccggaaacctggtcagagtgtctgtcccaactggcctgccctgttcagagagatggaa

SEQ ID NO: 537068 - DNA, 519 bp, Homo sapiens
ctgacagacactggttgcaggaacggcatgggataagcactcatgtgcattatcctttccgcctaagaaaagtactccccaaaaggctgtgcacagtggctcatgcctgtaatcccagcactttgggaggccgaggcgggcggatcacctgaagtcaggagttcgaaatcagcctggacaacatggcgaaaccccatctccactaaaaatacaaaaattagccaggcaaggtggcggggggtgcctgtaatcccagctactcggaggctgagacaggagaattgcttgaacccgggaggtggaggttgcagtgaaccgagattgcrtcactgaactccagcctgggcaacagagcgaaactctgtttcaaaaaaaaaacaaaaaaggtccccccgccccgaacaaaggagaaaggcagagcagtccctgagacaagatggggcgcaggcacaccaaggcccccggaaacctggtcagagtgtctgtcccaactggcctgccctgttcagagagatggaa

SEQ ID NO: 537069 - DNA, 598 bp, Homo sapiens
ttggtaaagcatccatgacttcaccattcttccacccaagcttcaccatgaatttaatgtttgtttttacttcaattttcacagaattcatgttgctctggtaggtgctcttatcaagccaatctctgatccttctcagtgcctcaaactagaccmtattcagaaatattataacaagttagtgtgagtttattttggtgtaaaaaaaatttgaagtccatgcacagttttttcataatacacattttccatgaactttttgaagccccctcataaataattcaaaaatacatttgggaaaatttgagaaattatgtagggcctggtggtaattgggcatttggactggcagggtcatgtggtggctcaatgagaagccagaaagcaactctttcccattttctgggtgggggctccagcccctgagtggggataaggaggaaagcagcccttcatggaagctggctcaggagttcacccaggcttcctggagaaggggacagaagaggatgtctccttcccatgaactccacatttgagttcactggaaacataggctctgggaatggaggggaagagggcagaggaaaggctggca

SEQ ID NO: 537070 - DNA, 598 bp, Homo sapiens
ttggtaaagcatccatgacttcaccattcttccacccaagcttcaccatgaatttaatgtttgtttttacttcaattttcacagaattcatgttgctctggtaggtgctcttatcaagccaatctctgatccttctcagtgcctcaaactagaccctattcagaaatattataacaagttagtgtgagtttattttggtgtaaaaaaaatttgaagtccatgcacagttttttcataatacacattttccatgaactttttgaagccccctcataaataattcaaaaatacatttgggaaaatttgagaaattatgtagggcctggtggtaattgggcatttggactggcagggtcatgtggtggctcaatgagaagccagaaagcaactctttcccattttctgggtgggggctccagcccctgagtggggataagsaggaaagcagcccttcatggaagctggctcaggagttcacccaggcttcctggagaaggggacagaagaggatgtctccttcccatgaactccacatttgagttcactggaaacataggctctgggaatggaggggaagagggcagaggaaaggctggca

SEQ ID NO: 537071 - DNA, 619 bp, Homo sapiens
tccagctgttgtacttttcagttmtagattgtctacttgtttcctttttaggatttatatctattaacttttttaaggaaaacatcattcatatactttcctttacttctttagacatggtttcacattttttgcatgtgagatctatggagatgtgaaggattctggcaaaacagaggagtagagaggctgttaggagccagatcatgaaggatctggacaccagcttcaaaggtttggacttgagttaaggcatgttgggtggcactgaaggcttttgatcacgggatcaaattgattttgtaggaagacccaatctcaggaagtgaatagatgggtcaaagacttagaaataggttaaagagtctttttgttttgttttgttttgttttgttttttgcctgaaaaaggacttttgaagtggcagtgcaaatggaaagcaacggtcaaatgccatggtcttataaaggatggatagtcaggatttggtgactcaatgaggaggccaaggtaagcaatcactgctgatgtttaggcttggaaacatggtgacttcaagaagagcaatttgagaagagctagaagaacaaagacatattgagtaaacaaaaaatgtttg

SEQ ID NO: 537072 - DNA, 619 bp, Homo sapiens
tccagctgttgtacttttcagttctagattgtctacttgtttcctttttaggatttatatctattaacttttttaaggaaaacatcattcatatactttcctttacttctttagacatggtttcacattttttgcatgtgagatctatggagatgtgaaggattctggcaaaacagaggagtagagaggctgttaggagccagatcawgaaggatctggacaccagcttcaaaggtttggacttgagttaaggcatgttgggtggcactgaaggcttttgatcacgggatcaaattgattttgtaggaagacccaatctcaggaagtgaatagatgggtcaaagacttagaaataggttaaagagtctttttgttttgttttgttttgttttgttttttgcctgaaaaaggacttttgaagtggcagtgcaaatggaaagcaacggtcaaatgccatggtcttataaaggatggatagtcaggatttggtgactcaatgaggaggccaaggtaagcaatcactgctgatgtttaggcttggaaacatggtgacttcaagaagagcaatttgagaagagctagaagaacaaagacatattgagtaaacaaaaaatgtttg

SEQ ID NO: 537073 - DNA, 619 bp, Homo sapiens
tccagctgttgtacttttcagttctagattgtctacttgtttcctttttaggatttatatctattaacttttttaaggaaaacatcattcatatactttcctttacttctttagacatggtttcacattttttgcatgtgagatctatggagatgtgaaggattctggcaaaacagaggagtagagaggctgttaggagccagatcatgaaggatctggacaccagcttcaaaggtttggacttgagttaaggcatgttgggtggcactgaaggcttttgatcacgggatcaaattgattttgtaggaagacccaatctcaggaagtgaatagatgggtcaaagacttagaaataggttaaagagtctttttgttttgttttgttttgttttgttttttgcctgaaaaaggacttttgaagtggcagtgcaaatggaaagcaacggtcaaatgccatggtcttataaaggatggatagtcaggatttggtgactcaatgaggaggccaaggwaagcaatcactgctgatgtttaggcttggaaacatggtgacttcaagaagagcaatttgagaagagctagaagaacaaagacatattgagtaaacaaaaaatgtttg

SEQ ID NO: 537074 - DNA, 524 bp, Homo sapiens
ttgttcatttttcccttgcttttcggccaagtcgggacatggatgtatttttctccccacagctctgtgctcaagccttgcagagggagatggcagagaggaaggctgcckgcaagcagcacaggtaggtgattgtgatggacaaattttaaggatgtttttgttttaagatgaagctttgactgtctagtaaagaaaacagtgttttaattcttctacaagtcaactctttcactgtcttcaagacaggaaatgatggaaaagcagggagtgctggagagacacatgagtcaggaggcagcccagggacagctagggctagagaaccctttctggagaggtaggagctctctgggaaggcacccacttaacttctgctccacaatccacacccctgcttctcctttctggggtgagggcttgggttgggtaattgttatgtttcctggaaacagttccaagcacttactaaagagaacagttatcccgctgggtggcaggaccgtttttctcacgtgccacag

SEQ ID NO: 537075 - DNA, 448 bp, Homo sapiens
tgtgaatagcggagcacaggcccctccactgactgtggacatcattccaccctgatgtcttggttacttttaactgaggggatgagcctagaaggcaaatgggtcagctccccttccaaccttgagtcagtgggaaggctttattttttttattaccacctgagaaaagtaacactartaacattttagaatgggagccataagtgctgatgagagcagaaattttctggctatgtcttcatggatcaatatttcttcttttcttaaagaatcagaagacatagccagaaaacagagaagacaaaggtaaatgctggagtcattttccctctgcctagttcaggacagttttgtcttttcctacagcgccctctcctggcctgtcctctgctctctgggttctgtggtgccttttctaactggacttttttgaaagcaaaatcttccc

SEQ ID NO: 537076 - DNA, 630 bp, Homo sapiens
atgaaaagttattgtgtatcatttaggtccacttggtctagagtgtagtgtatttctgcattttttgttgttgattttctttctggatgacctgtccatttctgaaagtgaagtactaaagtctcctactattattaagtattagaagatactagcatattgcagtatcttgtattttagacctaataatacttgttttatatatttgagtgctttggcattggatgcatatatatttacaattgctgtatcttcatgatgaacagatccttttatcattacataatgacattctttacagtttttgacttaatgtctatgttatctaacataagtataggtactcctgttttcttttsgtttgttttcacataagtataggtactcctgtttgcttttggtttgttttcatccaatacccttttcaaccctttcatttttagtctttgtgttttttacaggtgaagtgagtctcttgtaggcagcataaagagaaccagcctgatttctaagaatgtagctaaataatcattgataaaaagatgagtatgttttttaaccatgcacgtactactcccatctcaacaaaagccaggaataaatatgtgattataccagcagaaacacttc

SEQ ID NO: 537077 - DNA, 486 bp, Homo sapiens
gcagaattaacacatctcttatactagtgtatgtcctctacacccttcaaggctcaggttaacttcaaatatttctgtgattataccagtctacacaaatmtaatgcttctccaaacacctactacttttgtagtcagtatgcctgtgtctttttaatttattttttctgtaatcgtagtattatgtatgttatattcaacctcccaattgagaatctgttacttttccactgaacctagcattgtgccaaacacattgtaaattttaataagctgactaagttatcactaaaatactatagctaaattataataattggtggaataataattcaaaatgaaagttcttattctatttgtgtataaaataaaatgttagcctagagcatcaaataggaaaaaaaaagatcctaaatatcccctccttctaaattaaggcagatatgtcctccaacagaatagtaaaatttcttatgggacatttac

SEQ ID NO: 537078 - DNA, 601 bp, Homo sapiens
gctgcagaattaacacatctcttatactagtgtatgtcctctacacccttcaaggctcaggttaacttcaaatatttctgtgattataccagtctacacaaatataatgcttctccaaacacctactacttttgtagtcagtatgcctgtgtctttttaatttattttttctgtaatcgtagtattatgtatgttatattcaacctcccaattgagaatctgttacttttccactgaacctagcattgtgcyaaacacattgtaaattttaataagctgactaagttatcactaaaatactatagctaaattataataattggtggaataataattcaaaatgaaagttcttattctatttgtgtataaaataaaatgttagcctagagcatcaaataggaaaaaaaaagatcctaaatatcccctccttctaaattaaggcagatatgtcctccaacagaatagtaaaatttcttatgggacatttacctcataatctaatccatcctatgtaagccaaaaattagatatttgggaaaaaataattaaggatgactgtgtttttgtttttatagggaatactgtagaatttttccagctt

SEQ ID NO: 537079 - DNA, 486 bp, Homo sapiens
gcagaattaacacatctcttatactagtgtatgtcctctacacccttcaaggctcaggttaacttcaaatatttctgtgattataccagtctacacaaatataatgcttctccaaacacctactacttttgtagtcagtatgcctgtgtctttttaatttattttttctgtaatcgtagtattatgtatgttatattcaacctcccaattgagaatctgttacttttccactgaacctagcattgtgccaaacacattgtaaattttaataarctgactaagttatcactaaaatactatagctaaattataataattggtggaataataattcaaaatgaaagttcttattctatttgtgtataaaataaaatgttagcctagagcatcaaataggaaaaaaaaagatcctaaatatcccctccttctaaattaaggcagatatgtcctccaacagaatagtaaaatttcttatgggacatttac

SEQ ID NO: 537080 - DNA, 601 bp, Homo sapiens
gctgcagaattaacacatctcttatactagtgtatgtcctctacacccttcaaggctcaggttaacttcaaatatttctgtgattataccagtctacacaaatataatgcttctccaaacacctactacttttgtagtcagtatgcctgtgtctttttaatttattttttctgtaatcgtagtattatgtatgttatattcaacctcccaattgagaatctgttacttttccactgaacctagcattgtgccaaacacattgtaaattttaataagctgactaagttatcactaaaatactatagctaaattataataattggtggaataataattcaaaatgaaagttcttattctatttgtgtataaaataaaatgttagcctagagcatcaaataggaaaaaaaaagatcctaaatatcccctccttctaaattaaggcagatatgtcctccaacagaatagtaaaatttctyatgggacatttacctcataatctaatccatcctatgtaagccaaaaattagatatttgggaaaaaataattaaggatgactgtgtttttgtttttatagggaatactgtagaatttttccagctt

SEQ ID NO: 537081 - DNA, 690 bp, Homo sapiens
agcagctgcagattttttttttctagcagcargcttttcagtttattcagtccacacatgtccggaaactgatgcctctcattttacaggtgtatctactttgacagtccttagctctgtgtcgccaacatgactcacttaacctaccagtgtgcaaaacctagtagaatgctgaaaaaattatcagaatggtttagaatactgaaattcatatgttgtttatttccaatcaatttccccatataactatcacttaatatttgctatctttcttagattttcaaattctctcacatactaattcaggcaatgatgtccatcttatgatattttgagcagaagtccaatccattgtaaaacacatagcaagcaattcagttgctcaaagaacactgaatattgtttttgtcctcacatagtagtctgtgttgagtacaagaactgttctacttcgcaagttctttcatggattcaggagacttaacctcacataaaaatgcctacaatattgtcatttcactttctgccttataactgagcctaccatcctgtaattgctttgccagagaataagcgtatttctaagggatttgatgaattcttttttacaaagatagtactttcaattttcatcaacacttacccaacattaggtattaatatttttcctacttttgtggttttttagat

SEQ ID NO: 537082 - DNA, 690 bp, Homo sapiens
agcagctgcagattttttttttctagcagcaagcttttcagtttattcagtccacacatgtccggaaactgatrcctctcattttacaggtgtatctactttgacagtccttagctctgtgtcgccaacatgactcacttaacctaccagtgtgcaaaacctagtagaatgctgaaaaaattatcagaatggtttagaatactgaaattcatatgttgtttatttccaatcaatttccccatataactatcacttaatatttgctatctttcttagattttcaaattctctcacatactaattcaggcaatgatgtccatcttatgatattttgagcagaagtccaatccattgtaaaacacatagcaagcaattcagttgctcaaagaacactgaatattgtttttgtcctcacatagtagtctgtgttgagtacaagaactgttctacttcgcaagttctttcatggattcaggagacttaacctcacataaaaatgcctacaatattgtcatttcactttctgccttataactgagcctaccatcctgtaattgctttgccagagaataagcgtatttctaagggatttgatgaattcttttttacaaagatagtactttcaattttcatcaacacttacccaacattaggtattaatatttttcctacttttgtggttttttagat

SEQ ID NO: 537083 - DNA, 690 bp, Homo sapiens
agcagctgcagattttttttttctagcagcaagcttttcagtttattcagtccacacatgtccggaaactgatgcctctcattttacaggtgtatctactttgacagtccttagctctgtgtygccaacatgactcacttaacctaccagtgtgcaaaacctagtagaatgctgaaaaaattatcagaatggtttagaatactgaaattcatatgttgtttatttccaatcaatttccccatataactatcacttaatatttgctatctttcttagattttcaaattctctcacatactaattcaggcaatgatgtccatcttatgatattttgagcagaagtccaatccattgtaaaacacatagcaagcaattcagttgctcaaagaacactgaatattgtttttgtcctcacatagtagtctgtgttgagtacaagaactgttctacttcgcaagttctttcatggattcaggagacttaacctcacataaaaatgcctacaatattgtcatttcactttctgccttataactgagcctaccatcctgtaattgctttgccagagaataagcgtatttctaagggatttgatgaattcttttttacaaagatagtactttcaattttcatcaacacttacccaacattaggtattaatatttttcctacttttgtggttttttagat

SEQ ID NO: 537084 - DNA, 442 bp, Homo sapiens
  misc_feature (1)...(442): n = A,T,C or G
tcttttttttgtttgttttttttttgagacagagtctcactttgttgcctaggctggagtgcagtggcacaatctcagctcactgcaacctctgcctcccaggttcaagtgattcttctgcctcagcctccggagtagctgggactacaggcgctctacccrtcaatgtgatggtatttggagatggggcctttaggaggtaattagatttagataaagtcataagggtggggccctcatgatgggattagtgaccttgaaaacagacaacaagtttaagatcagggtgccagcatgaccgaggtctggtgaggactttttcctggcttgcagacaactgcttctcactgcgcccattgacatagacgaggaccacntatctttctttcaatcatgaggggtggacccccctcacaacatgatagggcatagtgagaaggca

SEQ ID NO: 537085 - DNA, 581 bp, Homo sapiens
agcaggaaaaataatggaaacagaaatagcgtactttaaatgtgcaaaaactggagactggggagagaaatcgatgcagagrgaggctgagaataagggggagatagagtgactaaagtgatgtgagtcccatgtggggagggggatgcaatgtttattgtttaacatttctattaaatgcagccctgagcaattgccaacctgagccaggttgaatcaatgtcttctcacttaatcagctaacaagactgcagactttttttccgtttctgaattggtataaacttggatgcggcgtggtgggtgtcatagataacctctatagggacagaagcctcacaggtcaaaactggctccaaggaaagttttgcagaatgatttcctttccattcttttagaagagctacctttttttttttttttccctgacagggtctggcttgcccaggctggagtgcggtggctagtcacaggtgtaataataggcactgcagtctccaactcctggcctcaagggatcctcacatcttagcctccagaatagctaggagtaggagtagctgggactacaagcatgcaca

SEQ ID NO: 537086 - DNA, 561 bp, Homo sapiens
tattctattagaggtaagtgccgatggcctcaggcttactaaggcataacctttgtagcagcacaattttcagtgaacaacttcacattccctgcatgcacagaagcctcagctttccaggttactcttgggctagaatcactgtgaacggggctgcagtggggctagtggaaagggcacagaagccaggagacctrggtgcaagcctgtcacttgcttcctgtgtgatcttaagttgtttcacttctgagcttccattttcctccataaaatgagggtaataatttctacctatagtgttgttgtgagatttagacacaaaatgtttttaagctgtgaagtacgaaatatataaaaacattggttattatagatgaggccagcccaaaaagagtgattgacttgtccattgttccactgtaacaacaagtagagtggaaaatgtggtacaaatgcatgtcctaattctagtcaggagctgtggccacaagggccaccaaatccaaagtagcagtatcctgccacggccctgcacctgccattttagaacctgctgaaacc

SEQ ID NO: 537087 - DNA, 561 bp, Homo sapiens
tattctattagaggtaagtgccgatggcctcaggcttactaaggcataacctttgtagcagcacaattttcagtgaacaacttcacattccctgcatgcacagaagcctcagctttccaggttactcttgggctagaatcactgtgaacggggctgcagtggggctagtggaaagggcacagaagccaggagacctgggtgcaagcctgtcacttgcttcctgtgtgatcttaagttgtttcacttctgagcttccattttcctccataaaatgagggtaataatttctacctatagtgttgttgtgagatttagacacaaaatgtttttaagctgtgaagtacgaaatatataaaaacattggttattatagatgaggccagcccaaaaagrgtgattgacttgtccattgttccactgtaacaacaagtagagtggaaaatgtggtacaaatgcatgtcctaattctagtcaggagctgtggccacaagggccaccaaatccaaagtagcagtatcctgccacggccctgcacctgccattttagaacctgctgaaacc

SEQ ID NO: 537088 - DNA, 586 bp, Homo sapiens
tctgcatatatttagccattacarcccatttcctgggaggactatcactgcattctaaaatcctctagtgattcatagcactgtcactatctgcaagttggaattgcctaggaagctgtaatgaatcaaaaaaaaaaaaaagtaagcaaacaagcaaagcaaatgaaatcatccacagattgccagactataccacaggtcaattaagtcagaaactccgtgaattcgttccagaaaatatgttctgtatctcctcaggtgattttcagcctacattgagaacaaccactttgcatcacgtataaaagactcttgatggatatcttattttaatatttgattttagatagggtaattatttctctttccatttgctctttattgtcagagtttctttatccaaattttgtacatagtttctatttttttagactatgaaagaaaatattgcactgttcaatttaatcttcaaaaagcccagcagagcaggtctaatctaatacacatggtgtttctttctttctcaaatagcagagtgtgacccatcaaaaaatatctccaaaatactatttttttgtttattttt

SEQ ID NO: 537089 - DNA, 586 bp, Homo sapiens
tctgcatatatttagccattacaacccatttcctgggaggactatcactgcattctaaaatcctctagtgattcatagcactrtcactatctgcaagttggaattgcctaggaagctgtaatgaatcaaaaaaaaaaaaaagtaagcaaacaagcaaagcaaatgaaatcatccacagattgccagactataccacaggtcaattaagtcagaaactccgtgaattcgttccagaaaatatgttctgtatctcctcaggtgattttcagcctacattgagaacaaccactttgcatcacgtataaaagactcttgatggatatcttattttaatatttgattttagatagggtaattatttctctttccatttgctctttattgtcagagtttctttatccaaattttgtacatagtttctatttttttagactatgaaagaaaatattgcactgttcaatttaatcttcaaaaagcccagcagagcaggtctaatctaatacacatggtgtttctttctttctcaaatagcagagtgtgacccatcaaaaaatatctccaaaatactatttttttgtttattttt

SEQ ID NO: 537090 - DNA, 563 bp, Homo sapiens
ctgcctctaaagacaaacagaagagggaaatgtggataactaagatttctgtctttttgcatggcaaagtttctgaggtgaataagatttctgttatgttaatgcagatgaaaggaaaaatggattgcttttactggaatgaagagagaatcttagtatcagcctctcccatggaaaactctcctaggaacatcaaagggaatgccatgcctggtagcagagtagaataatctagctagcctctcccatcctgtttctggcatcaggtaagatttccaaatggtttgaattgaagcagcagacataccccctaggaactgactaagaatcacgcattctatttgacacaagctattgcatttttctttttgtttttttttttttttttttgagatggagtcttgctctgtcacccagggctggagtgcagtggcatgatcccggctcactgcaacctccgcctcttgggttcaagcgaatctcctgcctcagccacccgagtagctgggattacagkcatgtgccaccacagccagctaattttttgcatttttagtagatac

SEQ ID NO: 537091 - DNA, 639 bp, Homo sapiens
cagtggcagcttctgtaaatgcctaataagaaagagttatgctaaataaaatgaaatgtgtaaaattaaatgacaaggagaacagtaaaggacaaatgacaactaagttattaaacttcttattcaacagacagatcaatcagacaagtatctcaatatttaaagtttcaaatttcttttcttaccttgactaaattgtttaacattacaagaccacatttggataatgtaatgtttaattggtcttttgaatggaaactgatgacagttttatattctggcactttgtagttttcttcttcaggatctgactcaacaatggccatttttgctttctttttcatctaaaatgataaatcatagaaatataaggaaaaattctaagaacacaacataactagacaaatcccaataccaacattagaaaggtcagtacattttatcttttctaatttcagtaagttctattgccttaytgaaattacttggacatcagccaactaaggtcataaaggacagaagtattagagaaaataaatcatgtcatcatcagtgatagtaaaatggcagacacaatttagaaggaaaaataaaaacctaaaattactatgtgtacccgggatctgaatataaaagcac

SEQ ID NO: 537092 - DNA, 609 bp, Homo sapiens
aacactttaaaacttgcattaaaatgttcatgatattatttccttcctcatataagaaagctaacattacaattcttaaattgaatgaaacataccatcataaaaattgctttgcagagactgctaatgcaaaaacttttaagctgttcatccttttttaatgaaaaagataataagatcaataaaagcaccattctttaccacttacttagaatgaatttttatttgttcaatgtaagagagattggctatttcaatgtgtttcaatattggtataagctttaaatgacaaagatttgtgttttatgacttacctatacatcaacagcactgaattttctcaaaacttatttaggcagcatgacttggaaggaaaatattaactattgaatcacactgatgctctctggtctasttaagatagttttttagatactccatataagcctgggttttgctgacaaaattcacctacaaagcccagagagacttacagtcacttgcaggcatttctttatattaaggcctttaaaaataaaatatacaagattctgacaacacttgccttaattgcttaagaacttaaaataagcttgttggtagaaatgg

SEQ ID NO: 537093 - DNA, 521 bp, Homo sapiens
aactcacagttactagactcagcttagtggcctttggatatgggtccaactgtgggaaaaatcacgatgaaaggaaatgtagtctgataaccccttgcctctttcaggtcaagatgaaagtacttagatgggttagtaatgtatgttactaacacctcagtatatgcaaaatccatatctgttttttaaaagaggatccaccgggagaagaacccaaagaagtaagtctctrataacagcatttatggtctgtgatatctggattcagttgaccttcttggttccttccataacagtagtaaggatagtaataataataccctacctaccatttactgagtgcccaatatattccagtggctctgaaacaggcttcatgtatcatttaatgctcatgtgaagcaggtcttattttctccttatacagttgaggaaagtgaaactcagagtgggtaataacatgcccacgtttccacagtttgtaagcacctgagccagggtcaagtctgggtctttatacc

SEQ ID NO: 537094 - DNA, 623 bp, Homo sapiens
tttaatatatccatatctatatctctgcccataatctatatggtgatttgtttactccatacaattccagttacattaggtttaagcagttgccctcatttggatgctgagttattagcggcagcattaagagactactactcttaacactgttgtttgtattaagaatacaagtatttgtatcaytaaagtcaattctcatatatacatttatatatatatatatacacatatatatatatatatatgtatttccctattcatgtttcaccatacaggacacccactatcctatggttttataccactatgaggtgaaaaccatcttctaattactacatctcgaccatttgacaatatattatttcacctaagaaactcaaaaattgaaaagatcaaaggctgtagagcttgacaaaacattttgatttctccttaacccgacacttcccatggtgattctactgggcagccaattttgagaatcacaaactttgggaactgttatcttccaagtgtggatttgaactaagattttgatatatagatctgaaaaataaacaaattaaatgtagtgagtcaaagtataaaataagtaaaataatgtaaagtcatttactttt

SEQ ID NO: 537095 - DNA, 187 bp, Homo sapiens
aaaaaattgaataggggatcccttgcatcctmcactggcccatgaatcttaggatatattaaggtatattccactgcggatagggttatttaaatcttaatgccaaagaaaaaaattgtaattgcctggtgggttcttcttgcttgctgcatagatagagctgatttaccgaaatagaagtattgca

SEQ ID NO: 537096 - DNA, 585 bp, Homo sapiens
  misc_feature (1)...(585): n = A,T,C or G
aataattataatcatatgtatatatttgggtaatatannnnnnnnnnnnnnnnnnnnnnnnnnnnnnnnnnnnnnnnnnnnnnnnnnnnnnnnnnnnnnnnnnnnnnnnnnnnnnnnnnnnnnnnnnnnnnnnnnnnataaaaggtacagcctttggcctaagagattgactccgaaacatcggtccccaactctaaattttgattctacactggggcagcttttcactatgaatgtagttgcgaatctttgtttattaaatatttattgcataaaaatcttatcaggctctggtctctgggccttgaattgtgaactctgttctggctggagtcacagtatcactttgggattaccatctccattagcacttttatatttcttacttaagaaaatctgaagtagcaaaaaattgaataggggatcccttgcatcctccactggcccatgaatcttaggatatattaaggtrtattccactgcggatagggttatttaaatcttaatgccaaagaaaaaaattgtaattgcctggtgggttcttcttgcttgctgcatagatagagctgatttaccgaaatagaa

SEQ ID NO: 537097 - DNA, 652 bp, Homo sapiens
gggattgccttctcaaaatggcccttttttgtgtatgactttactggggtttttcaacctcctacctrgatcccaaagctcctacaaagtcacttttggtgggagatggttgcagaattactgttgctgtaggggtatatgagtcggggacttcatattatgtcaccttatggaggttttgtttttataaaatctgtcttgctggggttcagaactattctatgtgaaaaagatgtcacattgattcactctgtctccaggtgcctgtttactaatctcttctttgcagactccattttctctatacaaattacattatggatttttgaggttcaaagactcacaaatctagatgtgtcagtatacattcccatgtatattactgtttaacttagtgtctatgcctgtctatctatttatccatctatgtaaatttattaccactaattttttcaagagtattatatgttacatataaaatgttaataatataaacctagtagaccatattttaaatgacattctttgtaaattaaattgaatacatttaaacatttgattctaagaaatataaaagctgctttagtatttcagatgaattataattattattactgattgagttgttttattatactgtcaaactgacaga

SEQ ID NO: 537098 - DNA, 563 bp, Homo sapiens
ttttcttagaatctgacatgatgcatggtgggagagaaccaggctaggcatggtggtcagggtagtcaagagaaggaaatgtatgggaagaattctgtggtggtactagacttatgaaggagttyattattaacatagattatttcacagagtcagggacattagtccaagattccaaagatgttaatgtttcaacataatttacatctgcaaactactaacagtaacatctgttaagaaaatgattatgtggaaagagactaccaccacagggagggcagaggaggcatgcaatagtaaagaatgcatctctcatcttatcattctaatatgttttactaatgacatgttccacagtgatgggtgtaatttatatatagctgaaatccagagtgtttgatgatcaaatagtccatgaatgctacatttcaaatgtgtgtgatatttataataggatgtaaaatgcatttaaacacaagctgtgctcatttatattcatagtcagggcataagagatacagcagaagggaatgtgttcttggtgtgctaacttgtactataga

SEQ ID NO: 537099 - DNA, 428 bp, Homo sapiens
tttcccagtgtctggaggaaagtaggagcttaatttaagggccaattaacaaatgcagatggcttcatcttattgaccaacctcctcytaatgccctccagtgtttttccattagcttacccaagtatttaaaaacgctcctgtgttttctttcagtgtctttctgttcagtctctctcccttactgcaataatcttgaccccttattgtaagagacttgaataaagtcttctttgcctatataactctttagatgcaatttttctttgacaacacacatacatacacacacacatacacacacaggtttttactatcttaaatagtcttttacttgctattccattgttatagctgcaattagtagttaatattcatggtcccaacagtctgtcattccagttattccttattccacttcaatatag

SEQ ID NO: 537100 - DNA, 623 bp, Homo sapiens
atgtttctgtttactcatctgtaaaatagagccgttatagagtgaatgaaacaatgcgtattatagctggcatgtaatatgttctccataaatcttacctattattgctacgtagagagaaaaacatgggacctcctttcttccttggtcctgctgacgtgtagctctgcagtaacatctctggtgctgatgtttcaggccagattgacatagacaggactacacccatttaggcctgtgtagggcctgaaggatctaggtgtctgggtggattggatcaggaaatttcctggagtgagtagacccggatttgacctttcaatttcttgattgtgggaaagtcaaggcatggtgagtggcagacggtagctaagggcagtggccacgtaacaactgctrtggaaattttacaaatttaataattggtatggcactgctgagtaaaacaaagccctgggagagggtaggtgagctgaattgggagcaaggggacatctttccagacacccttaaagtggatgcaaagatggctatagacagccaggtcaccaagcaaagaacttctttgccctccttctgatgggttttgtctgatggaaacagctaatatggagaattttttc

SEQ ID NO: 537101 - DNA, 533 bp, Homo sapiens
tttttttttttttttttaaatctaggttggtaaaacatatacaagggggtattgggacgttctgatttcttactaaatctaaatcttccctaggtattgtgttcttgcttctcctccagcttgtaaaatgcaagtaatacaaatgttttctctattacactacacctagcataatatattatattcaggagtcattcaaaacccattgaacttggaaagttaaaatccttattaaatttaacagaggaatgttgttagcatcttccaagtgttcagtcctatgctaattagacaaaaaaggacctttgacctcaaggcatttgcagtttgataggggacatattaggagtaagaaacaatcaaaatagccaataatagctatgaatcatagggtgtaatcaagtatcaaattgcattctacaagtcacaytaaaattaaaaagtaatattgatttaataatggaacattgattccagtttgttaaatgaatgcaagttggaaaccaggtattatagaagactgagggaaattc

SEQ ID NO: 537102 - DNA, 519 bp, Homo sapiens
taactattctgaagaatacaaactaaaccagttagtacacacaaatagcctgtaatgctataatgtccattatctttatttagtttgtttaatttccttccttcctrccttccttccctcccttccttctttccttcctttctctctgttttttcctttctttctttctttctctttcttttctttctttctttttctttcttcttttcttccttcctttccctctctttctttttctttcttctttctttccttccttcctttccctctctttctttcttttttctccttccttccttccttccctccttctttttcttttcttttttcttttctttctgtagagctgaaggtcttttctttctgtagagatgagggtcttgctatcctcagcaagtgcttgcgatccccccaaagtgctgggattataggtgtgagccactgcacccagcctagtttaactttttaaaggatgctgttgcttgtctagactatacattttgtagcctttctgttact

SEQ ID NO: 537103 - DNA, 604 bp, Homo sapiens
gaggatttaaaacaaacaaacaaacaaacaaacaaacaaaaaaacagctccatgtaaaaactgttmctaggttgggtgctggtctttgcatcctcctctttccaagaccgccatgctgccctaagtctcatgttctggaatcatttcccctaccaagacccccacttgataccaaaggctccataaaccagctgtgcttattccttgtccatgactaaaatccacattcccccagaaacacaaaccccactccatggcactgcctgtgggtttaccctcaggagaaggtcccaaggtggaacacgctggtgagacccagaacaagggagagtttgtttggctcatataggaagctcagcttgctcagttttgttttctttcttttccaaactaatttggttactaatactctaaaaagcagagtagatattatgagtgctcaccaacgtccacttagcctcttctgggcacacctctcagtcccttagtagtaggtggagccacacgaccaccctggccaacagaccatgagcagaaatgacatgtgtccttaaggcagaggcagggaaaagctcctctgtgagatgacccactctttctgttt

SEQ ID NO: 537104 - DNA, 604 bp, Homo sapiens
gaggatttaaaacaaacaaacaaacaaacaaacaaacaaaaaaacagctccatgtaaaaactgttactaggttgggtgctggtctttgcatcctcctctttccaagaccgccatgctgccctaagtctcatgttctggaatcatttcccctaccaagacccccacttgataccaaaggctccataaaccagctgtgcttattccttgtccatgactaaaatccacattcccccagaaacacaaaccccactccatggcactgcctgtgggtttaccctcaggagaaggtcccaaggtggaacacrctggtgagacccagaacaagggagagtttgtttggctcatataggaagctcagcttgctcagttttgttttctttcttttccaaactaatttggttactaatactctaaaaagcagagtagatattatgagtgctcaccaacgtccacttagcctcttctgggcacacctctcagtcccttagtagtaggtggagccacacgaccaccctggccaacagaccatgagcagaaatgacatgtgtccttaaggcagaggcagggaaaagctcctctgtgagatgacccactctttctgttt

SEQ ID NO: 537105 - DNA, 643 bp, Homo sapiens
aagaggacgggcttacaaaggggcatgagcaaatttggaggtggtcatgatagatatatttactatagtcagccttccatatccccaggttccacatctgtgattcaaccaatcacagattgaaaatacttacaaaaaatgaaaaaataacaatactactacaaaaataaaaatgaaaaacaatacagtataaatactgctatttatatagcatttgcattgtattaggtattataagtaatctggagatgatttgargtatagaagtggatatgagttaggttgtaggcaaagactatgccaagttctatgccaaggacttgagcatccacagattttggtatgcaggaggtcctggaaacaatccctcacaaatactgagggttgactatatatcaattacggtgatggtttcatgggtgcatacctatgtcaaaatttatcaaattttacactgtacatttgtgctggttatagtaaatatatatggtatagtattttatagacaactgaataatgaagtgaatacacaattaaaactagctgaacttcaagtttgctgagtgagaggcaagatcatccacaatataaatatttccaggatctccaacaaattgtttaaattcatttttaaaagcaacag

SEQ ID NO: 537106 - DNA, 643 bp, Homo sapiens
aagaggacgggcttacaaaggggcatgagcaaatttggaggtggtcatgatagatatatttactatagtcagccttccatatccccaggttccacatctgtgattcaaccaatcacagattgaaaatacttacaaaaaatgaaaaaataacaatactactacaaaaataaaaatgaaaaacaatacagtataaatactgctatttatatagcatttgcattgtattaggtattataagtaatctggagatgatttgaggtatagaagtggatatgagttaggttgtaggcaaagactatgccaagtyctatgccaaggacttgagcatccacagattttggtatgcaggaggtcctggaaacaatccctcacaaatactgagggttgactatatatcaattacggtgatggtttcatgggtgcatacctatgtcaaaatttatcaaattttacactgtacatttgtgctggttatagtaaatatatatggtatagtattttatagacaactgaataatgaagtgaatacacaattaaaactagctgaacttcaagtttgctgagtgagaggcaagatcatccacaatataaatatttccaggatctccaacaaattgtttaaattcatttttaaaagcaacag

SEQ ID NO: 537107 - DNA, 597 bp, Homo sapiens
atgatatagaatggctgatactgtaacacagtttggtaatttgattagttttcaagcttgagaatgcacttccattcaggttaaaaagcaagctgccaagtggggtatacaagcaggctggcctggttttattaacagaaactgttatgttttagatgacagggaaaatattttgtatattatgcatgtgtatgtttattttcatgtacatggaaaatatctaaataatatgcactatatccttttagtgatgttgcagtgaggatctttgggagtcaaatggtgatcttttaattttgtttttgcttatttttattttctaacttctgcaacacatatgttttgttctgtagaaataaaatgctattaaaaataaaaataaaatagcaaaatcataaaagataaataagaaaaaaagtggtgtacactctcaaagaaaggaaagamaacataagaaagttatatgaataaaatagtttaaccttaaatgtgacagacactcatgtgtgttgaggagaaaaatagaattaaaaaatcctacaaaattaaaaaatcctataaaaatcctacaaaagaaataattggagaagccatttt

SEQ ID NO: 537108 - DNA, 596 bp, Homo sapiens
tgtgaggtctccccaaccccatggaactataagtttattaaacctctttcttttgtaaattgcccagtcactgatatgtctttatcagcagcgtgaaaatggactaatacagggtccaagatcagaagtcaaagatattttagtgtatatttttatgtggcttgatattcttaccttggggatacattaatttttaaaattacaaatctaggtagttttttaaaagaaattgaatcaagcagctaactaaggagaccctcacattaaattatggttctcagcttcatccaggaataatgtcccagtccacaacttccctcttctatctcttctataggatgacccttctgattacattacccatcattaatccagaaaacagagcaaaggtgacataaaaacacctttgtgactgggcacattggctcacacctgtaatcccagtgctttggaaaactgaggtgggaggatcacttaagaccaagagttcaagaccagcctgggcagcatagtgagatcgcatctctataaaaataataatataaaaargaaaaaagaaaacacctttgtgttttgcagtgacaattttaggagca

SEQ ID NO: 537109 - DNA, 651 bp, Homo sapiens
ggcatgaaattggatgagcggaaaaaatgcattcttttcaggcagaacacaggtttaaggaaacaagaggggaaaatgtacaggtgccctggagaagggacttcttctcttggaacagtctactgggcagactaggaaaggaatcagaggaagtttgagggtgagcttgttgctggggtatggcatgacatttttgctttgtagatcatagaggaagatgggcaccactgccccaactcatttcctcccagcctgagtttggtatgcctttgtcacctaaagtcatgaaggttcaatcagaattccrgtagcattaggttgtaaacacagaagtggtttcccaaaggccaacccatgtcctagttgctacttgtacttaattcaagcagctttagtgtctcactgggctggcaggtctgggaagtcagatctgacatgcagtaggatgtgctcatcatagaaatcacacttctccagagtaatttttaaggtaatgtgaactaaagttaatttctcagaaatgttgcaggccctctctctctagaagtatacttttcagtcctctaactatggttgtttttcttctttcaatgaaatcaatgcaacctatactaacttgggacaatggaccctgcaacatccagtatttca

SEQ ID NO: 537110 - DNA, 599 bp, Homo sapiens
aacccaacactgcaacaccgtcttggtcccttcatctatgataggtctggaataaagtcgttaaatctccaccttctccctgccatccctaatctgcaaggtgactgtatggacaaatgtcaacagcaaatttgggttgatggagagaccaatgactcagacttcaagtgattaagctaaacaatattgcagtcaggataagtaatagagttagctagggcaagcagagayacaagttttcaaattctccaatcctcacaaaggagagtgggctaaaaatacccttgtaactgagcatcgcagaaagactgtcctccttcaattttatgagattagagagttctacatattaattagtctggctatatgccagtgctatatattcatctgggactgatgcatctgataatcttggggtcatgcaataaacaacatgattacagagcacagcatggtatgacatactcaggcgttcactcagttcttggtctctcaaggcaaacactgtctcatttcactcctaaactagggaactgcaacaagagtcagttactcaggcatctctgaatcatattaataggcccttagggtagccatgg

SEQ ID NO: 537111 - DNA, 601 bp, Homo sapiens
aacccaacactgcaacaccgtcttggtcccttcatctatgataggtctggaataaagtcgttaaatctccaccttctccctgccatccctaatctgcaaggtgactgtatggacaaatgtcaacagcaaatttgggttgatggagagaccaatgactcagacttcaagtgattaagctaaacaatattgcagtcaggataagtaatagagttagctagggcaagcagagacacaagttttcaaattctccaatcctcacaaaggagagtgggctaaaaatacccttgtaactgagcatcgcagaaagactgtcctccttcaattttatgagattagagagttctacatattaattagtctggctatatgccagtgctatatattcatctgggactgatgcatctgataatcttggggtyatgcaataaacaacatgattacagagcacagcatggtatgacatactcaggcgttcactcagttcttggtctctcaaggcaaacactgtctcatttcactcctaaactagggaactgcaacaagagtcagttactcaggcatctctgaatcatattaataggcccttagggtagccatggga

SEQ ID NO: 537112 - DNA, 611 bp, Homo sapiens
cacaattgacatacaaataacttccagtagggatagagcttgaaaatatgctcccagcaatcttacctaggattgtattgtgcagttagacaccaggctgggttattatgctatgctgtgaggccaatgattcttatatatatttcccactccagaaccttttaaagtcagagatcactttacatgaaatgcacacctggtccaaaaaaakgccattgaaatgcaccttggaaaataatagcttaacgtgaacaattcaagtaaaagctgtctttcttttcctcttgtgaaagccataagaattaagtttcatgtctccagtttctgccagtataatactgaatttaagttcttggggatattagtttaagtaatgtactaactacttctgaaggctgaatttctaatgtatctcagaaactggatatgggaaaaatagagttttatctagacgtgcatttatttccaaaactggtgaggcacagcagttgagttctcactggagtgacccatgcgagacctaaatatccatttctgtctgttacatatttttatgtgccttaggttttacaaaaatcccttgctccatatttacccaactatagaatata

SEQ ID NO: 537113 - DNA, 598 bp, Homo sapiens
gtgccagggagcaggacatagacgttttggggaggagggcactattctgcctactgcaatggtactgaagcaaaagcaattttaaagattcttaatattttcatcagttcgataaatcagaagtgaactcttgaggagtcttaaacatttggaggaggctctgttggagagctggcccttgcatgyctccaccactatgttgcttagccatgacttatcccatttcttgaggaaagagtaatgtgttttggatctgagacacagatgactacattccccttgtcaccttcactttgccaattctccatttatttcattctatagagacctgacatattgcccttagaaactggctactccctagaatactgccaatttggggttagatgagaacgattataagatggctactcaaaatagtgcagcttgattgaaggtgtattacaacatcctcagcaaataataaaaaatagtggattaaaaaaaaaattgcattggggttttgtttaaaaggaggttacccctccctacattgctgtagcatggtgattctctttattttggtcactgttatatttcgttctgtttgcaacactat

SEQ ID NO: 537114 - DNA, 546 bp, Homo sapiens
gctatgtcaaaacaactttctcttaatgctcaagaaagcatgaaaaacactgaagatgagcggaaagtcaatgagctgcaaaatcaacctttagaattagatactatgttaagaaatgaacaattagaagagatagaggtatggaaagataaaaacactgacaacatgattgcatcatttatccagtgcaatacaatatattttaattgccaaaaacttgcttgtacagagtgaaaagtcttatttaacctttgcctgatgatcaatttggtaactgtataattatgtactaagtaagttgtataaatctttccatttagaaagtagaagagttaaaggracattagtcttctttctatttcacaaagttcctaaagacttagtgagaaaatttggagattttgacttgccatcattccttttcttacaagtatatattcttctgattctgacaaatgtatttttcctaacaatcagttctatgaggttcttccccctttgtttttacatctgtgtttacatagttatgtttatgtatttatgtgc

SEQ ID NO: 537115 - DNA, 634 bp, Homo sapiens
ggctgaagtctccagaagaacgggcagggaaccaaagcatgattgccttgaccactgacctccaggctaccaagcatggattttctgttttaaaggggcaagctgaacttcagatgaagaggatttggggagaaaaagaaaagaagaatttggaggatggaataaataacttgaagaaacaatgggaaacattggagccattacacttagaagcagaaaatcagattaagaagtgtgacataaggaacaagatgaaagagactatcttatgggccaagaatttgttgggtgaacttaatccctccattccccttctcccagatgacattctttcacagatcagaaagtgcaaagtgacacatgatggcattctagctaggcagcagtctgtggaatcgttggctgaagaggtcaaagataaggttcctagccttacaacctatgagggcrgtgatttaaataataccctagaggacttacggaatcaataccaaatgctggttttaaaatcaactcaaagatcacagcaattagaatttaagttggaagaaagaagcaatttttttgctataataaggaagtttcaacttatggttcaagaaagtgaaacactgataattcccagggtggagac

SEQ ID NO: 537116 - DNA, 540 bp, Homo sapiens
tctaaagaactgagaaggctgaataaaagatggagaaagttggtttcaaaaactcaacttgtaagttcttttgattggttgcagctttatttagatatgattcatgtaccacacaatttactcattgtaagttcataaccaattgatttctggtatatgcacagttacgtagccattaccataaaaaatttagaacatttttattacttcataaggaaaccctagcagtcactccctattttcttccaacccccaccccctaagccctacrcaaccatgaatccactgtctttctatagattagcctattctggacatttcacataatgaaatcatataatatgtgatgtcttgtgactggcttttgttacttggcataatatttttaaggttcatctgtattatagaatgtaatcgtacttcattcctttttattggcaaataataattcattgtatggatataccacattttgtttatccgttctctagtttatacacatttgagttcttttaactttttgggtttttatgaacaatg

SEQ ID NO: 537117 - DNA, 580 bp, Homo sapiens
tgtgtaaccaagctcctgttcccaatgccacctcctcccctacacaaattcttttctctccccctttgacctctgatgccttgtgctggggcattccccacatggagatcctcatccaccttggccttcaacatctcagaccaggactcctctatgtatcttccaacgcttctagtaaatttttaagaaaactgagaaaacggatttctgtaactgagataattgaaaaaatgatttctatattttcaaactatcttagtttcataactaacctctttcccttccttcttttttttttttcttttgggacagagttttgctctgtcacccgrgctggagtgcagtggcgcgatcttggctcactgcaacctctgcctcccgggttcaagtgattctcctgcctcagcctcccgagtagctgggattacaggcgcccaccaccatgcccggctaattttttgcatttttagtagagacggggtttcaccatgttgcccaggctggtttcgaactcctgagctggggcaatccgcccacctcggccttccaaagtgctgggattacaggcatgagccactgt

SEQ ID NO: 537118 - DNA, 640 bp, Homo sapiens
gggttagctactaaaaaaaatgattcaaaaaaacatagtcccttccttccaagcagagaggtccctaaagggtcacaaccagtaaatctctttcagtctccagaaaatgacttaaaagattgtaggttgggtgtggtggcttatgcctgtaatcccagcactttgggaggctgaagtgggaggatcagttgagtccagatgtttgagaccagcctgggcagtagtgagacctcatctctacagaaaaattagctgggcccccatggtggcatgcgccaagaggctgaggcaggaggattgtttgagcccaggaggcagaggttgcagtgagccgtgattattccactaaactccaacctgggcaacagagtgagactctgtcccccctgctctccagaaaaagattgcagtttaaaacttttatgaactgaagtaaaactccttcctatctccccatatgcacmcattcaaatgaatcagaaatatgaattttagatcttcctttaatgacctgagtagtgaaaaacaagaaaaagcattgtttacacatgagttgataaaccacttggggataagaaacaagatgtgtactctacagccccgtgcattctttgcatgaagcagatactcgatatatatt

SEQ ID NO: 537119 - DNA, 538 bp, Homo sapiens
gaattaaatttaaaggaatttaattgagcaatgaatgatttgcaaatagaacagccagaatcacagcagagtcagagaggctccaggggtgcctcatggtcagaacaaatttatggacaaaaaagtaaagtgatgtacagaaatcagaagtgagacacaggaatggatggattggttacaggttggcatttgccttattggaacactgcttgaacacttggcaatgtatgagtggttgaagtacatcttctgggattggccaagactcagctattgttacaggtgcatactcttaagttaggttttcaatcttgtctacctaataagttaggttgcagttcatccacaaggactcaaatatagaagtacagagtccttctcaggccatatttagtttgctttaacaaactgaattaggtggaccttgtcaattcttctggtaaagcacctatcaccttgaatgaaaaagtgagagattcttaagtccagaaaatatatgytttctccttgtgtgcttatcacagagcctggcacagag

SEQ ID NO: 537120 - DNA, 664 bp, Homo sapiens
ctgataggtccaatggcctttagaggagcagaggtctcaaaaatggttaaatgtaagtctgaaaacagatgctggaagcaaatatattctaacagggtaaccatctatgataccttctggaaaatgattgacaatgttgcccaaggcagaaaccactgagccaatgttggtaagtttaggtgacagccaagctcattcttattcctcctggaggtccttcagccttcagggaactaggaacacccctctgaaatgtacycccatcccctctaaaattagtgtccttccaaatatactcacagttgaagagggaatttgctattgcaaattagcaataggtatcacattcaaaagcatcttccctgttttagtagaaatatgtactgatgtatgatttcagagctatttgtagaaagtccaatcacttttgcaaatcacattaagatttctttcagacagtttggcaatatacgcacaatgtgatatgtgcaagccttggatccaacaagtctacctctaagtatctttcttctgaaatactcatgtaggtatgcaagtatatacccatttgaatattcatggtgacattatttgtaacaagggaaaattggagataacttgaacacctcttagtggtaaataaggttaagtaaatgatggccca

SEQ ID NO: 537121 - DNA, 607 bp, Homo sapiens
ggatacaattctgtccctcatactcctttctttcactatagaggcagtggaaaaaataagaatactgagatatatatatcagtattatatacacatatagatcatatatatgtacataatacagtggaaaaaatactgatatatatatatatcattattataaacatatgtatataagatatatacatagtatacacacacatagatatatgcatataagatatataaatacacacacacacacacacacacacacayatctcacagtgacaaatggcataaaatcctgtgaaaagaccagaatttaaagttaaacaaaggagccttcagatatgcccctcacttgcccagccatgccttaattccttatactgcctagtgatgtccagtgatgctcagcagtacaggttgcattagttcactgagatccagttttctcacttataaaaagggaaatcaattaagtcatttattcaatatctctttactgagcacctactattttgcaggcactattccaggtgctggggatatagcagtgaacaaaacacacagaaattcttccctctctatgctccctttccaccccacagcacctccttgagct

SEQ ID NO: 537122 - DNA, 607 bp, Homo sapiens
ggatacaattctgtccctcatactcctttctttcactatagaggcagtggaaaaaataagaatactgagatatatatatcagtattatatacacatatagatcatatatatgtacataatacagtggaaaaaatactgatatatatatatatcattattataaacatatgtatataagatatatacatagtatacacacacatagatatatgcatataagatatataaatacacacacacacacacacacacacacacatctcacagtgacaaatggcataaaaycctgtgaaaagaccagaatttaaagttaaacaaaggagccttcagatatgcccctcacttgcccagccatgccttaattccttatactgcctagtgatgtccagtgatgctcagcagtacaggttgcattagttcactgagatccagttttctcacttataaaaagggaaatcaattaagtcatttattcaatatctctttactgagcacctactattttgcaggcactattccaggtgctggggatatagcagtgaacaaaacacacagaaattcttccctctctatgctccctttccaccccacagcacctccttgagct

SEQ ID NO: 537123 - DNA, 618 bp, Homo sapiens
ctggaagtatttggaggtcaaagctctaaaatgaaagttagggcratgcaaaaagatgcggagtgtaaataataggtgctccatacacgtctattcccttcaccttactttataatttttattgaagtcagaaacaagcaagatcaacatcctttatatgcatgtgctaggaaggtttcatgaaaatgagtgaaaaaatctttgaaaaatgaatgttgcttaataatgcttgtaatatggtgtaacccaggaatacaacgtccttggagtcaacattatatactcaggttcatcttatcttgctgcattctacatattcatagtctttttggtacatactcaccactgacagctcaactcattatagcaatccaaggcagacagaaaacagagtgcaaacatatatctcaggccctgcattgtcagtgaaggacaaaataataacagggaaatttctccttcctcaagttgggtaatattcagctttatgtgtccaattctgttctaagttacataacagcataaagcattctgtaattttgcatctaaaattaaaataatttcatacaccacataagagtcaatagaagaaaaaggtaaaatggaaggatgtaaaag

SEQ ID NO: 537124 - DNA, 424 bp, Homo sapiens
ttcaatcaccctctgattaaattttggcctgccttcatgttaaaaatcataaaacagaaaactcattctgcactagttctttctcccaaatttgaactctacttccaactctccatgcttttgtttactctcaaagagctttcctctttgtttattgttcagggtttatagttattatctttgtgagggtcagccataccagaaatggcaaaagtttattttgtgtattcattttactgtatgtgcaaatattttgttgcttcagactgttttttagtactgcatayggattgaaattttactaatttttcccatagcaaatctttaatacccataattatgttcattttcccctataatttattgactttgtgaatattctagacttttctataaaccaaaaacaaaacaaagaatcctataa

SEQ ID NO: 537125 - DNA, 398 bp, Homo sapiens
ctggaagtatctagacaccgttcaagttgtatatctagtatgtgttatatttttcaatgtatctgtcaactggrtgttaatatttttaatcatttctccttaaagtaatattaataatttgagcatttaaaatactacacatatatttaaaggtttgttttttattccttacatttgctcttctgtttagcaaggaacccacttaatgtgaaaactcgtagtttagaaatgaaaacaaatcgatattttataatttctctcctaatctggcaaacttacactatttataatatataattttgataaatgcttatggtatagtattttaatattcttcttagactctgaaatacaagagcttcctgtttcaagaccaaaccaaagcacataaaatgtaa

SEQ ID NO: 537126 - DNA, 615 bp, Homo sapiens
gggagcaaggagggtgggttaggtgacctggcccagcatgccatgtgagccagggctacagaggggccaggactcaattcatcctgaaggcaaagctgactacacagtttccagactggagctggcaagtgaaaatacaggacacccagttagatctgaatttcagatagacagtgaataattgtttagcatacctataccctgtgcaatatgaagacaagcttgtactaaaaatttagtcatttgtttatctgaaattcaaatttagctggatgtcctgtgttttacctggcaaacctacatgtaggccactagacctgtttacgaggacagttaattgtgcaatatgtattcactaggtatctactgtgtacacagaattgaagtggatcttcccctcaacaactcattctcccagctttctcccaaggacatctcctagcatctcagttgctctagcctcactcccctcctcccagcagtcaactcattggtaaattctgttcattcatcatccgaaatgtatcataaacacactttgytctctttgtatctatggcaaccttctagccagcctcagcctttagcttcttggactactcaagtggttgtgca

SEQ ID NO: 537127 - DNA, 631 bp, Homo sapiens
aaaaaaaaggtttcatataatatccttaataccaatgtaaaccagaatatctcacagaaaaaatcatttaattggaaaatcatarcggtaaaaggaaaaaaatcatcattttgaaggaattagtttcaaaaagtacttgcatcagaaaagaaggtaatggatactgatggatgtgttcgtttgactacaataggcattttactatgcatatcaagacatgttattcaccttatatataataaaaataaattttttaaaagtatttgcaaaattagaatttgaaatgcagaagcctatccaacaactccaatgctacagaaatcttagaaaatcacaccttatgaaattaataacaatgtatgcataatataatttcatattttttggcttggaacaattctcagaaaaaataaattttgctaaagactgcttaaaactatcaatctggcttcttatataactcattgtgtgcaggggcgattggtttttcatataagtcattgttgaaggaagctctttttccttaatgtatacctagctcagtctaaaaaccagtccctctcaccaacatctattctttcatatttctaatccaaacaaataaggaggttctgctaaatgtctcccttcc

SEQ ID NO: 537128 - DNA, 432 bp, Homo sapiens
attcaatgtagaatatattaaaaatacacataaaaaaaattacttgctcataatctcttcacccagagataactactggctacatttttagaataaatatacagggatcattccccatcactataatcttgtttctcttaatattaaaaatcatttcatgtcattaagtggtcctctccatctttctcaactgctgtatcacaagtcataccatacccatacagtacaataaattatttaattactccttgcttttcttgatgtttaggttgcttataattaatcattattgcaatcaacactgtaacaatcatgtctgtagctagatatttaamcacatctatgattatttccttaagataaattttctaaagaatgtttagatcaaaggatatttaaaaaattatccccaggaggaagttttgctaattt

SEQ ID NO: 537129 - DNA, 519 bp, Homo sapiens
aagtgtctcccctcaacaataactttttaagatctacttacaagtaggttatttattggatacattgcccataaggagagcaacttgccatcccaatctcatgggaatgtgctcttgaaaaaagtctttcttctcgctatagaggtagatctcttttagtggttttacagatttcaatgaaatttaatgaatagcaggtgaacctacccatgttttcacttccagggtgtccacttgacctgtcattaaacatatgtgacaattttgtaggaagggtggtagtggaattggaagagaaccattttctaccaaatacctattatgtgccctgcactttggctcacaacaaaatgagaaaaacaaataaattagataagttcagtcacttgggcagggtcacatactatgtaatgcttcctagaattagatctagaaccatctggttttgtccatcctatttctaccacagtgtatgttgtgmaaaacccttaagcactttatgttaaagttatatcttta

SEQ ID NO: 537130 - DNA, 580 bp, Homo sapiens
attttaaaaatgagatgtgtaacaaattagattagaaaacaaaatggctagacatgcaggttagaacttttggggcagatactaacaagccagctatatataattaggagacagccggatcctactacagtcaccatttcagccttccagagaggcaggattgtgctcctccacagatggtagccaaaatcctaaaactatgtttttgtcagaaaattggaggaagattttttttttcttagtgacaacttctgrttctttgctatacccacaagtcatcaagtgtaggaaatttaagctagagtcactaatttgctatttattgtaacaacactgcctggtgtttatacagcacattccattctgtgatctccaagaatgttacgatctttttctactaaaacagatggagaaactaaggcacgctagaccacccacatagtcaccctgagaagccaagagtagaagccatcttatggatcacttggcctgaattgtcctgccaggactgagtcaagattcagtttaacaaaaagacgcaatactgaaaaggtgggcttcccttagcacagaagctcag

SEQ ID NO: 537131 - DNA, 521 bp, Homo sapiens
  misc_feature (1)...(521): n = A,T,C or G
gctgaggcagcctatcaaggatctccttacatantggagaaactggaaaaatcatattgatgtgcatgtgcattctatttgaagatggttaatactttctccccagacaatttaggcatttgtcttctttccaattcatttcatcactggattgctaaaaatcattccttttactccatgaatttcctagccaagttcactgctaaccaaaattaagaaaaagaagcattccagatgcttctgtctcagataattttagaacttgaatctcaacacaggacatctgaaggcaaaatcacctttcagaagtagccaaactcrgttctgtgaatttgtaaatgaagaaatctaaatgaccggctctcccctcactttatatccacagacatttattgagcacttactaaaagaaccctagttattggcagagagataggttacagtaagccagaaaaatgtgccctgatcactacaactaatcccaatactgagtgaaaagtaaatgagcaatgaggcatcag

SEQ ID NO: 537132 - DNA, 522 bp, Homo sapiens
tcctgaataagaaggaagcaattgctgcagtcatccaggcaacagctatggtgccatgagtgaggaggaagcagcagagggagtcggattctggcggaggggggaatcccatgaggaaggatttacaggatgagaagtatgagaggaacacaggaattagcttattacaatacaaaaactccaacaaatatgaaagaggcaaatcactaaagcagtttcagaaaaatatgctaccaaagggagaaaaggcaaagtagctgagattttcagacaatggctttagtacaaaagagaagcaaggggactatacatgtcatttcactrggttgacttttcattattgttgttcttaaaaccttgatctttattttcttcttaagtcgaaagctaagaatctacaaagaattatctataattggttttctctactcatgtgaattcaaaagaagccttccaaaaacgtatattgtaaattgagttgcacgaaaaaaaaaaaactcattttagaatcttcttttttat

SEQ ID NO: 537133 - DNA, 663 bp, Homo sapiens
aagcatttgtgtgtgtgtgtgtgtgtgtgtgtgtgtgygtgcgcgtgtgcacgtgcacgcacattgtggaatttttttaatggctagtaatcttgattttaatcctgtggagtaagaggtcatagcccgatttgcagagatccctgtgccagggggtagataaaggtcaatgggtgggatgcagacaggcattcagtggactctttgaaattatattcaaagttgggcatatacgtagatttctgggaacgccatcatcaaatcccctgagatcgtttggtccgaaaaggattatgagccactgctgtcaagagaatagaagagcagcaataaataaatcattttaattttatgaacagattctaaattaacctgctctcatacctctctcttggaaattagggaaatgtacttttattagctctcaaaatggtaaatattattcccttaagcattcacttagctgatagtctgaaatattatattgaaatgtctagttttgaaaggcttataaataaaatacctctgattataaataatcaattttaaagtaccctgtaagccataaaaaatgcaaaagaccagtgatatatcctctgccttcatgcctaactcatgccttaggcatggagatcaatgtgtggtgcgtcagggtatgtttat

SEQ ID NO: 537134 - DNA, 663 bp, Homo sapiens
aagcatttgtgtgtgtgtgtgtgtgtgtgtgtgtgtgtgygcgcgtgtgcacgtgcacgcacattgtggaatttttttaatggctagtaatcttgattttaatcctgtggagtaagaggtcatagcccgatttgcagagatccctgtgccagggggtagataaaggtcaatgggtgggatgcagacaggcattcagtggactctttgaaattatattcaaagttgggcatatacgtagatttctgggaacgccatcatcaaatcccctgagatcgtttggtccgaaaaggattatgagccactgctgtcaagagaatagaagagcagcaataaataaatcattttaattttatgaacagattctaaattaacctgctctcatacctctctcttggaaattagggaaatgtacttttattagctctcaaaatggtaaatattattcccttaagcattcacttagctgatagtctgaaatattatattgaaatgtctagttttgaaaggcttataaataaaatacctctgattataaataatcaattttaaagtaccctgtaagccataaaaaatgcaaaagaccagtgatatatcctctgccttcatgcctaactcatgccttaggcatggagatcaatgtgtggtgcgtcagggtatgtttat

SEQ ID NO: 537135 - DNA, 661 bp, Homo sapiens
ttaatcctgtggagtaagaggtcatagcccgatttgcagagatccctgtgccagggggtagataaaggtcaatgggtgggatgcagacaggcattcagtggactctttgaaattatattcaaagttgggcatatacgtagatttctgggaacgccatcatcaaatcccctgagatcgtttggtcckaaaaggattatgagccactgctgtcaagagaatagaagagcagcaataaataaatcattttaattttatgaacagattctaaattaacctgctctcatacctctctcttggaaattagggaaatgtacttttattagctctcaaaatggtaaatattattcccttaagcattcacttagctgatagtctgaaatattatattgaaatgtctagttttgaaaggcttataaataaaatacctctgattataaataatcaattttaaagtaccctgtaagccataaaaaatgcaaaagaccagtgatatatcctctgccttcatgcctaactcatgccttaggcatggagatcaatgtgtggtgcgtcagggtatgtttattttcgtctatcagctggatttcactaagagtgaagaaacggttggtaaacttaatttcttaacaatttgatgtcagtgatatcactgtctgtattt

SEQ ID NO: 537136 - DNA, 527 bp, Homo sapiens
aacacaggttttgcttgggtctcaagaatgccagctctcagacagaaaagtacatcatcagttctgagtattcaacttattgactgcagagtcttgaggtttctcagcttccataattaagtatgctgacatatccataaacagacacacatatatacacacacacatatcctgctggtattgttagtctgsagaaccctaacaaacttgtgttctggagataaatgtcacataatatcaattagcactactgtcctcactttatataatttagtcatatatatctctctatatataaatttataatttagtcataaatatacctaatatatccaaatatatatatatatatcatgtattagagaacataaaattgatatgtggttttagactttttttttctttgcaatttgccttgtgttaagctcaaggcttcctatgcttacacagccagagccacgtttctcttttatttcctacatataatttttctctcattaaaaataaataacatgcaagaaagagta

SEQ ID NO: 537137 - DNA, 498 bp, Homo sapiens
  misc_feature (1)...(498): n = A,T,C or G
ttatcatgatgcattananctgggttgattgaagcaataaaatcaaagtaacagtaaatgcttatacaacatgttaagtaatatttacttcaatcttagaaatgaaatgataattttacattctagcagatgtatttcttgatacctgttctgagaggacagaaacaggctcaaaattcatgcaagaggctaataacaacttagttgatagtaaaatatggagcattggatgtagagtgcattaaccttcttgtttaatctgagttgacctataagtgggcatattgttttttggggaatygggagttttctcaagtagaaagaagccccacttttcctttgatagggtaccagtcaaggaaataaatgctcttttttctacctgagttagatttgcctttcatttgctcaccctgatctgtgtggctttattgaccactacagtttaagcccatgcaacctgcatgctgtgcaagaaagaaaggtgatggacagata

SEQ ID NO: 537138 - DNA, 619 bp, Homo sapiens
aaaatagctccaaaggttgtaatttttagggctttggtggagttcaatatggtactctgaacacagaaaaatggaaagtagaatttctcagtaaaagaaagwctgttgtttcagtccagttttactattagagtgagttgtaaagaacaagtaaaagggaaaaattggatatgtgtttttgttttgttttattgccctgcaggtcccctcttttttttttttcttggtttctcaattttgaactttaatgcattaatacatcaggtatcttttacaactaaagtagcccctgaaatattttctgtgcagaaaggttaccttcaagtgcattagggtctcacattgacatacaaattcaggtttgaatccttgcaaaatcacatggtaaaatcgggcctcatttcctacatggtaaatatgcactctccttgagatggtgcatgagctttctagttcatcatagtccctcccatgcaaacaccttactcattaacttttatatgcctgttccttacaaaggcatttttagtttcaacccatatatttagagcagtggttctaaccatgggtgatttgcccccaggggccatttggcaatatctggggacattactggttt

SEQ ID NO: 537139 - DNA, 625 bp, Homo sapiens
tagaaaggacgagttttacccagaccataaaaggcccttaaatgtcagattaaagaatattcaatttatcatgtaggtgaacgggagccactgaaggctttgagcctggagttttctttttagaactgcctttggctatactcgctcctcataagaatcaacaggaggtgcttattactaagactgacatgaaggcttggggattgtgatttagtaggttcagggtgagcacacaggaacttgcttatgatcagtcagctaacagacataccactagagaatacagcaaggttggaggtagagagacaagtgagaaagcttatgccatcagtccaggtgagaactaatgacagcatacactaaggtagcaaatagcctacggagggaaggaagtaggtggattttagtcaagacttgggcaaatttggcagaactgttggtgctctatkggatgcagccctgtgtgatataaaatgtatatgctttagaatcagagaaatgtgggtttgaatcctgaccccaactgccacctacctgcagatgaactttgaggaaataatatctctgaacctcaggctctttgacttataaaatgaggataatagtacaaattttgcaggatttg

SEQ ID NO: 537140 - DNA, 628 bp, Homo sapiens
actttctaccaaagatgctcgctgagattttgagtggaattgcattgaatttatagatcagattggggaaaagtaacacctcaacaatattaagtctcttgacccatgaacaaagaatttctctctagtttttaggtattcattatgttctctgtgaaacattttataatttgcagtcagatttatccctatgcattttatacakttgacactattgtaagtggtattgctttttacatttcaattgtgcattggaattacataaaatagaattgatttttgtatattgacgttgtatcctgctagaaacaaatgcttttcagactgaagttacatttggcagtgacaatatctttcggggggtgggggtcctgcgtatttaccaggtgaaaagaatctttttcattttacttggagctttatcatcagcccaaggaagaggaacgtcccaacctatattcagttttcaggctgggcagagtgtgtaccttgtggaccaatgcatgtgaaatgttctgtatgttcatcaataggttttccttaagagtgctcatgcagttgatgaggcttcccatgtgcgtgtctgtttatctgcaatgttatcccttattttaaaatttagtattca

SEQ ID NO: 537141 - DNA, 512 bp, Homo sapiens
agaaccatgaaacaataagcaaaatggtagtacaaagtccttacttatcaataattaccttgaacatgaatggattaaattatccaatcaaaaaacacagtgtctgagtggattaaaaaaactagatccaactatatgctgcccatgacagactcatttcatctgtaaaaatacacacagactgatggtgaaggaatggaaaaagatattccatggaaacagaaaccaaaggagagcaggagtaactttacttrtatcatataaaacaaactttaagtcagaagttgtaaaggagaaacaaagttcctatataatgataaaagggtcaattcaataagaggatataatagtaagttatatgaaggtacttttactccactcctcccattttaaattttcagtgtcacaatttatatattttatattgcatatcccttaataagttatgtagctattgttttttataaatatatatgaacccaacatcagagcacctaaagataaataccaaa

SEQ ID NO: 537142 - DNA, 640 bp, Homo sapiens
ctgcggactcctgttctctacacgatgggaattgagaaacagggctaacgccggtcaatgctatttgtccatctgggcattggtctccctaggtattgrtcacaattggagggggatggaatgtggcttctcaaatcaaaggagcatagtggcttgaagtcatcaagagtattctgtgtctgaaattcaatcctcagtgaaggacccctgcagtattgtgtttggacttaaacttgctttgctgttttagttgtttttatcaagtggaaaagctgctttttgtgacattctttcatcctgccatcctttgcgtccttccagcagtatttggtatctgtaggggagagagagaaaaaaaatcaaatgagcatttttgtcaggtccacctgatggctgagtctggagggattgctaagcagtgatatctcactgggatctcctgctgggaggatgagctgaagggtgagtcctgggctgtcagaagggggaagcaccatccacaagtgagaagaaaacactcctgaacttccagtcagcctggggtgcaggatataaggaccccacctatgcccaaccagcagtgggcaacatcatcccctttcctcctgatcccctctgtctggagcagagtgagggcttt

SEQ ID NO: 537143 - DNA, 640 bp, Homo sapiens
ctgcggactcctgttctctacacgatgggaattgagaaacagggctaacgccggtcaatgctatttgtccatctgggcattggtctccctaggtattgatcacaattggagggggatggaatgtggcttctcaaatcaaaggagcatagtggcttgaagtcatcaagagtattctgtgtctgaaattcaatcctcagtgaaggacccctgcagtattgtgtttggacttaaacttgctttgctgttttagttgtttttatcaagtggaaaagctgctttttgtgacattctttcatcctgccatcctttgcgtccttccagcagtatttggtatctgtaggggagagagagaaaaaaaatcaaatgagcatttttgtcaggtccacctgrtggctgagtctggagggattgctaagcagtgatatctcactgggatctcctgctgggaggatgagctgaagggtgagtcctgggctgtcagaagggggaagcaccatccacaagtgagaagaaaacactcctgaacttccagtcagcctggggtgcaggatataaggaccccacctatgcccaaccagcagtgggcaacatcatcccctttcctcctgatcccctctgtctggagcagagtgagggcttt

SEQ ID NO: 537144 - DNA, 629 bp, Homo sapiens
tgcgagcgcaattcctggttgatttctaggatgttcatctctgccctctcgctggacaaagggtcggcagataccaccatgctgacgtttgtggcagaagaggtagagccagggactggggagaagaaacccagacacatgatgggtcaaaaaatagtgaaatcaattaggtttaatcaggactgagagatgacaattactggaattgttaacttacrgttgagaaaaagttgatgaacacgacacaacactttagagtccttaaccgcaaaaacagggaccgggatgcctgagctcagagctgaaggcactgcctgtagctccgactctgacaagagtgagggaggtagcagccagcgtaccaggtaacggtctgcagttgcaataacagaattagaaggtgggggtgtcatggaatcttagaaaccctgcattccaattgcccaggctgtgctgaaacactaggccccctggtctcacctgagggtcactgatggggaccatttcttcagcagtcactctcagtatttgtgcacccttgtgacaatgctacaggcccacctctttctcaatacatataagcatattcctcattgttcatctcttgtgtgtataaaatcatcaaggta

SEQ ID NO: 537145 - DNA, 629 bp, Homo sapiens
tgcgagcgcaattcctggttgatttctaggatgttcatctctgccctctcgctggacaaagggtcggcagataccaccatgctgacgtttgtggcagaagaggtagagccagggactggggagaagaaacccagacacatgatgggtcaaaaaatagtgaaatcaattaggtttaatcaggactgagagatgacaattactggaattgttaacttacagttgagaaaaagttgatgaacacgacacaacactttagagtccttaaccgcaaaaacagggaccgggatgcctgagctcagagctgaaggyactgcctgtagctccgactctgacaagagtgagggaggtagcagccagcgtaccaggtaacggtctgcagttgcaataacagaattagaaggtgggggtgtcatggaatcttagaaaccctgcattccaattgcccaggctgtgctgaaacactaggccccctggtctcacctgagggtcactgatggggaccatttcttcagcagtcactctcagtatttgtgcacccttgtgacaatgctacaggcccacctctttctcaatacatataagcatattcctcattgttcatctcttgtgtgtataaaatcatcaaggta

SEQ ID NO: 537146 - DNA, 651 bp, Homo sapiens
gctgactggaaaaagaattcgttagtaattggctattgtgaaaagggcctttcttgctaactagggcaatatgaaagaaaagaactgagaaaatattaaaatgaggcttggacttttaatatacataggagtaaataagattttgtttttctaaaccawtctagctaggttaggattatacaagaaattttcatttccttaaaatttagttaattagcattacttattagttgtaagtattgctatgagtttgagcttgttagccttaccatatttatcttactgcctttacatatttaatgttttgatcaagcattttaattgatttttaaaactgcatagatgtaaactaccaacaccgattctaaaaaatgaaaagcatttaaagaaactgtttttgacagcatgcgttataaaaagggccagccacaaaaatttaacattatgaattgataagagaaaaatgaagaaagtatagggcttttttgaagaatataacatattaaacttcatttcagctcacatgagcacaagtactagagaggacagcaaatgagcaccattcctgtgtgtgaaatgtacatgcttatatagacaactttttcttaattctaggaaaacagacagttgctaaatgaaagaattaaatta

SEQ ID NO: 537147 - DNA, 651 bp, Homo sapiens
gctgactggaaaaagaattcgttagtaattggctattgtgaaaagggcctttcttgctaactagggcaatatgaaagaaaagaactgagaaaatattaaaatgaggcttggacttttaatatacataggagtaaataagattttgtttttctaaaccaatctagctaggttaggattatacaagaaattttcatttccttaaaatttagttaattagcattacttattagttgtaagtattgctatgagtttgagcttgttagccttaccatatttatcttactgcctttacatatttaatgttttgatcaagcattttaattgatttttaaaactgcatagatgtaaactaccaacaccgattctaaaaaatgaaaagcatttaaagaaactgtttttgacagcatgcgttataaaaagrgccagccacaaaaatttaacattatgaattgataagagaaaaatgaagaaagtatagggcttttttgaagaatataacatattaaacttcatttcagctcacatgagcacaagtactagagaggacagcaaatgagcaccattcctgtgtgtgaaatgtacatgcttatatagacaactttttcttaattctaggaaaacagacagttgctaaatgaaagaattaaatta

SEQ ID NO: 537148 - DNA, 574 bp, Homo sapiens
  misc_feature (1)...(574): n = A,T,C or G
aattcctagaacctatgaatatgaaaccttacatgacaaaactgattcagttcaggattttgagatggggagattatcctggatcatctggagtggcccagcgtaatcacaagagtcctgataagggaaagaagaagacaggggagttgggaaaatagaggtgacgacagaagcagaggttggagtgacacaggccagtgagccaaggcacatgagtgaccaatgcctttgcttgtaccacatctccttcctccggggtgcccttcctttgatctgagctctcatttcctgctatttgtcccaaggaccaaatttcctactttgagccttgataaaatgctcttctccccagtccaccaatgctactaacagttatctctggctgatggaattgtgggagatttyagttttttccttttggcttatcaaacattttccatattcagtaattaacgtgatgtatcaccttgcagttgaaaattatctataaaaataattaaaagaagtgagcatttggtgatatctagtttgtgcctggactttnnnnnnnnnnnnnnnnnnnnnnnnnnnnnnn

SEQ ID NO: 537149 - DNA, 603 bp, Homo sapiens
tgcaacttgctttataacacacagtaagattgttgtattatgtgtcctggaaacagcaaatgagagaaagtcattctctggctctttggaagcatagctcaaaactcctcttttccaggaagccatgcccaggttaaccctcccccttgctgctctgggcccctgtgattctggacgcaatctgcagttgttgatttgtygccaggtaccgaacaagcggtggcagaacagagctctagccacccggggctcggagcagtgatgcttttaggagaggcaaagatgctgatgtcatttgtggttgggataactgctttcctgttcaaggacattggatgtatacctaaagctctagaaccacggtttcctgacttccaaccaactgcactttgactacaatacaacacctgcagggcttattagaggacaagaggcctggctgataaattcctgaccagagggatggaggctaagcctttccctgcagccaatgccggaagttcccagtgagtcggtcgggcagaaaagagcctcctgggtcatgtcctcacttttcctcagctaaagttccctgactgtctccttcaaattcagatgtgcatc

SEQ ID NO: 537150 - DNA, 395 bp, Homo sapiens
tcggcgaggggagcctcccctttgactgtctcgctgagacctctcaggcttctagttttcaaacacgagggttgaattattcggagagctcagcagaaagcggattaagaaggggaaagccgagggagccataaactgacargtgctgcgacactctccggccaccaggggccgaagtctcaccactgcccccacccgcggcgccaggcatcgcctccctcgtggcagaaccctgtccaagtgcgcggagaaacgcaaagcgcggcagggacggctccctgaagcccaccgggtaaaagcaatgccagacatcaaaaccaggagcctccgagagccgtcatcggacaagataggaagaagagtccctaatagggccctaaaataccccctaagtt

SEQ ID NO: 537151 - DNA, 343 bp, Homo sapiens
gcttcacccctgctcaggggccagcaaatgtcccccaaggtaagcagcatgcagaacctggtctaacctcaaagaacatttctgcygcctatgatcttacccttcaaatataggcagcctccatcattcacgtatgcctttaattttatattttactttctccagcttttctagtttctctcagaggaagcatcagtctgttacatgatatttcatcatagtcagaaggtgaggtctgttgtgccagacccctactgactccagcagggatggcacgatgtcccagaggtcaaagaagagacccagggccaacaaaggagacccagggtgttttgaggactta

SEQ ID NO: 537152 - DNA, 399 bp, Homo sapiens
tgtggacaaacaggcaacaaggtcgatgctcttgctagcttaccccaaggaagcatttctgcccctgtgaactcaggaacaaatgggtaaaggagcatcacgtgaatgttgagtaagaatcacttgcacacgcagaaaaatccactttgtaatagtgaatgattagaattaactctcaattcccaacaggaaccaggaatcattcaaaagccactgagtcgagagaggctgacagcagtggcagaatgacaatgagatgcaggagctgctcccaggatgtcaaactgggactgggacaatgcaactgtagggcaggggcagcccaggaccctgctggacacagacggtgccaccccaagtctcractgtgactgggagaggccctgtaactaaatcatt

SEQ ID NO: 537153 - DNA, 549 bp, Homo sapiens
attgtatgcctgtatcaaagtatctcatgtataccataaatatatacacatatattatgtactcataaaactaaaaataaaaataggttgggtgtggtggctcttgcctgtaatttcagcagttttggaggccaagacaggtggatagcctgaggtcagaagttcgagaccagcctggccaacatggagaaaccccatctatactaaaaatacaaaattaactaggcatggtggcgcatggctgtagtaatccaagctacttgggaggctgaggcaggagaatcacttgaacctgggaggcaaaggttgcaatgagccaagatcgtgccatttcactccagcctgggcaacaagagcaaaactctgtttcaaaaaataaaaataacaaaacaaattgcaaagaaagaaaataagytctagcagaaggatgcccatgggcaccccactatcatgccaccactagcacaaacatgtatgcagatgccaccaccccactcccatcagtgtcccatcacaaccaacacatgtgcaccctgcacactgccacag

SEQ ID NO: 537154 - DNA, 552 bp, Homo sapiens
ctggaagatgtaatgcagcaggagaaaccagaccctaaatattttaccaggtgtttttctaacagtttatgattctagaattcaaattagatttttaattttagaataaggatttttaaatcattaaaattcttcagaagcttccactgcagagctagtrataataacagatcattgaagcaacagccatccctcccaaggcaacactccagccataatcaattcacttaatgcccacgggagtcaggtctttgtctcccttactgcctcaccgtttatttcaatagagaactgaacccaaaaggaatgaaatttatagtgcactttttgccactgataaactatagaattaaatagaacatataatttctaaaatgagctatgctggtgaatttatgtgaacagttacttatgagatgacttgtgggaaatcaaggtaagttcacaattactgaacacgaagcaccaactggaatttcaaacgggtagaagagacgataagatacaactatgcatatctaatagacataggattctacattaatttatata

SEQ ID NO: 537155 - DNA, 507 bp, Homo sapiens
ttttttgctgtcacagaggtcagaactaataaaagagggatattttatagagaagtaatagaacttcatagtgaggcctatttaatacttgtctctattaccaaaataggtggggtttgggcagatgagagggtctcaagtgttgctaatgaaccagcatcattaatatcacctggaaacttgttagaaatgcaaatccttgaaccctgccccagacctactgaatcagatactctgggattgggactcagcactaggtcttttaacaagccctcaggtgattctgatagatgtgaggtttgagaatcactgggatagataaactcttgtggaccctgtgctttcagatatccttggaaagcaggggtccagaagaaatgaagtcttkaagcttcttccagcttactgttgtctgtcttttgtgaacaagacacccttatcaatgtagtttatgtccatccgtattataaactataagggaaaaaagctgtctctcttggaagataa

SEQ ID NO: 537156 - DNA, 507 bp, Homo sapiens
ttttttgctgtcacagaggtcagaactaataaaagagggatattttatagagaagtaatagaacttcatagtgaggcctatttaatacttgtctctattaccaaaataggtggggtttgggcagatgagagggtctcaagtgttgctaatgaaccagcatcattaatatcacctggaaacttgttagaaatgcaaatccttgaaccctgccccagacctactgaatcagatactctgggattgggactcagcactaggtcttttaacaagccctcaggtgattctgatagatgtgaggtttgagaatcactgggatagataaactcttgtggaccctgtgctttcagatatccttggaaagcaggggtccagaagaaatgaagtctttaagcttcttccagcttactgttgyctgtcttttgtgaacaagacacccttatcaatgtagtttatgtccatccgtattataaactataagggaaaaaagctgtctctcttggaagataa

SEQ ID NO: 537157 - DNA, 578 bp, Homo sapiens
agctggcctttgccagaaccctgcctcctttccccccaccacaagacagaagccaatcttggtgcccaggcagtggtttctgttgggtagatttttaggagatgatgacttgaaaggagatgttgggatcttcctatttaagtcagtccatgaaaggaagctcacaagaagccatcaaaatttttctttgttcttttttaaatttttgagcatctggaaccctgtttatttaatcaagattatgactgttctacataagggaagaatcaagaaacyaaatttaatgataactaagtttaactagaacttataacaggcgaggcacttctaaatattttatgtgcttaaattttattaatcctcaattctgttaatcttcaccaaaaaaaaaaaaaccctatgatataggtacaaattttatagataagaaaactaaggcactggggctgactagactgcagcaaatgaggcacctcaggcacacgggcaggattctgagagtgggcgcctctgtaagtttgttgccctatgtgccttcctcaccttaccctaaagctgaccctgctaaggaaggtggg

SEQ ID NO: 537158 - DNA, 548 bp, Homo sapiens
tttcagttgtttctactttttgcccgccatgaataattactgctgggaagattcatatacaagttttgtgtggaccagtgttttcagttttggagggtatatatcttagagtggaatggctaggtcaaatagtaactatatttaaccttttgagagtcttccagacygttttccaaagcagctacacattcctaccagcagtgtatgaggcttcttatatcattacaataggaataataaaacctatttcaccattgttctgaagattaaacaaggcaaacatgtaaagtgattagggcgttattggcatcgtgagggtttaataaatgtctctttcttttccttgtcattattagaaacacctcttatcctgatccaaaatcttgagccacaggactctaactgaagagaaagaaaatgaatctactgcctcctccgaagctagtccttcagatactagaagacaattatgccctctttatcaaaggccctacttaaaccagttcagtgataatctattttctatacccgtttttcataaatagacc

SEQ ID NO: 537159 - DNA, 570 bp, Homo sapiens
gtctgactgcaaggggcttgaacttttcaccgtaacgcaggtgggagtctgtggagttgggggtggggtgatgtttcccagctaccctccacacaaaaaatggaaagtcactgtcctgattatttatctaccctaaatgtcccggggtaaaatcccatttcttccaagagaccctgccttgtttatccagcccagactgatcttgttttctgatctcccattcatttctcaaccacatactgaccctccactctgtaccagtcttaggtacacattgtgatgggccccagagatacaaatccagtaggccctggtcctgcccccaggttcctgtggtgtacaggggagagggagctgagtgacccgagcaagtttgatgtcctgctgggggcctgggcctactccaaawcacgcacatctgtcatgtatgtcccctctgtggccctaaattggattttcagtactatgttttattttctcatggattccactgcaactcacatttgttatcaggaatagggattaagccctactggcctatgcgtgcctcagttctgtcatctgtgaagt

SEQ ID NO: 537160 - DNA, 314 bp, Homo sapiens
caccaagatgacatagcttaatattggtgagccagaacartggcagacttggggacctctgtgtcattgtcagctattggcttcaccctgttgattgagcttgacaagccttctcgctcaagcaactgactactgccggcaaacagctggtatgtctagtctttgtttttaggccttttaatttgtctgattctttgaataaatggaatcaatgggttgtttaacttattaatcaagcatcaaacattattaaagggacagctacatgccccaaactgtgcttggctttgtggacagatataaaaatagatcct

SEQ ID NO: 537161 - DNA, 314 bp, Homo sapiens
caccaagatgacatagcttaatattggtgagccagaacagtggcagacttggggacctctgtgtcattgtcagctattggcttcaccctgttgattgagcttgacaagccttctcgctcaagcaactgactastgccggcaaacagctggtatgtctagtctttgtttttaggccttttaatttgtctgattctttgaataaatggaatcaatgggttgtttaacttattaatcaagcatcaaacattattaaagggacagctacatgccccaaactgtgcttggctttgtggacagatataaaaatagatcct

SEQ ID NO: 537162 - DNA, 461 bp, Homo sapiens
ctgcttttcattgcaaatcagcttgatccaattgcactgacagcgacaggctgaatgtaggccagcagcaggggttcatactggctgaatgtaagccagctcatatacttgaagaggactagctaggacaagtcacttcaccacttagcataattacctttaatgggtttagggctgtctacctggaggaagtgaacgacttacgagattctatgaacctattttcctcttcccagtccacactctctcacctgagtgatctcattttttcccarccttttctgatgacttctacatctctatcctgaatctagatgtctcatctctggtctaagctatcatctgtccaccgcttgtcttacctggatgtcccactgtcacctctaactcaacaggttccaggtggatgtcctcatccacatatccacaaaccagcttctgccctccttctggtactttct

SEQ ID NO: 537163 - DNA, 561 bp, Homo sapiens
gccattgttttccctccctcaaagtgtattgttttgatctatattgtatctacactaaatagktacaagcctggcacagagtaagtgctcaagaaatggtggtttttctgtcctcatttccttggcccccaggcagatgctctattaacatcagtgaagaactttactgatggtctatcagcttcactaacagcctaatcataagagctacctcctgagtgcagtctgctgccaggaactgggccaaggacttcatacgccctgcctcataaactcttgccaatctcatcacatacctgagaagtcagtctttaaacacattgtcgaatcacatattaaaacaacctggaaagcagatcctgttccacatacactagatcatgttattacccttctgctcaaaccctccagtggcttctcagctcctttagagtaaaatctaaaggctttacatgggctaaaatgttccagccacctcagacttctcactcttcctcaaacattcactacaagcataccacccaccttggagtccttgtacctgctgtcttccctacctgg

SEQ ID NO: 537164 - DNA, 562 bp, Homo sapiens
gcaagcaaaagatcgtgttctcatagcgtagggaaaaggtttgtagagcagtatttttaggcatgttcacaaagtatatatgctggcaaggaatagccaaagaaaatgaaaacactatttcagaaagatatctgtactcccatgttcatttcagcattattcacagtagccaagataaagaaacaaccgaagtgtctgtcaacagatgaatagattaagaaactatgatatatgtatatacacacacacatatgtatctcacactatatatatttatatctatatatagagagagatatatgtacacacacacaatggaatattattcagccttaagaaaaaaacaaaatcctgctacttaggacagcacrgatgaaactgtacaacattatactaagtgaaataagccagacacagaaagacaaatgctgtatcatctcacttaaatgtgaaatctaaaatataaaattcataagaatggcaagtgaaatggtggttaccaggggcgtgaggtggcagaaatggggagatggtagtcaaagggtacaagctttccatcatg

SEQ ID NO: 537165 - DNA, 558 bp, Homo sapiens
gaaggaaggaagtatgttcttcactctaaccccgagatcattttatgcttcttaatcagcttcatcaaattaggacaaagtgatttttagctatcatcttgggatgtattttctttgtactcctatttttttttttctttcttttctttcttttcttttttctttttcttttctttyttttttttttttgctgcattctttcttgaatttgtcttttctgtttgctgaagtatatttacaggtgcctttttttcccccagaaagggtgcatgggagagaaactaggagtccttgtgtgtttgacaaggcctttattttttcctcacactttatttttattgggcctgcagttctatgttcaaactcatttttctttagaattttgaagacatttcactattaccttcaagcatccagttttgcagtagtccaggctagaaagattcggacaaggatagaaacaatagagatggtgagatatggttggattctggatatattttgaagcaggagctaaaagaatctgccagtggactatgaaaggagtagggcctgagc

SEQ ID NO: 537166 - DNA, 537 bp, Homo sapiens
cccttcaaggcttaatttgagtcttctttgggaaatgttacctgacttctccacattccttactacctctgatcctcacccatggctgaataaggtatctctcttctggcttctcctagaacctgtgcatacctctaattatagcacttgacacacagcttacatgtctgttcacgaatttcttgagagcatgaagtttgccttagttgccttttatcccaacatgtatgcagcacagtgcctggaacacaataaatccttcttgagtaactattcttctcctggaagatctcccgcaaatgattgtggtgagtttctattgtcaaaacttataaatccacaggtgacatctttcgctattctggagccatgagagcctctrcaaaactaagcagagagggctcctaaataggatggtacggattgtgacctgtatttgttcatactttatttgaatatacttgcacatttacagaaaaattatgagaataagaataaaaagagtactcatacgttttttacacagactcacctatt

SEQ ID NO: 537167 - DNA, 537 bp, Homo sapiens
cccttcaaggcttaatttgagtcttctttgggaaatgttacctgacttctccacattccttactacctctgatcctcacccatggctgaataaggtatctctcttctggcttctcctagaacctgtgcatacctctaattatagcacttgacacacagcttacatgtctgttcacgaatttcttgagagcatgaagtttgccttagttgccttttatcccaacatgtatgcagcacagtgcctggaacacaataaatccttcttgagtaactattcttctcctggaagatctcccgcaaatgattgtggtgagtttctattgtcaaaacttataaatccacaggtgacatctttcgctattctggagccatgagagcctctacaaaactaagcagagagggctyctaaataggatggtacggattgtgacctgtatttgttcatactttatttgaatatacttgcacatttacagaaaaattatgagaataagaataaaaagagtactcatacgttttttacacagactcacctatt

SEQ ID NO: 537168 - DNA, 602 bp, Homo sapiens
ttctacctcatagggtcatgatgaggcttaaataagctaatgcatgtaaaacacttagcagagggtttgcttttattactgctttttataaagtgattttcctgattactgctgtcatccttaactggtgtgttctcattgggatggggtagagtaggacatgggggtgataatgcaagtatttacataatatccaatatatttaataatgcattaaagcaagtttgtccaaaccatggcccatgggctgcatgtgacccaggatggctttgaatgtggcycaaaacaaatttgtaaactttcttaaagcattaagaacttttttcgtgatttttttttttagctcatcagctatcattagtgttagtgtattttatgtgtggcccaacacaattcttctttgtccaatgtggctcagggaagccaaaagattggatacccctactgattaaagcgtggacataatccatcagaatgtgtgagcaatgatgaaagtcctgtggtatttctgttgggtctggcactaacccaccaatttctgatctatagaaaagtcaagggtccaggatattactagggtaacagaggaggaacttggaggg

SEQ ID NO: 537169 - DNA, 533 bp, Homo sapiens
aaaagtgaacaggcacactgtagctttaaaaagtcagccatgaaccagaaggcagttggtgcagcttgtgtgtgattcctaacgtcatgttggctgagagccagcctggttttatttcactgtgtcaaattgtacctccttattgaattcctttgccagcctactttgtgaaagaaaacattggggtttctttggctgttcttgataagcctataaaaaatgatattttttagttgcttataggtaggttttctttttactcttccacagaaaagaaaataatagtaataataataagmcaatgtagtgtggtgttgcagagtatcattgtgagtgttttgttttgttttctgagatgcttagaaaatggtgaatgtgtaacagtttccaactgaagtgaaatcatattctgttagcatggagcagcagcactatcttcctgtctactctctaacggtgtgtgaatgtatgctaatatctatatatatatattaaatgttggatttctctatcaatgatctaagtggtttgca

SEQ ID NO: 537170 - DNA, 570 bp, Homo sapiens
tgcatcactctagtctctgcctccatggccgcattgcttcctcctttttctgtctggcaggttttccctgtatgactcttataaggacactggtcactagatttggggcccacctggataaccttaagacaagatcctcaagatccttaatgacatctgcaaagatcttttttccacgtaaggtcacatttgcaggttctgacagtgaaggcatggtctctgttttgagacccattcaacccaatacacmaagtaagaggtcagtgagctgtttaagggcagctcttctggtgtatgtggatcttagctatacataagctcctcttcccttcagatctgggggatggtgccatacccctcctggtttgatcacttgtcacatagatttttataaaagggtaaagagcacggactttggatgcagatagtactaaggtttagactgggctccaccaatttctagttgtgtgatctcgagcaagtaatctctaagcttaagctctcttgtttatgaaatgggaataataataacccctacctcacagcacagggtagtgaagcattaactga

SEQ ID NO: 537171 - DNA, 570 bp, Homo sapiens
tgcatcactctagtctctgcctccatggccgcattgcttcctcctttttctgtctggcaggttttccctgtatgactcttataaggacactggtcactagatttggggcccacctggataaccttaagacaagatcctcaagatccttaatgacatctgcaaagatcttttttccacgtaaggtcacatttgcaggttctgacagtgaaggcatggtctctgttttgagacccattcaacccaatacacaaagtaagaggtcagtgagctgtttaagggcagctcttctggtgtatgtggatcttagctatacataagctmctcttcccttcagatctgggggatggtgccatacccctcctggtttgatcacttgtcacatagatttttataaaagggtaaagagcacggactttggatgcagatagtactaaggtttagactgggctccaccaatttctagttgtgtgatctcgagcaagtaatctctaagcttaagctctcttgtttatgaaatgggaataataataacccctacctcacagcacagggtagtgaagcattaactga

SEQ ID NO: 537172 - DNA, 516 bp, Homo sapiens
cactatccaagggcttacagaattccacataacgtcactcagaccaagggacaaagagaccctctttaaagtaaaggcaagctgtaagtgatcatatagtcctatcacatactttactatcccaaagctgctggcctgagagagcgatggaataatctcttaaaggcacaactgagatgtcagcttggagataataccctgtgatgatgggttactgtcctccaggatgcagtgcattccctaaatacttggctcttgtattgtgttatgtccccaataggtagaacatgtggatctggtaaccaagatgtagaaataagaatggtcccacttgctatcactcccagtgatctaccaaggaaatctgtgcttcccctaccccctgaactctaagatctgattgtgtagagggcmtattcctgggggatgcttctaccatggaacacagtgagagtgatttaaacttaaagctatagggttatgcaatcagccaacttgacaattctcaagataaaa

SEQ ID NO: 537173 - DNA, 587 bp, Homo sapiens
ctgccattccagtctttctaaactagaactattcctctgattaaaaatgaaacaaagcttattgtgactgtaatgaaatctgtgtactggacttctgttggctctgtggttctcagcagcctaccagaacacagagctttccaaactcagccctgggcacatctgttccttcatccaggctttccaccctgcgtggctctcacccttgtgtgtccgtccttgtttcttagaggagtcgtgtgcctccaaatgcatatgcctacgaccttttctttctcttgcctgaaatgccaaacttcattctccatcaggtgaattccaactcacccctgaagatgagctcaactgtctctcttgtgtgaagccttccctgacacccctgagaattttccatccacgtcaccacagagtaatgtccatcctcctgtagaaccattcactcatcacaggtctggatgcccattgttcataggaggtcttccccactagacttcaaagcttcagtgataggcgcttgtgtccctggmctacacgaggcccttattcccactgctcttttttgaaaaaataatagtttcttcaggcct

SEQ ID NO: 537174 - DNA, 508 bp, Homo sapiens
gtgacaggggatgctacgaagagtgtgcatcacccaaatgacagctcaccattgactcttaagatggaagagactttagaggctctttagtccaaacctctcatttttcaaatgaggcagaagtgtcctagagtggaaatgtgacttacccaaggtcacacaccagagactaaaaattctagaacaakgacgagtattttgatctccagtgatctggaaaactctgcatgtcaaacacccatttctgttcccagcatctggtaaccccttaattcctggtcacctccacccctcctcaatgcccagactttccgtcacatggaaacccactaggcttttgacctcacatgctgtttcagcaggcatccccctgtgctgaccttagctctagcagtgtaaggcggagctgccctccctgaactgacagaggaggctacagtgtgttgtgtgggtgtgggaggctccaggaagggcctcagtgctccctgcgcatggaagataaaatagg

SEQ ID NO: 537175 - DNA, 551 bp, Homo sapiens
aaaggccaagtttgaagagaaacaatcccaggattggtaggagtaagggttttaccaaagagatcagaatattggatcttatgacaagtttgatgaagataaattagaggaccaaaaacacagaagacattgggagttatctagaaaggcatactaaaatagggttcaaagaagtcctgaatagrttgctgctttttttgcttgtttaattggaggaatgggcaaacttcaagatttctattgaaagatttagaaaaaaagaccaactcagaaaagtctccacaatcagaatagaaatgtcctattctgttctttcaccccaaatctcacaggagtggcttagagccccttcagtgctaggggattgaaggttgctgaattacatagatctgtggcctaaggcaggtgtcccctcccgtttgcctctttttccaagcctctgatgtcctacccatgtacatgtaaagcagggggaagattggctgtcaaattagtcatggagcttcagttgggtttttggtaacatgactgagactctgtttagttgtttt

SEQ ID NO: 537176 - DNA, 592 bp, Homo sapiens
tggaaaacccagtagaagtagataagaatggaattatcagggaaaggccaagtttgaagagaaacaatcccaggattggtaggagtaagggttttaccaaagagatcagaatattggatcttatgacaagtttgatgaagataaattagaggaccaaaaacacagaagacattgggagttatctagaaaggcatactaaaatagggttcaaagaagtcctgaatagattgctgctttttttgcttgtttaattggaggaatgggcaaacttcaagatttctattgaaagatttagaaaaaaagaccaactcagaaaagtctccacaatcagaatagaaatgtcctattctgttctttcaccccaaatctcacaggagtggcttagagccccttsagtgctaggggattgaaggttgctgaattacatagatctgtggcctaaggcaggtgtcccctcccgtttgcctctttttccaagcctctgatgtcctacccatgtacatgtaaagcagggggaagattggctgtcaaattagtcatggagcttcagttgggtttttggtaacatgactgagactctgtttagttgttt

SEQ ID NO: 537177 - DNA, 681 bp, Homo sapiens
tggtggcaaaaatgcaggagttaaatccagttggaaggtcagtctcagcaaagatctgagctgaatggaaagtttctgatgaagtctcagattttcaatgattgcttcatcttttacagcctctctcccatccctggccctgggcaccctccctccacccaggctagaacttcacacagacttcaatcacaaacatcacaaaagtgtctcacaaaaatgttacctgcttccacggtaaaggatttctcagagtgaaagtcccggggtgcaggagtggcctgaagtgcgagcccgaatcctcgggctgactcaggaggaaacagctccaatgggaagggccctccctgatcacttgctccctcactttctgtggtcactgctcacatggcagtcacatggtggggcaaggagccgagcctcaggaaagttaaagaggtagggcttgactccagtccggctccttagtagctgtgtgatcctggacagtcatttattccctagatctgcactgtccaatgtagcagtcactagccacaggaagctatttgcatttacccttaattcaaataaaaggaaatacaatttaaaatcccacttcgctggtgcacttgccacactgctcaatartgccctgtggctggtggccgctgtgttgacccagctccacagcgagtgctattg

SEQ ID NO: 537178 - DNA, 286 bp, Homo sapiens
aattaaaatttgtttatgcaaaaaacaaatatatgaaaataaaaayaaatgagatatcagtcttcatttaagttggtttttacctactgatttttgatatattagaaactgaaactaaaatatttcaagtatcactatgtacaatcttctactttaataaaagtgaaaactgtgacctatggaccattaaagctatgctgttgtaacacattatttccctgaaacagtgcagtatagacttcatagtacatatgaacttcatggtacatatatgacacattttctt

SEQ ID NO: 537179 - DNA, 286 bp, Homo sapiens
aattaaaatttgtttatgcaaaaaacaaatatatgaaaataaaaacaaatgagatatcagtcttcatttaagttggtttttacctactgatttttgatatattagaaactgaaactaaaatatttcaagtatcactatgtacaatcwtctactttaataaaagtgaaaactgtgacctatggaccattaaagctatgctgttgtaacacattatttccctgaaacagtgcagtatagacttcatagtacatatgaacttcatggtacatatatgacacattttctt

SEQ ID NO: 537180 - DNA, 643 bp, Homo sapiens
cccgtgacatggcaggctcatgcctagaaattaggaggataagatccctccaactcaagcccatggggattgcttactcttctctggtgccagaagagggcaacacatgaatctctctgggaacttagatcaacctaggagttgacaatagagatagggaaagggaagaaacctccaaagactgaagatgctccccaaagtggctaagaattggaaagcaactgaaataataatctgattttaaaggtcactgattgctgtagatttattaaaattactctgtggagattggagctttaggaaagagttgaatttagatacaaaaaaaaataaagaataaagttatatttaggcaactcaattgttagtgcgtaagttttgaycctgctattatatatgcatgtgtatatatgtcatcactaatttctattacaactataaataactagctaacatttccattttatggttaacgagtgtgaggcttaatgagataagtaaattgtccatgtacacatcgtacatggagacagacttcaaatcttcaaatcctggtccacccaactccaaagtctgtgccttttccattgttaacacattgcctctgatggagaaaccaccatcaaaaacctgttagcaccac

SEQ ID NO: 537181 - DNA, 539 bp, Homo sapiens
caacttctcttctgtccagatgagtatgaatctcagagtgaaggctagacttcacsgtcatcatcatcaaacagaatttgaagcactcttcgcatatggttggaatgagtgatcataaagctcagcttagtgtttctgagagcttttcgggtcatgggggtttgtctgcatcttaccctatgtccagcacaatgagaggtcaaagacagattggtcaggctcgttaacgaacttctagtacaaactaaggcttctcaaacatttttcaaatcatgcaaacttagaaaatgataatattttatgctatttggacaaatggataaagatgccattgccactggcccaggaactcagggtcccacatgactgctataagggccaaggaaagtactcctatggcccattaatggcacagcattgcacatttgcctgccagttgagaagcactaattgaaattatattgatggaccataagtgtacctgctgacaaaattctattgcctatatgatatttgaaatattccctaaattaatgatt

SEQ ID NO: 537182 - DNA, 589 bp, Homo sapiens
aacctttctgaataactcttaggtatttgagaaagcttgtgttgtcatctgtatgagcaatggtaaacattatttgtgattttatgaagagtcacgtagagactgcctaaagaaaattaaacagaaagaggttcttgcccattaaaaaaaattctttttcctcccaaaagaaatcttgaccaaggtaagttgattcatagacaggaagagaactctctatcttttccatatcttatctgttccacctgcacacaaaaactaatgattggtygtaaatggttagctgatgcttctgtattgacttgtggtttgcagcagccttatttcctttgctttgtgacatcattttcctcttcatttcccacagttgcatatgtgggtttatgtgatgcacactcacccaacaaatggaagaaattatgtaccatgttggagagctttcaggaatagaatttggaacaaagaggtcaatactttaagcatcataaagtaaaaaggatgatgagataactgatgaagcatgcttcctagcctgagatgaaagaatcctgctcactgaatgttttgagtgaatagtaggggttctctc

SEQ ID NO: 537183 - DNA, 531 bp, Homo sapiens
tggtagctcacacctgtggtcccacttactcaggaggcgaagatgggaggatctcctgaggccaagagtttgagaccagcctaggcaacatagtgagacaccatctctaccaaaaaactttttttaaaaacttagctgggcatggtggcacatacctgtggtcccatctactctggagacaaagtgagaggatctcttgagaccagaagttccagaccagcctggacaacacagtcagaccctgactctaccaaaaatttttttaaaacagccaggcatggtggtggatgcctgtggtcccaactayttggagactgtggtgagaggatcacttgagcctgggaagtcacggctgcagtgagccgtgttcatgccactgcactcctgcctgggtgacagagtgagaccctgtcacaaaaaaataaaaacaaaaataaaaacaaaagagctcctgtctttgcaataaagacagagattggatttcctatgatgagtgtctcaccaagtttttttatgtgcttgccattagct

SEQ ID NO: 537184 - DNA, 578 bp, Homo sapiens
ctgatttttgtatttttagtagagatggggtttcaccatgttcaccatgctagtcctgacatgcaactcctgacatcaagtgatccacatacctcggccaactcaagtgctgggattaccagcatgagccatcatgcctggccaaaaactaccttttaaaaattattatttttaaaaatatgtaagaagatccatcctggattttctgcttttagtttaagttcatgattatgctgtagagttaacaggccaatctcattgaagttcaaaccaytaggttaaatgaaaagaatccacaatgctgaaaggctcacacagacattaaagaaagtacaagaaaaccacttaccataagtgatcaacagaaggacaaaaggaatgtttttaaacaggtttcttattgatttcttataggagtactcttcagggggactgtcttgaagagctgcttgagcctgacttggtggacaccgaggtttttctttgaaggctgagaatatacacgaaaaggattatgtatatttaatatatatacaatatgttgtgatatattacaatatgtaattatatgtatcatt

SEQ ID NO: 537185 - DNA, 400 bp, Homo sapiens
aggggaggacctcagtgaagctgcactttctgctggattcaaactaaatctactctgggcagatcaaggaaaagcttgaaggatgtgacttaaggaagaactttctactgaaagagccaggagaccctaaaatgcattttctgaacagataatggagatgccttttgggtagagagcagcactcactggatttggggtcagccctgtcaataacccatggagaatcctgggcatgcccctcccctctctgaagttgggtccataaaagaggggactgaaagacatcccttcttctaaagcttggccgcacattagcatcacctgggagctgctaaaaatccccatgcttaggctgcaacctagacagtttckatcagaatctttaggagtggggtccaca

SEQ ID NO: 537186 - DNA, 555 bp, Homo sapiens
agctggaatactgtacatgatcaagtctgagacttgcagagctagatggtatctaaaggtctccatcagccctgacattcattaagtttttttttttctttttttgagacggagtttcactcatgtcgcccagactggaatraagtggtgtgatctcagctcactgcaacctctgcctcctggattcaagcaattctcctgcctcagcctcccacatagctggaattacaggcacccaccaccatgcccagctaatttttgtatttttagtagagatggggtttcaccaggctggtctcaaactcctgaccttaggtgatccacctgccccggcttcccatagtgctgggattagaggcgtgagccaccgcacccggcctcattaagtctttaagaaaaggaaagagggggtggctggcaggtagtcctcagtagaagcaaagcatggaccaaatggcttcttgagtgttccacggtccataagattcaatgatttgagaccctgagtagatgggaacttgctgccaaattccagccaactgtttctctccatta

SEQ ID NO: 537187 - DNA, 555 bp, Homo sapiens
agctggaatactgtacatgatcaagtctgagacttgcagagctagatggtatctaaaggtctccatcagccctgacattcattaagtttttttttttctttttttgagacggagtttcactcatgtcgcccagactggaatamagtggtgtgatctcagctcactgcaacctctgcctcctggattcaagcaattctcctgcctcagcctcccacatagctggaattacaggcacccaccaccatgcccagctaatttttgtatttttagtagagatggggtttcaccaggctggtctcaaactcctgaccttaggtgatccacctgccccggcttcccatagtgctgggattagaggcgtgagccaccgcacccggcctcattaagtctttaagaaaaggaaagagggggtggctggcaggtagtcctcagtagaagcaaagcatggaccaaatggcttcttgagtgttccacggtccataagattcaatgatttgagaccctgagtagatgggaacttgctgccaaattccagccaactgtttctctccatta

SEQ ID NO: 537188 - DNA, 555 bp, Homo sapiens
agctggaatactgtacatgatcaagtctgagacttgcagagctagatggtatctaaaggtctccatcagccctgacattcattaagtttttttttttctttttttgagacggagtttcactcatgtcgcccagactggaataaagtggtgtgatctcagctcactgcaacytctgcctcctggattcaagcaattctcctgcctcagcctcccacatagctggaattacaggcacccaccaccatgcccagctaatttttgtatttttagtagagatggggtttcaccaggctggtctcaaactcctgaccttaggtgatccacctgccccggcttcccatagtgctgggattagaggcgtgagccaccgcacccggcctcattaagtctttaagaaaaggaaagagggggtggctggcaggtagtcctcagtagaagcaaagcatggaccaaatggcttcttgagtgttccacggtccataagattcaatgatttgagaccctgagtagatgggaacttgctgccaaattccagccaactgtttctctccatta

SEQ ID NO: 537189 - DNA, 555 bp, Homo sapiens
agctggaatactgtacatgatcaagtctgagacttgcagagctagatggtatctaaaggtctccatcagccctgacattcattaagtttttttttttctttttttgagacggagtttcactcatgtcgcccagactggaataaagtggtgtgatctcagctcactgcaacctctgcctcctggattcaagcaattctcctgcctcagcctcccacatagctggaattacaggcacccacsaccatgcccagctaatttttgtatttttagtagagatggggtttcaccaggctggtctcaaactcctgaccttaggtgatccacctgccccggcttcccatagtgctgggattagaggcgtgagccaccgcacccggcctcattaagtctttaagaaaaggaaagagggggtggctggcaggtagtcctcagtagaagcaaagcatggaccaaatggcttcttgagtgttccacggtccataagattcaatgatttgagaccctgagtagatgggaacttgctgccaaattccagccaactgtttctctccatta

SEQ ID NO: 537190 - DNA, 600 bp, Homo sapiens
attcatccacctttctgagagctttcccaaaggccaccttacaataaattatttcttcctctgttggatccctactttgttgttacacatctattcattgagcgctctgtgcccgacactgtgctggtttcctaaaactcatccaarcctcttgctttctgcctggagtgaagagtagttcacgttctgattctcagtgcctctagggctggagcggaatcttaatgtctgtgtcctcgtctctcaccaccgcgttttgcactttgtcgaaaggtgtcagatggtgagatggcttctagactgggctctgcccactaattagctgtgtggccttgggagaatcatccggcctctcttgctgcccttctttccgatgaaataatgctgacgatgatatttcagggttgtccaggggtcaatgaggcgggatagagggaagcatcgtgaaatctgggagccccaggccagcgaaaaatgtggaagggccgtacccgcactctcctagcactgggtgtgaggcagcgtcgtttccccttcgcgctcttcgaatgtcaagtgcaccagcttccaatccctcctctgggcgggcccggtctggct

SEQ ID NO: 537191 - DNA, 602 bp, Homo sapiens
agtatggtcacccagggaacttctgtgaacatttcagaccagataggagtggcaggccagaggtactttgggaaagagggggcgactggaagaagcttgtcgatcatattatataggcaagataaggctcaggcaaaatttgaggaggcattgaggcaggtctgcccaggtatagcctttccacttttccagacccattaggaacaacttcacgtttcgctgaagagcacaagctcctctttcttgctgtttcataaagtgaggtgtggctctgtgtagagcagggatgactttgtctcagagttcagaggtgagtgacatgccttaatgtgaattgggctgttgcaggattttcctggcccctaggtgggccaggcagagtggagtggcccaggatggaaacagatgttggctgtcagcaggggatggagagagggaatggagagaggatgtgaatgaagtccaagtgatcccacttctaggctcagccctgccctcaagggactgtgtttccttaggtgagtcagtcccactcsctggaccttagtttcctcatctgtcaggtgagggttgaactacaggatctcggcggtccctatcag

SEQ ID NO: 537192 - DNA, 639 bp, Homo sapiens
accctccactcctgggcttcatgtgctcacgtgaccccaaggagaagtggcttgttaaagaactctgacgtcagcctttctccatcccagcacacagacatgtgccatttctgagacctgatattttacaagcctgtattgaagaacccaatacagtctcccattactccagacacagtcctctgcccgagggtgggtgctgggtaggagctgagactgtccccagtgcctgtctaaaccccaagtaaccatgagggtcattaaagaaacaacactcattctgaaattgcctcctgttggtaagtatttgcatgcacagagcacttcaaagactaagtgttaggattatgaattttcatacgttacatcatggggtttgtcccagagaaactatgagaaacgtcagccttgacgaagacgatgtctgcactagctgggctttgttttctttatgtgaagacaactcaagttgcatggtgaggtttcatcgctttcagagaggctgtaacctgggaccaccygcatcccctggaggcgattccttgagtagttcccttgcccgctgcctgtgtggacacagtgttgtgtggcgttggagtgcacaggcctggagtcaaccagacctggattcgagtcccc

SEQ ID NO: 537193 - DNA, 449 bp, Homo sapiens
ggaacagcacggcagggacagactcccagaatcatctgtgtttggtgcctcygcagaggagctgagacaagatgttggcaggggctttgcccttcggtttcattgttgatggttttaaactgacaaaagcagttgaaaaggttgcaaaaatagtaaggctctcattgaccccaagatgctatgacagagaatgattgaaagattcacgttaagaatgtgactcttgaaagtgcctcccagaattcagactggcttaggaaaataactcgtgtgcttcacctctgggcttggaaccatctcagtccaaatggtaatggtctcagaaaattaccagccctcgaaaatgagtgtggcgaatggaaatgctatttcagccttaaatggaaagaattaagtgccaaaaccttccatccaggttccatgactgacaacagttaaactgtgttaga

SEQ ID NO: 537194 - DNA, 491 bp, Homo sapiens
ctgttgtaagtaagtggtccttgtgacagaagacaatttaataagccagatctgggggcctagtgggaaggttgctagtggctttactgggtatcttctgtggtgctggagctgtaggcaggcaggtgtgactgaggagagttggagtcgggggaggccaggcatctgcctttacccaagggctggaggcttttgtcctgcagaggtaggcccagccaagagggagctgcctcctgtgtcttcagagatcccgacactcarctctggacatcacccaaggccgaggccttgcacttctgctcccagctagaatgaactagcttgtatcagagcagttcttctgctgagaacaactggacaatttggatgaagcataagaaacatctgtgtgcagttgagactgaggcagacaggacaggtgtccatatctagggcccgatttcagcacgtgcagtagccctgggaaaatggcatgctgtttctgcatctct

SEQ ID NO: 537195 - DNA, 662 bp, Homo sapiens
tgtaacagaatatcacagccagggtggcttataaacaacagaaattgatttctyacagtttcagagcctggaaacccaagatcaaggcaccagcaggtttggtgtctgatgagggctgctctctctgtttccaagatggtaccttgttgctgtgtattccagaggggacaaatgctgtgtcctcgtatggcagaaggtgaaagggcgtaaaggtgtgaactctctctgaagcctcttttataaaggcattaatccattcatgagggcagagcctttctgacttaatcacttcccaaaagaccttacttcttaataccaccacaatggggattaagtttcaacaggaattttggaggggacatattcgaaccacagcagagcctcaaagaaagtcacacaagaggcaggctgatttttcccaagttctccttcccctctcccttttccttacatttaatctgattcaaaaaaatctgcctttgtcatgctctgtcctattggtggacattattgtgagagtataacctaaccgattaattactagtcacaaaccacaggtaatgtgtttctaaatttgacccacagtgccaataatgtgccatatcggccactactctgtttttggctctctcttctgaaaagtgttataaaccgacatgccc

SEQ ID NO: 537196 - DNA, 540 bp, Homo sapiens
ctccaggccagaagtggctgcacttcagtaggatgggagtcaccgcgttgaccctagtgggtgttaaatgctttggaattctaccagatacagttaaaagtccccttttcgatgtattrtagtacttttcctggaagctatcctctgtcattaagtggtaataagctactgaaataggcacttgtcagttttgccctttcaagttagcaggaattacatcctctggaccagagatggcacaggagcagttgagtagaatcatcattgaaagatgggctgtacatctctgatctggggaaaataataataattttttttaaaaaaaaagatcggctgaacatggaagaggtttacccgtcaaacaaaattatttacttctactttttgttcagtgacaatacgattaatcgtactaataacaaatatgcaaatgtttcatataaaagtacatattctagcaaacattactaaacagaaaccaaattccatcagaacttggggaaaagggcaaaaaataaataaatttttaaaagaaagaaa

SEQ ID NO: 537197 - DNA, 542 bp, Homo sapiens
gtgcttcacttgttggtgttatcycactctttgcaacttgttcattacgtgtatttttccttggctaaatcatgaatttttcgaaggcagattgtgcctttcgactctttttacccggggtctatcagtgtctgacttatataatgtgttgtgtaaaaagtttgctgaatgaatcccttggctggaaaagaaaaaaaaatgcagtttacaaaacctcttcaaataaaaatgaattaataaaaccgtatgttaggagatgttattttctctgaaaacaaatattcagttttttatgtaaaattatgtttgagagggaagcataatcaagatgcagattggcctcaatagatgaaacatttggctgaaacagacaagatgaaatttagaagaaggatttttgatttaagtacaaaatataaattacaaatatataaaatgaagaacttgatttggcatcagtgaattttaatttactacaagctttatatgacccaacaatgagattctgttacttaaaaatgtatcatttcatacagcattaa

SEQ ID NO: 537198 - DNA, 542 bp, Homo sapiens
gtgcttcacttgttggtgttatcccactctttgcaacttgttcattacgtgtatttttccttggctaaatcatgaatttttcgaaggcagattgtgcctttcgactctttttacccggggtctatcagtgtctgacttatataatgtgttgtgtaaaaagtttgctgaatgaatcccttggctggaaaagaaaaaaaaatgcagtttacaaaacctcttcaaataaaaatgaattaataaaascgtatgttaggagatgttattttctctgaaaacaaatattcagttttttatgtaaaattatgtttgagagggaagcataatcaagatgcagattggcctcaatagatgaaacatttggctgaaacagacaagatgaaatttagaagaaggatttttgatttaagtacaaaatataaattacaaatatataaaatgaagaacttgatttggcatcagtgaattttaatttactacaagctttatatgacccaacaatgagattctgttacttaaaaatgtatcatttcatacagcattaa

SEQ ID NO: 537199 - DNA, 521 bp, Homo sapiens
cttccatggtagtcctgtatgtttcctatgtggggtgtgtttgtgtgtgtgtgttatgatagactctgcctggttccaatagaatttaccagttctgaaccagtgtaaattcaatttcttggcttagggttcccttttatgaggataatgtgaacttgggccttgtatctgcttgagccatagagaagtgtaggcttgaggatttgtcttttattttttaatttattttttatttttatttgagacatagtctcactctgttgcccaggttggagtgcagtggcrtgatcttggctcactgcaatctccacctcccaggttctagtgattctcatgcctcagcctctggagtagctgggattacaggcatgcaccaccacacctggctaatttttgtgtttttagtagagagacgggctttcactaagttggccaggctgatttcaaactcctgggctcaagctgtctgtccgccttggcctcccaaagtgctgggattacaggtgtgagccactgcaccc

SEQ ID NO: 537200 - DNA, 613 bp, Homo sapiens
cccagttaaaattttgcaaacttccacttccttagattttctcaatattcctaagtagaataaagcatagtcagaggcaccaaagaagcacataccaaatagaatatgaatcagggctctattcattctgataattgtatgttatattgagtcagtcaggctttcgtagtgaactgagacctgcaaagtctttattagaataaactaaagtggtatagcatattaatggttcagaaaaaaacaatatatgcgatatatgtctttaaaaataagaataatgaatgtacattttctagtttaagaaaagagaaattatattatgtaatcctggcatttaacattaactcagcaaatattcattgcacattgattattttctaggcactaccctaaatactgaagatacagtgctaaaaaaggcaggtgaggtgcttatgatgatatagaataacactcaataaagtcatcttcctgataagtaatatgaagaagatgatctaagagtctaacacttattttatcacgaatattattatttttatttatttatwttattattattattattattattattattatgttttttttttttttgagacagagtctcgct

SEQ ID NO: 537201 - DNA, 419 bp, Homo sapiens
gactcatttagagaaagatcttttctgcatatttaaaaccaagttgcagttgtctgcatattctttgacactctgcccttcagaaggtagagcaagtttcttccccgtgagtgttgaatgaactttctcaatttgaatcagtggagaatggagaattttttaaaagtaacttgatgtagagcgacctggtagaaaccagctaatccttgtgaccaaggctaacaccactcataagccatgttgatatcatgtacctgctgattttactcactgagaacatttctccgctgtgatattcttcagcaaaagccagattctcagataaatcataagaaaacattaggcaatccaaaattgaggcattttctacaaaatacctgactagactcttcagaagsgtcaagatcaccaaacaaaag

SEQ ID NO: 537202 - DNA, 337 bp, Homo sapiens
gctctttatagaaaaagtttgctaatccacggtccagacgagtgattctcaaagcctagtctgcagaccagtagcatcatgataagctagaaatctcttaatgcaaattattgggctttgcctaagacctcctgaatcagtatctctgagagagggacccagcagcttgtattttaccaagtgccccattggattttgatgcatgataatgtttraaaattatcgttccatagtaaacaacatgtgtaagaaatgggcaagatagcaaagtcagagagacatctgtgactcagagtccatggctctgaccaaccccacagggcagatatgaattgca

SEQ ID NO: 537203 - DNA, 337 bp, Homo sapiens
gctctttatagaaaaagtttgctaatccacggtccagacgagtgattctcaaagcctagtctgcagaccagtagcatcatgataagctagaaatctcttaatgcaaattattgggctttgcctaagacctcctgaatcagtatctctgagagagggacccagcagcttgtattttaccaagtgccccattggattttgatgcatgataatgtttaaaaattatcgttccatagtaaacaacatgtgtragaaatgggcaagatagcaaagtcagagagacatctgtgactcagagtccatggctctgaccaaccccacagggcagatatgaattgca

SEQ ID NO: 537204 - DNA, 618 bp, Homo sapiens
gctgcttgtttatttggtttttgcttgtgcatctatattttgtattgaggagccattgacagattctcctggcttgcatcaagtttacacaggagctccacacacttcctgaagccatttaggcttactttctttttattattattattattttttatttatttatttatttttttgagacagagtcttgctctgtcgcccaggctggagtgcagtggcgcgatctcggctcactgcaactccgcctcccgggttcacaccattctcctgcttcagcctcccaagtagctgggactacaggcacccgccaccacgcccagctaattttgtttttgtatttttagtagagatggggtttcaccgtgttagcgaggatggtcttgatctcctgatcttgcgatccgcccgcctcggcctcccaawgtgctgggattacaggcgtgaaccaccacgcccggcccatttaggcttactttcatatccactggagtgaaataaaagtaaggctaaacagactatttgaggttggtttatttgtttacaatatatgataagcacactcaatctgtatgttgttggttcttcacttttgcccttatagtctagttatgtgcttgg

SEQ ID NO: 537205 - DNA, 618 bp, Homo sapiens
gctgcttgtttatttggtttttgcttgtgcatctatattttgtattgaggagccattgacagattctcctggcttgcatcaagtttacacaggagctccacacacttcctgaagccatttaggcttactttctttttattattattattattttttatttatttatttatttttttgagacagagtcttgctctgtcgcccaggctggagtgcagtggcgcgatctcggctcactgcaactccgcctcccgggttcacaccattctcctgcttcagcctcccaagtagctgggactacaggcacccgccaccacgcccagctaattttgtttttgtatttttagtagagatggggtttcaccgtgttagcgaggatggtcttgatctcctgatcttgcgatccgcccgcctcggcctcccaatgtgctgggattacaggcgtgaaccaccacgcccggcccatttaggcttactttcatatccactggagtgaaataaaagtaaggctaaacagactatttgaggttggtttatttgtttamaatatatgataagcacactcaatctgtatgttgttggttcttcacttttgcccttatagtctagttatgtgcttgg

SEQ ID NO: 537206 - DNA, 527 bp, Homo sapiens
tgtcccttctctccacactacttatctgaatccttaaatccaagggaggaagggagaacatgaatcagatcrgaaggaaagggttgatctcagaagaaaggtaaggatcattaagggtattctggaagtacaatgtggacatctacctgaaataattctaatttggagatagagttgttaaataaagtcatcatgagaggagaagcaattaagggcactatctcagaagaaacagattctttccttttagatttactgtttcctctaaagctctcccacaccatgcctatcaccaccactcatggccaggatgtttttcctaagatagaaatctgatcatatcatccccatttaaaatgcttttctggttctccaccctctttaggataaatgctatgatgtcccttggcatgtaaacattctgtgatttgtctactacctctaccataccctaacctgaaccagcgttctcactcaccatctcccaattcacacactcctttcttctttttaatgcaaaccacatg

SEQ ID NO: 537207 - DNA, 527 bp, Homo sapiens
tgtcccttctctccacactacttatctgaatccttaaatccaagggaggaagggagaacatgaatcagatcggaaggaaagggttgatctcagaagaaaggtaaggatcattaagggtattctggaartacaatgtggacatctacctgaaataattctaatttggagatagagttgttaaataaagtcatcatgagaggagaagcaattaagggcactatctcagaagaaacagattctttccttttagatttactgtttcctctaaagctctcccacaccatgcctatcaccaccactcatggccaggatgtttttcctaagatagaaatctgatcatatcatccccatttaaaatgcttttctggttctccaccctctttaggataaatgctatgatgtcccttggcatgtaaacattctgtgatttgtctactacctctaccataccctaacctgaaccagcgttctcactcaccatctcccaattcacacactcctttcttctttttaatgcaaaccacatg

SEQ ID NO: 537208 - DNA, 527 bp, Homo sapiens
tgtcccttctctccacactacttatctgaatccttaaatccaagggaggaagggagaacatgaatcagatcggaaggaaagggttgatctcagaagaaaggtaaggatcattaagggtattctggaagtacaatgtggacatctacctgaaataattctaatttggagatagagttgttaaataaagtcatcatgagaggagaagcaattaagggcactatctcagaagaaacagattctttccttttagatttactgtttcctctaaagctctcccacaccatgcctatcaccaccactcatggccaggatgtttttcctaagatagaaatctgatcatatcatccccatttaaaatgcttttctggttctccaccctctttaggataaatgctatgatgtcccttggcatgtaaacattctgtgatttgtctactacctctaccataccctaacctgaaccagcsttctcactcaccatctcccaattcacacactcctttcttctttttaatgcaaaccacatg

SEQ ID NO: 537209 - DNA, 631 bp, Homo sapiens
atgcgttttgaaagacagttgctgaaccacaatgcaagtgtatttccctctggtttttattctatattatgcactatcacgttgtctattttatttcaccatgagaaattctcaaagattaaggtaaagkgaatgtgaagactcaaatggaactccactctgactgagcaggccagttcaggtgtttcccggtcctaggactttgcagatatggaaacacttctctggagaacccattatcctctttaactcaaaagcctaaaacattctgatgtgaaccgtatgctcccaaagcattgtgaatacctgtatcaattgtaattgttattgcaattaagaaaaaatatttagacaactatattatacatttcttaaaataagggatggtatattctgcttatactcaagaagtctgtactgaatgaattgccatctgtttttaatagacttgctcaactcccaagttatccaggaggacttctttatttcacccttacctgaatcaatatctctttccatatactgctagcggtacttttctatattatgtgactatctctatgtgtttctgttgtgaaaggaaaatacattctgggaccccaaaatcactaagctaaagggaaaagttcag

SEQ ID NO: 537210 - DNA, 631 bp, Homo sapiens
atgcgttttgaaagacagttgctgaaccacaatgcaagtgtatttccctctggtttttattctatattatgcactatcacgttgtctattttatttcaccatgagaaattctcaaagattaaggtaaagtgaatgtgaagactcaaatggaactccactctgactgagcaggccagttcaggtgtttcccggtcctaggactttgcagatatggaaacacttctctggagaacccattatcctctttaactcaaaagcctaaaacattctgatgtgaaccgtatgctcccaaagcattgtgaatacctgtrtcaattgtaattgttattgcaattaagaaaaaatatttagacaactatattatacatttcttaaaataagggatggtatattctgcttatactcaagaagtctgtactgaatgaattgccatctgtttttaatagacttgctcaactcccaagttatccaggaggacttctttatttcacccttacctgaatcaatatctctttccatatactgctagcggtacttttctatattatgtgactatctctatgtgtttctgttgtgaaaggaaaatacattctgggaccccaaaatcactaagctaaagggaaaagttcag

SEQ ID NO: 537211 - DNA, 631 bp, Homo sapiens
atgcgttttgaaagacagttgctgaaccacaatgcaagtgtatttccctctggtttttattctatattatgcactatcacgttgtctattttatttcaccatgagaaattctcaaagattaaggtaaagtgaatgtgaagactcaaatggaactccactctgactgagcaggccagttcaggtgtttcccggtcctaggactttgcagatatggaaacacttctctggagaacccattatcctctttaactcaaaagcctaaaacattctgatgtgaaccgtatgctcccaaagcattgtgaatacctgtatcaattgtaattgttattgcaattaagaaaaaatatttagacaactatattatacatttcttaaaataagggatggtatattctgcttatactcaagaagtctgtactgaatgaattgccatctgtttttaatagacttgctcaactcccaagttatccaggaggacttcyttatttcacccttacctgaatcaatatctctttccatatactgctagcggtacttttctatattatgtgactatctctatgtgtttctgttgtgaaaggaaaatacattctgggaccccaaaatcactaagctaaagggaaaagttcag

SEQ ID NO: 537212 - DNA, 631 bp, Homo sapiens
atgcgttttgaaagacagttgctgaaccacaatgcaagtgtatttccctctggtttttattctatattatgcactatcacgttgtctattttatttcaccatgagaaattctcaaagattaaggtaaagtgaatgtgaagactcaaatggaactccactctgactgagcaggccagttcaggtgtttcccggtcctaggactttgcagatatggaaacacttctctggagaacccattatcctctttaactcaaaagcctaaaacattctgatgtgaaccgtatgctcccaaagcattgtgaatacctgtatcaattgtaattgttattgcaattaagaaaaaatatttagacaactatattatacatttcttaaaataagggatggtatattctgcttatactcaagaagtctgtactgaatgaattgccatctgtttttaatagacttgctcaactcccaagttatccaggaggacttctttatttcacccttacctgaatcaatatctctttccatatactgctagcrgtacttttctatattatgtgactatctctatgtgtttctgttgtgaaaggaaaatacattctgggaccccaaaatcactaagctaaagggaaaagttcag

SEQ ID NO: 537213 - DNA, 513 bp, Homo sapiens
gctaatacatttgaaatatagacaaggtgtggggaaatgatacttcaatcttgatctttatttttctaagaaaaaagtaattcaaaaaattagtgatatttactttgaaaatcaaagactttgaaaaagtattactttttacttagtattactataactttttactttgaaaaaagctggcatttcttagttttagtcttagtttatctctaagtaagttgtattttaacatagatggggccgtgaaagtagtaaagcaagtaaaacaacaaaacccctcctccttaatgtttacgataaatcaaattttcttacatgtttataatgtctaactcatacctttttacrtataaacaaatctaactggaattctttatacattcctaaaatgctaattttattaaagtagaatctgagttacattgagttaatattttttctttatgccatcattaattaaattattcaacatgaggcattctgaagtttgatattcctgtacccacagtggac

SEQ ID NO: 537214 - DNA, 501 bp, Homo sapiens
aggtatcttggggatgggatgcagtataaatacaaaattcatttatggttcatatataccttatacacataacctgaagataattttatacaatatttttaataattttgtgcatgaaacaaagtttgtgtacatgaaccaaccatcaaaaagcaaaggtgccaagtgtggaatttttcacttgtggtgtcatgttggcgctcataaagttttggatttccgagcattctggatttttggattagggatactcaacctgtacaatcacatctttgatgagaaagaaaatttagctcatttataaagatctcttgactctggcagcctggagaaaatatatctagacttgaagtgaaaggagaaattaggttggtcctgaacttggagctaagtgycatctgtcaaagaggtgtggtgggaagtggaaaagattatctataaggttgtttcttgcgctaacgctgtaggggcttataacaactttagaactagaatccttca

SEQ ID NO: 537215 - DNA, 501 bp, Homo sapiens
aggtatcttggggatgggatgcagtataaatacaaaattcatttatggttcatatataccttatacacataacctgaagataattttatacaatatttttaataattttgtgcatgaaacaaagtttgtgtacatgaaccaaccatcaaaaagcaaaggtgccaagtgtggaatttttcacttgtggtgtcatgttggcgctcataaagttttggatttccgagcattctggatttttggattagggatactcaacctgtacaatcacatctttgatgagaaagaaaatttagctcatttataaagatctcttgactctggcagcctggagaaaatatatctagacttgaagtgaaaggagaaattaggttggtcctgaacttggagctaagtgtcatctgtcaaagaggtgtggtgggaagtggaaaagattatctataaggttgtttcttgcgctaacgctgtaggggcttataacaamtttagaactagaatccttca

SEQ ID NO: 537216 - DNA, 354 bp, Homo sapiens
caataaaggacacatggaacagacctggacctaatccacagcttagagtcaggcccatctgacctcagcctagactcgctgaatctcaggtgatctatacaactgtacactcaagaaatatayatccatcatctatgacactgaattctgagtaagtttgttatacaatgttgttgtggcaagagctgctgacataggactctaaaagtggtatcttttctctaggctaaatatccctattttctgcaactgttcatagtatgccccctcctttcttatttctgtcagatttctctgcaagatatgccaactgaaccaattaggaggcacccctccaaagaatcaccagattag

SEQ ID NO: 537217 - DNA, 571 bp, Homo sapiens
gctacgctagcacctcaagctagatactgtcagtggacctgggcactgggatgaacccaggacagcatgccagcccctacagggacaggcaatgtacagaaaaggcccaaaccagccgggcgcggtggcttacaactgtaatcacagcactttgggaagctgagrtgggcagatcacctgaggtcaggagttcgagaccagcctggccaacatggtgaaaccccatttgtactaaaaatacaaaaattagccaggtgtggtggcatgtggctgtaatcccagctactcaggaggctgaggcaggagagtcgcttgaacccgggaggtagaggttgtggtgagctgagatcgtgccactgtactccagcctgggagacagagtgagactccgtgtttaaaaaaaaaaaaaaaaaaaagggcccaaaccccctgggctgccaagaccaaaggcagatggcgaaccacatctcagcttctcttttgggctttccattagtctcttccatatttgtcttcatgagacaaccaaacagtacaggctcagtctggggaatgagaggcttgcagccac

SEQ ID NO: 537218 - DNA, 608 bp, Homo sapiens
gctgcctttagtgtggccagctccacagcccatctgcccctctcccacctcagctcttacactgagaggtgctcacacttgctgagctacctgccctgtcctaggctaggcatcagcttctcctacctggcctgtctgatcctctttattgaacactctgcctgacctctgcctcttccacccattccccaaaatcaacttccatagcattgttctaagaggcagatctggctgggtgtggtggctcacgcctgtaatcccagcactttgggaggccaaggcgggcggtcaggagttggagaccagcctggccaacatggtgaaaccccgtctctactgaagatacaaaaaatgagccaggcgtggtggcgggcacctgtaatcccagctactcgggaggcaggagaatcgcttgaaccgggaggtggaggttgcartgagccgagattgcgccattgcactccagcctgggcgacagggtgagactccatctcaaaaaaaaaaaaaaaaaaaaaaaaaaagatgcagatctgaccatgtcccttctctccctaaaatcctccaatggctgcccactgcctaaggcagaaagttctagttcttcagcc

SEQ ID NO: 537219 - DNA, 563 bp, Homo sapiens
cacacattcttgctgggatgaatcagtgaggacacactattattgttctgagatctaagaccttggtataaaagttttaaacggaagtgagcagtcacctctggggtagtctcctgggggaagggcaactgattgatcacccaagtgacgctagttccaattcatcattgtccaggacacagcccaagtcgtacacttgcaaatgcattcctgtcactctccagggttgactgggctcagggactcagaccaaccaacttcacaagagaggaagttaataaaccagcaggccaattggttcatttatcatgaatgataccagcatttccagcccccaccccatatgtgaacaatatggaaaaccartttgtgggaacatccgtaagcctagaatcagaacaagaggtatgagttgtacaattctaatgttcaatgacactgagctgtttgggttctgtccatttcaatttgttcttttgttgccttccaaggtccaaggtaaaatgaaaccctttcaggcattgttgtcaataacaatctggcctgagtgtaccatgactgaa

SEQ ID NO: 537220 - DNA, 484 bp, Homo sapiens
tattagtctgttacatagactcttccacaatgtctgcagtcttgaatatgttggttactaattatcttatactttttcccctaataaagatttttaccaacacttaatacaatgaatatgggcttcacatgtttattttgaccacataaaataatctttgtaatttatttaatttgaaactgtacttcaatgacaaatgtttcccctgataaaagtgatctatattaatagcacccaaaagccaccacaccacaatcctcccttccccccgcacctcataaaatatttactaccgtggttaaaatttgcactcttagcaagccagcatcactgtrctttattacatatctgccagttagagaggttcaagtctatctaggtgcagaggagcagagctggaagacccagatgagtttcctgggctaattttctgattgatcccaagttgctgggccagggtctctccccttgactccaggaggtt

SEQ ID NO: 537221 - DNA, 598 bp, Homo sapiens
ataacggaaagtcaccttccatgttataactacttataatgacagagtccagcggttaccttaaatttggggtaaagtccactcttccttgtttcattttttgtyatagaaaataacgtccttccttattttctttactacatgtttccttcgcacttctagaaagatttcttgtgtgtctatgtatgtgctctttctatattttgcccttttgttgtatttaatgtaaagctgtttaagcctcccaattccaaatctagtcaaggaaaaatataaatgtcacttacagattatttacaatcccaaatcagtctatctatctatctgtctatctgacttctctagtgagctaaccttgtttttaaaaatattttttatacattcaaataagaacttctttagctatattttcagcaaggcctcctaaaatccctttgttgattacagacttaagtaaaaatgaaacattttaagtgaaaagaacaatagcattttggtatatttgttttttaaaaaatcagcatgaaaccatcctccctgcaaggcccctacctcccaaaaaaggcacatagtttcatttaccaacaattctagcaag

SEQ ID NO: 537222 - DNA, 662 bp, Homo sapiens
cacgtatacacacacacacatgcacacgcgcgcgcacacacacacacacacacacacatatatgcacgtacagcacaggaactggtaaatgagacagagaaggaataggctagaggtaggatgaccaagatrttttaatgacatgaaagtcaaacactaagaggaaaaaggtggttaatgtcatcagggtttgaaaatggtcaaggtcactgggtgtggtggctcacgcctgtaatcctatcagtttgggaagccaaggagggaatattgcttgaacccaggagttttaagaccagcctgggcaacatagcaagacccctgtctctacaaacaaaaattagctgggcttgctggtgcaggcctgtagccccagctactcaggaggctgaggtgtgagaatcacttgagcccaggagtttgaggtagcagtgagacatgatagcactactgtagtctggcctgagtgacagagcaagaccattttattaaaaaaaaaagtcaaggtgcataaaatattcaaaaaggcccttgggtttgtcagttaggagatcagtagtgacatcaaaacaggggttggcaaactatggctgttggctgcttttgtatggcccacaagctccgaatggttttaacatttctaaatttaaaaagtatttaccaga

SEQ ID NO: 537223 - DNA, 662 bp, Homo sapiens
cacgtatacacacacacacatgcacacgcgcgcgcacacacacacacacacacacacatatatgcacgtacagcacaggaactggtaaatgagacagagaaggaataggctagaggtaggatgaccaagatattttaatgacatgaaagtcaaacactaagaggaaaarggtggttaatgtcatcagggtttgaaaatggtcaaggtcactgggtgtggtggctcacgcctgtaatcctatcagtttgggaagccaaggagggaatattgcttgaacccaggagttttaagaccagcctgggcaacatagcaagacccctgtctctacaaacaaaaattagctgggcttgctggtgcaggcctgtagccccagctactcaggaggctgaggtgtgagaatcacttgagcccaggagtttgaggtagcagtgagacatgatagcactactgtagtctggcctgagtgacagagcaagaccattttattaaaaaaaaaagtcaaggtgcataaaatattcaaaaaggcccttgggtttgtcagttaggagatcagtagtgacatcaaaacaggggttggcaaactatggctgttggctgcttttgtatggcccacaagctccgaatggttttaacatttctaaatttaaaaagtatttaccaga

SEQ ID NO: 537224 - DNA, 652 bp, Homo sapiens
ctgcaatacattcatacaatgaaatactactcagcaatgaaaagggacatgccactgatacatgatgtgatatggatgaatttcaaatgccttatgctaaatgaaagaagccaggctcaaaaggccagacacactctttgattctattttatawgacattctggaaaatgcaaaactacagaagcagaaaccatatcattggtttccaggagctgattggatagaaaggttgattacaaagggacaaggatcttacagtactcagtcctttgtagtgatgaggctatatgttatactgctgtgtgtgtttgtcaaagtccatagaattttatgtgaaaaacagtgattttactaaattatgcctatatctcaataaacctgtctaaaaagaaaaacacaataaaaagcaaagttccagtttggtgtgtcaagggatatgtactttgctttcaggttgatcctttctaagaatcaaattctttttcccccttgcaaatgactaaggtaacaaacggtctgccagtgtccccttatgtggaaatctgagaggacagtatgctgtgtgccactccatttgctgttgtgatgggctttagacatctactattatttattacacaggtttaggatataatgtggaggtcaccttcca

SEQ ID NO: 537225 - DNA, 652 bp, Homo sapiens
ctgcaatacattcatacaatgaaatactactcagcaatgaaaagggacatgccactgatacatgatgtgatatggatgaatttcaaatgccttatgctaaatgaaagaagccaggctcaaaaggccagacacactctttgattctattttataagacattctggaaaatgcaaaactacagaagcagaaaccatatcattggtttccaggagctgattggatagaaaggttgattacaaagggacaaggatcttacagtactcagtcctttgtagtgatgaggctatatgttatactgctgtgtgtgtttgtcaaagtccatagaattttatgtgaaaaacagtgattttactaaattatgcctatatctcaataaacctgtctaaaaagaaaaacacaataaaaagcaaagttccagtttggtgtgtcaagggatatgtactttgctttcaggttgatcctttctaagaatcaaattctttttcccccttgcaaatgactaagktaacaaacggtctgccagtgtccccttatgtggaaatctgagaggacagtatgctgtgtgccactccatttgctgttgtgatgggctttagacatctactattatttattacacaggtttaggatataatgtggaggtcaccttcca

SEQ ID NO: 537226 - DNA, 652 bp, Homo sapiens
ctgcaatacattcatacaatgaaatactactcagcaatgaaaagggacatgccactgatacatgatgtgatatggatgaatttcaaatgccttatgctaaatgaaagaagccaggctcaaaaggccagacacactctttgattctattttataagacattctggaaaatgcaaaactacagaagcagaaaccatatcattggtttccaggagctgattggatagaaaggttgattacaaagggacaaggatcttacagtactcagtcctttgtagtgatgaggctatatgttatactgctgtgtgtgtttgtcaaagtccatagaattttatgtgaaaaacagtgattttactaaattatgcctatatctcaataaacctgtctaaaaagaaaaacacaataaaaagcaaagttccagtttggtgtgtcaagggatatgtactttgctttcaggttgatcctttctaagaatcaaattctttttcccccttgcaaatgactaaggtaacaaacggtctgccagtgtcccctwatgtggaaatctgagaggacagtatgctgtgtgccactccatttgctgttgtgatgggctttagacatctactattatttattacacaggtttaggatataatgtggaggtcaccttcca

SEQ ID NO: 537227 - DNA, 570 bp, Homo sapiens
gcaccaaactacctgcagctatctaaacaccctttgctgttaatcatctgcaattatatgcctaagctgctcactccgcccaaccttttagtgctggcttgttagatctttgcctttaatgtccttgtcattatggatttgtgtatcttttaatatttaaaatgattttyttttattattgccttttactccctgaatttttcacaatgaacaagcaaatcatttttaaggggaacatctaacatttattaaaatacctaggtgaacagggaatggctttctcctttttctactttatgataaaatccagatgaatgtaggaatcgtaaaacttcaaaaaagttattgttgttttaggtctattcatatgtgcaaggttttcaattttacgaataactcataccattttggggcaagttttggggctgagggtttacacccatacctccactaagagaaccgggtattcctttcctgctgtgtaggtgttttcatccctttctttttaataaaataattaaggagtttttattagtatagttaaagatttaccgaaaaattgagtacaat

SEQ ID NO: 537228 - DNA, 518 bp, Homo sapiens
actatgtgcaggttctgtgaggggtgaatttcccttgtctgcccaatcttgtcactattagaaactatatttaaataacaggaatacgatccctaactaatcctgggcacagggctccttatgatgccttatgtattctcatcatgttactaatacatattaacttcacctattattttaaggatcataccaacatgacaaaatagagaagttcaaaaaaatacatgtttaagatgctamttttaaacgtgtattttctattaaacatgtattttctatttttaaacatgtattttctatttttcgatgaaaatacaccttccattttcaaagaaattaccttctttcaatcccaaaatacctgcaatagtaatggcccaagggtgcatgtacagctgtgcaagttgtatatggagcaaaaatgaggagttccacttacagaaactacagacatactgaccccggcagagatgagagaagtgggtcagagagaaaatagcaaggggtaagggatatgg

SEQ ID NO: 537229 - DNA, 628 bp, Homo sapiens
aaaccaccaacctgctgggactccaaacaggtgcttccagacatccctccctaaggccatctgcctatttacttgagactcctccagatccctagttagaagaagaacagttctgcaagacaggtccatttaatttctcaggaagcatgatgtagtacaaagatcacgggttctggggtcaggaagacttgggttcaaaatccccatttgtcatttttaactgcatgatgttggccaattgagactctctgaatctccttagtaatgtaagactaatgaaacccatattcccaattggatagggtcattctgagaatcagatgaagactgagtgaaagcaatttataaactttacaacattagacaatgctataatgtggtataaagggtggtatcacatgtcttgaagatgtgacccttacaatcaaatcaggcactgatgcaacacattttaaagagcacatagtaatttctttccttcattttatgaaaagaatttaccgatttattctcattactataccagcatccatattgayaaaccttggcagaatgtacagtgtattttccaggattctttaatttgtcatttttaaaatttcctatctaaaccgctatgcctattctg

SEQ ID NO: 537230 - DNA, 628 bp, Homo sapiens
aaaccaccaacctgctgggactccaaacaggtgcttccagacatccctccctaaggccatctgcctatttacttgagactcctccagatccctagttagaagaagaacagttctgcaagacaggtccatttaatttctcaggaagcatgatgtagtacaaagatcacgggttctggggtcaggaagacttgggttcaaaatccccatttgtcatttttaactgcatgatgttggccaattgagactctctgaatctccttagtaatgtaagactaatgaaacccatattcccaattggatagggtcattctgagaatcagatgaagactgagtgaaagcaatttataaactttacaacattagacaatgctataatgtggtataaagggtggtatcacatgtcttgaagatgtgacccttacaatcaaatcaggcactgatgcaacacattttaaagagcacatagtaatttctttccttcattttatgaaaagaatttaccgatttattctcattactataccagcatccatattgataaaccttggcagaatgtacagtgtattttccaggattctttaatttgtcattyttaaaatttcctatctaaaccgctatgcctattctg

SEQ ID NO: 537231 - DNA, 339 bp, Homo sapiens
gaaatgaatgttaggccttttttattttttaatttagtctgaacttatcccgtaaatagccctttgtagtaatgtttggtttttttgaggtaattgcttagtctctcttgttcccaactccttcctggctctgttccaaggtggagttaagtgtcttaagtggaagggactcaggtaacctctgagagcagtgaagagcaacttggattcacatgatcattgggcgtgctgccagcctttccacctaacatctctccctcccttccttcctctctctctccctactttcctctctctctctctctctcctcatctscctccatttctctccctccccct

SEQ ID NO: 537232 - DNA, 621 bp, Homo sapiens
acctgaccctgtgtgctagaagaataggtaggaatagaagagggagggcataaagtgtgaataagcccttaaatgctatgctacataatccaattttattcatrtcttctttctggactatattgtgggcattttaaggctctagcaatttaaaaatctgctttagcatgtgatcgctaataagctttttatatacagagaggactaaataaaagtttgttgatatataaagttgataaattacattgagacttaaagtctttgagagttcatactctaccgtgaattgctttcttctctaaatgtggcatgaatatattgaaccatctgattttaaaaacatgggaaatcatcgcaccttccctctaaacagcagtagaaagactgtgtatactaatttagcaaacattagtatacatagattttgcagaaaagaaacattcagcaaatacttattgagggcctggtacacacacacacacacacacacatgtatatatacacatacatatttatagacaaatataattgatgtattatttaattaaggaagtgataaccatttgggaataaaagtatgaaaacatatatcctcaattaaatagagtaccttttaaaatg

SEQ ID NO: 537233 - DNA, 621 bp, Homo sapiens
acctgaccctgtgtgctagaagaataggtaggaatagaagagggagggcataaagtgtgaataagcccttaaatgctatgctacataatccaattttattcatgtcttctttctggactataytgtgggcattttaaggctctagcaatttaaaaatctgctttagcatgtgatcgctaataagctttttatatacagagaggactaaataaaagtttgttgatatataaagttgataaattacattgagacttaaagtctttgagagttcatactctaccgtgaattgctttcttctctaaatgtggcatgaatatattgaaccatctgattttaaaaacatgggaaatcatcgcaccttccctctaaacagcagtagaaagactgtgtatactaatttagcaaacattagtatacatagattttgcagaaaagaaacattcagcaaatacttattgagggcctggtacacacacacacacacacacacatgtatatatacacatacatatttatagacaaatataattgatgtattatttaattaaggaagtgataaccatttgggaataaaagtatgaaaacatatatcctcaattaaatagagtaccttttaaaatg

SEQ ID NO: 537234 - DNA, 621 bp, Homo sapiens
acctgaccctgtgtgctagaagaataggtaggaatagaagagggagggcataaagtgtgaataagcccttaaatgctatgctacataatccaattttattcatgtcttctttctggactatattgtgggcattttaaggctctagcaatttaaaaakctgctttagcatgtgatcgctaataagctttttatatacagagaggactaaataaaagtttgttgatatataaagttgataaattacattgagacttaaagtctttgagagttcatactctaccgtgaattgctttcttctctaaatgtggcatgaatatattgaaccatctgattttaaaaacatgggaaatcatcgcaccttccctctaaacagcagtagaaagactgtgtatactaatttagcaaacattagtatacatagattttgcagaaaagaaacattcagcaaatacttattgagggcctggtacacacacacacacacacacacatgtatatatacacatacatatttatagacaaatataattgatgtattatttaattaaggaagtgataaccatttgggaataaaagtatgaaaacatatatcctcaattaaatagagtaccttttaaaatg

SEQ ID NO: 537235 - DNA, 525 bp, Homo sapiens
gatcagtaatcctgcacagaaatataatgggtatctctgggctcagttcagcctgatattggacaggtgagcatgcccatatayttaggttctttttctttctctctgctgtccttgggctcaccttttccctctccctccacccaccaactctctgaacatgagagtgtatgtgcctatacaccttctcccacacatgagcataggatcccaaggtctagattttggatgggacataagagactccattccttctttgtcccaaattatgcctgccatccagctttcccttggattttcagggaactattcagatactgataaaatttacactggatttcttattcgattattgatccttttgtaggtgttctttggcagagaaccctgtaggtaagaagaacaagtgccaggatttggatatcctgaacacctaaaaatgtgttatgtaaactttttctacaagacattttatctcctaaaaacaaaactctcttaaattataatcctccaattgctctgttt

SEQ ID NO: 537236 - DNA, 525 bp, Homo sapiens
gatcagtaatcctgcacagaaatataatgggtatctctgggctcagttcagcctgatattggacaggtgagcatgcccatatatttaggttctttttctttctctctgctgtccttgggctcaccttttccctctccctccacccaccaactctctgaacatgagagtgtatgtgcctatacaccttctcccacacatgagcataggatcccaaggtctagattttggatgggacataagagactccattccttctttgtcccaaattatgcctgccatccagctttcccttggattttcagggaactattcagatactgataaaatttacactggatttcttattcgattattgatccttttgtaggtgttctttggcagagaaccctgtaggtaagaagaacaagtgccaggatttggatatcctgaacacctaaaaaygtgttatgtaaactttttctacaagacattttatctcctaaaaacaaaactctcttaaattataatcctccaattgctctgttt

SEQ ID NO: 537237 - DNA, 606 bp, Homo sapiens
tatccgtatgagaaaaggatgaaattggatgcttatctctcaccatatacaatatttaattgcaggtgaattaaagaatcacaactattagtatgagacttttaaaagaccatacaggaaaacatctttatgatcagaagatcaagagagatttgttaaacaggaagtgaaaggcaaaaaacctaaaggaaaaaaatgctatattaaaattaagaaagtctgttcatggaatgacagaataaagaaaggaaaaagacaaaccataaatttgagaaatatatttataacacattcaactagaattttaactggaattctatttagcacaccactttcaaagatgagcagacagaaaaagatatttaggctttgaggaaagcattatgtgtgaaagacaatgatcaacacaacaaaaagaaaaatgaaacaacttakaacatgcagagaatatgctagaaaaaaacttaaaaaatataatatctttagaagcatgtagagctgcatctgttaaataaaaacaggatgctataacaaacaaatactccaagaaaagaaggagctcttggaaaaagtaaaggcttttatggcacaaatgaaaagctcagt

SEQ ID NO: 537238 - DNA, 624 bp, Homo sapiens
tcagattaagaatgctgttgtcaccatcaattaaatccctttgctagatagctctgaccacgcacctgtttcctttccttttccttttttttttttaaatggagagctactctcccccccttccccttctccttgtattgaaagaaaggcaggaggggaaagggacgataatttagctgaaggtcaactagggcacctgytaatggctccctctcctcccatcactgattgcctgaaaataggaaatcagcccaaatctattgttgtgatcagggagcaaaagctgtaatgctggtgagtgagcacgtgcttcttcctgcctctttttccttcgaagaaaaatgattactacatttaactgacacactgtagagcaaatcccttctttagagctcatcagtctgaagggtgatggggatgcggcccagaagaactggtctcccctgatgaaaacacctgctgccagagccgcccaccgcctctttcctctcgcttccctcacgtttccatggttcaaggtgatccttaaaaccatggatgaagtgtgaggcttgcaatgtgtcagcacctaaaagtgggtacgctagggtatcctggattttcctgtgtttgggagaataatca

SEQ ID NO: 537239 - DNA, 624 bp, Homo sapiens
tcagattaagaatgctgttgtcaccatcaattaaatccctttgctagatagctctgaccacgcacctgtttcctttccttttccttttttttttttaaatggagagctactctcccccccttccccttctccttgtattgaaagaaaggcaggaggggaaagggacgataatttagctgaaggtcaactagggcacctgctaatggctccctctcctcccatcactgattgcctgaaaataggaaatcagcccaaatctattgttgtgatcagggagcaaaagctgtaatgctggtgagtgagcacgtgcttcttcctgcctctttttccttcgaagaaaaatgattactacatttaactgacacactgtagagcaaatcccttctttagagctcatcagtctgaagggtgatggggatgcggcccagaagaactggtctcccctgatgaaaacacctgctgccagagccgcccaccgcctctttcctctcgcttccctcacgtttccatggttcaaggtgatccttaaaacyatggatgaagtgtgaggcttgcaatgtgtcagcacctaaaagtgggtacgctagggtatcctggattttcctgtgtttgggagaataatca

SEQ ID NO: 537240 - DNA, 649 bp, Homo sapiens
ctgcccggaccctggctctcacctgatatcagtgcctgggagttcctcataggaaaggagccggtcatgccgtagatgctgctgctgaagacagtggaggcaccgctgaggatcaccatgcagacaatggtgaccgcaaaaaagccacgggtccaggagaaagtgtccaccttcaccagtgcagttatcaccatgaagatggccaggatgaccgtcagtgaggccaggacacggatgtggactgcaaccctggggcgaggatgccagaagcagttagacaccccttctgggctcctgtgtgggctggggatggtcagcaccttaaagggaagcaggcgagcttagcagttaggactgttcactctgcagtcaagaggcctgcactcgaatcctgccttcccggctccctagctgtgtggccttgggtaagggactcagttgctctggtttcagcttttgaacttgtacaatggggagagttgattcaactcacaggggggtgaggctgaagaggtgagcagtgtggggtgcaagcggcagtgcctggctcagggccagcgctcagtgggttctgctgcttttcaccttgckgtgaggttcaaggacacgaggacaccaggatgttcaaggcaaaccctgctcttcctgc

SEQ ID NO: 537241 - DNA, 608 bp, Homo sapiens
gttcttctcgggtattaatggctaattatgaagtctatgtaattatacgagaaagattcatggaataatgttaagtgtagaggcctgagcatgaaatgaaacctgtaagtatgtgatgacatcataaaacaaacctgggcatgagcctgaaaggaaacacacgaatatgcaagtagtagttgtgtctgggtgggattaagggtgattatttttcagaacttagttcccaccatttggggaaatatggcaacattatctggactgtagaaacaaacaaacaagccacttcctggacccagaaatagtggagaaagggtcagtgcctggtgttgtttctaagggcgccaggctgctgttctggaagcaggaccaatggtggaggctcrccacgtgcacagctggaacctatgggggcctgggtggtggtcatccaccctgctcagtgcacctgttgccacaggaaggcctctctggggatgtcccattgttcttcagccaggaggaaggtgggaggcgggagaatggctggttttaaagccaggaaataaatctccctcccccaacccagcctctccattcaggccagcttattgatggggacccagggg

SEQ ID NO: 537242 - DNA, 567 bp, Homo sapiens
atgaagctatgaggtcaaggtcatcctaaggaaaatttaaaagaagagtaaattaatatatcctgccaactttgttttggggttcttacaaaaacctggaacaaaaaaagggagagtggggacatggtatactcctatactcaggaacaagaaaaatcttaacactattatcagataacaaggaacctattaatataggttatattaatagcccactcccatgacctgcccagagaacctaagtgcatttggaatactgccaccaagagttatatttgtrtaagagtttagtttttaaagcatcttttaatttcattaatttattcaacaattcaacaaggtaagcatggaaagtatcatgattcccatctgacagaggaaaaaaactgaggttaaactgtaagtttaaagtcatctggatactaaagtgacagacccacctgggagcccaagggctctgactcttggctaatactccttcccacacatggcaacttaatacgacaactagacagcagtgctagaggaacaaaaacagctctctaacaaaaaccacactccagttaa

SEQ ID NO: 537243 - DNA, 452 bp, Homo sapiens
gaaatcagtccccacgccccggaccccctcatggagggacaacgaacacaggcgcgggacggcttcggtcaccgcccgcgccgccctttgcccccgtgcctgctcgcgagtcacccccgccccggtgcggtggtagggcccggcgcgacgtcacccattgtttacaaatcaacccgagccggcaggcttccggctccagcggctgcaggcgcgtggctcgagtgcctggcgggctcyggcttccgcgtccgcccctgctccggcttcgcccgcagctccgcgcccgcgggcaaccaagcccccagcgaagcccgcacagctccgggtgccaggacggggggccatgccgtgccggagggaggaggaagaggaagccggcgaggaggcggagggggaggaagaggaggacgacagcttcctcctgctgcagcagtcggtgacgctgggcagct

SEQ ID NO: 537244 - DNA, 609 bp, Homo sapiens
tactcctcacgtcacagagccccttctctgatgtgcaacacagcaaagcactttgcaatataaaagcttttcaacattttgtctttacccccttataaactagccctttatagggtccccaaaaaacagaagaaaactttttatgcataagaaaaatcacattgttacatttcctaaaaatcaatgctgaaaacgacagcccagcatacctaccttaataagcccactgaaggagcgcgaacgagccctcttttgtacctgggaagtagaaggttctcgccctggtgtctgggtcaatgattgcttattaaactaraagaaaacatggagaacattttataaatactttcccatcaagacacggcattctgtgacaactaatagctaagtgtaaataaaagtccaggaaaaactgagtctgcgcatagatggattaggaggtcaaaaagccaatcacaaagtcagaaatgatgatgccaaaagaagtggattcaagtgctctgaggggctctgcacgccacattccttgaatgtggaattactgtccccattctacagacaaaaaaactgagacttggagagcttatgaaatttatccacgatccccag

SEQ ID NO: 537245 - DNA, 580 bp, Homo sapiens
ctaaagatattgggccagacatagtggctcattcctgtaatttcagtactttggaaggctgaggcaggaggattgctttagctcaggagttcaaggttgcagtaagctatgatcacaccactgcactccagcctgggtgatggaatgagatcctgtatttaaacaataaaaataaaatatattgatatgctgcaatcacaagagagaattgtaatagaattttaaaagtgtccagagcagtggcacaattgcacagcctcctaatgtgattgggaagaaatactctctggaaactctctagcatgcacaagacttaatgtttttgataaaaagttcattctgatattttatgatcacacttcatatattcacataccacaccaggctaygacttggcaaggaaacaattccttgttttagttggaggaagggctgtatataagggagtgggaaagttgaagcaaaactttaacttttcatagggaattcctaggtgctctccacttgaaaaatcatactgcctcagaattaatggtcatgataattttgaatcccctcttcttgaatcttggatttacag

SEQ ID NO: 537246 - DNA, 511 bp, Homo sapiens
atatggtgaaactgaggactgcattttcagataaaatttcaagggctcatcaaacgctcagatgtgtccctgagtcaggcactcattacttgctcatcagtcgccagcctttggctgccaggagtccagccaacaggtgtgtcctccccatctgaacctgacccagcagccaatcctttctgcagccccttacgctactctcattgtctgagtctagtggtctcttctgatagtgaagatgaatacctgaaggagcatgctgtccaatacagtagccactagccacatgtggcttttgagcattgaaacatggctggcataaccaacaaaccacatttttaaaatttcatttcattttaattaatttaccttttaaaaataatgttccattcagctactggaaaagstctaagcacaattcaacttagacgagtgaacctacttttttactttaaattagtaaaatcaaaatacaaatcaaatatttctgatgaaaaatttagaattcaaa

SEQ ID NO: 537247 - DNA, 573 bp, Homo sapiens
tgttttcagaagacaggttggacctgtgtctataactgacataaaaaaaaattaataacaccactgayacattcagcaaacacttaaggatcacctactgagagccaagctagttcttagaaataccaagttgaataaaacaaagccttttctgccttttacattcagttcagtaaccgtcaacaccccacccatatactcccataccatgaggtgtaattttcaaactcctcgcatacttttaattactagtttaattatttgccttctcactgagtctataatctcacttagggtaagaacagaactcaattacagatgctcagtaaacactggaaggccgcggctccctaacatttgatagtcaaagaagagctgggcatgaaagcagtttattgacagtacatggtaatacctgctactacagggacaagaactaagaccacaggagcacagaggaagcctgctgaggcaggggatggcctgaccacagatgtgactctaaagtgggagttgaacaaggcagggggagtaaggatggaaagtaaggggcagagttgagaggttttcctg

SEQ ID NO: 537248 - DNA, 259 bp, Homo sapiens
ctgttgtcttctgtatgtcactttccctgagcctccaatgcggctctcacctctaaagcaaagtacagaaaatcgttgtctgcttggagttcctaaggcatgatattcatcacctgctagtatgacctwtatcctataatgttgcaggtactaaagtaagtgtttggtttcccatacatgacttcaggcaaagtgctaagtgtattctttgagtcctgggactttggactcacaacacttgttgaatattggagtttcc

SEQ ID NO: 537249 - DNA, 259 bp, Homo sapiens
ctgttgtcttctgtatgtcactttccctgagcctccaatgcggctctcacctctaaagcaaagtacagaaaatcgttgtctgcttggagttcctaaggcatgatattcatcacctgctagtatgacctttatcctataatgttgcaggtactaaagtaagtgtttggtttcccatacatgacttcaggcaaagtgctaagtgtattctttgagtcctgggactttggactcayaacacttgttgaatattggagtttcc

SEQ ID NO: 537250 - DNA, 549 bp, Homo sapiens
atctgctcctggcctccctcttacagaggacccagrcttctcctcttacatgtcggcgtgttccatggttgaacacacagtgccaccgtggatggcttctctgggtcacaggcagccagtgagggggctggacctcgttgactgggaggctgcccctttcagggctttgggcagggcagacattagaaatccatctcctcggccgggcacggtggctcatgcctgtaatcccagcactttgggaggctgaggcgggtggatcactaggtcaggagatcaagaccatcctggctaacgtggtgaaaccccgtctctactaaaaatataaaaaattagccgggcacggtggcaggcgcctgtagttccagctactcgggaggctgaagcaggagaatggcctgaacccgggaggcagaggttgcagccgagatcgtgccactgcactccagcctgggcaacagagtgagactctgtctcaaaaaaaaaaaagaaacccatctcctcgcatctcctacagtcaggggatgctgtggacactggagagcaacg

SEQ ID NO: 537251 - DNA, 347 bp, Homo sapiens
aaaaatacaaaaattagctgggtgtggtggttgctcctgtaatcccagctactcaggtggttgaggcatgagaatcacttgarcccgggagatagaggttgcagtgagctgagatcatgccactgcactccagccttggcgacagagggaaactccatctcagaaagttttattcatagctgagctcaaaagaaagggcaatctcagtgcttcaagaggaaatggacagaaacttaggttcgagcggctgggagctaggattttaaggtccacaagtggagtgttggaacccagatcccagcataaaaccgggaccattccaggggttccaaatgcctgaaaaatgc

SEQ ID NO: 537252 - DNA, 347 bp, Homo sapiens
aaaaatacaaaaattagctgggtgtggtggttgctcctgtaatcccagctactcaggtggttgaggcatgagaatcacttgaacccgggagatagaggttgcagtgagctgagatcatgccactgcactccagccttggcgacagagggaaactccatctcaraaagttttattcatagctgagctcaaaagaaagggcaatctcagtgcttcaagaggaaatggacagaaacttaggttcgagcggctgggagctaggattttaaggtccacaagtggagtgttggaacccagatcccagcataaaaccgggaccattccaggggttccaaatgcctgaaaaatgc

SEQ ID NO: 537253 - DNA, 527 bp, Homo sapiens
actaacctcacaacaattatttaagaaaaacacgatgatgatcctaatttgcagataaggaaactgaagcacagggaattaggtaaacttgtccaaaattctccaagtagtgacaaaaggatttgaattctttgaccattggattgtaataactattttcctaagataaagtacagagcaaagacatatttatgttaaattcaatgtatgttcaagagktacttccagcctagtggctccaagaccagtgcctcactgtcacctggggaccttgtcaaatgcaaagtgtgagtcatgagttcagagcctctgcatctctctcagctcctgtgatgctgacaatgctggtccccaaatgacactgtgcacagtagggctgtaaatcacatataatgcaatatgctcatgaatatgccacttaaaaaatcattttgggttaacagttctcactgtaatagtgccctgaaatcatgcctctttaaatgaaggtggtgtttttatcttaaaagttaccaatttactgaaag

SEQ ID NO: 537254 - DNA, 514 bp, Homo sapiens
caatgtttcatgaaaatctcctctgatcttatcctgtaaccccacaacaaaacagaaccaacagctccctcctctgtgctactttttttttttttttttttttttttttgagatggagtctcgttctgttgcccaggctggagtgcagtggcgcaatctcggctcacygcaacctccgcctcccgggttcaagcgattctcctgcctcagcctcccaagtagctgggattacaggcatgcgccaccacacctggctaatttttgtatttttagtagagacaagagtttcaccatgttggccaggctggtctcgaactccaacctcaggtgatccaccctcctcggcctcccaaagtgctgggattacaggcatgagccactgtgctcagcccctctgcactactttttcctcccacatactgcgtttattcatgatcacacttactttaatcaatttcttttaccaattctgcccccttccctgctagaccacaagctcctttaggcatagacc

SEQ ID NO: 537255 - DNA, 514 bp, Homo sapiens
caatgtttcatgaaaatctcctctgatcttatcctgtaaccccacaacaaaacagaaccaacagctccctcctctgtgctactttttttttttttttttttttttttttgagatggagtctcgttctgttgcccaggctggagtgcagtggcgcaatctcggctcactgcaasctccgcctcccgggttcaagcgattctcctgcctcagcctcccaagtagctgggattacaggcatgcgccaccacacctggctaatttttgtatttttagtagagacaagagtttcaccatgttggccaggctggtctcgaactccaacctcaggtgatccaccctcctcggcctcccaaagtgctgggattacaggcatgagccactgtgctcagcccctctgcactactttttcctcccacatactgcgtttattcatgatcacacttactttaatcaatttcttttaccaattctgcccccttccctgctagaccacaagctcctttaggcatagacc

SEQ ID NO: 537256 - DNA, 430 bp, Homo sapiens
caatgtttcatgaaaatctcctctgatcttatcctgtaaccccacaacaaaacagaaccaacagctccctcctctgtgctactttttttttttttttttttttttttttgagatggagtctcgttctgttgcccaggctggagtgcagtggcgcaatctcggctcactgcaacctccgcctcccgggttcaagcgattctcctgcctcagcctcccaagtagctgggattacaggcatgygccaccacacctggctaatttttgtatttttagtagagacaagagtttcaccatgttggccaggctggtctcgaactccaacctcaggtgatccaccctcctcggcctcccaaagtgctgggattacaggcatgagccactgtgctcagcccctctgcactactttttcctcccacatactgcgtttatt

SEQ ID NO: 537257 - DNA, 655 bp, Homo sapiens
aacttttattttgttgttatattttatatacttccagacacaagaaaacgcagatgttggtaaacttaagaaaatatctgttttaggataagtgggaatgctgatatagtcaagaaacatttttttattcaacatttacctacagcaagatataagtyaataatgatgatgatgattaatacttagaggatatttattgtataatgaacaccactttaagcatattacatgtatttaataatttagttcccataacaactttatgaactactagaacctgcattttacacgagaaacggagatattttcaagttcacaggcagcaagtggtagaagcaggactctaatacagcagcctgacacacagtccatgcgtttcatgaatttaccagtgttttctaatctgccaaccatgacccattagtagatggtaacatcagtttaacggggtgcaactagtggggttatttttaataaaatagaagacaacagaaaatcaaatgcagtacccgggttggctgtgtgggtatacgacctgtgcagtcacacagggccctgctctgaagggccctacccattgatttaatgctccactatcaccaaccacgttaaaattcttaatcattttatccttgaacttgtgtgctttgtaagt

SEQ ID NO: 537258 - DNA, 655 bp, Homo sapiens
aacttttattttgttgttatattttatatacttccagacacaagaaaacgcagatgttggtaaacttaagaaaatatctgttttaggataagtgggaatgctgatatagtcaagaaacatttttttattcaacatttacctacagcaagatataagttaataatgatgatgatgattaatacttagaggatatttattrtataatgaacaccactttaagcatattacatgtatttaataatttagttcccataacaactttatgaactactagaacctgcattttacacgagaaacggagatattttcaagttcacaggcagcaagtggtagaagcaggactctaatacagcagcctgacacacagtccatgcgtttcatgaatttaccagtgttttctaatctgccaaccatgacccattagtagatggtaacatcagtttaacggggtgcaactagtggggttatttttaataaaatagaagacaacagaaaatcaaatgcagtacccgggttggctgtgtgggtatacgacctgtgcagtcacacagggccctgctctgaagggccctacccattgatttaatgctccactatcaccaaccacgttaaaattcttaatcattttatccttgaacttgtgtgctttgtaagt

SEQ ID NO: 537259 - DNA, 571 bp, Homo sapiens
gtgatgagagtcaaaaaggaaaagaaaagtctactcgtggtccctgaaatattctccatagatcaccttacccaaaataaatagtttgtaaatgtgatcatcttgctccagagatttttatgcatgcagtgcttgaaggtacacacatgtgaatggaacactcaccagagagccatcagtgaagtattaaaataatgtttagtgtttgacaaattaaagatgcaatcatttaaaatagcatctaggcagttttcatgtatctgttgcattgcagtgggtatcttaaatttccccattgtcacttaattcaataaacagtccatcaaaaactattaaaagtaggtattgatttctagataccattctaaaatgctttgccaagtctccattatctcaaaagcatgtgagaagtttatctttctgtgctcccaaacgatgttctcctcatcagtccacttgatagcaacataatgatcattaagtatatttcatagcttggtgactatgccattggaatttctttaagtttcaaggataratagataagtctacacaatagatatgtttagat

SEQ ID NO: 537260 - DNA, 593 bp, Homo sapiens
cactgaagagtaatttagaaaatatccagtacaatccctttattttacagatgaaggaactggaatctgtgatttgtccacagtcacattctagtcaatagcacagttatataaccatggccgatattctttccattctctatctagtaatatttccataacacacaagtactccatcccctctgggcacagtactccagaggcagattccatttgcccttgtgctaggtggcctaaaaccacatggggaaagcaaaactaaattaaaacctaggtagtcaaccagggcccacactggctttgaagcaatacagataacaactaaataaataatcctaatgttacaggatctttggggtgttgcttttctcaccrgaaacctatgcagccagtggcatctttgcccaagttcatgtcctgtgtccaggaagaatgaggtatgcagacaagtggagggtgagcaagacaaagaggagctttattgagtattagaacagctcagaggagacccacggtgggtaactcctctctgcaggcaggtcattctgtccagtgttcagctctcagcagagaggaggccctggatttggtgg

SEQ ID NO: 537261 - DNA, 551 bp, Homo sapiens
tttcagccctctagcacctctgggcggcctgtcctgtgacccatacatggaattccctgaggctgcgcccagcctgttccacaagaatgtcccagtttgacttttatgttccactgctgctttgtgatttatttcataggggcaaacttgccctgcccyggagaacatgggcaggccctgtgacctttccacccactcttgccttggcttggcaattgggatgtcctttctgagacaagaataaagtccaggacctggatatgggatcagaccctctgcccactgcagccgggcacactgaggggaagcaatgggagtggacaaggcaccatcggcctctctttattgtacaacccatgcttcaccagtggccaaggctgcctcctgcaggcaggcagagcagggggctaccagggagttatacttgagatagagggatcttaatctgtctttgcatcctccaggcctggcaggtgcttaaagtgctgccactaactacttgcgaccctgggtgagttacttaactcttaggtcctttcttctgtgagtga

SEQ ID NO: 537262 - DNA, 579 bp, Homo sapiens
tcgctctgtccccaggctggagtgcaggagttctgtggcgcgatctgggctcactgcaaactcttaactccctggttgaagcgagtctcctgcctcagcctcctgagtagctgggactacaggcgtgtgccaccacgcccagctaatttttgtgtttttagtagagacggggtttcaycatgctggccaagatggtctcgatctctcgacctcgtgatccacccgcctcggcctcccaaggtgttgggattacaggcgtgagccaccatgcccggccaacttctaccagaattttctaatgatctgcgtcttaaatttttcccacaattatacgagtcagtttcttaaaataaatgtctttctccatgaagacacatcctattggttctgtttttctggagaaccctaatacaataactaacaatacccactgcattaaagcccaagtgaattgcagtggttttaaattcaaatgtctttaaggacacagcagatgaatgaaattaggaaactgaggtgattaaaaaacagtaagtagtggtgagaatggtgttgaacttgagagttcactccgttgaa

SEQ ID NO: 537263 - DNA, 559 bp, Homo sapiens
ctggattttttttcagtttaattttttamaattatatttagtttgctaaaagcaaatagagacatttgtcattaaattcaagaacttggtagttgttatcccaattaccacaaaaaagggaaaataaagaaaactgaaaatcaacaacttttcttggacatatcagagaacaggatttaggaaaacaccaccctaaaatctagagagacaagtgcatccagagaggtgtagctatctagatgtgctcaactgaaggagaagatactggaaccataaactaggaaacactctaaaatggtaattttgtgagattccttggggatttctgggagcaaaaaatcctggggccacaaatttaaatgaggctcatatttccattctcatggagttttccttgcaggaatatcactaggttctcatggtcaggatccgagaaaaaaaaaaaaaaaaaaggaaccctccatgtcttggcagtggaaggagaagaataatcattgtgaaacattcccagagtcttctccttaacaaagtgtattctccaagggaatggagattacta

SEQ ID NO: 537264 - DNA, 616 bp, Homo sapiens
cagcatcagtagcttatgctttgttgatattgtctaatagatcaaatatgaaactgaaagataaccgaagtcttctgacccctaaggtacttgattatcaattcatagcattatacagctagaagtcccctgaaactttacctagtcctaaactctcatttttacaggtgaagacacctgtaagcaatttgcccaaggtcacacrgataatgctaactcacctttactgtgaatgtgcttacaaaattttattttatagtatgatgtctctaaattaaaaagttttcatacgatgatagactggaaaaagaaaatgtggtatatacacaccatggaatactatgcagccataaaaatgaatgagatcatgtcctttgcagggacaggatggagctggaagctgttatcctcagcaatctaacgcaggaacagaaaaccaaacaccacatgttctcacttataagtgggagctgaacaatgagaacacatggacacaggaaggggaacaacacatactgaggcctgtcgggggctgatttccttaagtaaatcttatatttgatttccttaagatttccttaataaatcttatatttggcaaatcatagcattttac

SEQ ID NO: 537265 - DNA, 619 bp, Homo sapiens
cacatgagtggtatgcggcaatggtcattatgggaagtattgaataagctggctcttgttaacacctataaatcactgaaaaaagaaaaaagaaaatgacagggtcaggttagccacgaacagtcatctgtgggagtcaggaggccttgctggcagtattcagagacatttatctcctacagacaggacagactgtgccaaaaaatcaatctcaggacttaaagggcagcagagctacaaaggggacaatatccagcctcaacaggtctctcatgtctaagtcagggctatggtgagaaaagagaatcatcctgagatctaggatagggacatctacgagaaagagcctgagaatctgaaattctcaaatttccctgaaccttcagggctaggaaaagcractcagttccattgctgtaggttagctgcttcctttacctgcagaccttaaaaatccctcacatgatgcaggtgcctccttaggagggggatgcctgtcctccttagattctaccccacctccttctagggcccacggacctataataggatgaggttgttgcagtgcctgagtagggcaataaggttcttgctctgcgaggaaataactgcactcaag

SEQ ID NO: 537266 - DNA, 481 bp, Homo sapiens
ttgcccaggctggaatgcagtggcacaaatcacggctcactgcagccttgactcccagaactcaggtgatcctcccacctcagcttcctgagtagctgggactacaggtgcatgccaccatgcccagctaatttttctattttttgtagagatggggtttcaccacgttgcccctgctggtcttgaactcatgggctcgagagatcagcacgttggcctcccaaaatactgggattacaagcgtgagccaccacacccagctcctgacttcttgatttaacgtgattttcttcctgttaccttgtctttctctgtaatctgacttctgttatgaccaccctacctctcatccaataaatccttagtatgtttaaacctgagttayggaaaggagttgaattcaggtagggtccatgtgtcatatgcaaatcagaagacggtgaataccctggtagaagaagttccaccccatagcttagag

SEQ ID NO: 537267 - DNA, 656 bp, Homo sapiens
cctgatatgacataggctattagtgtaggcagctgtataatacgattttaggaacctcaaggaaactctatgacccccctaatactctatctaacataaaattccatgttagtactttagcttctgatctttagaagttgcaaagccacaattcacaattcaagatgagatctggttggggatacagccaaaccatatcaaggttgtgaaatcctggaggagatttgcgaactggactttaaggaatttaaatggacattgttattcactgtgggttttcagaaaccacaaactgagaagtaattatggacttgaaagtttgacccagagtcagtgctttatgtagaccatttacatgtcaaatggccaggatgccctggcaccctggcaggtrctccatgatcaacagaaatctctggattctcttgtgtcttttattcattgtaagataatcatggtggtaactaatccaggaagacttagctttaagaaacatgaccaggataaagtcagatacccaaaatcaaatgtcacatttacagtgtgctaaatattacacttagcaaaattactgaggaaagaatatgtggttgaatatcatgatgatttaatgaaccatttcactcaaatgcggtgagtggttttgctttttttaa

SEQ ID NO: 537268 - DNA, 613 bp, Homo sapiens
cgggaaactaatccacattatgtcctttaatcctcctaacaaccaatgaaggggccattatttccaatcaacagagaaaaagatggaggcctagacaggttgaataagttgtctaaggtaagtgctaagtggtttggctagtaggtaacaattgaatgttacactgaaatgtacaatccatatgtgctgtagaaattctgagaaacagaaaacgatttggatttggattaagtggtcagagctgtcatagaaaagttatggcttgaactgagtatcattaaggtaaaggatttaaggtttgataaaataaatcagaactgtaggatggaagagccattatgagcccagcaatgaaactggagtgatcatggcctctatgtggccagtatcccagggtgcttggcagaatagtgggagagaaggctggagaggaggcttagccaaagaaaagaagtttgatgaaactgctttttctcacaagaccttatgggatttacttcacctagctttttgtctccagctacttytgcctccttccacatgacgcatacattagctacgctcaattgatatttattgaatgcctactgtgtacaaagtacagtgtaagaaa

SEQ ID NO: 537269 - DNA, 537 bp, Homo sapiens
caggtacatctttctactctctcctccatcaccacagctaaacttcaagccactgctcccagtacttcttccctgactcacatcttttattaccagggcaaccagtagttccagcaggtactttgtgtgaattagaaagaggcatctcgcctggaaacatttaaaacaacaacaaaccaaggcagggagtgtaagaaacgaaccacagagagagtgcatttattttctgagaccccaacccactggctggacttactgttttgataaacattccacagtgttgctgtggtcctcagccaaaaygaataagtaaatcagggaggaagctcttgagtagctgtgttaaggggactacaaaaagtcacttgtagcctctgagagaggctacaaggccactgttgtcacaggccagacgttcaggaaatcctttcaagcagatcagggggtgtttgaacagagagtgggatcacatgaaggaaaggaagaggccacttccaggaaggctagttgggacattgctggaccaggtctatgtcc

SEQ ID NO: 537270 - DNA, 495 bp, Homo sapiens
attccccagccccactaccttgatggtctgggcaasgcgaacccactcagcgatggtcatgtcactggagtcgaagaggggctggcactccagcacggtgtagaggatcctctggttgcggctggccgggctgcgggacagaaacagcaggaggcggaacagcaggctcccgctctgcacctcctcctgctctaaatgccctgacccgctctgttcccctctggcagagctggggcccctacgccaagggctccgcacatagcaagttctcagcatcccaggtacggggcccggccccccttccacctggagctccccacagaggcaaggacgtgggtcaggatgggccactcccagcagtcttcttcccacaccagctcgaagaggggggctgggaccagccatgcccaggcaggagaggatgcttgcaggaggctcgcctgtggcggctatggtggtcagccaccacgagggcaactcccagctcacccccag

SEQ ID NO: 537271 - DNA, 495 bp, Homo sapiens
attccccagccccactaccttgatggtctgggcaacgcgaacccactcagcgatggtcatgtcactggagtcgaagaggggctggcactccagcacggtgtagaggatcctctggttgcggctggccgggctgcgggacagaaacagcaggaggcggaacagcaggctcccgctctgcacctcctcctgctctaaatgccctgacccgctctgttcccctctggcagagctggggcccctacgccaagggctccgcacatagcaagttctcagcatcccaggtacggggcccggccccccttccacctggagctccccacagaggcaaggacgtgggtcaggatgggccactcccagcagtcttcttcccacaccagctcgaagaggggggctgggaccagccatscccaggcaggagaggatgcttgcaggaggctcgcctgtggcggctatggtggtcagccaccacgagggcaactcccagctcacccccag

SEQ ID NO: 537272 - DNA, 503 bp, Homo sapiens
ggacaggctgccaggaagggacaggtgctgaggcccgaggcaggagtgagcatggccccacagtgcccaggtcagtggggcgagagcactcagagggaggggatgcccgctgagtgactgtggtgccacgcaaggactttcaatttaaccccaaaggtgaacaccagccccaccgagggttgggctggtttgttttaatctctggctgctatgtgcggagactgagacaagaatgggttcaggagggctttgggcagggtggggaggagctggggatggggaagtgcaaggtgggagtgctgggagcacaagctggagcttgagrggtacgcgccgaagagaaagggtgactctcctgtctttggccagagcagccacggagtggggatgtccttactgagaaagcaggggccagagtggggcctggggccaggcagagggaagcaaggtgtgttggacacatcctgcttgggggccacctgggcaggtccaaggagactcac

SEQ ID NO: 537273 - DNA, 558 bp, Homo sapiens
ggaagccagtgcaaagccgcagaaaggggcaggtgcccagacacaaccttcgcaggccaggcaggcggggggtactggcatggggacagagtaacaggcttaaggaagcaaactagttccgctggggacctaccaaatgagaagcagataggactccgaagaggccaggaggcaaccagagcaacagctaaggtggccccagagggcacatgtacaggtcaggtgaggccatgagctcacagcagtcaaagggctggggatcccccaaagggtctggggcctctgaccacgggaaagcccagcaaactggggtcaagacagacccaggcctgagtcctccagggaagagcctccatccaggctgccccgggagggggctcttgtggttcgggggtcctgagcccatgagcaaaggtaggcagagggcagaggatggcaagaagactctgggagggaaatgctgccatcactcctgcctcgacttccccacayagcataacccagagacaagggagccaggggccgcttacacagggctgtttcccgccagcccagccc

SEQ ID NO: 537274 - DNA, 642 bp, Homo sapiens
ggtgtctcaagtctgtagcaccaaatgcaaaagggagaaaagtccaaatcaaggtcaaaggcacttgcgttgctgtcgggtggtgacggtcttckggtcaccctggcaccctcgctctgtccaccgcgtggccggccctccctcccccacactccgtctcctctctgagactcccgtcctgcacagaaacccctccgcatcctccccccgcagcccccaccacatcctcgctccgtcccacgtcccgtcctccagcccgctgcacgccccctcctcttgtccggcgcccagcctcagacgtccacctcctgcggccccgggatggcagcactggctgcaacgctgatgtcgaagcaggtgaccatcatgacgtgcgccttgcacaggttcacgcactgctccagggccgccgtggctcgctccagggccgccaggtactcggccgactcgggctccagctccgggtccacctcaactggggaggggaggagaggggaggggcacctgcgtcaggcccgaggctgggggcagccacctggccccccagaggccccaggaaaggcatcttggcccggccgaccctgccttccagccttcccaccacgaggtacaggagagcaacagggctctgggaggggaggg

SEQ ID NO: 537275 - DNA, 521 bp, Homo sapiens
accgaaccctggcaccctgtggcctgccggactagagtcagcagaaagcagggggaagcccattcgaatgcaaacggggacgggcaagataagaaggatcccatccaggggaagatacaaattctgacgcctcggcctcaccggccccactgcaggcttggggagactgaggctggggggcaggctgagggtgggttgggcttccagmctgacctcccgagccagcagggaaccaggcagccctggtgctgggcagaagcaatggcgtctccaaagcacacacacagatctcaaactgggccacatacaggcaccggactcgggaagaccctgacaccagccccagtaccctgagagggggcagacgccggggaggggcaggacccaggatgccggagcccagagcaatcactgcaaacactccgaaacccatccacagcagggacaccccacacaggtgggtctggtgcgtcgatgccaggaggcggcggctctgacccggcagaggctgcgcacacgag

SEQ ID NO: 537276 - DNA, 573 bp, Homo sapiens
gcccagggaggccagggggtcttgggatgaggacagcatctatggcagggcagacagagcagcccattagagaaaggtccctggaggccrcaggaggccaggccacagggggccgctccaggccatgggggtcctgaagtagtcagcccggagacaaggcctgaggaccctggtgagagcagagggcacagtgtggggacacagtgaggagcaggagccacggccagagtcccatcatggggcttcccctccacacccagggccaagcacccttctcagatcaggaaagacaatcccctggggctccaacaggggcaggaagacaatgtccccctcccctacggccccagacggggcaccagagctcagaaaggtggggagggcacagtcttatccatgccacagggatgaggtccccagataggggaccatggtcaccctcactgcccagacaagggaactgagacaggctcaggcagacaagagcacacagcaagggagaggtaggccgggaacctgggctccaacagccccagggactcggagtccctaactcagcaaacagcagcagca

SEQ ID NO: 537277 - DNA, 545 bp, Homo sapiens
gaggacagcatctatggcagggcagacagagcagcccattagagaaaggtccctggaggccacaggaggccaggccacagggggccgctccaggccatgggggtcctgaagtagtcagcccggagacaaggcctgaggaccctggtgagagcagagggcacagtgtggggacacagtgaggagcaggagccacggccagagtcccatcatggggcttcccctccacacccagggccaagcacccttctcagatcaggaaagacaatcccctggggctccaacaggggcaggaagacaatgtccccctcccctacggccccagacggggcaccagagctcagaaaggtggggagggcacagtcttatccatgccacagggatgaggtccccagataggggaccatggtcaccctcactgcccagacaagggaactgagacaggctcaggcagacragagcacacagcaagggagaggtaggccgggaacctgggctccaacagccccagggactcggagtccctaactcagcaaacagcagcagca

SEQ ID NO: 537278 - DNA, 488 bp, Homo sapiens
tgggacatctgggctgggggaggaacgccagcycaggcccctcccatccgaggcagcagggcccctcgggctgagctccctagctcacacatggtgttacagaccgggaaactgaggcccgcagaagggaagtcctggctgataactctttgtggaaacagcagcagggaaggagtggaaccctgcttccctccaagccccaagttctacccaagttcggcgtggccctgctcggaggggtcggcctaaggaagtgtcacttacccggagggtggtcccgggcccgctgaccagcttccacgcctgtcgcttgagctccaccagcttcgtgtggcagtggcggcaccagccgcctccgccggccgagtggccctgctctgggccggccccggcgccttcgggagcagggcggctgccgcatgggtcctggtcgggcccggcgggtagcctctttcggggggacacctccagcagcggcggcggctcgc

SEQ ID NO: 537279 - DNA, 566 bp, Homo sapiens
agaagaacccacctctcttcttttctttttttttttctttttttttgagacctagtcttgctgtgttgcccaggctggagtgcagtggtgcgatcttggctcgctgcaacctccatcttcccagttcaagcgattctcccacctcagcctcccaagtagctgggaccacagacacaaaccaccacacctggctaatgtttttatttattttttaagagacagagtttcgccatgttggctgttctcaaactcctaggctcaagctatccacccgcctcggcctcccaaagtgctgggattgcaggtgtgagccaccaagcctggccaccactccttaattctaagttctggtctagcccagtcctgggcagactcttcccgacgcacagccacttggatgggctcccctcgcccaggtggctcccgtgtccagcatccaagggaastgacgagagaggacggggagaaggtgacaagtacaagcacctgcagttcccaccagcagcaggaaatattgaggtgtgaccagaaggggaacttcctagcatacacgagaaatctggtta

SEQ ID NO: 537280 - DNA, 614 bp, Homo sapiens
ctgcaaggggtggggtcaactctgtggcagccccgcacccagcacccaggggagggcattagttggtgctagcagaatagctcctcccagggcagtctccccaacccattccaargggacagcccatttcagaggacagccttacatgagctgaccggccccactgcacacccaaacgctgatcacaccccgtggtgacctcctcagccaggcgcaggggacactgaatcaatccggccgactgcccttgggtaggagtgggggcagggcacccggacagtggagtctgtgggggtggggtcggggctctagcaaggaggagcagaggcacaaaggcccgaggccggaggccacacagcccattgtacagggtgacctaaagactgtgccataatcgctggccgtgcccccacccctgcaaagcaccacagatccccccatcaccccatttagggagcctgggaataggtatgaggcagtggcctccccataccccactcaggcacagcagggccaggcaggcggcctcagggagcctggcagcggagcgaggctgggagaccggttgggggcgtgctgtgagcctggtcctgtgagtcaggaggagacgaggg

SEQ ID NO: 537281 - DNA, 588 bp, Homo sapiens
acaggcttgagtcggtgcctccctgtgggagcctgcctctctctgcctccgtttctcacctgtagaaccaggcagtttcctctgtccygtcctgctgaggggccctggggcaacaagcaagtcagccaccgagcccggactcccacacacaggccttgtcttgagatccaaagacgctgcctccacccgcttctgctgacggccccacagccagacatgcccagagcccctcctgtcccccgacttctggtagatgctccaggaaggcccctgccctgccagacccttcccagggccccctcatgccaggccctgaagctccccagggtccttgcctgtgtctggggattcttccaggaagctgtgccccagcagcccatagcccaaccctttctccaggagggtctgctcctccttaaaatgggggagtggggagcctctgccgcaccgggagattccctaggaagggcctccccaggcgtccagtgaccttgtgggcttgacccaccagcccgccatggcccaggcctggacagaagcccagtgtgggtgagggggcgcctccaccccacccgcccagacaggaac

SEQ ID NO: 537282 - DNA, 579 bp, Homo sapiens
ttaatggcctaaagtcatatagaacctggtatttgtactcctttccttccagtcttaaggattatgtcttataaagatctgtccaaagcaccgatagaattattttagcctttaggagacaaagttcagagatatttgatatagctgtcttaaagtataaagggctgycatgtgaaacagggatttgttttttatgacccaagagagcagaaatctgatccaagggtgaaaactactgggaaggttattttggctcataaaaataaatatatttcaaaaatagaatgaatgctctatcagtggaactgtttgcatgttgctatatcatttttctggaatgtgtcaggcattcagggttttttgtttagtttgcagatttcttcaacctgagattcactaaaatataagctatatgaaagcagagatcttgtctgtctgggggaccacagtatcctcaatgtctagagagcaccatgcttgatacacttgttgactaaatgaataatgagttaattattctcacaggtcatctggatacttcattccttctctttgcctaaagttcagttctgatttttg

SEQ ID NO: 537283 - DNA, 579 bp, Homo sapiens
ttaatggcctaaagtcatatagaacctggtatttgtactcctttccttccagtcttaaggattatgtcttataaagatctgtccaaagcaccgatagaattattttagcctttaggagacaaagttcagagatatttgatatagctgtcttaaagtataaagggctgtcatgtgaaacagggatttgttttttatgacccaagagagcagaaatctgatccaagggtgaaaactactgggaaggttattttggctcataaaaataaatatatttcaaaaatagaatgaatgctctatcagtggaactgtttgcatgttgctatatcatttttctggaatgtgtcaggcattcagggttttttgtttagtttgcagatttcttcaacctgagattcactaaaatataagctayatgaaagcagagatcttgtctgtctgggggaccacagtatcctcaatgtctagagagcaccatgcttgatacacttgttgactaaatgaataatgagttaattattctcacaggtcatctggatacttcattccttctctttgcctaaagttcagttctgatttttg

SEQ ID NO: 537284 - DNA, 574 bp, Homo sapiens
tgaacatgcccatatgagatcagcacaaccactgagtgaagtctatccttaccatcaggcccccaaccaatgctcacacatttggcctaaatagatgtttagaattgcataccacagaaattttgttattgatatacacactattacactaataactaactgacatatcttctcagataaagacctcartgaggtggtaacagtttagtgaacacctaaaggaagaaaattctgggagaagaaacaacgttcaaaaaggcactaaggtatgtggtatattttaaggaactcgatggtcagtatgcctaagcctaataagcatgaaggagggggtttcagtaatagatgggggagatcagtccttgtagactctggtaggaaattaatttttaaattttacaacatccaatagggactgttgaaggatagcttaaaggtgggaaatgaattggaagagaagacagaaatacttgacttgaaaattcacttatatatatagcaaacacattgttttcacttaggttttatgtgtcatacgtatatattgtggctttaagggtgctgatggacatca

SEQ ID NO: 537285 - DNA, 574 bp, Homo sapiens
tgaacatgcccatatgagatcagcacaaccactgagtgaagtctatccttaccatcaggcccccaaccaatgctcacacatttggcctaaatagatgtttagaattgcataccacagaaattttgttattgatatacacactattacactaataactaactgacatatcttctcagataaagacctcagtgaggtggtaacagtttagtgaacacctaaaggaagaaaattctgggagaagaaacaacgttcaaaaaggcactaaggtatgtggtatattttaaggaactcgatggtcagtatgcctaagcctaataagcatgaaggagggggtttcagtaatagatgggggagatcagtccttgtagactstggtaggaaattaatttttaaattttacaacatccaatagggactgttgaaggatagcttaaaggtgggaaatgaattggaagagaagacagaaatacttgacttgaaaattcacttatatatatagcaaacacattgttttcacttaggttttatgtgtcatacgtatatattgtggctttaagggtgctgatggacatca

SEQ ID NO: 537286 - DNA, 574 bp, Homo sapiens
tgaacatgcccatatgagatcagcacaaccactgagtgaagtctatccttaccatcaggcccccaaccaatgctcacacatttggcctaaatagatgtttagaattgcataccacagaaattttgttattgatatacacactattacactaataactaactgacatatcttctcagataaagacctcagtgaggtggtaacagtttagtgaacacctaaaggaagaaaattctgggagaagaaacaacgttcaaaaaggcactaaggtatgtggtatattttaaggaactcgatggtcagtatgcctaagcctaataagcatgaaggagggggtttcagtaatagatgggggagatcagtccttgtagactctggtaggaaattaatttttaaattttacaacatccaatagggactgttgaaggatagcttaaaggtgggaaatgaattggaagagaagacagaaatacttgacttgaaaattcacttatatatatagcaaacacattgttttyacttaggttttatgtgtcatacgtatatattgtggctttaagggtgctgatggacatca

SEQ ID NO: 537287 - DNA, 443 bp, Homo sapiens
ctgtctccaactatgactcctctcctgagtttgattacattttgtttattgctttttggagtactttcacttggataaatatttttatttgataatgcaatatctaaaaccaagctaacaactgcaatctgtgcagaagaaagtaactatgatggttaggagtctagatagmatgtctgaaaaatagtcaagagaagttggaaacttgtcttagaaaggagaacccttaagcaagtacctgagtttttaaaaatatttgaaggattaagacagtgacgatgaatgcatagtttcttgttcagtgaaggcataccttaataatttgtatcaccctgagctcctagccaagtgttgaatggatagatagatggatggaaataggcaaacatcattaacgtattacagagttttctaaaaattagaactttccagtaatataatgg

SEQ ID NO: 537288 - DNA, 443 bp, Homo sapiens
ctgtctccaactatgactcctctcctgagtttgattacattttgtttattgctttttggagtactttcacttggataaatatttttatttgataatgcaatatctaaaaccaagctaacaactgcaatctgtgcagaagaaagtaactatgatggttaggagtctagatagaatgtctgaaaaatagtcaagagaagttggaaacttgtcttagaaaggagaacccttaagcaagtacctgagtttttaaaaatatttgaaggattaagacagtgacgatgaatgcatagtttcttgttcagtgaaggcataccttaataatttgtatcaccctgagctcctagccaagtgttgaatggatagatagatggatggaaataggcaaacatcattaacrtattacagagttttctaaaaattagaactttccagtaatataatgg

SEQ ID NO: 537289 - DNA, 442 bp, Homo sapiens
aaatcatgtcttgtcttattatgtccttagtctgttaagaagcttttataaatattaaataaacaaagttcagtcccttgggtcttaaagggaaatagttctttcagtgtagaaaaaaactctccctagccaagtctttttagacaaaggattttcccctgatgatccaagaactggcaattagggcaggaaggatggggtctgtgtgacacatttgggagctaaaccaagcaactgtaaagtgagaaaatgggatgggatgtcctcgaaggttcacgctgttttacagttctgtcactcacgagtgacaaggacaggtccaaattttagttctggctytgccactcatttgcagactcacatggtccagtaagtcacctcactaaacctgagttacctcgttagctaaataaggatagtaaagtacaatcaaaagccatgc

SEQ ID NO: 537290 - DNA, 643 bp, Homo sapiens
tgccaacctctgtagctctgattggccagccaaatcaagagcccactcctggcatgggaaaggaggggcagatcagctccacctcaaccaaatagagtgagagagggaggatggtcccccaaaggaaactggagtaatccttccagaagagtatgaaggcccatggatgtccagtgaatgggcactggatgccaagatcccctgaacatccatgacaagaaccagcagcactttgcttgtggccatcatgctgcataccatgcaggaagccaaaatcattaatagtaccagccagagtggggacttgctgttttttsggggaactaagcccaacaaagctaaaatgattggggaatgattcaaaataggttgtttgaattttaagacagaaactgggctcccgttctgttcccaatcaagggatgtgctgcttgaggctgtcatctcttcacttcctttccatttcttcctccccagtgctcagagccagaacatccctttggtagctgtatctcccagcatcttgtggatccattagaaattccctagagagctggagcagccagtgactgctgcctctttcctaacccctcccttcccctaccaccctcctccgcagtctctgaactctgtttttttccag

SEQ ID NO: 537291 - DNA, 643 bp, Homo sapiens
tgccaacctctgtagctctgattggccagccaaatcaagagcccactcctggcatgggaaaggaggggcagatcagctccacctcaaccaaatagagtgagagagggaggatggtcccccaaaggaaactggagtaatccttccagaagagtatgaaggcccatggatgtccagtgaatgggcactggatgccaagatcccctgaacatccatgacaagaaccagcagcactttgcttgtggccatcatgctgcataccatgcaggaagccaaaatcattaatagtaccagccagagtggggacttgctgttttttgggggaactaagcccaacaaagctaaaatgattggggaatgattcaaaataggttgtttgaattttaagacagaaactgggctcccgttctgttcccaatcaagggatgtgctrcttgaggctgtcatctcttcacttcctttccatttcttcctccccagtgctcagagccagaacatccctttggtagctgtatctcccagcatcttgtggatccattagaaattccctagagagctggagcagccagtgactgctgcctctttcctaacccctcccttcccctaccaccctcctccgcagtctctgaactctgtttttttccag

SEQ ID NO: 537292 - DNA, 558 bp, Homo sapiens
ggaagcaggcacattttccatggctggagcaggaggaagagaggggggtggcaagtgcgaaactcggtctcaaaaaaaaaaaagaacaaattagtaccaagtggcagtagaggtggtctgaatataygccagaaagtggctcgagactatgacatttgtgagctactgccatcagtggaagctctttacctgtggaggccacgatgggattaatagcaccctttccccccacaaagcgggatttctgttccgcacaggtagaggttgttctgggtgtgaacggctacaaaagccttaaaggtgagaaggatgaagctgacatgtggttccccaggccagcacctgggcaaaggtctgggcagctcagcccagagaactcactaacgtgagaacatgataaaacttactcactatcatgagaacaggatagaacttactatcatgagaacatgaagccaggggaaaatacacccccatgcttcagtcacctcccaccaggcccctcctccaacactggggattacactcactgttgtaacccagttctgaactcatgcc

SEQ ID NO: 537293 - DNA, 591 bp, Homo sapiens
aaacaggggaatttattgcctatgtagctggaaaaacctagggcactggcttcaggcaggcctgggtccaggtcctcaaggtataatatcaggactcagcctctgcttccctttctgtgggcctcaggctcaggcaggctctcccactgtggtggcaaagacagccctggcagtttcaggctgcagtgtcccccaaaaagagagcccctcctgtctaggacttcctgcagagtcccaggaatttctctactggactcccacatccatccaagaagataggtgctgtgggtggccatatttggccacatgtccacccgcaggaccaggggtcaggtcagcctcacccaaaacaactgatctgaaggtgaggcaggggtggttcacaaaggagaaggaggcaggaagaaactacagatagccactccacgtgactttacagcccacccaaatccgggctatccagtggaaaggacgtagcgttggtggcagggacctgcctgcctgacttcgctgcccctgacctctccaggcctcagtttcctcaattgtaaaattratatgctcgtttcatcttcccacctagaggggtcc

SEQ ID NO: 537294 - DNA, 611 bp, Homo sapiens
atggtatgttccacttagagcctgtctccgtatctccctcaatgggggatcttgggcaagctccttccacagtctgagcctcagttttctggtctgtcgaaggggaattgctgtacctctcctgtaaagccaaactgaggactagtgagaaaacgccgagttggggctcagcacggggccagccctcagggacattcagcactgttttcattatttcctgttctgttacacgctctgctgttacacaaggaaaataacaaccatacagcagcaactgttctaatcacatcacacgcatagctcctttaatcacagccacacaacaggtagggactgaaacacagagacatcaagcaagttgcttgaggtcacacaggtaagaagcttgggtctcagctcagcctttctggctgaaagtcaatgctgttatcacwgtaactacactagaacttgtcttgaactgtccctagaaatgggagtgtctgggggttaggggggaggttaaaaaaccaaaacctgtaaaccactgtgacttagggcttatgtagccagcatcttatcactggacagcacatgttctgagggcatgccaagggtttcacagaacacgt

SEQ ID NO: 537295 - DNA, 355 bp, Homo sapiens
ccctgggtcacaaaatgaaaataaacaagagactattttggagaaagcataccaagggacaagacgatagcctgtttatttccaaacctgccctgagtcatcattcagaaggttcatgcaaaagaaaagagaaatcagaagagaaaacactgcagtsaggagtcttctgagacaggtggcttcctaagcttttgcaagtagggtcaccatggtaaccagaaccaaacagatgacctcgaatggaatagactgacctagaccttctgctaaatgtgtctgggcaggacattgaggatagagtgggattttgttgactatagtcaacaaaaatttaaatgtacattctcaaataact

SEQ ID NO: 537296 - DNA, 655 bp, Homo sapiens
ttttcaagccagtaaaattggaacaaaatatatttggctgtagataactcaggaaggcacagcaaattatttgcagcaaaacaaggttattggttgtcctatttgataaaatgattaaaaataagttttactatcccaccttaggcatgtttcctcctgcagataaataattaacattattttagattggtttgtttcagacatcacggtaatgatatattccttcaactctaattaattgcatgcatagagccgtagaaaacattttgtgtaatccaaaggctactatttatcaggtgtttcagactttcaatcacttgtgaagaaccggctaaacgcaattagtgacaagttatttcttagaaacaaacagaataattagaagaggtggcttgatataactaacaaaaaagtcattagaaaggttgtattcatgtttcaaaatgaagggaattgcagtgtgagaacattactgtgactactacaatagaagttttaaactaagatttattaacatgttaggtggagtgttacataacttacrtatgtatcccttttaatataagtaaagcataatcttcaactctgagaattcacataaattaaatggaatgaaatgtaatttgaatggtcagtaaattggtatcaaggaata

SEQ ID NO: 537297 - DNA, 664 bp, Homo sapiens
tcattctatttatcatatttctttgctcattamattttttttgctagatctcatactagaacaacagcaacattatctgaagtaccagcccatcccaactcatttactagtagacgcatattttaactatagctataaagacccatgaaagaaccactccatcacacaaactgtgtaaaaaaaggcacagtttgggctttctgaaatggacaaagattatttcttttctcttttttcttttctttttaccttttagtaggtgaaaaaaaaatgagttcctgcaaattcgtgaaatatgctggatcacataggaggtggtaatttctgaagggctgactcaaacctagttcctctgtccccagaaaaaaaattatctttccactgtgatcacgtttaagcccattcttgaaataaagtacagtttataacttcagatgttttcaaaactgaatttgcaaagaggagaaaatgggcaatccttgtccccagcctttaggcaccatcacctacttctctgcattgtggaagaaggcaacgacactaacatttaaactactgcatgagaggatgacggctgtaagtttatttcatattagcattcattttatagattttcctctctgactagaaatatcgcttgaactccactcaccatggcaacaaa

SEQ ID NO: 537298 - DNA, 579 bp, Homo sapiens
ctttcaaaattatcacgacaatgtggaataaatacatcaatacagggctagtatatcaccaacacacaaacagcttttattaatataacaatcacctctgatactgaagtaagacaaggtttccctcttaattctggctcttccctaagaaagcttgaagcactctgttataaggggtagaccaattatatggcttggctctgtgttccgcccacatctcatcttgaattgtaatccccataatccccacgtgtcaagggtagaacctggagggtggtgattgtatgatggaggcagtttaccccctgctgttctcgtgatagtgagtgagttctcatgagagctgatggttttctaagtgtttgacatttcctcctacatacactccttttctcctgctaccatgtgaagaaggctcttgcttccccttcacctttctcyatgattgtaagtttcctgaggcctccccagccatgtgaaactgtgagtcaattaaacctctcccttcgtaaattacccagtcttgggaatttccttatagcagtgtgaaaatagactaatacaaccaatcttagagaa

SEQ ID NO: 537299 - DNA, 626 bp, Homo sapiens
ctgaagaagggccaatagtctcacttctgcctcaaattacctgtttccagatttgaagactgtgattacccaagtctttaagagatataatgaagacagcactttgcacccttgaattttactcattgcattacaataaagaggtatcttttttgcttctgtttttttttttttaatagcatgtgatagttagtgctcaatgtgattagtccttgtggaaaattttattattacaaaattgtgctaaactgcctcttttgytctttaaattctctggttaattctcagtggccatcgagagagattacctgcaaaatatatttggcagatataattcgaaattttgaaaattttaaagacagttaatatgacataagaaaagtttcaaatctaaattcgtaaatggatgatggtgacaattactaaatcaaaaatacatgaattgaatccattattctgattatatctcagataaatccaaagcaaatacactgattttcttcactttaggaagccacagtttgaaaaattgttaatatctaaatttaaactatttgttttgggtaggattaaaactataacttttaccattactattcacttgtaaatgaacactatattcatat

SEQ ID NO: 537300 - DNA, 621 bp, Homo sapiens
ccttcccttaatgaacttaccaatactggaaataaaaccactatcaactctaagagctcagttgctaaaatatgtcaaaattctaatcacaggcacagcagtcttgatgtggaatatggataagatggtagaaaactagctatttgggcactgtgttggtatccctaaaatgtttgggattccagcaaacctgtagagcacctaaaaggcatacgtagcatgccctagtggccatttcattcctattcaacctccagctcagatctctaagtccacatgtttctgattcattgacagttcattgtaatcatttttccaagagccattgaaattcaagaaatctttacttttaaaagcacacttttgagggaagctgttcaatcctaaactaatatgaaaagctcttaagatttaagtcagckcataggtccaaaccactaatttttcaataagcttcattcttggcaaatgatggtcagcctccctctccaagctcgtgcagtttagccctgaggtctgggaacgctggcagagagattgaaggaaagaatgttatgagttgtttctggccagggctccgaaatacttcttagaaaaggcgcaaactacccctgagcatta

SEQ ID NO: 537301 - DNA, 575 bp, Homo sapiens
tcaaaatgcaaagagatagtatccaggtttggaaatttttttttttttcctacaatgcctcaaaaacaaatcacacctgtaaactctaaactcttcttctgggggatattttgtgattgtaaaggagtggtgctgccttcccagtgaaagatgaaatgaattaaaaggaattgagtcacctcctgctggctctgtgagtctctgtgactgggagaagagcctgagaaggaggaaatggcaaaccgccccagaggcaaggttctagcacttcccgaggtgtcaggtggaaccttgctggggtgaggttaggcaatttggcacaatccctaatcttactcatttcctcattcccatgggaaacgttttcttgggagtgattatttctgagcagcctggaagacatcaaggttctggcgtagagtaaggtcataaaaaaaaagggccctgagtctcacccagcggtcttatctcccttcaagaatgtctcctaggtcattcccgggagtgagaagcttcgatcggctcacagtttctttttktaagtgtttattcatgcattaaacaaatgtttatca

SEQ ID NO: 537302 - DNA, 463 bp, Homo sapiens
gatcttcttatagaacacacgcagtcaccttcacactgctgagtgtttgttgaatgactgtatgagtgagcaaagaagtttacagtgcctaatgtgtgtcaaacactgtgctaagtactgttgatgcagtatgcattagtcagcaatctaccaattgcaagtgacaaatacccagcttccaggagtaaatggaatttactgggttagggagggtagccttcaggcctagttggattcagagccttgagcaatgtcactgagaaggcctcagcctcttcatttcttggttctatttacttaggtgttggctcactcccttagtggtagcagtgctgctgccagaagggccagggttatggccatggccttggagttggactccctcaatcatttcatcartagtccctgggcctgatcctcattggcccaagtaggatcacgtgcccattccagccactgagga

SEQ ID NO: 537303 - DNA, 633 bp, Homo sapiens
cataagttccacataaggaaggggatagatagttctactctattctgccttgagaattatgttcagatgtaatggttcaggtttaagattggggcaaagtagagaacaactagaacaagtgaatggctttcatgacaaaatatgaaaggaaagatgggatgtttgcttacagaagaaaagagatgaagaagagaagatgcaaaaactggcttcaaaaactggcttgatcggccaggcacggtggctcacgcctgtaatcccagcactttgggaggccaaggtgggcggatcacaaggtcaagagatcgagaccatcctggccaatacgtgaaaccccatctctactaaaaaaataagaataaaatagccgggtatggtggcgggtgcctgcagtcccagctactcaggaggctgaggcaggagaatggtgtgaacccaggaggcrgagcttgcagtgagccgagatcatgccactgcactccagcctggacgacagagcaagactccgtctcaaaacaaacaaacaaacaaacaaaaaactggcttgatctaagtaggatcgagtggaaagggaatagatcatcttatgtggctgaactagacccacttatgtggtgtagctcttgtagaaag

SEQ ID NO: 537304 - DNA, 642 bp, Homo sapiens
ttatcttattcacatagctaacatttagacatactacctagaactaaacattgtctccactgctgaattaattacttatgatatacatgtcaaatgtctatgacatatacatacatatacatgtatatatgtgtgtatatatatgtccagtttcactaaagacacagaatttttaaaaattatggccatatcgaccaaataagcagaaaagacacataatgccaaatctatataaatcttccaccttatagaaaaggartacatttagattatcttacttggaaagagtccaaagagcagcaaagagactctgaagctttttctcttttaaatcctactaggagaactacgataagagcttcctcaaccacagagcactggtaggctcagaaaacagacaatctcatcctctcacttgggtgaaaggtcctctggatctttttcactagctccagactcatgaacaggccacatataaaccacccaagaaatacagttagttagctacataattctcaaacacagtagcgacttttgtctggtggatttgttgtcttgaacttcatggccaaagagttcttaacccacttgttgcatgttaactccattcttcttatccagtccttagtggaaacaggaaac

SEQ ID NO: 537305 - DNA, 642 bp, Homo sapiens
ttatcttattcacatagctaacatttagacatactacctagaactaaacattgtctccactgctgaattaattacttatgatatacatgtcaaatgtctatgacatatacatacatatacatgtatatatgtgtgtatatatatgtccagtttcactaaagacacagaatttttaaaaattatggccatatcgaccaaataagcagaaaagacacataatgccaaatctatataaatcttccaccttatagaaaaggagtacatttagattatcttacttggaaagagtycaaagagcagcaaagagactctgaagctttttctcttttaaatcctactaggagaactacgataagagcttcctcaaccacagagcactggtaggctcagaaaacagacaatctcatcctctcacttgggtgaaaggtcctctggatctttttcactagctccagactcatgaacaggccacatataaaccacccaagaaatacagttagttagctacataattctcaaacacagtagcgacttttgtctggtggatttgttgtcttgaacttcatggccaaagagttcttaacccacttgttgcatgttaactccattcttcttatccagtccttagtggaaacaggaaac

SEQ ID NO: 537306 - DNA, 648 bp, Homo sapiens
atttaaatgtctttgaggaaaaaactcatattaaaattattatgtgtgcattatcttcatattaggtatgaaatagttattgaatttattttgagtacttatgaatcttcgtgaagaccaggagtcaaaataacaatcactaataagagtattaattctactttgcttgcctctctgcattttttctgttagtgtaaacatccactagacaggtaggtaaacatttcataaatctcaagttaaatgagataaaaatgacatggcatctatgaaaagatccaatagtcaataacgtttgtggcattaaaattgtcactacacagacttctagcacaaaataagcaccaaaaaaataaagaaatgtatctaatctactcttattcttctctcragaaattatcgaatttagctggacagagatagtagaaagaaaattttgggataccaggcagttaggggtcaaataaccctgtttgaagcacagggagatttcagtcatcataaggcatcttatggtcagcttgctaatgagttactgcaaaaaagttaataagtaagagacagaagcaaagaaccatgtggagtggtgacagaagcaatttcacttaattttatcagagttagcccttatctctaccctgcggatgc

SEQ ID NO: 537307 - DNA, 537 bp, Homo sapiens
caataagtttggtaaagtaaggaatggtggtgccaatgccagtcacaagagcctttttttgtaggagaaagcccaagttcatttttgatttctcattggaaatggtcagtggacatctactcatgtgggactataactcagatgagtagaaagaatataaaggtgaaatgaccatataagtaagctctgaagctatgatattttaaaaaaagttatcaagggaatataatgaaggaagaatagaaggttaagtccaagtaytggaaactgccctacgtcttaaaggtctggctgggagtgatacagaacagcagactcgggaaaagcaacaaaagtgaggctgataagtatttggagagccaggttactgccatgaaacagaagacaagcaaagaggttttctctcaacaaaggtttccacttgttaacatctggaacagaatgcttgatgtcaatagcaaagcacaatgctgtggaagcaacaaaagtgagttcagtgttactctgggtggcctctgtagaacctaagtcttctac

SEQ ID NO: 537308 - DNA, 618 bp, Homo sapiens
aagcccagtcagtatgctcccttccactcaccctatgtgaaaattttatagtcttttccaaagctcaataccattctaagcagtcacgtgggaggaaaatatagtcttttagttggaacacctaatgttttttcggagctggggactttatttcctaaggtcaaatagtatcagtcaagtattgcagaaatcacacaaagagcctagatctagggtggcttgcatgcttttactttgtgggtgacaattctgcttctagagttgcttctaccttacttaccactcatctgttcaacattgtcatcacagttaggatcccctgtgactgtggaacatgtatcaggaattcatgcacggcctagcagatatatgcctttttcttaaaargaatcctgaagtggttacaattcatttatatcagtggactagtgtctgtgtcctcagcgtggaaccccaaatcagaagattagaaaagctggtccacagctactctttgaggaagtttcgccttcgtcccactggggccctgggtcaccgatatttaattgttatattattttctgatggctgggaggaaggtttcaaaattgatgaatattgccccacccactgtgctat

SEQ ID NO: 537309 - DNA, 526 bp, Homo sapiens
cctggttctgtgcctaggagtgcctctttgttctccatttagctaccatttagggcattcgggctttttccctgcaacccctaccatattcttctaccagaagtgttaaggaaacgttaacaaattataatttgtaacatttgttctttctgatttatactgaagtgtaaatgactgatgataacttgccttctcctggcctagaattgaattttactaagaatagaacraagacagacaaacacacatgcacatgcatgtacacacacgccccagcacctaaaaatcaaatgagaaagcttaaccagcaattaaacaagggtgtgttggatggccatgagactagacatataggtaaccacagacacatatagatctatactatcaaatatggctacctatactatggaatactggtataggaaggcctgaggaagatgggcagtgggtggagagcagagtctagggtgaccaaagtttttagctataaaaaataggagaagaaagccagctttggggaagggtt

SEQ ID NO: 537310 - DNA, 580 bp, Homo sapiens
gagttagtaagagaagctttgcctcctggagtatcttctgtctggctgatccagacagcatttcaaacagcagcaggccagcaactactrcagagcctcctgaatggaggagtcaggcacacccttgcctgccacctctgccccatgatggtgcggtccatcatttctgaatatgttgggtctttggcctcaactgggcttccccagtcaggcatggtgtctcacacatgatggcatcctggtgcctggtcatgggaagagcctatagaccttgaacacatgatccctgaaaaggtgggtggtatggtggccggtgctgctggttagagcgctgtccctgatgggtgcaggcgttggtggcttgtgggctcagtcagagcgcctcctggactagattcccttcagttcacaaacacttatttagcaccttctgtgttttccacattgtgtgagacattaaggccatagaaatgaatagttctcaaaacaaatgtttactgagcttcctcaaagtgctccacccagggctaaccgagacaatgcagagaggaaggagatgcagtttccaggagctggaggc

SEQ ID NO: 537311 - DNA, 637 bp, Homo sapiens
ggcctgaaaggaaccattaatcttcctccttgcctgaggacttatgtcacaggggctgagctgggaagaaggggagctgaggctagagcccctggaatagacattaaatcctggactctctgtccagagtcacaccttctaagcacatgacaataagggctattgccctggaggagagggtggttccccaggctattgaggggcaagaatctgtgaatgaggatgctggcagggattgtgyttgcaatcgcagagtggttgcaaatgggcaaagcagatccctgatgcttgggaagtcttcatctgatgagcaaagaccagtccttgtccttgggaagtttatgtctaaggaggaggacaaagcagatacacaaggcacattattagggaacatttaggcaccaaaattcgtggatggagcatctttctcacagggagaaatgtgtgtacctgtgcctgcatttgtaggatttgcattgagttctgttttcctggttgtgtgaacttgagtgggttattctttctgtgcctcagttttctcatctgcaaaatgaggataataatagtacccacctcacagggttgttaggaaaattaaatgaactactatacataaggtacttggaacagtgcctgg

SEQ ID NO: 537312 - DNA, 462 bp, Homo sapiens
cagatgacaagtaggcagataagtactccacttcctcagctcttgatggacaactcaaggtgtgcctcatatygtatctcagggacccccccagtgggttatgagttccacctgaaagtacatgtttgattatacaacttttattggattctttccctttctttttttcctactgacatgttctaggtatcctctcaaataaaatacttttactcaaaccccatgtaaacgtctgtgcctgggggactccaaactagctcaataccaatagctactgttcattaaaagtcaaccatgccaggcactgtgctggttttttatactatatctaatccttacaaccatcttgaagggtaagaatcattgtttccgttatacagatgaggaaactgaggtctacagagcggaagtggcttatttgagatcacagaaaaagataccttgagcaaataaagactctat

SEQ ID NO: 537313 - DNA, 365 bp, Homo sapiens
ctcttccagagtggaggatggggccacagcttaactttcccttaatcctgccctgtccttttcacatggaacccacaaaggcagttttattagattaaatggaattactgttttgcagacatgagttggtttctgctccattctccacatccctttgagaggaaagccaaggacttgattaaggaatggaaagaattctgtagtcagtcaattcctgctgcgataaatctcttgggtgaaggatgttaaggcagggacataaatgacaatagctgtgcttctgcagttgactggattwtaaaaaaaaccatacactatgactatatgtttcaacaatacataaagggagtcagggagaggtaaag

SEQ ID NO: 537314 - DNA, 458 bp, Homo sapiens
ccgaggactcttggagatgctccctctgctcctccttttgccaccaggggcctgaaaaaggatttccttccgtgggaaaatccagatcggcctccctgtcacctcttcttcaccctcattcgttcctccccctgggataatctgactgtgcctgttcagctctgtggctaaacagagtggatcctgtcagtcctcaccctacggatcgctgaggtcctgcacctttcgcttggccatgctcagctccggggctcccacccgccttgcctttaccccgggactgctctccgcctccgtggctgggtcctgtcctcgggctcccttcttcagtagcaaggaccttaggtcctcatccttgagcctcttctctcccaaacagacccttgtacctgagcttgtccactcccgaggagaacagacatgtgcccaggcctyggaaatctgttgtttctaggctt

SEQ ID NO: 537315 - DNA, 617 bp, Homo sapiens
ttttgttcatccattcacccactgagggacacatgggtggcttcccccttttggctattgtgaataattctgctatgaacatgggtgtaagaagcatgttctatgtattaattaaggaaatcaaggcctcacccagaatgtgtcctggggctggaagggcagttggggtcctgagggtgacctgtctgcccgtggcccccragctggtcgggagaaggcgccataattttcatgtcctgtgccctcctcacccaccacagcccttagccatatctacaccactgcctttcccaccagacggtgaggccccaggacagagactggggttttttgttgctgcttcaccgcccccgctgctggcccctgcaagcgccaattcttgtggtgcacgagttccccaggagaggggcctctgcactactgccgaacggagcccagcacaggtaaatagtgccaagatttggggagagcaccctgaagcggggtgggcgcgggcgtgggcagcgggcagatacttgcagcccgcttggcactgggaagcacccactcccaggctgctttagggggcgctgctgctcttggaccccagaatggctggaccgagtgtccctaaccca

SEQ ID NO: 537316 - DNA, 636 bp, Homo sapiens
gctgaaacatctgaggctcaaataacacaatcttgttttgtctttcttttgaacttttacattatctacttaaatacctggacaaaccagtgaaaggagaaacataaagacttgaatgttttacactaacataaatcagcttacaaagctgatgccttggattgcaggaagaaaacatttttagtgagcatgatttgctttatacatattattccatttcaagcatcaaaataaaaaatgttttaaaaatgtttattagattagactatgtgactatttccttgtgaaatttttatggagacgtcatttgaatggtgtgtttcaggctaactacttccataaatttattttattaaataaaaaggatatgccagacagaagcagattgtcaattattattgcactttcaaaagtttagtttctattataattcttaataagtcaatgattaggtatattttaaacaagtttcaacaccaaataaaccagtcatggcgccctctccaagtccggcaataaaagagtccccagtggaaaacctagagttttaaatgggcactcctcygggttctggtttagtctagtaaatgccctcctttatgagccacaaataaatgcaatttaaaaccatcaggc

SEQ ID NO: 537317 - DNA, 654 bp, Homo sapiens
cctcctgcactctatcagatcacagaacgtagcttcagaagcttatttaggtgtcagtgcacatgacaccactaagtttttttctaactaaatttagataaattaattcaaataaattaactttccattctgacttattcttgggaacatcaaatgccagtgcctgagtgaacatatgtgctccaccaaaaccgtaaacttgtgctgtttttcacaccaaaaagtctaaacaataaataagcctttctttcttttcttttctttttcttaggatcatttcttaacatatacctgatattctatgggacaaaatgcaccagatatttcaacactagaggtgggcagtggagggtgaggggtgaagaatacatacctttaaacaaaaaagatatttttttgtttgtgctttttttttkaaacaaaaagcacaatatagttaaagaataagctgcatggtttttagaagtaaagtcataatgccctaaaagatttaattcactccccagggacaactatgcattgatttcaccagagagacaattttgtcctaaaattaaaccaaatagaagccaaaaagttctacactgaagaaagagccatttgggtcacttaaagtccagttccttttagacataaactcttttccaattactc

SEQ ID NO: 537318 - DNA, 654 bp, Homo sapiens
cctcctgcactctatcagatcacagaacgtagcttcagaagcttatttaggtgtcagtgcacatgacaccactaagtttttttctaactaaatttagataaattaattcaaataaattaactttccattctgacttattcttgggaacatcaaatgccagtgcctgagtgaacatatgtgctccaccaaaaccgtaaacttgtgctgtttttcacaccaaaaagtctaaacaataaataagcctttctttcttttcttttctttttcttaggatcatttcttaacatatacctgatattctatgggacaaaatgcaccagatatttcaacactagaggtgggcagtggagggtgaggggtgaagaatacatacctttaaacaaaaaagatatttttttgtttgtgctttttttttgaaacaaaaagcacaatatagttaaagaataagctgcatggtttttagaagtaaagtcataatgccctaaaagatttaattcactccccagggacaactatgcattgatttcaccagagagacawttttgtcctaaaattaaaccaaatagaagccaaaaagttctacactgaagaaagagccatttgggtcacttaaagtccagttccttttagacataaactcttttccaattactc

SEQ ID NO: 537319 - DNA, 247 bp, Homo sapiens
ctaaattaacaagaaatgccagttggaacagggagtgactgacaccaagggtccaggcaacagccagaaatgaaaggcacattcttgggctcataatggtcagatagtggmggggcttacatagggccacatatctgtcaaaggccatggctatgagcagcaccatctccacaccaccaacgacgtggatgaagaagatttgagcgatgcagcctccaaaggagatgactttgcgctttctgaacag

SEQ ID NO: 537320 - DNA, 363 bp, Homo sapiens
agctgtgagaaccctgactcttactactgtattgacttatttgtgaaaccttagtatatataaaagtagtttcaaagttgctaacatgtattgctgtgggaaacaattttaccaattggagtttagtgcttagatatgcagagttatttgattctttccagaatctaatcaaaacactgtttttggacttacccaggtcagctcctttctgcccactctttcagcgcaggcgtgtcctgctgtggaacacactctgggattcctgtgtgggtctgtacccgtcctgtacccgtcaggacccycgggccctgactcttgatgttgttcttgctcctcttgttgatcttgttgttcccacagtga

SEQ ID NO: 537321 - DNA, 431 bp, Homo sapiens
gagcagcttcagagggctgactgcagagaccaggaaggggccattcactctgatgggaattgggaatcattgatgctcgagcaacagctgagttaaaattcatgctaagaaatcagcattcacatgtgtacatatttaagtcaggatctcagtgaagagggcatgacagcagtgaaaasaggtgccagacctgaagtaggctaccttatggttgctgcttcacctgttgctctacacacacgcacacacacacacacacacacacacacacacacacacacacacacgattccagaagatagtgggacagtagcaatttgaaggctctgccagaaaagcatttgcttaaagtgttgggaattttttgttggattgttgtttcattcatagggcttctaaatttcacttttgcattttaaccatttcaagga

SEQ ID NO: 537322 - DNA, 431 bp, Homo sapiens
gagcagcttcagagggctgactgcagagaccaggaaggggccattcactctgatgggaattgggaatcattgatgctcgagcaacagctgagttaaaattcatgctaagaaatcagcattcacatgtgtacatatttaagtcaggatctcagtgaagagggcatgacagcagtgaaaagaggtgccagacctgaagtaggctaccttatggttgctgcttcacctgttgctctacacacacgcacacacacacacacacacacacacacacacacacacacacacacgattccagaagatagtgggacagtagcaatttgaaggctctgccwgaaaagcatttgcttaaagtgttgggaattttttgttggattgttgtttcattcatagggcttctaaatttcacttttgcattttaaccatttcaagga

SEQ ID NO: 537323 - DNA, 500 bp, Homo sapiens
tagccttttaagatgcaaatgcagggcgccatgatgttctacacacgtggggatatgtgggggcggccatgttgccagccacctgttggggcaaggaagaaacctggaatctccatgtttgggtggactcagtttccagtgrcctgcgtttgcatatcaaagcttgccagtgactcttagagctggcgctctcctgttagacaagaaaggtttctggatctgctttaaaagaaacaaaaacttcccaaggacctcttttcctctctatctgcctaaaataatttcttaataactcctataacaataagggggtggtccattcccacatgtaaattgaggcttttcccagaaatagggtgaatagatgctgagttaccccagtcagcaaatgtccatttatctcatttgtgaactctggactctgcacagagactgtggtgacacaggctgtcctgtgaccctgtggctgggtcagctcctgtgtctgcgacaggatgccc

SEQ ID NO: 537324 - DNA, 500 bp, Homo sapiens
tagccttttaagatgcaaatgcagggcgccatgatgttctacacacgtggggatatgtgggggcggccatgttgccagccacctgttggggcaaggaagaaacctggaatctccatgtttgggtggactcagtttccagtggcctgcgtttgcatatcaaagcttgccagtgactcttagagctggcgctctcctgttagacaagaaaggtttctggatctgctttaaaagaaacaaaaacttcccaaggacctcttttcctctctatctgcctaaaatratttcttaataactcctataacaataagggggtggtccattcccacatgtaaattgaggcttttcccagaaatagggtgaatagatgctgagttaccccagtcagcaaatgtccatttatctcatttgtgaactctggactctgcacagagactgtggtgacacaggctgtcctgtgaccctgtggctgggtcagctcctgtgtctgcgacaggatgccc

SEQ ID NO: 537325 - DNA, 500 bp, Homo sapiens
tagccttttaagatgcaaatgcagggcgccatgatgttctacacacgtggggatatgtgggggcggccatgttgccagccacctgttggggcaaggaagaaacctggaatctccatgtttgggtggactcagtttccagtggcctgcgtttgcatatcaaagcttgccagtgactcttagagctggcgctctcctgttagacaagaaaggtttctggatctgctttaaaagaaacaaaaacttcccaaggacctcttttcctctctatctgcctaaaataatttcttaataactcctataacaataagggggtggtccattcccacatgtaaattgaggcttttcccagaaatagggtgaatagatgctgagttaccccagtcagcaaatgtccatttatctcatttgtgaactctggactctgcacagaractgtggtgacacaggctgtcctgtgaccctgtggctgggtcagctcctgtgtctgcgacaggatgccc

SEQ ID NO: 537326 - DNA, 498 bp, Homo sapiens
atttctgcaacagctaaggactgcaaaaccccactctgcatcaactgaacgcaaatcagccactttaattaaggtaagccctaagtagaccaatggggacttaaacccacaaacacttagttaacagctaagcaccctgaatgcaactgggcttcaatgctgacttctgcccgccgccgggaaaaaaggcgggagaagccccggcaggtttgaagctgcttcttcgaatttgcaattcaatatgaaaatcacctcrgagctggtaaaaagaggcttaacccctgtctttagattaacagtccaatgcttcactcagccattttacctcacccccattgatgttctccgaccgttgactattctctacaaaccacaaagacattggaacactatacctattattcggcgcatgagctggagtcctaggcacagctctaagcctccttattcgagccgaactgggccagccaggcaaccttctaggtaacgaccacatct

SEQ ID NO: 537327 - DNA, 302 bp, Homo sapiens
cttaacccctgtctttagattaacagtccaatgcttcactcagccattttacctcacccccattgatgttctccgaccgttgactattctctacaaaccacaaagacattggaacactatacctattattcggcgcatgagctggagtcctaggcacagctctaagcctccttattcgagccgarctgggccagccaggcaaccttctaggtaacgaccacatctacaacgttatcgtcacagcccatgcatttgtaataatcttcttcatagtaatacccatcataatcggaggctttggc

SEQ ID NO: 537328 - DNA, 346 bp, Homo sapiens
ataggagctgtatttgccatcataggaggcttcattcactgatttcccctattctcaggctacaccctagaccaaacctacgccaaaatccatttcrctatcatattcatcggcgtaaatctaactttcttcccacaacactttctcggcctatccggaatgccccgacgttactcggactatcccgatgcatacaccacatgaaatatcctatcatctgtaggctcattcatttctctaacagcagtaatattaataattttcataatttgagaagccttcgcttcgaagcgaaaagtcctaatagtagaagaaccctccataaacctggagtgactatatggat

SEQ ID NO: 537329 - DNA, 346 bp, Homo sapiens
ataggagctgtatttgccatcataggaggcttcattcactgatttcccctattctcaggctacaccctagaccaaacctacgccaaaatccatttcgctatcatattcatcggcgtaaatctaactttcttcccacaacactttctcggcctatccggaatgccccgacgttactcggactaycccgatgcatacaccacatgaaatatcctatcatctgtaggctcattcatttctctaacagcagtaatattaataattttcataatttgagaagccttcgcttcgaagcgaaaagtcctaatagtagaagaaccctccataaacctggagtgactatatggat

SEQ ID NO: 537330 - DNA, 346 bp, Homo sapiens
ataggagctgtatttgccatcataggaggcttcattcactgatttcccctattctcaggctacaccctagaccaaacctacgccaaaatccatttcgctatcatattcatcggcgtaaatctaactttcttcccacaacactttctcggcctatccggaatgccccgacgttactcggactatcccgatgcatacaccacatgaaayatcctatcatctgtaggctcattcatttctctaacagcagtaatattaataattttcataatttgagaagccttcgcttcgaagcgaaaagtcctaatagtagaagaaccctccataaacctggagtgactatatggat

SEQ ID NO: 537331 - DNA, 346 bp, Homo sapiens
ataggagctgtatttgccatcataggaggcttcattcactgatttcccctattctcaggctacaccctagaccaaacctacgccaaaatccatttcgctatcatattcatcggcgtaaatctaactttcttcccacaacactttctcggcctatccggaatgccccgacgttactcggactatcccgatgcatacaccacatgaaatatcctatcatctgtaggctcattcatttctctaacagcagtaatattaataattttcatratttgagaagccttcgcttcgaagcgaaaagtcctaatagtagaagaaccctccataaacctggagtgactatatggat

SEQ ID NO: 537332 - DNA, 653 bp, Homo sapiens
cgttttccatgtgctgtagccttatacccaaagcctgggtcccaagtgaccatgacaggcagagctccctgttgagccacagagatttagagaatggctgttaacacagcataatccagcccatcctgactaatctgatattaacatgtataataaagaattctatcaatgctgagggaagatgaytagttaaggtcctaggttgcaagtctcaaaacctcttctaaggattgtagacaggaaattaaatgacttctagtccctagagttcccaatctcctaccatcccatcctaatatgacagaagtaattcttgagttgcttctgaaaccagagcttccctcagaacccttagcctgccagatggcttcttggagagccctcactcacttttctccttctgctattgctgctcattcattccagcttttaaaaattcatctttatccaggaacctcgcttctagaaaagtcatacaggtgcttccaggaggctacatgggcacccatatttttctagccactttcattagaccaatgcagcagagaagaaaagcctcaataattattatgacatggcatgttaggataccaagtaaattgcatttgtaaaatgtgattttctgttggtgttcacttcggctctactgacat

SEQ ID NO: 537333 - DNA, 598 bp, Homo sapiens
gaacaggctcatctttaccacaaaacaagccaagaagccttcttggccctattgacctatctaagccactgccccatctctttttgtcttttagtcacttctcttcaaaggggtcttcatgtcagttttctctactacccgtcactccttacttcarcctctgtctccaggatgacactggaacactctagaagagagcaccaatgaccacctcaattgccaaatacattgtactttatctttattttcttttatctctctgtggctgtggccactttggatgaatttctcttccttgggcttctgggacactatgttttactgatttttctcctatctcttgcgtgttccttctcagtctctaatactaacacttattcccctccctgaagtatagtgtcctgcagcatttaattctttgtactttttcccattccttttcaccactctctgggtgagctcatccttgcccaaccctttcactaccacactctgaagcttccagacagatctcttctgccaagacatctctcctgaaattcatctattggcttcctggtccatgggaattctgggtctaggtaacccatatatccag

SEQ ID NO: 537334 - DNA, 432 bp, Homo sapiens
agtcaaaagtacatgaaacccattccatgaatcatggatcataagttatggttctgttcatcatgcctccatgagaacatcacaaaacttccatctagaaaggaaataggccaagtgtggtggcttgtgcctctcatcccagcagtttggaaggccraggtgggaggattgcttgaggccaggagtttgagaccagcctaagtgacaaaaagtgaggcctcttctgtataaaaataaataaataaataattagctgggtatagtggcatgtgcctgtagtcctagctactcgagaggctgaggccgggggatggcttgagcccaggacttggaggctgcagtgagctatgattgtgccactacactccagcctgggtgacagaattagaagaccctgtttctcttaaaaatgtgactgaaagaaaggaagag

SEQ ID NO: 537335 - DNA, 628 bp, Homo sapiens
ataccttctaatagtaaagcattactgtattcctgagataaaccccattattggtgctgctttattcttttaatcccatacttaagcacattctgtagttttaaaggttttgtaatagtggtggcacctacacttgctgctgtaaccaaaatgtttatgcatatgtgtgtgagtgaaagtgtgtgttattttcaggtttagatttcaaagtgatactgttcctattaaaatatgaaaaaatgaagatttttctttcttctgcatgtcrttaaaaagacagacaaaaagcaaaccctgaaggtttaaaaatacttacatgtgaaatcatttgaggcctgattttaatcaatttcctctatgattatccatctatttggatttttcctccctttctgccctcatttagataaaatatattttcagataattctctgatctgtagattctttcaaatgtgtttgtatgcagttttgcaaagtatacttttccgactcttaagtttcttttacatctctagctatttcctggtattccattttaacattcactcacatttttccttgattaggccacttagtgatgtatatactttatcgtatacaggtatgtttgttttcaaagaaccagc

SEQ ID NO: 537336 - DNA, 603 bp, Homo sapiens
aaatgattgcaatggactctcccatttaaaaatgggggaaaagaaaagcacatttggcagtgtcttgattaggggccagtcctaccttggaaatattaaatcrttctctctggctctttcattcacttcccgggttcttggaactcacttcttgtttattttttattttccataacaagaaaaacattttggctgttgtgcaacattatcagctttctttctactctcagagaattgagggcttatgggttggtttttgttttgtttttctttttaatatgtctattccttttatttcaagttcacagtactaatgcaattctcatataaactttgtgggatccctgtgaatcttagtaagtttcactatactaaataaaagccacaccacaaatctctcaacacaggctctcttggatttgggatagggtcaaaatggctgtaggaaaatatcttaaaattttctggaaggctttttgtctaactgagagtttctatgagacatgcctttaagtctttctgaaaccttcataaagggtcttataggcatacttttgaggtggtctttgacttatagtcatttttaactcgaaagccttttgg

SEQ ID NO: 537337 - DNA, 615 bp, Homo sapiens
tgttacacaacaattgatagaggatacttaggtaaggagcgtaagataactgaatgccacctccaactccctccaaccacaattccatccatgttctcctcttayggtgaaaaaaaaagaaaaagaaaacagatgagtctactaccataattcaagttaacgaatgacagcctaagataattaaaaggactctttagcaatttatgataatgtacaatcatattcttttctcctaaaagacttttgcattattgtatttatttcttattaagaagaaatatcactcgccttgcaacagatgtgaaattatccttattagatacttttctttgacattggtattttaacactgtgattaaaccagatggaagacaactttttttttttttttaaaggatccgggagggaagaggaaagaaaacacagccaggtactttcagatcctagttgccataacaactcgagtcagcttccatcattaaattattttttgatcatgcttatggattttttgtataaaaaagagattcattaatttcatgtacttatgttctattgaaaaaattattctccttttgagaacagctcatagtctattttattaaacagaagcag

SEQ ID NO: 537338 - DNA, 615 bp, Homo sapiens
tgttacacaacaattgatagaggatacttaggtaaggagcgtaagataactgaatgccacctccaactccctccaaccacaattccatccatgttctcctcttatggtgaaaaaaaaagaaaaagaaaacagatgagtctactaccataattcaagttaacgaatgacagcctaagataattaaaaggactctttagcaatttatgataatgtacaatcatattcttttctcctaaaagacttttgcattattgtatttatttcttattaagaagaaatatcactcgccttgcaacagatgtgaaattatccttattagatacttttctttgacattggtattttaacactgtgattaaaccagatggaagacaacttttttttttttttwaaaggatccgggagggaagaggaaagaaaacacagccaggtactttcagatcctagttgccataacaactcgagtcagcttccatcattaaattattttttgatcatgcttatggattttttgtataaaaaagagattcattaatttcatgtacttatgttctattgaaaaaattattctccttttgagaacagctcatagtctattttattaaacagaagcag

SEQ ID NO: 537339 - DNA, 615 bp, Homo sapiens
tgttacacaacaattgatagaggatacttaggtaaggagcgtaagataactgaatgccacctccaactccctccaaccacaattccatccatgttctcctcttatggtgaaaaaaaaagaaaaagaaaacagatgagtctactaccataattcaagttaacgaatgacagcctaagataattaaaaggactctttagcaatttatgataatgtacaatcatattcttttctcctaaaagacttttgcattattgtatttatttcttattaagaagaaatatcactcgccttgcaacagatgtgaaattatccttattagatacttttctttgacattggtattttaacactgtgattaaaccagatggaagacaactttttttttttttttaaaggatccgggagggaagaggaaagaaaacacagccaggtactttcagatcctagttgccataacaactcgagtcagcttccatcattaaattattttttgatcatgcttatggattttttgtataaaaaagagattcattaatttcatgtacttaygttctattgaaaaaattattctccttttgagaacagctcatagtctattttattaaacagaagcag

SEQ ID NO: 537340 - DNA, 578 bp, Homo sapiens
aaataaagtaagaaaaattgtggattatataaagtcaagtctactaggactaacgtttgtctttgttcccatctatattcttcaatggtaatttttttttcatcttgactaaagatagacttgcggcaactagcacagttttcattatctatacaatcatcaaagctatcaatactgctatatttaagcatatcaaaaatttatttatgtggaaaacagaagccatattttaccttggtatctagatctcttttggtagaggaagaaggtgcattttttcatatcttgataagatttcaatactcaaatcgtgataaaatctcaactactactcttatacttccaagcgttagtacataagtattatacaaaatgccaggaactcagtaaatggagacattatacaaataaatggatttaggattatggactgcttctcagtgttttgttaggcttgacacatgacagacacaccggattgttcaragaagggcaggatgtaatttatgggccagcctatgttgtggcatatggacatcttgttcctgttaaatgagtcaagctagacacaaaaatct

SEQ ID NO: 537341 - DNA, 589 bp, Homo sapiens
taatgctttcaccacctcaagtatctgctccccagattctggtgtgatgctctttggcagcctcaggtgtggctccaggaggccaaggtgtgattcaagacacagtggctgtccctctaaagggcatgggcagtaaaactkggcagccaccacacagtgccatctccatagatgtgcagagtgcatgagctgtggggacatggctgtctccacctagatttcaaaggatgccctgaagagcctttgggccccatcagggaaccacaacagagagcccccaaaagggcaatgcctagtggagccatgaaagtagggctactcatagccttggatgctcaacacctgcctggcaatgctgcagagtctggacccctgtcccacgggctgagaggcacaacattgaatcaaagatgactttggaatcctaagctttaatgctatttgccttgttgggttttggactcacttgggacctgtcatcccttccttctttcctgtttctcccttttgaaatgggaatgtctatcctatgcctctcctactattgtattttggaagcgaataacatgtttgatttcacaggttcaca

SEQ ID NO: 537342 - DNA, 598 bp, Homo sapiens
ccacaggccatggagactgacaccaactactgaaactgatcttgctctgtctcttcttgtgtgaataaagcattgttccatccagtgattgactgaattgaattttctttggtggctccaataccaagaggcagtgggcagaaatgctcagacttctactcctgataataggcaacagacatcacctgttcaacagattaatttttgtgttaatatggtgagatacactggatgatttcaagtgttaaaccaaccttgcattcctggtataaactccacttgcataaaccctcttgtatgtattgctgaattttatttgctaaaaatttgtcaggattttttgcatctatgttcctcaggacatggacctatattttttttccttacaatgtctttgcctgggtttttatatgagagtaatactggccacaaagaaacmgttgagaagcatcataatcctcttaaattttctggaagaaaatttgtagaattttaattattccttaaattgcagaattcaccagtgaagtagctggtatgagagttttctttgctttaaggtttttaactacaaatttaatttatgtaatagacaaaa

SEQ ID NO: 537343 - DNA, 636 bp, Homo sapiens
tggtgtgtgcagcgtgtgtgtgtatgtgtgtgtgtaaggagcatcaggcctgtgggacggggatctgacagggactgcctacattgaaagtgtgtgcacgtaggtagacacatgtgtgtgaacatgtgagtgaaaaaatgagcacgtgcgaatgtgcacgtgtgtgtttgcgactgtgcgtgtgtgtgtgcatgtgtgcgtgagtacatgtcagagagaacgtaagtattagagtttatgtgtcaggcaaaggtttggaggtccatgtgcagtgtgaggaaatgcctggatgcctggatatggaggtgtgtgtttattggmtgtgagcgtgtgggtgtgcaggtgtgtgtttattggctgtgagcgtgtgggtgtgcaggtgtgtgtttattggatgtgagtgtgtgggtgtgcaggtgtgtgtttattggatgtgggcgtgtgggtgtgcaggtgtgtgtttattggatgtgggtgtgtgggtgtgcacgtgtgtgtttattggatgtgtgtgggtgggtgtgcaggtgtgtttattggctgtgagcgtgtgggtgtgcaggtgtgtgtttattggctgtgagcgtgtgggtgtgcaggtgtgtgtttattggctgtgagcatgtgggtgtgcag

SEQ ID NO: 537344 - DNA, 636 bp, Homo sapiens
tggtgtgtgcagcgtgtgtgtgtatgtgtgtgtgtaaggagcatcaggcctgtgggacggggatctgacagggactgcctacattgaaagtgtgtgcacgtaggtagacacatgtgtgtgaacatgtgagtgaaaaaatgagcacgtgcgaatgtgcacgtgtgtgtttgcgactgtgcgtgtgtgtgtgcatgtgtgcgtgagtacatgtcagagagaacgtaagtattagagtttatgtgtcaggcaaaggtttggaggtccatgtgcagtgtgaggaaatgcctggatgcctggatatggaggtgtgtgtttattggctgtgagcgtgtgggtgtgcaggtgtgtgtttattggctgtgagcgtgtgggtgtgcaggtgtgtgtttattggatgtgagtgtgtgggtgtgcaggtgtgtgtttattggatgtgggcgtstgggtgtgcaggtgtgtgtttattggatgtgggtgtgtgggtgtgcacgtgtgtgtttattggatgtgtgtgggtgggtgtgcaggtgtgtttattggctgtgagcgtgtgggtgtgcaggtgtgtgtttattggctgtgagcgtgtgggtgtgcaggtgtgtgtttattggctgtgagcatgtgggtgtgcag

SEQ ID NO: 537345 - DNA, 671 bp, Homo sapiens
ttcagtgataatacagtgagtggtagagagcttcagtgataatacagtgagtggcagagagcttctcccagggcctgtgggaaaaaaaaaaagccctgtccgtcaatcatctgttaggcaactgcccacttcttcaaactcatatcttaccatgcttcccctccctgactgtgttccagccacaccagcttcctggctattctgggaacacactagcttgtcctgtgcacttgctgttgttccctctgcctagagtgtccttctgccgaactgccggattgtttccttctcatgcctcaggactcagctcaagtgttaccccctcatagggacctccttggcaagcccctctcgatgcaaccgtcagtctgctctgcagctcagcacagcagccacytgggcgatggcttcttgggcatttggtcctttacttggctgttgcttgtctcctctgccagaattaagctgttttgtcacgactgcaacccgagtgtttacgcggatgcccggttcatggaagatactccataaatatatgtgaaataaatgaaggaatgaagaggttaggaggaagagagaaaagaaaggaaggcaggaaggaagggcagaaggaagagaaggagggggagaaaggcaaaggaggaagggaggaaagtcgggggcagggaagg

SEQ ID NO: 537346 - DNA, 671 bp, Homo sapiens
ttcagtgataatacagtgagtggtagagagcttcagtgataatacagtgagtggcagagagcttctcccagggcctgtgggaaaaaaaaaaagccctgtccgtcaatcatctgttaggcaactgcccacttcttcaaactcatatcttaccatgcttcccctccctgactgtgttccagccacaccagcttcctggctattctgggaacacactagcttgtcctgtgcacttgctgttgttccctctgcctagagtgtccttctgccgaactgccggattgtttccttctcatgcctcaggactcagctcaagtgttaccccctcatagggacctccttggcaagcccctctcgatgcaaccgtcagtctgctctgcagctcagcacagcagccacttgggcgatggcttcttgggcatttggtcctttacttggctgttgcttgtctcctctgccagaattaagctgttttgtcacsactgcaacccgagtgtttacgcggatgcccggttcatggaagatactccataaatatatgtgaaataaatgaaggaatgaagaggttaggaggaagagagaaaagaaaggaaggcaggaaggaagggcagaaggaagagaaggagggggagaaaggcaaaggaggaagggaggaaagtcgggggcagggaagg

SEQ ID NO: 537347 - DNA, 267 bp, Homo sapiens
tctcccttggttttcaaaggttccggctctgccctgcacggtgggcatcacagcagggctctgggcccctctgcccaggcccgggctcctcaggcagccrgctgagcccacactcctgggagccgccagggagcctggcctctccagcagcagctggacgctgagaggctgcccaggcaggctctgcccagccagggtgggaactgcgatccgccacccagagggatgtgctttaattgaaaatttatgtttaattgaagagtcacc

SEQ ID NO: 537348 - DNA, 600 bp, Homo sapiens
tggtagctaaaatgcggcttccttcaggaagccttccacggcagactccaggtcatgctccttcctgacttctccccgcttccagggcttttctcccagggctggctgaaacctggtgctttgatgcctccgctcaccaagtgggaagttcccagaaagcagggcgctgggtgtttccctccgcagccccaggagagaggccggtttacagcaagtgtgccacgatcatttgttgcatgaatgaatacgtatgatttgcttggtctttatagacaggcaggmaattagcctaaaaggttttactaaactttcattgccttttctcctccagcttttttggaggtgtaattgacaaataagagttgtatatactgatggcataggtggtggcattttgatatatatgtgaaatgatgttcacaaactaattaacgaatgcatcccttcacatggtcacctactctcttcataaatttcaagtacatatgaatcatttgaatgatttgcctactcagtctaaattttcatggtaattagggctatgtgaacctagtattaagatccagaaaaataagttttgggaattactaaaaataaaaa

SEQ ID NO: 537349 - DNA, 600 bp, Homo sapiens
tggtagctaaaatgcggcttccttcaggaagccttccacggcagactccaggtcatgctccttcctgacttctccccgcttccagggcttttctcccagggctggctgaaacctggtgctttgatgcctccgctcaccaagtgggaagttcccagaaagcagggcgctgggtgtttccctccgcagccccaggagagaggccggtttacagcaagtgtgccacgatcatttgttgcatgaatgaatacgtatgatttgcttggtctttatagacaggcaggaaattrgcctaaaaggttttactaaactttcattgccttttctcctccagcttttttggaggtgtaattgacaaataagagttgtatatactgatggcataggtggtggcattttgatatatatgtgaaatgatgttcacaaactaattaacgaatgcatcccttcacatggtcacctactctcttcataaatttcaagtacatatgaatcatttgaatgatttgcctactcagtctaaattttcatggtaattagggctatgtgaacctagtattaagatccagaaaaataagttttgggaattactaaaaataaaaa

SEQ ID NO: 537350 - DNA, 600 bp, Homo sapiens
tggtagctaaaatgcggcttccttcaggaagccttccacggcagactccaggtcatgctccttcctgacttctccccgcttccagggcttttctcccagggctggctgaaacctggtgctttgatgcctccgctcaccaagtgggaagttcccagaaagcagggcgctgggtgtttccctccgcagccccaggagagaggccggtttacagcaagtgtgccacgatcatttgttgcatgaatgaatacgtatgatttgcttggtctttatagacaggcaggaaattagcctaaaaggttttactaaactttcattgccttttctcytccagcttttttggaggtgtaattgacaaataagagttgtatatactgatggcataggtggtggcattttgatatatatgtgaaatgatgttcacaaactaattaacgaatgcatcccttcacatggtcacctactctcttcataaatttcaagtacatatgaatcatttgaatgatttgcctactcagtctaaattttcatggtaattagggctatgtgaacctagtattaagatccagaaaaataagttttgggaattactaaaaataaaaa

SEQ ID NO: 537351 - DNA, 490 bp, Homo sapiens
gcaggcaccttccacacgcacaacaacccaggttttggacagctcagggcccagactgcttcctgtccctgtcctgggatgttactgggtcccacctggcaggctgtctctctgacacctggagtkcccgacaaagacttcttgcagtggtgttctgggattgccagggaggtgtgggagtgtgttctgtcatgcccctgtgatgacagtgcttataactgaggagcctgggcagtgtccccaccttgcaggcccatcccttgccccttaagcttgttcctggccctctgctcatcccgctggccttcagctctgctgagaagagcctgcaagggatgtcctctggccctgcccctgtccttgtgaccgagcagtgcctgacctcacgtggatgggctgtgtggctgcctgggactctgccttgcagggctacttcctgagcagcctccctggagcccccgtctctgaagttgtggctcagtccctgtgg

SEQ ID NO: 537352 - DNA, 502 bp, Homo sapiens
tggggtttccctcaacacaaagaggaaactcatacatcgaaaaattgcttatgaggccgggcacagtggctcacgcctgtaatcctggcactttgggagggcaagctaggtggattgcttgagcccaggagttcaagaccagccaagacaacattgtgagaccctgtctctacaaaaaattaaaaaattwgctaagcatggtggtatgcgagtacccagctcctcaggaggctgaggcgggaggattgcttgagcctgagaggtcaaagttgcagtaagccatgactgcaccactgcactccagcctgggcaacagaacaaattcctgtctctaaaaacaaaaatctcttatgctacctcttaactaggataacatgtacgcacagtgatatgcacaaacatgtatgcacagtgatatgcacagatctggtgcacaattctatgagttctgacagctatctgcacctgtgtaacccacaccccacacccacacagctcccag

SEQ ID NO: 537353 - DNA, 414 bp, Homo sapiens
gctttgttgtctcacaggccaaagcaatatatggccttgacctaagcatgctttcaaagaagggactgtggaagccgtagaacagaaggtctcccttcccctcctcctgtctctcattatctttgactacacaaatggattcaataaatatctgtcaagtaaacaactcccaagtccctggagccagaagtgggacagcatgagggaacatgcccgmggggcacagatcctcatgcctggtttctttctcccagtttctgttccttccccaccttcttactgcatatccacactctcaagaggacagtacgttacaatgataaatgattcccaacttgtttgatagcagagctctgttctcaaggaatcccaattagaatctcatggattttttccaacacactttgagaaatg

SEQ ID NO: 537354 - DNA, 657 bp, Homo sapiens
gaagcagacagcaagcaatggcctgtcagttcgacagcaaatgaaatactgaggctaatgcctgcaggtttcgagctcaaagctcttctccaatgcccaagattttrcaagtaggcttgaggaatacattgttcagagatctattccattctcaactcctttatgtaaacactgccctactgaagtagagaaactagaataatgcttaaaattattttcaccagtgaatttcttctgactcatagagcctcgctacttaaagttgtggtctttggaccatgggcatcggcatcacctggagtctgttagacatgcaacatcgcaggccccactccagatctgctgcctcaggatctgcattggaacaggattggcatccccaggtgactattatgcactttgaagtatagaggaaagcacttcaactttttcaagagaaacagtatattttgtgactgcagatcacatgggcatagaagtttagatgaaataatccaaagacatgggattctgatttttcaggtgatctgttaatccctgaagtgcatctggaggttagcccatcggttctgcaaatcttcataatttccatagttactgtagtaaccatggttagtacctttcctttgtccagcaggtgggaatttcggtctttta

SEQ ID NO: 537355 - DNA, 657 bp, Homo sapiens
gaagcagacagcaagcaatggcctgtcagttcgacagcaaatgaaatactgaggctaatgcctgcaggtttcgagctcaaagctcttctccaatgcccaagattttacaagtaggcttgaggaatacattgttcagagatctattccattctcaactcctttatgtaaacactgccctactgaagtagagaaactagaataatgcttaaaattattttcaccagtgaatttcttctgactcatagagcctcgctacttaaagttgtggtctttggaccatgggcatcrgcatcacctggagtctgttagacatgcaacatcgcaggccccactccagatctgctgcctcaggatctgcattggaacaggattggcatccccaggtgactattatgcactttgaagtatagaggaaagcacttcaactttttcaagagaaacagtatattttgtgactgcagatcacatgggcatagaagtttagatgaaataatccaaagacatgggattctgatttttcaggtgatctgttaatccctgaagtgcatctggaggttagcccatcggttctgcaaatcttcataatttccatagttactgtagtaaccatggttagtacctttcctttgtccagcaggtgggaatttcggtctttta

SEQ ID NO: 537356 - DNA, 657 bp, Homo sapiens
gaagcagacagcaagcaatggcctgtcagttcgacagcaaatgaaatactgaggctaatgcctgcaggtttcgagctcaaagctcttctccaatgcccaagattttacaagtaggcttgaggaatacattgttcagagatctattccattctcaactcctttatgtaaacactgccctactgaagtagagaaactagaataatgcttaaaattattttcaccagtgaatttcttctgactcatagagcctcgctacttaaagttgtggtctttggaccatgggcatcggcatcacctggagtctgttagacatgcaacatcgcaggccccactccagatctgctgcctcaggatctgcattggaacaggattggcatccccaggtgactattatgcactttgaagtatagaggaaagcacttcaactttttcaagagaaacagtatattttgtgactgcagatcacatgggcatagaagtttagatgaaataatccaaagacaygggattctgatttttcaggtgatctgttaatccctgaagtgcatctggaggttagcccatcggttctgcaaatcttcataatttccatagttactgtagtaaccatggttagtacctttcctttgtccagcaggtgggaatttcggtctttta

SEQ ID NO: 537357 - DNA, 632 bp, Homo sapiens
gttctctgggcacaataattttggctttaaacaggtattacttaactgaaacagtaagtttagcaagtaagataatcagtttaagtaagataatcagcctctgattatcatactcattatgcttgtagatatggtggctatcacaaaagaaaaacattcaaataccatctaaatgtatctacatagaatcaactgtttaatttgctacagcaaaaaactacttcaaaggcctctttgaatttaaatatatttataataaattatttcaagtkactgaaaatatactcccagtgcagaatcttatctaattgatgcatacagatgttattttttaaaaccagttaagcagcttgtcattaactgaaatatcagtccatatggtggtctgaaacatataatagtggctctgatcagcttatgcccatctgcaggaaagcatcccccatctgcaaaaggattttgctaaaagaatagtgtgttgcgtattcttatggccaactcactaaggttaataactgaaaacaaaggggaatgtgcacacacctaacaggaatttccttagataaacaaaaggcttaaacactggattcttatcagcctagagccagcagatgcaggaaaccctttgtgag

SEQ ID NO: 537358 - DNA, 611 bp, Homo sapiens
actgtgcccagctttgttgtctttgtatttttagtacagacagcrtttcaccatgttggccaggctggtctggaattcctgacctcaagtgatctgcctgcctcggcctcctaaactgctatgattacaggtgtcagccactatgcctggccaggagttactgcttttaaactggctacagccagcccacaacatctggagctgaggacagcgtgagccgcttcagaaaccagcacttgcagagttacatctttaggcggacaaacaccagagggtgggctcagggcttgggaaccacaaattgtggggtataggtatagcactgggctctgggtacccctctcaaagagcaaactggccattaagcactcagatccgagactgggccaggcagcccttagtgctcccatcacagcatgctctgaaattgggcatcctgcacggagagggaggggttccctctcagccctgggtctcactccatttccctgcaaatggtcttcatggctcttgttatcaccatttctagctcaactctcacgttttatgtctcagaggtggtgtttattgatactgaacaatgctcctgccactatgcagaacatctgtgc

SEQ ID NO: 537359 - DNA, 622 bp, Homo sapiens
agctgtgcttgcattcctcctccaggcccagatgtctcaggcaggaacgctgggtcctggacttttaattcaatccagattgtgtattgagtcctcttaccatttgggcatgaaaaggagatggaagggacagtgtctggcttgggaaagctgaccttctgcctgtgaagcaagacccatcgcccagcctgatatgcaacagcaatacatcacatatgggaatctcacctcccacagaacaggaagaggacgggacgtgcagaggcatgatgtgttggcatcatcaacaggaaactgacactcctgcccttgtggcctcccgatactgtcctccatrctccaaactcccttcgaagcaactggagacccagaaggtcagaatcatttacgaaattcatgtctaaaggccacactggaaggttcacgttttaggatgaaacaaaacaaaacaaaaccctaggacccaaatttctttaacttgaagccagggaaggagatgcacccagcacatatgaggtgctggagctccatgattggcagcctctgggccacccccggcagggccctgtctccagcaggcagcctcctgtctgtggtgaggactcctccacaaaggacatgt

SEQ ID NO: 537360 - DNA, 572 bp, Homo sapiens
ctggtcttcccactttgcactcccaaagtgccaggattatgggtgtgagccactcagtttcctgttaaatgaagacattggagtggatgatctctaaggtccctgtattaatccattttcatactgccataaagaactgcttgagactgagcaatttaaaaaggaaaaggtttaattgactcacagttcagcatggctggggaggcctcaggaaacttacaatcatggcagaaagcraaggggaagcaaggtacattcttcacaaggtggcaggaagaagaagtgccaagcaaatggggaggagccccttataaaactatcagacctcatgggaactcactcactatcacgagaacagcatgggggaaactgtccccatgacccagttacctccacccggtctctccctggacatgtggggattaccaagattatggagattataattcaagataagatttgggtggggacacaaagcctaagtatatcattccctttcaggtcaattttgtctgagactctctaaatttggttgtgatccatttgaccaataagcatctttctatggagat

SEQ ID NO: 537361 - DNA, 610 bp, Homo sapiens
ccagaatgaggagtgctggaaggagataaaaaggcataacaagtgctgggtgcctgccaagggctgtttctcttatctccccccacaacaaactctgactagtgcagcctcaccccagcctacgtgaaaaaatggaggtgtgtgaagcagaatcacccccagttcacacggatagtaagtggcagagccagaatgcaaatccagatccgtctgtctcctgggctagtcagccttgcacaggagtcagggttcccagagcaaggggagacggactccctatctagggaagctggggaaagccacaaagagagggtgayggttgaactgcaacatgaactgactccctgtctccagattcctttccactcatttcccatctcctgatgtcataggggtcacccctggagaaggcactggagcacacgccaatggcctggccttggatactgagggatgctgctagacaggtgaggtgcaagagatgctccttgaaagatccatcccttcagcccagaaagaaaggaaaggccatgaaacctgggcccaatccctggaggaggaggttggtggctggtagctgggctgctaggcaggggagatgaggaggggc

SEQ ID NO: 537362 - DNA, 597 bp, Homo sapiens
attcacaatagagaagagatagaaagttccattttaatcagtttttctaatgactcactatgtattcatgagaccctgaagatgtcatgcgctctgaagattcaaggcatagtattgtcaaagagatgattaataaagtggtatctttatttataagaaaagtaaatcaattctgagttattttgtcttaccatggtttaagaaatcctctcatatttaggaagccatacataggtcaaataaattcccctatgatattttagattttggttgaaaaaytcatctaagtctttctcaaactcctatagattacacctgcagcatgatatcttccatgaatccatactccaataggactttaaagcaaacactcacagaaagtggcatgccttagaagctgaaggcatagctctaagttctgtctcccatatttaccacttgtttacatttaggcaagctatttaaagtctctgaagctcagatttcttatttttaaaaaatgagaaaaaaatgatgtcttcaggtttcaaggtgatactctatattgagaactttgtccattatacagttttgggtacatacaaattgttgaatggc

SEQ ID NO: 537363 - DNA, 622 bp, Homo sapiens
caaccaaaacattttggaataacctgaggttttatcctaactatgttagagtcaagcaatttctgacactaaatctaggtaaagcccatcctaggagtcagagcttagttggaaattggagattagaactaacgggaaaaaaatagagaagctaatggaaatagggaaaatatgtaggagttatgaaagtatttgcaaatacaaaatcaattatgtcaggatatttattaaagacctayggcccaataaattctgcttagtaggcttgaaccatcatctgtcactacaatatccaaaaaggtataatgtcaattaacaaaccagactgttgattgacattattattcaaaaatagaaaatggccaggcatggtggctcaagccagtaatcacagcactttgggaggcagaggcaggcagatcacttgaggccaggagttcgagaccagcctggccaacatagtgaaaccccatctatactacaaatacaaaaaattagcccagtgtggtggcacatgcctgtaatctcagctactcaggtggctgaggcactagaatcgcttgaaaccaggaggaggaggctgcagttagccatgacggtgccactgcattccagcctggac

SEQ ID NO: 537364 - DNA, 609 bp, Homo sapiens
gcactttccataagagtctgcttctatgcaaaggtgcaaacaggagacatgcccaaatctgctggctgaacaggctaaactacagtgagaggctgctctggcatggctcgttcttccttctrtgtatctcccaagtctgacaagtgtgttgccctgggaagcaggacctccctgagctccttaaccttgaccccattctgcaggacagtcgcatgctctgggctcgcctctggcctcaaagcacttgtgtaagtgggcttgcttaacagtaatatccttggaggcttctggacccaaagggaagccaatccttcgagtttgccattgggctgctggttgctggtttcaaacatatagttcatgaaaagtctttaattggagattttcaaaggtgaatattctgtttttgttggaaagaaactcatctgatgagtcatcgatgagtttggctttcgcccctgccacatcctcccctgaggttccttccatgctgcactgccttcctttagccagtgacagagcctggtgcccttcctggactgaaaccgatggaatccttccgaggggagtggcattcggcttgcctcctgcctaaatctgcttttatcc

SEQ ID NO: 537365 - DNA, 609 bp, Homo sapiens
gcactttccataagagtctgcttctatgcaaaggtgcaaacaggagacatgcccaaatctgctggctgaacaggctaaactacagtgagaggctgctctggcatggctcgttcttccttctgtgtatctcccaagtctgacaagtgtgttgccctgggaagcaggacctccctgagctccttaaccttgaccccattctgcaggacagtcgcatgctctgggctcgcctctggcctcaaagcacttgtgtaagtgggcttgcttaacagtaatatccttggaggcttctggacccaaagggaagccaatccttcgagtttgccattgggctgctggttgctggtttcaaacatatagttcatgaaaagtctttaattggagattttcaaaggtgaatattctgtttttgttggaaagaaactcatctgatgagtcatcgatgagtttggctttcgcccctgccacatcctcccctgaggttccttccatgctgcactgccttcctttagccagtgacagagcctggtgcccttcctggactgaaaccgatggaatccttccgakgggagtggcattcggcttgcctcctgcctaaatctgcttttatcc

SEQ ID NO: 537366 - DNA, 575 bp, Homo sapiens
cttaaaaagttaaacatctactatatggtacagccattccagtttttctttttttttttttcaaatattcccagacattgataagattccagttctaktataggtttttaccccaaaggaaagaaaatatatgtccatatatatattagactgttttcatactgctataaataactacctgagactgggtaatttatgaggaaaataggtttcattgactcacagtgaaggaagacacatcttcccatggcagagcaggagagagagcgagtgagcaggggggagagtaccacacactcttaaaccaccggatctcataactcactatgatgagaacagcatgggggacatccatcctcatgatgtaatcacctcccaccaggtccctcccccaacactgggaattacaattcaacatgaaatttgggcgaggacagagccaaaccatataaccatacaaagacttgtgcatgtatgctcacacaagctgaatatcccttatctgaaatgcttggaaccagagattttggagtatttgcatatatctaatgacatatcttggaaataggacccaa

SEQ ID NO: 537367 - DNA, 473 bp, Homo sapiens
  misc_feature (1)...(473): n = A,T,C or G
ttttcacttatcatgacttcctatatttatcaagtacttttggtctcacagcccaatcactacatgcataaataattattaataatcttttctagttgcaatactgttgtctgtgtgtgtgtgtgtgtgtgtgtgtgtgtgtgtgtgtgtgtgtnancnctcgctttttgttttttgagacagagtctcactgtcacccaggctggagtgcagtggcgtgatctcggctcacggcaacctctgtctcccaggttcaagtgattgttgagcctcagcctcccgagtagctgggactataggcacatgccatcatacccagctaatttttgaatttttagtagagatggggtttcactatattagccaggctggtctcaaactcctggcttcaagtgatctgccttcctgggcctcccaaagtgctggatyacaggcatgagccactgcacccggcctgttgtttatgtctttta

SEQ ID NO: 537368 - DNA, 463 bp, Homo sapiens
gaaaattgcccctttcgttttgtgggctttgatgcctccttcgtgccatgttggctggaaatgattccagaatagtccttctatcctatcagctctcaggacttggcctttcctcctggggacctctctgtggctttccccctctctacacagccctcatctagctcctcatctctgtgtgcgttggttcttccagaatcaagtcttctccactactctctgttgtctctattatctaattaatctttccaacagactgttttcatcactccctcactcaggaaaaggcgggaggctttaaatatttgaaaattaagaaaaaactcctcagacatacaataaacagtaagattttaaacatgtgacaataataaggcaaaaatatttaatgatctgtaatcaataatccagggaagacaccaaaatgaaaaattwaaaaaaaaaatctaacttatttgaaaac

SEQ ID NO: 537369 - DNA, 484 bp, Homo sapiens
ctgaaagtgcatttctggctatttcaaaagttatttaaataattgctatgccatctgaagattggaaggtaataaagcacattgtttaaggacaagctgtaaagtcagactgacttggttcaaatcccatatctgccacttactagctgtatgacttgagcatgctactaaatckctctgtgcctcagtttcttcatctgtaaaagacatgttaatggcatataacagtaattccacaagggtagcctctaagaaaagagagacaatgaccattgcaatgagtacaaaatggaaaaagaataacaaaattcatgtggaaagtaaaaaatccatccattggtctttattgtttttaacatcttcctttttaaaaatccacattcccagcaagaaaataaaagcaacttatcaggaacttaagtatatattactcagttatatgcataaatttttttgatcaagaaaaagcaagtaaataaatacc

SEQ ID NO: 537370 - DNA, 484 bp, Homo sapiens
ctgaaagtgcatttctggctatttcaaaagttatttaaataattgctatgccatctgaagattggaaggtaataaagcacattgtttaaggacaagctgtaaagtcagactgacttggttcaaatcccatatctgccacttactagctgtatgacttgagcatgctactaaatcgctctgtgcctcagtttcttcatctgtaaaagacatgttaatggcatataacagtaattccacaagggtagcctctargaaaagagagacaatgaccattgcaatgagtacaaaatggaaaaagaataacaaaattcatgtggaaagtaaaaaatccatccattggtctttattgtttttaacatcttcctttttaaaaatccacattcccagcaagaaaataaaagcaacttatcaggaacttaagtatatattactcagttatatgcataaatttttttgatcaagaaaaagcaagtaaataaatacc

SEQ ID NO: 537371 - DNA, 484 bp, Homo sapiens
ctgaaagtgcatttctggctatttcaaaagttatttaaataattgctatgccatctgaagattggaaggtaataaagcacattgtttaaggacaagctgtaaagtcagactgacttggttcaaatcccatatctgccacttactagctgtatgacttgagcatgctactaaatcgctctgtgcctcagtttcttcatctgtaaaagacatgttaatggcatataacagtaattccacaagggtagcctctaagaaaagagagacaatgaccattgcaatgagtacaaaatggaaaaagaataacaaaattcatgtggaaagtaaaaaatccatccattggtctttattgtttttaacatcttcctttttaaaaatccacattcccagcaagaaaataaaagcaacttatcaggaacttaagtatatattwctcagttatatgcataaatttttttgatcaagaaaaagcaagtaaataaatacc

SEQ ID NO: 537372 - DNA, 617 bp, Homo sapiens
gcatttctggctatttcaaaagttatttaaataattgctatgccatctgaagattggaaggtaataaagcacattgtttaaggacaagctgtaaagtcagactgacttggttcaaatcccatatctgccacttactagctgtatgacttgagcatgctactaaatcgctctgtgcctcagtttcttcatctgtaaaagacatgttaatggcatataacagtaattccacaagggtagcctctaagaaaagagagacaatgaccattgcaatgagtacaaaatggaaaaagaataacaaaattcatgtggaaagtaaaaaatccatccattggtctttattgtttttaacatcttcctttttaaaaatccacattcccagcaagaaaataaaagcaacttatcaggaacttaagtatatattactcagttatatrcataaatttttttgatcaagaaaaagcaagtaaataaatacccctactctcatgcatgaaggcactggttctcaaagtgctgctccagagcagcagcagcaacagcatcccctgggccttgttagaaatgcaaattatcttgccccaccccagacttactggatcagaaattttgcgaatggg

SEQ ID NO: 537373 - DNA, 545 bp, Homo sapiens
ggagatttaaaaaaatcaaaaagaaatttcacaagggtgtcatgaagacttaatgggataaaatgtgtcgcagttatttgtaatgtacaaggaataaaagttgacctagacggctaagaagttttggcgccagaagtcaactgtatatatataatactaacttacttagacaccaatgttcactgactttctgactctgggagtacattccagatttgttctgtaataaaggaaagtaaaactgatccttaacccatcaaggctcctgtacttaccatggaaaatgacaatgttaaaaattacacttctgacaaaagttacatgttaacaatagcttttcttttcagtatgaacatcattctcagtttatgtgatagtattgtaatcaaaggttcagaaaagctaatgaaatactataaaatgtcaactgtaaaawtaattttagtggaacgaattggagaagtggaaaagacaaattggttaggaataagaccatcctaataattagccattagaaaatggtctcactgagcaaaataaaggtc

SEQ ID NO: 537374 - DNA, 588 bp, Homo sapiens
aacacaaacgtggcaaggatatggagaaaagagaactctagcacactgttggtgggaatgtggattggtatagccattatggaaaacagtatggcggttctgaagaaattaaaaatagaaccaccatatgatccagcaacccctcttttgggtctacatccaaaaaagatgaaatccctaccttgtgaagatatatctgcacccccatattcattgcaacgttattcacaatagctaagacatggaaacaacctaaatgctcatggatggatgaatggaaaaagcagtgcgttttttttktttgtgtggtgaaattttagtcattacttttgctatagtccagagagcctttgaaatgacacggtgctttgcctctgtctacttgacataatatttggatatttgagtcttttctgtagttcttcaaaatacatgcacatttactcaaaagtgctctttactttatattaaagtatgtattttaatacttaaagaaatgaacatatccaccttgtgatagctatttccactgccttgccatttttgtgtaatgaatccataatattcatgtattcagattattgtgcc

SEQ ID NO: 537375 - DNA, 588 bp, Homo sapiens
aacacaaacgtggcaaggatatggagaaaagagaactctagcacactgttggtgggaatgtggattggtatagccattatggaaaacagtatggcggttctgaagaaattaaaaatagaaccaccatatgatccagcaacccctcttttgggtctacatccaaaaaagatgaaatccctaccttgtgaagatatatctgcacccccatattcattgcaacgttattcacaatagctaagacatggaaacaacctaaatgctcatggatggatgaatggaaaaagcagtgcgttttttttttktgtgtggtgaaattttagtcattacttttgctatagtccagagagcctttgaaatgacacggtgctttgcctctgtctacttgacataatatttggatatttgagtcttttctgtagttcttcaaaatacatgcacatttactcaaaagtgctctttactttatattaaagtatgtattttaatacttaaagaaatgaacatatccaccttgtgatagctatttccactgccttgccatttttgtgtaatgaatccataatattcatgtattcagattattgtgcc

SEQ ID NO: 537376 - DNA, 583 bp, Homo sapiens
actctgtgtatcacaaaatagcatcaaatagtctaatcctccttctcagacacagtcagactgtaggatataattataatttcaataataaactttgaaatctatgtcaaccaaggaagaataattgtgccaactgataaatcattactttattgtcatttcaattctttcaacttagccacaaatgctaattagaaaataaacatggtagcagaaaaactatgcttatgttattttatgtgattcctgtaagtttcctacatcttgttcattatctcatttaggtcagcacttatgtttcctaagacacttttttttyccccaaattaggtgacattttaataattttagactaaagtaataaaatattcaaataattgacttgattaattcctttcaccctggctatatctaagtaatttggaaacatcataagttcagtgaaaatgttaatatgaacacatgtggtgatgccatgcagaattaacatctggctggttgaatttgagactgagttgaccagatgttttgtgttcaagttatttttcttatttgaacaatctcaacttcttctctctacttc

SEQ ID NO: 537377 - DNA, 517 bp, Homo sapiens
gtgcatttggtagagatagagaaaggcaacgaagttaaggggatttgcaaggaggtaattataatgatgcctcattgaattcaagctagatgggggagggtgggaggtaaaggcaaacatgtgctcaaggatagrcagtggtaagatggatgctttggggttcttgataaggtcaaagattattctggtggctgtacttgagcagagaaagttcatctccaaagaaagaaagtttactgatgatgagcagttcagggaatgaagaggccagttgtttgatgggttatccacatattctggatcactacagtcatctcttttttttttctttttctttttctctgacctcattcttccatcacaattagtttctttcttaattaagctctttggcatttgccctgttccaatctatttgacactgcactttcagccccaatttgaaaattctaagtgacttcccactgtatactgaaccaaggagtgaacttataaaaaaaaacttaaatttatttga

SEQ ID NO: 537378 - DNA, 517 bp, Homo sapiens
gtgcatttggtagagatagagaaaggcaacgaagttaaggggatttgcaaggaggtaattataatgatgcctcattgaattcaagctagatgggggagggtgggaggtaaaggcaaacatgtgctcaaggataggcagtggtaagatggatgctttggggttcttgataaggtcaaagattattctggtggctgtacttgagcagagaaagttcatctccaaagaaagaaagtttactgatgatgagcagttcagggaatgaagaggccagttgtttgatgggttatccacatattctggatcactacagtcatctcttttttttttctttttctttttctctgacctcattcttccatcacaattagtttctttcttaattaagctctttggcatttgccctgttccaatctatttgacactgcactttcagccccaatttgaaaattctaagtgacttcccactgtrtactgaaccaaggagtgaacttataaaaaaaaacttaaatttatttga

SEQ ID NO: 537379 - DNA, 574 bp, Homo sapiens
tgacaactgcattgcattcttaccattgaggtggtggcttggtgcagaagtcagacctctgtggcaggctgtggatcatgtgggaagccacacactggccctgagacgaggaattattaggatggaggggaagcacaagagtgctggtcagcccaggcactcctaaagcaggcaggtgatcatccctgttcccagtaattagttcttctctgcctcccctactcttgggcacattgtcaaatatgtccctactttgtttgaaatctacaggactctatctcttttatcaaaacctgcactcaaaacatgatctgaagtgaccagcataatttaaatgaccagtcacattttcctaagaggcatttgcatttttaaaaggggctagtccattaagcaaaatatgaggggactctcagagtggaacttcaggcatcagcaagaggggaagatactatcttmctgggagttgacagtacctgataattgatctccttcccatcagatttccaagggatcaaggtgccccggttctaaacaaccacaggtaaggacaggatagagtccaaggagacac

SEQ ID NO: 537380 - DNA, 574 bp, Homo sapiens
tgacaactgcattgcattcttaccattgaggtggtggcttggtgcagaagtcagacctctgtggcaggctgtggatcatgtgggaagccacacactggccctgagacgaggaattattaggatggaggggaagcacaagagtgctggtcagcccaggcactcctaaagcaggcaggtgatcatccctgttcccagtaattagttcttctctgcctcccctactcttgggcacattgtcaaatatgtccctactttgtttgaaatctacaggactctatctcttttatcaaaacctgcactcaaaacatgatctgaagtgaccagcataatttaaatgaccagtcacattttcctaagaggcatttgcatttttaaaaggggctagtccattaagcaaaatatgaggggactctcagagtggaacttcaggcatcagcaagaggggaagatactatcttcctgggagttgacagtacctgataattgatctccttcccatcagatttccaagggatcaaggtgcccyggttctaaacaaccacaggtaaggacaggatagagtccaaggagacac

SEQ ID NO: 537381 - DNA, 569 bp, Homo sapiens
ggttttaaaacaggataagaaaaataacaataatttgttcaataaagtacaggattgctgggcacggtggctcaagcctgtgatcccagcactttgggaggccaaggcgggcagatcacctgaggtcaggagttcaagaccagcctggccaacatggtgaaacactctctactaaaaaaaaaaaaaaaaaaaaaaatagctgggcatgatagcgggtgcctgtagtcccagctactcaggaggctgaggcatgagaattgtttgaacctgggaggcggaagttgcagtgagctgagatcgtgcactcctagccacaatttgtattcagaatttaaagcacatcactcaatgttcagattagcacttacacacacttcatattcatactctgtggtttcttgttcggaaatcrttggtgatagcaataattatactgagtactataggagtaattactgcttacagattgggagtgcatgtggattgtggctattacttgcaggattctttctcaatgtacaacacctaaaatggcatctgctctgtgctagggctatgtaagcgtgcta

SEQ ID NO: 537382 - DNA, 529 bp, Homo sapiens
taccacagcccatcagtctgtctagctgcactggggcagggggtgcacctgggttaagtctaacagaactctgacccttttttttttttttttttgagatggagtttcactcttgttgcccaggctggagtgcaatggcacgatctcggctyactgcaacctccgccttccaggttcaagcaattctcctgcctcagcctcccaagtagctgggattacaggcgcctgccaccatgcccagctaatttttgtattttcagtagagacggggtttcgcgatgttggccaggctggtctcggactcctgacctcaggtgattcccccccccccccccgcctcagcctcccaaagactctgacccttttaaccagggaatgggaggcccacacaaacaactttctctcgccaaaactaaatagaacccaggatttatttgaagatgtaaactcatcagtaataggactgaacgtctttttaatatcaacagagtaaattcattatgaataattacactttgaccctaaaata

SEQ ID NO: 537383 - DNA, 499 bp, Homo sapiens
tgaaaaccagcctcattaaaatgttttcattagaaacaccccccaaaaaaacctgtattaattagaaacacctgaaaaaaaacagataatacacaaagtgataacttttcttgaacccatcagagtgctgaggtagtgaggcaaccaaataccctgaaatctaagaaaagacaggtgtttcyaaagagggctaggatatgagcacaggctcacctgtaagacagcgtggaaggaaggcagggctaccattcaaatgggttagaagaattcagctaaaatttttaataaatcgctgaaagccagatgtggccaagaactgagagctcatgatacaagggccattcctacgcatttgaagcatcttcatgggcctccaccagagctcatgaaaagcttgtggccagggaatacatacctaggtaatggagcagccatcattctgggaaaggcatgaagcccacctgaatccttttttctaaggaacaaatgtcttaaatca

SEQ ID NO: 537384 - DNA, 619 bp, Homo sapiens
gagtctctctgagcactgagagagaagggtatgaatgaatcagttaggtggctttctgaagcaagtacagaaaattctgctcaaatggcttaaataataataaatgttttactatctcacatattaagtttcttgaagttagggcagctccagagctgtttaatctacaataatgtcatcagtaacccagattcttccctctctttgctttgctactctcagcatgtcagccagtcttctctggaagcaagttggctgccgtagtagctcccagcatcacatctttaagcatcaccatgtccaaagactgagaaagaactcgttacttcctgagtcccagaatccctctagcagattatccctgaggattaattgtccagaactgtatcatatgcttagtcctaagcatggcaagacaatagaacaccataattggcttagagcagcagttctcaaagtgtggtccttgtaccaagatcagcattacctggaaacttrttagaaatgcacattctcaagccccaccagaatcagaaactcggagggtagagtagagctcaccaagttgtgtttttaacaagccctccaaatggctctgatgtagctcaaatttgagaac

SEQ ID NO: 537385 - DNA, 110 bp, Homo sapiens
gaccaattctgtgcactgaaaactgaagtttattaggtatagtctaactaggasagaaattaaaagaataatcctttatagcatattatcatatcttaccccagcctacc

SEQ ID NO: 537386 - DNA, 665 bp, Homo sapiens
ttatatatatactatgaatttaatctttaaatatccgatgtacaaatatttaaacaatggtaattatttattatggtaaaacatttgcaaacttccctttacacttataaacctgtcacacttacttcaatatagaaacataacagcaacttttaattggccacatctatatggaaataatcataagaagacaactattatgcatcaagtattttagtatattacttctcgtttaaaaatcacagtcctgaaaggatagtctyatttaatcatccatatgaccccatcaactaggtgtacatcatttcaaatgaggaaactaaagctctcagaggttgaattcccccaaactaggaacatgtaagtcttgctggtccaaagcccacagtctttctttcatgtgattctagatatagagaaattgcttctttatgtccaaaaatagctattaggtaaagaatagaatagagacattgctcaacttagtgctgacttataatttcacgatcgttttatttaatacataaggaatatagatgcaccgttttatcattttaccattgacatttggaaacaaatcaagataaggtgcatagaaaagaattataacaatagatttgaatatacccttaactcagatactgacttttacaagatgattaaat

SEQ ID NO: 537387 - DNA, 687 bp, Homo sapiens
ttttggtgagttgggaggagacttttccagaatgcactggccactccctctctttctcagggtaaaatgtctcagctaaagactttcctcatcagaggaaagccactttctaattcccactgcagcccttatggtcaaggtctaaaaggaataacgtccccagctctccctcctgtgacatgaacgtacatgaactccaccctgacaaccatggcatatctgtgatgtttattttctcgtgaccacctttccagtgaggccactctgaaagattgggctctgtgtcattcccttctaacccacttctctctcatacacatctctttccctatgaatatttaacaccaacatattttaagatgattctaaaagaattattttataatcaggatttctgtctgagccaaatgtccctttgaagggcttttacttccctaccttgcttcctgcacacttaagtcacattccaacaggaagaatagaagcacyttgaacgtttatatgtggttttctcaagggaatgttgtgtttggggtctggtggcaagaaaagcctgagtggtgagggaaacctcctgggagggtttagttggccaccccccgtgttcaggaagctcctcctatgcataaaaagcagtcctatgcccaggacacagcacatggaaagactgcatgatggagctgttag

SEQ ID NO: 537388 - DNA, 687 bp, Homo sapiens
ttttggtgagttgggaggagacttttccagaatgcactggccactccctctctttctcagggtaaaatgtctcagctaaagactttcctcatcagaggaaagccactttctaattcccactgcagcccttatggtcaaggtctaaaaggaataacgtccccagctctccctcctgtgacatgaacgtacatgaactccaccctgacaaccatggcatatctgtgatgtttattttctcgtgaccacctttccagtgaggccactctgaaagattgggctctgtgtcattcccttctaacccacttctctctcatacacatctctttccctatgaatatttaacaccaacatattttaagatgattctaaaagaattattttataatcaggatttctgtctgagccaaatgtccctttgaagggcttttacttccctaccttgcttcctgcacacttaagtcacattccaacaggaagaatagaagcaccttgaacgtttatatgtggttttctcaagggaatrttgtgtttggggtctggtggcaagaaaagcctgagtggtgagggaaacctcctgggagggtttagttggccaccccccgtgttcaggaagctcctcctatgcataaaaagcagtcctatgcccaggacacagcacatggaaagactgcatgatggagctgttag

SEQ ID NO: 537389 - DNA, 669 bp, Homo sapiens
gtgaacaaaatgtatattttttttcacctatgatcataacactgtcagagcattgaggtttgctctacataaagcatcaccccttcactcccaggaagagtgtccccttcctctgtgctcccacctcactgtgctcccatctctcccagctcaaaacatatgactgtattcctgtctacatgtcagcccccagctcccctccttgccaagactgcccctgtagggcacacatttggtgactgagacaaagactagacacagtaaagtgttgtagcatatcagaagttgagagaaaaagaacactcagcacagggcgaggcgaggcttgggcatggaaagaccgatcattctgtagtattaatcagggtgctcagaaaagggtctctgagaaagtgagcgtaatggttcattttatgtgtcaacttgcctgggccatgggktgcccagattaaatattgcttctgtgtgtgtctgtgcgggtgtctctggatgagatcaacatttgaatcagtgggctcagtcaggtagattgccttccccaatgtgtgtgagcatcatccaacattgagcacccaaggaaagagctggcagagcaaaggacagaggagagagggattccccttcaccttttttttttcctgcctgtttgacctggggcatctcacccca

SEQ ID NO: 537390 - DNA, 492 bp, Homo sapiens
aagatagccaggaactaactagcagggctgcccttgacagtcaggtcctctgactgtgcattccattgcactatgtctcaggactgtgtgttattatttctaacatcaccaatttccagaaaggatcccaggcatttgtggaaggggtgtcaaggggagagaaggaagaagaatcccaacagttaaaacctcccacagcccaggcttcctggtcacagacagggctgcaaaaggcaccctagatgggctagctgctgtgggtgggtgagacttgcattgagtacctactatgtgtttcaggaaaaaggaccctgagcgtcgtggctcactcctgtaattctagcactttcagaaactgaagtgggaggcttggttgaggccaggaatttgagaccaacctgggcaataaagggagaccctctctctacaaaaataaattaaaaagaaaagagcsccgcctgtgagtagggtcaaatgttatgcactgcacct

SEQ ID NO: 537391 - DNA, 637 bp, Homo sapiens
ccacctcctgggctcaagcaattctcctgcctcagcctcccaagtagctgggattrcaggcatgaatgcgccaccatgcccagttaatttttgtatttttagtagagacagcattttatcatgttggccaggctggtctagaactcctgaaccttaagtgattcacctgccttggcctcccaaagtgctggaaatataggcgtgagacaccgcgcccggccagagggactgttacttctaacaaggggtgatggggagaggcttgggctccagcacagcaggaacaggtaggaaacttcctgaaatgctgataagccttaaaaaagagtttgagtgaaataggtgcacatgagagttaagacagaagccccacagttagcaaagaagtggaggcaagactgtgggatgtgtgctcacagagggaggatgggcttgtctgaaggggaaggtgtgagtcagcaggacagaggcaggtctttcctgattcaggggagccaggagcactggcctgacttactgggcaagtttcttttgatgacagtgcctcagcttttcccttcactaatcaggaagaaaaacacccactgttggctctccagcatactgtctccttttgttgacagcacaacaaaaatca

SEQ ID NO: 537392 - DNA, 658 bp, Homo sapiens
tcaattgccaggaaatacaaaggacagaggaacatgaagaactacaccraaagtacacaatcagcaaaatccaggctgtggaccctccacaagtcaaacagcctgggtccgtcaactggtgagctgtcacaaaatgaaggagatggaggaggtttgcatagattaaaaaacatttagaagacacaccaccttctttaaatgggctagactaaaccaaatcttggaatgtatacatggatgataacactccaaaaaaatatgtggaagtgacataaacaatgctcaggaattttttttaatggggagtggaaggggattttgacaaagtccttttcttgtctctaggtggagttcacctcattataattcattaagccaccatttgagttctgtggcttccagtatctgtgtcttatttacgataacgattatttttggaaaataaagaagtaagaaaacagaggtgatttgtttcagagaggagaacggctccgggtgaaaggtcactggacctgatgaggagtcctgggttggagtaccaaccgtcactgtctctggaaagccctgcagcttcttggagcctcagctccttacttatgtggcaatggaccagtgtggccaactctgaaagctccaatcacccgtattccaaggactc

SEQ ID NO: 537393 - DNA, 658 bp, Homo sapiens
tcaattgccaggaaatacaaaggacagaggaacatgaagaactacaccgaaagtacacaatcagcaaaatccaggctgtggaccctccacaagtcaaacagcctgggtccgtcaactggtgagctgtcacaaaatgaaggagatggaggaggtttgcatagattaaaaaacatttagaagacacaccaccttctttaaatgggctagactaaaccaaatcttggaatgtatacatggatgataacactmcaaaaaaatatgtggaagtgacataaacaatgctcaggaattttttttaatggggagtggaaggggattttgacaaagtccttttcttgtctctaggtggagttcacctcattataattcattaagccaccatttgagttctgtggcttccagtatctgtgtcttatttacgataacgattatttttggaaaataaagaagtaagaaaacagaggtgatttgtttcagagaggagaacggctccgggtgaaaggtcactggacctgatgaggagtcctgggttggagtaccaaccgtcactgtctctggaaagccctgcagcttcttggagcctcagctccttacttatgtggcaatggaccagtgtggccaactctgaaagctccaatcacccgtattccaaggactc

SEQ ID NO: 537394 - DNA, 548 bp, Homo sapiens
ctggggaaaggggctatggggtgtgaccgctaatgggcacagggtttctttttggggttatgaaaatgtcctgaaattagctaacagtgatggttaccccctctgtagatccgctaaaacccactggattttatactttaaaggggtgaattttatcacatgtgaattaatctcaatcaataactaaagcttagagatacttttaggcttaaaaaatgtttatagcaacattattcacaggctgggcacaatggctcatgcctgtaattccagcactttcggaggatcacttgtacccaggcgttcaaggctgcagtgaactgtgattgagccactgcactccagcctgggtgacagagtgagaccttgtctcaaaaaaaaaaaaaaaaaamcttttaaaaattaataagcagcattacattatatagtaattagatacatagatgatagataatacatgtttgagtcacgtggggtaaattcctatgagtggaacttttacatgaaagtgtgtatgcatttttttttctctagacctcctccatagt

SEQ ID NO: 537395 - DNA, 548 bp, Homo sapiens
ctggggaaaggggctatggggtgtgaccgctaatgggcacagggtttctttttggggttatgaaaatgtcctgaaattagctaacagtgatggttaccccctctgtagatccgctaaaacccactggattttatactttaaaggggtgaattttatcacatgtgaattaatctcaatcaataactaaagcttagagatacttttaggcttaaaaaatgtttatagcaacattattcacaggctgggcacaatggctcatgcctgtaattccagcactttcggaggatcacttgtacccaggcgttcaaggctgcagtgaactgtgattgagccactgcactccagcctgggtgacagagtgagaccttgtctcaaaaaaaaaaaaaaaaaaacttttaaaaattaataagcagcattacattatatagtaattagatacatagatgatagataatacatgtttgagtcacgtggggtaaattcctatgagtggaacttttacatsaaagtgtgtatgcatttttttttctctagacctcctccatagt

SEQ ID NO: 537396 - DNA, 590 bp, Homo sapiens
agggcgtcgcaggacagcttttcctagacaggggctagtatgtgcagctcctgcaccgggatactggttgacaagtttggctgggctggaagccagcacctagggaggtccctggaaggggccagcctcaccaggagaggagggacctggcccttcagggtcgagctcaacagaggaaaagatctcagggcacccagarcccagtggctttcagcacctgcatgaaaatcagagatcaaccagattaccccatattgcccaagagaaaactgaggccagaaagtgatggagcttgcccaggaccccagagggtgttagaggcaggccagaaccagaggacagctctgtcccagcacttgccctcctttaattaggtgggtggtcatatcgcagtggtcagagacattgcaaacaataataataaatattgagcacttgttacacgcagggcactatgctaagcaccttgtatttgttatgtcctttcatcctagcaacttctctggaagtggagtaatatctcccccatgtcctacataagacaatggatacactggagggttaaagccatgccttgcctaaagttacac

SEQ ID NO: 537397 - DNA, 559 bp, Homo sapiens
caggggctagtatgtgcagctcctgcaccgggatactggttgacaagtttggctgggctggaagccagcacctagggaggtccctggaaggggccagcctcaccaggagaggagggacctggcccttcagggtcgagctcaacagaggaaaagatctcagggcacccagagcccagtggctttcagcacctgcatgaaaatcagagatcaaccagattaccccatattgcccaagagaaaactgaggccagaaagtgatggagcttgcccaggaccccagagggtgttagaggcaggccagaaccagaggacagctctgtcccagcacttgccctcctttawttaggtgggtggtcatatcgcagtggtcagagacattgcaaacaataataataaatattgagcacttgttacacgcagggcactatgctaagcaccttgtatttgttatgtcctttcatcctagcaacttctctggaagtggagtaatatctcccccatgtcctacataagacaatggatacactggagggttaaagccatgccttgcctaaagtta

SEQ ID NO: 537398 - DNA, 417 bp, Homo sapiens
tgagatcttcatggcacaaattattgatgaacaggtatttttttttagtggtcactctcttcactttttccttctactcctcaacgcacagatgaattgtgggttgtactttccagttgaactttcaacccaaatattcgaggaaattgctcttaccaaattacttaggatgttgccaaaaccaatggtcaattctcttcctattgtatttgatgcaccagcagcatccatcatagtggaccacgctcctcttgaaacactttctccagttgacttttacwatgccatcccctcctaattttcctcctgccaccaacttctactcagtatctttagctggcccctcctcctcttttcaacctctaaatgttgatatatctattccaggattcagtctggaaacttttccttttatcc

SEQ ID NO: 537399 - DNA, 608 bp, Homo sapiens
ctgagatgttagttcattggtggctaactcattttcagcattgctatctgctttttatgatatctgataaaagtttctcaatgaaattaatcatttaagcccatctgcaattcctgagtaatggctccactctcctcccagttgcccaagcaggaaactgtaagggtgattttgtctccttttcctctcatcccagctccagtaggtaccaggaccttcaaggtgaggtctgaaattcaaacctggagtgcatctctcccctcctctgcttccactgctggaccctggttccagtcctcatctaaactttggcacagacattctgattaatctcttgatcacctggctttctcatttcccctataccagtctgttttatatcctcaagccaaggtaaacttcctacgccacaactctgcgtctgtttatcttttattattattactattattattattattattattattattattattattttgagacagggtctttctctgccactgaggctagcatgcagtggcatgatctcaattcactgcaacctccacctcccagactccatccwtcctcctgcttcaggtttgtgattagctgggactata

SEQ ID NO: 537400 - DNA, 565 bp, Homo sapiens
ctgggaggaagccaagcagaaaaccgtggagtgggttggttcccttgtggaccggcacaaggagaccctgaagtccaagactcagtgatttaaggatgacagagatgtgcatgtgggtattgttaggaaatgtcatcaaactccacccacctggcttcatacagaaggcaacaggggcacaagcccaggtcctgctgcctctctttcacacaatgcccaacttactgtcttcttcatgtcatcaaaatctgcacagtcactggcccaaccagaactttctgtcctaatcatacaccagaagacaaacaatatgatttgctgttaccaaatctcagtggctgattctgaacaattgtggtctctyttaacttgaggttctcttttgactaatagagctccatttcccctcttaaatgagaaagcatttcttttctctttaatctcctattccttcacacagttcaacataaagagcaataaatgttttaatgcttaacatggagagaagcatggtttctgttaatacatactttcatccttttcctttcatttccaactatcacca

SEQ ID NO: 537401 - DNA, 565 bp, Homo sapiens
ctgggaggaagccaagcagaaaaccgtggagtgggttggttcccttgtggaccggcacaaggagaccctgaagtccaagactcagtgatttaaggatgacagagatgtgcatgtgggtattgttaggaaatgtcatcaaactccacccacctggcttcatacagaaggcaacaggggcacaagcccaggtcctgctgcctctctttcacacaatgcccaacttactgtcttcttcatgtcatcaaaatctgcacagtcactggcccaaccagaactttctgtcctaatcatacaccagaagacaaacaatatgatttgctgttaccaaatctcagtggctgattctgaacaattgtggtctctcttaacttgaggttctcttttgactaatagagctccatttcccctsttaaatgagaaagcatttcttttctctttaatctcctattccttcacacagttcaacataaagagcaataaatgttttaatgcttaacatggagagaagcatggtttctgttaatacatactttcatccttttcctttcatttccaactatcacca

SEQ ID NO: 537402 - DNA, 662 bp, Homo sapiens
ccggtatgggcccttccatcggggttgaagggaattctttattagatgtcttttccaatagacaaaatttctgggctgcagattgtgaccaggtgccttatcttcagggagcacactatgaaaggaatttcttaccaaatcttgacttttttaaggtgataaaaaaagtcgctcacaatattgcartatatctcccttgagaaaagttggatttgttatgtttgttcccatatacatgggccttcccactataatttcataaggggacaattgatgttttccaaaaggggttgatcagagtgtaagcagcactagggtgagtgcttcgaatgaggggagggaaaatgcctctgtgaacttagccaattgtgttttaattattccattggttctctccaccaggcctgaggattggggatggtaggcacaatggaaatgctgagatatgggccaaatttttcaaatattttgaataacctggccagtaaagtgagttcccctgtcattgtgaagttcacaggggactccccacagtgggatacttttttctagtaggatttttccaaccgccatagctgttgcttgcctacagggaaaaggttcaacccaatgggaaaacatgtagactattactaaaacatacctgtaaacttgagatgatg

SEQ ID NO: 537403 - DNA, 662 bp, Homo sapiens
ccggtatgggcccttccatcggggttgaagggaattctttattagatgtcttttccaatagacaaaatttctgggctgcagattgtgaccaggtgccttatcttcagggagcacactatgaaaggaatttcttaccaaatcttgacttttttaaggtgataaaaaaagtcgctcacaatattgcagtatatctcccttgagaaaagttggatttgttatgtttgttcccatatacatgggccttcccactataatttcataaggggacaattgatgttttccaaaaggggttgatcagagtgtaagcagcactagggtgagtgcttcgaatgaggggagggaaaatgcctctgtgaacttagccaattgtgttttaattattccattggttctctccaccaggcctgaggattggggatggtaggcacaatggaaatgytgagatatgggccaaatttttcaaatattttgaataacctggccagtaaagtgagttcccctgtcattgtgaagttcacaggggactccccacagtgggatacttttttctagtaggatttttccaaccgccatagctgttgcttgcctacagggaaaaggttcaacccaatgggaaaacatgtagactattactaaaacatacctgtaaacttgagatgatg

SEQ ID NO: 537404 - DNA, 570 bp, Homo sapiens
ttacaactttaaatgcctatagtggaagtgagcaaaggactaaagtcaattatcaatgctttcatcataagaatactgaaaaataagagtataataaacccaaagttaataaatgtaatccaattatgaaaatcatgaaatataaaaawgaacaaacaatagagaaaatgaatagttaatttttctgtacaccatgcacaaaactaaattttaaaatgattttatatttaaacatatatccagaaccacagagatcttagaagaataaattatgacaatataggaaattgaaagagaaaatgggaattctgtgggaataaaaatcagaaagtagttgcctatgagactgattgggtgaagggcagggaaataacagggaacagttggaaaacaactttatggagtgaaggaaatggtctatatcttctttgagtggtacttacatgggcatatataactctcaaagttcattggcactgaacacttaagatctgggcattttaatgcatacacattacatcttgatttttttaaaatagaggaaagtgttttggggagcttatggtagtg

SEQ ID NO: 537405 - DNA, 681 bp, Homo sapiens
acactgtcctttccctcacccagcaaagccaggtacagtggacattgcctgatttgcagcaatggcagggaccctgacttacagttccaaagtccttggcagagaatctgcttaactctgagcttttgctgaatgtacaatcttgccctagcataacatgtgaagccttgacaggaagaagttccccctaaccacctcccatcccttgcagtcccttrtgcccctgaaaatcatacttatagttggcaaaataattcaccacaagccggttgggcaggaaggaaacaaaatcagctttcacctttgcccttaagtggtgttggaatatgtaagcatctgcacctctctcatatctgtctccctagcattgagcactaggcccggcacttgcccactcagctgaggggtgaacttctcaggggctctgctcttaatgagtcacagtcttggggcccggggaaggccagctatacacaggcggtatcagaacccccaggcagaatcactccctacttcagccctggtaggtccagaaaagcatctcagtggagtgtctttagtgaataaaaagaatgcgtggaactgctttcaatgaatccctggtctccaggaaatggagtctgccaatacttttacttaggctaaacatctttcaaatacatgagtgggaaagtcagcttg

SEQ ID NO: 537406 - DNA, 681 bp, Homo sapiens
acactgtcctttccctcacccagcaaagccaggtacagtggacattgcctgatttgcagcaatggcagggaccctgacttacagttccaaagtccttggcagagaatctgcttaactctgagcttttgctgaatgtacaatcttgccctagcataacatgtgaagccttgacaggaagaagttccccctaaccacctcccatcccttgcagtcccttgtgcccmtgaaaatcatacttatagttggcaaaataattcaccacaagccggttgggcaggaaggaaacaaaatcagctttcacctttgcccttaagtggtgttggaatatgtaagcatctgcacctctctcatatctgtctccctagcattgagcactaggcccggcacttgcccactcagctgaggggtgaacttctcaggggctctgctcttaatgagtcacagtcttggggcccggggaaggccagctatacacaggcggtatcagaacccccaggcagaatcactccctacttcagccctggtaggtccagaaaagcatctcagtggagtgtctttagtgaataaaaagaatgcgtggaactgctttcaatgaatccctggtctccaggaaatggagtctgccaatacttttacttaggctaaacatctttcaaatacatgagtgggaaagtcagcttg

SEQ ID NO: 537407 - DNA, 518 bp, Homo sapiens
ccttccataaggaactgccatctatagcaatcattatatcaccttagtcttttgaaatgctttaaagcttgctaataatatccagacttacagctaactgcactatgaatatctttcagattattttgatgctctcaaggaagatmtctagaaaattgtctccaaatctctttaatagaatatattacttgaggaagatatatccattcattcattcaatcaacaaatatttattgaatatttactgtgtgtcagaccctattaaaaatgctggagatacagcttttcttccaatttggagggtagaaggagacaggctttaaataaagtaagtcagtcaatgttatagtactttaaaagttgataagtggcatggagaaaaattaagcagaaaggacaaatagaaagtgcatgagggggcagggtgtcattttaaatttgacgatcaggggtgcctcactgagaaggtgatgatgcagaaagatttgaagtaggtgagtgcagagccataagaccat

SEQ ID NO: 537408 - DNA, 518 bp, Homo sapiens
ccttccataaggaactgccatctatagcaatcattatatcaccttagtcttttgaaatgctttaaagcttgctaataatatccagacttacagctaactgcactatgaatatctttcagattattttgatgctctcaaggaagatctctagaaaattgtctccaaatctctttaatagaatatattacttgaggaagatatatccattcattcattcaatcaacaaatatttattgaatatttactgtgtgtcagaccctattaaaaatgctggagatacagcttttcttccaatttggagggtagaaggagacaggctttaaataaagtaagtcagtcaatgttatagtactttaaaagttgataagtggcatggagaaaaattaagcagaaaggacaaatagaaartgcatgagggggcagggtgtcattttaaatttgacgatcaggggtgcctcactgagaaggtgatgatgcagaaagatttgaagtaggtgagtgcagagccataagaccat

SEQ ID NO: 537409 - DNA, 598 bp, Homo sapiens
ctggcccccattagcgtccaggtcctgtaggacatacttacctttgtctgtctgaagaaatcatccttcctgttctgtggaaatgttctccgcccgcaaactattcgtgatattgtaaacctagttttgcaaaagcataatctgtcgctgatactgctgggccttgtaggaggagcaggtacttcttccctggctcagagcacttctcatattccagagtggttctcagagtccactgacctcatctacctaacaggcattctgtttsggaggggccacctcctctggaattgggaatgtttcctgaagcatgccctgaatcaccccatcttagaaaaccataggcatttatccatgccttacccaaaacagagattgcctccaagccaaagtgagcccagcattcataaaacattaacctctctataaatcaagctgctccactgtttcttacaatgtaattcttgttcagcagaacatagagcttgggaattaagatcagccttagtcagtggaatcagtttttgatctacagcacggatatcctcccctttccttcacacagaccctactgtgaatatctaaggactcctgaatg

SEQ ID NO: 537410 - DNA, 556 bp, Homo sapiens
cccttggcattgagaacctccaagcagccgggggtgggttgtgtgtattgcttcctcccaggtaggggagcaaagagagtattctaaccaaatttgccagcaggtaatatttgcctgacagtaattttgtgttatcttagaataacaaaatcaaakcattttcaatgaggacttctaatttggacttccagtgaagcatatgcatttatctcctaatctcttccctttctccagccactcaaaaaatcatgaaagattgaaacaggcacaaacacaccaggacagtaagaaacagagaggcaatgacagcagataagaaacaccaaccaaatggtgagagccaaaaagagagggaggtggagcagtgccctaagcccgctggagaaagcagaagcagcctgtccgtgtgtgttggctgcatgaggaggacaaataagatgcagcctgaagtgagccacagaatcccagagaggctcaggaattcaagtataaaaagtatttccaaagattagctgaaagccttcctcaggagtagttagacccccaaattccacac

SEQ ID NO: 537411 - DNA, 610 bp, Homo sapiens
aagttattgcctatctctccatgccttggttttctccccagaaaatggggtaataatagaccgacctcacagagtcatggtgtggcttgaatgagataatgagtgtgatcaaatcagtgctgggcacagtcagcctctgaccaatattagctcttgctaagttttcatttgtcactcctgtttcctgaccatgttgcacgagcctggtgcagagctgattctcactaggtatttgttgaatggatggatagatgaatgcctacagatttgtgatgaggatataatttagtgcatatgtaaagtgcttagtatgagcctgggacatagtaagtgctcagtaaagtctgctggatgagtatggaatgaacaaatgatgccttgagaaagagacagtgtctggttcatctgtgggcccctggcccccrtaccatgcctgaggcctctgagcaaggcctggcatgcaggtggcactctggatgtgttttcggaatacagggatgattgggagagttcttctttaagtccctcctcccagccacagtcccgggagtccataccccactttgctctttgagatgtgcacgtggacactgttgatgtggctgctgca

SEQ ID NO: 537412 - DNA, 633 bp, Homo sapiens
ccccatagcaagcaatccaagaaacagccaggcagaagccacagtgtcttttgtgacctagtttctgaaatcacaagctattacttcttctacatttggctgtctacaggggagtctctaagttcagcccacactgaagggggctccagagtgttaagaaatttggggacatattttaaaatcatcacaccatctatccacttagccaacaaagatgtattaggcacctgctgtgtgcctggccctgtgagtagctcacagtccagaaccttgaggagtataacaagtaggtaggggtgcaaattcaaatgtccacagggcccaaggagtagcatgaatgagtaaactgagccaggtggggactctggtgagctggatagcatgcgcctaaaggcagaggatgctgcccagctccggagtgtctgtgaagcctcccartttttagatgttgagaattaattccattttcacttttttttttaaccttctctttgcctgatttggcctatccactgacagtttgcaagctctgatgcagccacaccaaatttctcaatgttcccccaaacattgattcattcaacaaacatttacatgcactgggcccctttcatgcattacagaaataacttg

SEQ ID NO: 537413 - DNA, 521 bp, Homo sapiens
tattgttctatcactttaattcatgtcactatcatcttttcatctggaacagttttatataattttccagtggagttacctgacaaatcctatcaaattaacaaggtacattaacagtattgactgactacagcttcaagagttgyaggggcatagaacaaaattttaaaaccatgtctctggtgatgatatttttccccattctttctgagaaaagaatgtggagcacggtttattttcacataagagatatgcatgtttattctgctcggctcattttgacttttataaatgtcaaaataagaagaagaaggggaacacacacatgcacacacacacacccgacaaccatggcttcagtacttctttcagggaactatagaaatgtccagatctttaacaattaatgaccaaattggaggcaagagtgtaactgggtagtcgtaatctattttaactgaaatgtaataaaattggtctcctgatacattctcaccctcctgaaatcatctagacctgaa

SEQ ID NO: 537414 - DNA, 607 bp, Homo sapiens
cagcaggggaaatgaggcccacaaagaaggaggacttgtacaaggttacacagtggtgccaaatatcctgcctttatagtgcgaaccagtccacattaaccagagaggaagacaaggactcacaggtatgtggcgaataatgtttctgtttcatttaaattctaatagcgtgcagcaaacagggagctattatgcaatatcgacttggataaaaatcctcaccctacagaaaattccttacagtgaacacctccccgctaaagccagacaggttaactggctttcagcaataacaacctaaaatatgyaaaacgaacatcacaagtcattttcatttgtaaataagagtttatttgcatgatcacattttcttgtgtatttgaagagtgctgttgtggtataataaaggaggtgcttaagtcacatgatagaaattggggagatcagtaatttgtaactgaaggaggcagagcctccagaagcagcatggaaccaccagggagtctccagagctggcacagagcacacgcaggaggaagaatcagcccgttataaataagcatcacaaagagggtcggaagcacaccaggataaagctgactttcat

SEQ ID NO: 537415 - DNA, 491 bp, Homo sapiens
tgggttagtagagaaggcatcagccagcccaagtggagcagcatgaggttccttagccacwcaggccaggcctggaaatatccccattatttcctcacttcgattttcaagcagtttaaccagaggactttcttagggtggatctacctcaggagataagaccaaactttatctgagtcacaagtttttgttctacaccatttcattctctgccttctttggcactcttgaaactggctagtttcttaggtaacccagcaaacaatggaaataacaaaactgaagatttcccaaagttccattaaagactggccactttgtgacactgagatttgggtgatatattgcctagttggagcatcagtgtttttcaaagcattttaagctgtagggtctgagctgagtgggtctgggtttaaacatgacctcctagagggagaacggacatagacattatcacaaacatcttaacttatagaagaagatgtcaa

SEQ ID NO: 537416 - DNA, 626 bp, Homo sapiens
aattgaaagtatagcaatatctcggtcaaggaagaatttctacttataagttaagactgggcctgccttttggaccaattctttatccattccactttgttcagtaattacagcattctatgcttttatttctctagcatgcccagccacattttaagctttaaagtcataaatgtgaaactaacataggcagtaatgaaaagtaattcaggagttattcagcacatcttamtttgtgcaaatgccaaatcataggactctgatgtccttcagttaagacctttgtatttcaagcaccttcgtgtccagatttactgctactgaagaattgagttcttgaattctgccacctgtcacggacttaaatctgatcactgttaatgacatcacagtatcactcctactaaaggagagaagcattagctgtagttagaacaatgcattcttttgagtagacactgctgggtattgtcacagaggatgagctgtggagggctgatggcagctcagctttcaaacatcggtcatctttcacattgtttgagctttcagacttgaagtcacaggcctaaggacatgaatttccacagcatttggacacaatctattacctggtaaagaaaccg

SEQ ID NO: 537417 - DNA, 632 bp, Homo sapiens
tataaagatacatgcacatgtatgtttattgctgcactatttacaatagcaaagacatgcaaycaaccttaatgtccatcaatgatagactggataaagaaaatgtggtacatacacaccacagaatactatgcagccattaaaaggaatgagatcatgtcctttgcagggacatggatgaagctgaaagccatcatcctcagcaaactaaaacaggaacagaacaccaaacactgcatgttttccctcataagtgggagttcaacaatgaaaacacatggacacagggaggtgaacatcacacaccggggcctgtgttggggagccggcagagtggggagagcatcaggacaaatagctaatgcatgtggggcttaaaacctagatgacaggttgataggtgcagcaaaccaccatggcacgcgtatacctatgtaacaaacctgcacgtactgcacgtgtatcccagaacttaaagtaaaataaaacttttaaaaaaagaagagatgtaaaacctatgaaaacatgtaaataagtcaaaagttttctatatatcatgaggtagaaaattacctcaatggtactctttgggcaactttgaaggcaaaagaaaccagaaggcaggtcagacg

SEQ ID NO: 537418 - DNA, 564 bp, Homo sapiens
acttatttccaatcccacacaattgaacacccaagctatcctcttgtctatgttatcatgtacttctctgtgcaagcctttttactttagctggaatatgaagacctcaataacagagacaaattctttaacttttctcactgtctaagtaatgcctggtatattgttcaggtcagagaagatggtgatggtaaaagaaaattttgattgatgaaagtcaccaattttcttttacatttttatttttatttwttttttttttattctttgagatggagtcttactcactctgttgcccaggctagagtgcaatggtgccatctcagctcactgcaacctctgcctcccaggctcaagcagttctcctgtctcagcctcccgagtagctgggattacaagtgtgagccaccacatccggctgatgtttgtatttttagtagagatgggatttcaccatcttggtcaggctggtctcaaactcctgacctcaactgatccacccaccttggcctcccaaagtgctgggattacaggggtgagccaccacaccccgcctgaaagtca

SEQ ID NO: 537419 - DNA, 564 bp, Homo sapiens
acttatttccaatcccacacaattgaacacccaagctatcctcttgtctatgttatcatgtacttctctgtgcaagcctttttactttagctggaatatgaagacctcaataacagagacaaattctttaacttttctcactgtctaagtaatgcctggtatattgttcaggtcagagaagatggtgatggtaaaagaaaattttgattgatgaaagtcaccaattttcttttacatttttatttttatttatwttttttttattctttgagatggagtcttactcactctgttgcccaggctagagtgcaatggtgccatctcagctcactgcaacctctgcctcccaggctcaagcagttctcctgtctcagcctcccgagtagctgggattacaagtgtgagccaccacatccggctgatgtttgtatttttagtagagatgggatttcaccatcttggtcaggctggtctcaaactcctgacctcaactgatccacccaccttggcctcccaaagtgctgggattacaggggtgagccaccacaccccgcctgaaagtca

SEQ ID NO: 537420 - DNA, 548 bp, Homo sapiens
tttgttttgtttttaagggggagaggttcttccctagattaatttcttctttcattcactcaggaacaaatgtcaagaaggtagcactcataaatctaacaaggcagatgaactcttttctactttttttttttttttttgtattttcacctggaatgggctaagtacagtgaatataatcacttggatgatttgccaaaatcagactatttttctagtattatttttgtattgatttgtgtggatcaggttaaatgtgactaatgcwtttctttctttgagaggtatccttacaattccatgatgttcttagagatctggccactggtcaaacagtacctttctgaagtactgaccttctgagttgtcctttctttcttgagccaacattttgtacttcagattcttttttctcttgggggcctaccttcaaccaagtaaaatactgtgattagaagaagagagagtatgagccaggcacagtgactcactcctgtagtcctagctactcggggaggctgaggcaggatgattgcttaagcccagga

SEQ ID NO: 537421 - DNA, 599 bp, Homo sapiens
gaaaaagtttaaaatcagtcagcttaattaaatgtttcattttcacagacgttttagtctcctttctctctatacccaggagctcgtgctctcattttaccagctcatttcttatgagctcagaggggctaaacatactgtgtagactaacataggatcgacatgatgtaggggaattttaacatttttagagacaatagacagtggctggcactcaatccaactttcaataaatgaatggaaagaaaaggatgggcagagaattgcttgaatccaggaggcagaggttgcagtaagccgagattgtgccactgcactccagcctgggcaacccagccagactctgtctcaaaaaaaaaamcaaaaaaaaaaaaaaaaaaaaaaacctgtcacatttttcacaccaaaaacaaaaacaccaaaatcacatcaacaagaagtaaaccttgttctacaagccaccaaaccaacacaaacctgatgcttttggataatgaatcttgtctgtcaataaaaccgcagtatggcttggccaaatcagtaagaatgaggagacgtgcagtgaggaggattcacatcaatcagaaagcggtccgcag

SEQ ID NO: 537422 - DNA, 430 bp, Homo sapiens
taggggaattttaacatttttagagacaatagacagtggctggcactcaatccaactttcaataaatgaatggaaagaaaaggatgggcagagaattgcttgaatccaggaggcagaggttgcagtaagccgagattgtgccactgcactccagcctgggcaacccagccagactctgtctcaaaaaaaaaaamaaaaaaaaaaaaaaaaaaaaaaacctgtcacatttttcacaccaaaaacaaaaacaccaaaatcacatcaacaagaagtaaaccttgttctacaagccaccaaaccaacacaaacctgatgcttttggataatgaatcttgtctgtcaataaaaccgcagtatggcttggccaaatcagtaagaatgaggagacgtgcagtgaggaggattcacatcaatcagaaagcggtccgca

SEQ ID NO: 537423 - DNA, 618 bp, Homo sapiens
agaactccagctaatcataggcgtgacaacagacttagccttccccacgaggactgtacagtgtaaatggcgcatcagagttgttctgtgttgggctgaagtggcctggccttatactcctacctccatcaggatgtgcccaccctacctgctcaggagaggtgactctgcagctgaggcagtccttgaagggacagctagggcaaaatgtccttctttgaagggagatctgggtatgtttcatctaccctaccctccatgcacgcacacacacgcacacacatacacgccatatatatagctttaaacaaaaatatgatcatattatctatgctcttatgacactgacattttttgcttagcaacatagtgtaaacatttycccatgacccaaaatatacatcccattcatttttaattactgcagatattctattgagttgtacaatacttcatcaaatacctgttgatgggcatctgagaaccttcctaatttttgtctctacaaataacttgatcatgaacatactaatgtttgtatcttttcacacatgtgtaattattgccataaaataattcccccaagtggaattgctgagccaaaaggtttgcattttt

SEQ ID NO: 537424 - DNA, 558 bp, Homo sapiens
gaaaaaattagccaaacatggtagtgtgcacatatagtcccaggtacttggtagactgaggcagaaggatcccttgctcccaggagattgaggctgcagtgagctaagatagcaccactgcactccagcatgggcaacagagttaagaccctgtctcgagaaaaaaaaagtaatttaaatttttaaaaatattgaaaaaaattatgataaagaaaatcgatttcatggttaaaatggtgaattttgtattgtatatattgccacggttaaaaaaaataaaagaaaaagaaacaaaacacatgtgggccaaataaaaaaacctatgtctagattagagtcaggkgcggtctccttattgtcagtgtctgctttcgtactaagggctcgtattgtccttctttccaatgctaatgcctatctctccccattgctaaaatttgcttaactcttggactccagaccaaggcctgagaccttgaaatctgccacagaactatggctatgttttagaagatctgagaacggtctggtcctggattttgctaaattgtcaaatgc

SEQ ID NO: 537425 - DNA, 464 bp, Homo sapiens
ttcctcatctttatacacagttgtaatgtctgaatttcttcaaataaacatttattgccaatggaatagaaaactattaataaacaagatgacctatgcaatggtgaaagacttcataaattacyagttgaagaaaaactttctgagtgcatgcatatctaaaaacacgattttggcacgtttactttagtagacaatttgataatttgataggatgcagcattctaggtccaaagcttttctttcagatcttttaaagatacatctatattattccaatgcctcgggtgttttcagtgataaataagaggtcaccctaatttgtgttcctttgtaatgatttccttctcattggatcatactccatagatccctaacaccaaacatggctatgctgccactgcttaggccttggaagagcagaccctgattccacctactttactccaagcctgagtttagga

SEQ ID NO: 537426 - DNA, 429 bp, Homo sapiens
caattttctttaaagaaagtgtttcactgcctaaaacctggcttgcaaatataaaatgaagttaaaacatatcaaaaamtagaaaaactatagtgagcaaatattacattgtattagttagttataatttgaattgataaacattgaaatgttaagaaaattattgaggtatagaatgcatgcattgagtggtgctttgagaaggcaaatatgatagtacacattgaagggatatagtgcaagaaaaacaagcataaggattttagagagaatttgctatagtactctgagactatgaaccaacttgagcaatgtgattgtaaagaaaaaaaatggttgagtcactgttaaggttggattgaaaaagaaacaagtcactaacaacactgtggccatagctaagtgctgaataaatattgttataatgaa

SEQ ID NO: 537427 - DNA, 652 bp, Homo sapiens
atcaccatttgaatcaatggtgaaatataatataaatttgaataggaagacaccatcatcataagatatacattgttcctacgttagtatataatttaaacattatttcaaatgaaagtgcaagatgactctaaatttcatatagaaaaataagtttcaaaagtaaacacaaaaacaaaaacaaacccaaaaatgattgaggagagactcaatctactggatttaaaaacatataagaaatttagaattctattaatatatttcagagacatraatagacaaaaagatcaacagactaaatagaaagtagagatgatgtgaacttatttatatagaaattcagtatacagattatctgccactaaactgactttttaagaaaattaaaaaaaaatctatttctagaaattgtgaaaggagagaaaaaagaacaagttaggcagatagttaggacaaggtctcagtagaagtctttccaacaaaagagcagcctggaagaaatcaagctgcaagcgctgataaggaagtaaggtccaatgactttgtttcttgtccaaccagcaagctccacctatacacagtggacttcagtgaggacattcctttcctttttgggcatactcagataagggaacttgcacagagttcttgc

SEQ ID NO: 537428 - DNA, 579 bp, Homo sapiens
actgccattagccatgggcctcaccatgcactccaaaactacatgctcaagtagcatatgaacataaatcatccatcccaggcatctttagggtctaggggctttttaagccttttattatctaacaataaaccccayggtgcatttggttatgtttctcattacacttgacttaggtaaacggttcaaaggccctgtgggaagtggtttcttctaaatacctctgttttgttctagaagtagcacaaataaaagaaaatcacacagatatttaaatagttactcaaggcagaaaagccaaatcatagaaaagtcagattattttaacattgtaccgaaataaagggttgaaacatttttaaaaaatccaatcgggtatttggccctctgcagaaaaaaaaaaaaaaaaaaaaaaagatgaaatgatgtgaatgattcaaatttttctttaatgtgaaattcagtctattcccagatcagtttgggctgcttttttagctgctctgtccaaccaattcagggaaattctagaaacttctgcacagaaatgggtgcaggcctgatggagactgagattca

SEQ ID NO: 537429 - DNA, 621 bp, Homo sapiens
ccctagaagatacatggcccaaaggatcatcacccaggaatgttattagaatgaagcttacccatctcctgtgaggacctggctaagcagatctgtgcctggagttacagtcatggcagtgctcctgattctgaagatgggctatgggaagaggactttgggacatgctaagcctcctgagtagacacttgagccttggcatagttgggattagggaatggtagaagaccctcttaagaaagaaaagagtgttccctgactcaagagcctcatgaacctgggtcttgcccatgctgggtagctagaaatgtaaccatatctgcagttcttggaggtcaatgaaaaggttgtgtaaaggagtattgtttggcagatgtctctagtaccattgctgcaacaaataaagctggcttagcactggcctgtctgaagctgtgctctgcagtggttgtagtcatactgagctgaccacstgaccatctaggctcctaggaactgctagaagggccagacaatgaggacccaagagcttccaacccaaggtactcctagaagatcccattacttgacagcagcaacttctgcttctagaacttgctgagagacctgctgatgagagca

SEQ ID NO: 537430 - DNA, 544 bp, Homo sapiens
ttgcccctcaccctcttggaagactgccactttgtgaacaagcccgcaccagcctccttcagcatgagattctagtggagagagaatctccatttctyctgaggtcccacgcatatgaattccagccgaatcgctaccaaacgtggtgatgagcgagcccaggcaagaacagctgaaggcaactcaagtcataacccacagaatcatgagaaataataaagggttctaaatcattaagttctggggtggcttataatggaacagatttgaacattctcaaattattgtttaaaaaatctgtactgtggacaagcttaaggtttattattactattttaaactagattactaggcagggcatacatcgctatttccatatggtaaaccttgcttgttgcatgcattttgaatatacggcatactttgattttcctttgcattttcagccctcctcacatgttatcacgcattcattcatcaaacaccaagcatgttgaaagtgacagctcctggagtaggcactaaggatgtgacattgaattgg

SEQ ID NO: 537431 - DNA, 544 bp, Homo sapiens
ttgcccctcaccctcttggaagactgccactttgtgaacaagcccgcaccagcctccttcagcatgagattctagtggagagagaatctccatttctcctgaggtcccasgcatatgaattccagccgaatcgctaccaaacgtggtgatgagcgagcccaggcaagaacagctgaaggcaactcaagtcataacccacagaatcatgagaaataataaagggttctaaatcattaagttctggggtggcttataatggaacagatttgaacattctcaaattattgtttaaaaaatctgtactgtggacaagcttaaggtttattattactattttaaactagattactaggcagggcatacatcgctatttccatatggtaaaccttgcttgttgcatgcattttgaatatacggcatactttgattttcctttgcattttcagccctcctcacatgttatcacgcattcattcatcaaacaccaagcatgttgaaagtgacagctcctggagtaggcactaaggatgtgacattgaattgg

SEQ ID NO: 537432 - DNA, 544 bp, Homo sapiens
ttgcccctcaccctcttggaagactgccactttgtgaacaagcccgcaccagcctccttcagcatgagattctagtggagagagaatctccatttctcctgaggtcccacgcatatgaattccagccgaatcgctaccaaacgtggtgatgagcgagcccaggcaagaacagctgaaggcaactcaagtcataacccacagaatcatgagaaataataaagggttctaaatcaytaagttctggggtggcttataatggaacagatttgaacattctcaaattattgtttaaaaaatctgtactgtggacaagcttaaggtttattattactattttaaactagattactaggcagggcatacatcgctatttccatatggtaaaccttgcttgttgcatgcattttgaatatacggcatactttgattttcctttgcattttcagccctcctcacatgttatcacgcattcattcatcaaacaccaagcatgttgaaagtgacagctcctggagtaggcactaaggatgtgacattgaattgg

SEQ ID NO: 537433 - DNA, 547 bp, Homo sapiens
caactcaagtcataacccacagaatcatgagaaataataaagggttctaaatcattaagttctggggtggcttataatggaacagatttgaacattctcaaattattgtttaaaaaatctgtactgtggacaagcttaaggtttattattactattttaaactagattactaggcagggcatacatcgctatttccatatggtaaaccttgcttgttgcatgcattttgaatatacggcatactttgattttcctttgcattttcagccctcstcacatgttatcacgcattcattcatcaaacaccaagcatgttgaaagtgacagctcctggagtaggcactaaggatgtgacattgaattggatatgacggctactcctgagaagctcatggctattggagaagatacgtatgcaaatgctgagtgaccactcccagtggaagcaagacaaggggctaagttagtcaggacccaataaagaaaagagaaaccactccaaatcccttggagaatttaatccagagaatttatcaaacagacaaga

SEQ ID NO: 537434 - DNA, 626 bp, Homo sapiens
tgaatttttgatacttactttctaaatactcccatttttcttccttagatcaataggcaacttctaagaggtaaaaaatgaggtaaatatttttacgtaaaatgagagctaagtttctgacttttgaagaacatcagaaaataatattttaaaacaccaactaacatccacttacttttgttcttcttcaacccctatggctgggtttgttgttgtaatcattaatagtaatggtaggtgttccatgattaaactctgagagctttctattcctttgttgaatccttataacaacaactcttggaggtatgattggtaccattttacaggtgaagaaaccaaggcctagaaagatgaggtgacttggaaaaagttatgcagctaataaatagcagaacttagattcagatttagatccatctgtctccaaagctatatgctatgctatgctatgctatgctatgctatgctatgctatgctatgctaygctatgctatgctatgctatgctatactgtgctatactgtactatgcagtattgttgggtccatatatgtcttgctcagtagaagaacagtgagtgcaaacacatggagttttgtccacatcttgttagaaagaggcc

SEQ ID NO: 537435 - DNA, 609 bp, Homo sapiens
aggcatcattccatacctcctcaacaaccaacccacatagcagatgtttacttttatttgtttctataatgacacagctctatgtattccttgtattagttgcttctgtgtctgttgcttttctgcctcctattctttttttattatagtaaaatgtaacatagattttaccatttgaacccttttaagtatatacttcagggacattaaatacattcacgttgttgtgccatctccaggactttttcatcttcccaaactgacactctatgcctattaaccaataactccctgttagaaataccaaaattgttagaaatagataattggtgccacaaagaaaagacagtacagagacaaaagatctctcagcaaggcaatctttactttctgcagaaagggtgctcagtcgcagatggaacaatggcgagagcacacctgaacaaaggaaaagcagrcatatttatccctatgcatttgggttgtccttactgctgtgtcctgcatccattggctggagctggacctcatattctgaaactgacacccaatttgctaacagcctaaaactttcctaaataggtaagtgcaaggaagaacaaagaattt

SEQ ID NO: 537436 - DNA, 605 bp, Homo sapiens
cttgtgtgaactgtgtgttcaagtcagcatgctctggaattgatagtgtgtcattctgggctttctacccctttctgacactgcgtggtacaaaccaaaagttcacattggggtcatgattgctggcttttggcagggcttggcgagaaggtctctgcagggttaggccgcccagatgcgagctgtttgggctgagttcagtttgtttccatttgctccctctccctcctcccctctcctcagtcatgccaactgctactggagatgtttttcctctgtttaaggtaataaccgagtcaatgctgaagccaagctataggcaagcattgaaaataaattttcaagggggttgttttcatattattaggaaaagccttggaatctttttgaaartttttgtttcctgagaaactgccctttgggaatatctttgttttttgagtgcctttagcttggtgctgagaaataaacttaggaaatatgattgagatgtagtgggctaggtttttaaacaaaatgctctaaacattccctcaaaaaccatttctctaaacagagcgctcgcatgagtagctgattagtacatgtggtgctgcctgacctct

SEQ ID NO: 537437 - DNA, 535 bp, Homo sapiens
tctcaaggtacctctaattaaagatgagccaagggggcagactagattgcctcatcttattctggtttggtccaaaatatttaaggttggtttcacactgtaccagcttctgggagtgaagagcaaaagagaaacagggtatctttcactcccacattcattttgctgaattatatttcaaatacaaaaaaagaacacacaaggaaaaatgatttagctatacatwtgctaccaatagtatgtttgttgggagaaaaaagcaggttccagtttgcttttcatcaaatctttaggataattaaatcacacaaggccaattcttcagcttctttgtgatcacataattatgaaatctatgagactaatacatttataaaaataaatttccctcttaaatctactcctatgggttctttcttccgcaatgaagagtcagtcccccacttggtgatgttcttggcctgaatattttatttcagtatctgttactgctcacaaaagtactatttttgagtggagagttagttgagtggag

SEQ ID NO: 537438 - DNA, 535 bp, Homo sapiens
tctcaaggtacctctaattaaagatgagccaagggggcagactagattgcctcatcttattctggtttggtccaaaatatttaaggttggtttcacactgtaccagcttctgggagtgaagagcaaaagagaaacagggtatctttcactcccacattcattttgctgaattatatttcaaatacaaaaaaagaacacacaaggaaaaatgatttagctatacatatgctaccaatagtatgtttgttgggagaaaaaagcaggttccagtttgcttttcatcaaatctttaggataattaaatcamacaaggccaattcttcagcttctttgtgatcacataattatgaaatctatgagactaatacatttataaaaataaatttccctcttaaatctactcctatgggttctttcttccgcaatgaagagtcagtcccccacttggtgatgttcttggcctgaatattttatttcagtatctgttactgctcacaaaagtactatttttgagtggagagttagttgagtggag

SEQ ID NO: 537439 - DNA, 503 bp, Homo sapiens
tccctcatactatataacctcccctaagatagacattgctctcatgttaaagtcagatgggacatgtcttttctaagtcacttgatgaaggcttgatttgtacactgatayaacaaaattgggagcaggctctcctatctttcagagtctgcatgcattctgcatttggacagtctctaaaaggctattacgatgtatgagtggcaggcgcagtggctcatgcctgtaatcccggcactttgggaggccgaggcaggcagatcacctgaggtcaggagttaagaccagcctggtcaacatggtgaaacaccgtctctactaaaaatataaaaattatcttgatgttgtggtgggcacctgtaatcccagctactcgggaggctgaagcacgagaatcgcgtgaaaccaggaggtggaggtcgcagtgagctgagatcgtgtcattgcactccagactgggcaacaagagcaaaactccatctcaaagaaaaaaaaaaaaaatt

SEQ ID NO: 537440 - DNA, 503 bp, Homo sapiens
tccctcatactatataacctcccctaagatagacattgctctcatgttaaagtcagatgggacatgtcttttctaagtcacttgatgaaggcttgatttgtacactgatacaacaaaattgggagcaggctctcctatctttcagagtctgcatgcattctgcatttggacagtctctaaaaggctattacgatgtatgagtggcaggcgcrgtggctcatgcctgtaatcccggcactttgggaggccgaggcaggcagatcacctgaggtcaggagttaagaccagcctggtcaacatggtgaaacaccgtctctactaaaaatataaaaattatcttgatgttgtggtgggcacctgtaatcccagctactcgggaggctgaagcacgagaatcgcgtgaaaccaggaggtggaggtcgcagtgagctgagatcgtgtcattgcactccagactgggcaacaagagcaaaactccatctcaaagaaaaaaaaaaaaaatt

SEQ ID NO: 537441 - DNA, 616 bp, Homo sapiens
tgaaattttctctcttcagaatgtataatatcacggctaggaatgtaagagaaatatatgttttagtaatttgttgtttcaaatttatttttttaaaacttacatctatatttggatgtaaaggcaaaaactgtagtgtaaatgactataagagatgtgagatgtcaggcaaggttttatgcatgcaagagggaaacaaacatagtcaaccttcctaaagtttaaaatcatgaggcagagaaactgatgtcatataggagtttgtcactgatgaaacatatcttaaggtttccttatatacaagagatatatgaatttcaggtgtaaatttgaatgtggmattttactattttaaagctagaaagggccttagagttattcaatcaacattctaaaaagcaatatatctgaataaatcatttctgatctttgctatttacttcctcctctaggactcttagtggtaatgaaatggaattagggaatctgaaaaatctttaggaatagtagagaattgtaaagcaaatagatttagaaaggggactgtgttgtagggaatggcaaacaaaagaataataactccctatgtatgtatactgtttgagtaaaagcaagg

SEQ ID NO: 537442 - DNA, 616 bp, Homo sapiens
tgaaattttctctcttcagaatgtataatatcacggctaggaatgtaagagaaatatatgttttagtaatttgttgtttcaaatttatttttttaaaacttacatctatatttggatgtaaaggcaaaaactgtagtgtaaatgactataagagatgtgagatgtcaggcaaggttttatgcatgcaagagggaaacaaacatagtcaaccttcctaaagtttaaaatcatgaggcagagaaactgatgtcatataggagtttgtcactgatgaaacatatcttaaggtttccttatatacaagagatatatgaatttcaggtgtaaatttgaatgtggaattttactattttaaagctagaaagggccttagagttattcaatcaacattctaaaaagcaatatatctgaataaatcatttctgatctttgctatttacttcctcctctaggactcttagtggtaatgaaatggaattagggaatctgaaaaatctttaggaatagtagagaattgtaaagcaaatagatttagaaaggggactgtgttgtagggaatggcaaacaaaagaataataactccctatgtaygtatactgtttgagtaaaagcaagg

SEQ ID NO: 537443 - DNA, 617 bp, Homo sapiens
agacaaatctattttgttaacttcaaaatagaatgaatttttaattgaatatttaaaatataaaggtattttacgtcagatgatataaaagaaagaaagcactttgaaaaaggagaaagtgttacacaaagctaaagacttctcatgacaactttagctatagttttgccataaacagtgtttaaaggggtccacaccatttcaccacatgttagcattgatggtcaaaacagacaactgagcacttacctctttaggtaacctttgataaaataagtctggttgtgcatccaaagcttggtaatctaccaccttcaactctcactgctgtagaaaacctcagcaaacttcaaatatgggcaaagtgggagactgcctctgcaaaatgttaatgtttaattatcaaactcctattagactaaagaagcggtttggggaagatgctatgcaattgcactgttagtgattttagtgaaattgagtactaaattggaactcaaatgggatttttagtacaaaagtcacctttgtragtcacagtccagctggccaagggttacccttaaagactcatttatgattttatttttccaatgtgtgcaatttactcaattcgt

SEQ ID NO: 537444 - DNA, 641 bp, Homo sapiens
gtttgtgtgaaatagacctagagattttagttggcctcaagatcaatacgagccagcagtgagatctgactgctaaagatgctggtacaatctaaagctaaactaggagaagtattttgtctgcttcacaaaaagcaattgtcccactgtaccctgttacagtccaaccatatgtgtgatattgttttcaacattttaagaaaaacatttacaaactgattaagttcagagtagataaactagaatgatgagagaatgtagaaaatatagtatatgacagatagctaaaggaccaggggacatatacactgagaacagaaaatctggggtcaaggaatgtagcagcatctctaggaaagaggaaagaaacaggtggtaaagagtggtgaggggcatgtgtgatttgagaaagtcccatcaatgcgtcaaatacacacagaatccaccatacccatgccacatacrtggctgaggactactgtccctgaggaaataaaccagccagctgaatattataggagggcaattctaaaaataatgttataatgttattatagctgaagcaatctaaaaatgcaacagcttcttatgaggcagaggcccagtatcactggaaatacttaaacagaaattgaatgccc

SEQ ID NO: 537445 - DNA, 530 bp, Homo sapiens
ttcaaacacctagaagagaggattttgaatgttcccaacacaaataataagtgtttgaggttacggatatcccaattacccagatttgatcattayacatggtatacacaaatcaaactatcagtttgcacccctaaatatgtaaaactattacttgtcaattaaaaataaaaataagaaaaaaaaataaataagagggccgggtgcagtggctcacatctgtaatcccagcgctttgggaggccgaggtgggcagatcacctgagatcaggagttcaagaccagtctggccaacatggtgaaaccacatctctactaaaaatacaaaaattagccaggcatggtggcgggcacctgtaaacccagctactctggaggctgaagcaggaaaactgcctgaacctgggaggtggaggttgcagtgagcgccgagaccatgccactgcattcacacctgggcgacagagcaagactctgtctcaaaaaaaaaaaaaaaaaaattaagagatttcagaaaactgagtgttaac

SEQ ID NO: 537446 - DNA, 624 bp, Homo sapiens
gtcctcaaggatgactagaatcaagttcaaatgctgccaggagtcccgccctcggccccaatttctattatttctggcttcatgctttcatgctgctctccgtccttggagttagaaacatggctatttgacaactcaagttcgcaactccaaaaaccacctcggtgtcaagttaaaattttcttaaggaaatgcagtgattggttcaacctggatttggtgcccatccttggaccaaacaatgatccagggtgctgggttataagtgaaccacttgagttaggtaactgtggccaatggtgtagggggtctctaagacagtagaagcttcttttcaagccaccactgtgggctgacaaagrccagatgtcaattacaatttttcatcacctatataattgcttccaaagaaaaagatcaaggcatttaaattttcagtagggcaataggaaagaaagctgcctacgttcaaattctggctgcataacttattagctgtgtggccttggacaaattacttaatgcctcctacttaagtttctcatctgaaaaattgtagtaataatgttacttacttattgaattttgaaattcaatagccccaaactgcatttcgccttcttt

SEQ ID NO: 537447 - DNA, 624 bp, Homo sapiens
gtcctcaaggatgactagaatcaagttcaaatgctgccaggagtcccgccctcggccccaatttctattatttctggcttcatgctttcatgctgctctccgtccttggagttagaaacatggctatttgacaactcaagttcgcaactccaaaaaccacctcggtgtcaagttaaaattttcttaaggaaatgcagtgattggttcaacctggatttggtgcccatccttggaccaaacaatgatccagggtgctgggttataagtgaaccacttgagttaggtaactgtggccaatggtgtagggggtctctaagacagtagaagcttcttttcaagccaccactgtgggctgacaaaggccagatgtcaattacaatttttcatcacctatataattgcttccaaagaaaaagatcaaggcatttaaattttcagtagggcaataggaaagaaagctgcctacgttcaaattctggctgcataacttattagctgtgtggccttggacaaattacttaatgcctcctacttaagtttctcatcygaaaaattgtagtaataatgttacttacttattgaattttgaaattcaatagccccaaactgcatttcgccttcttt

SEQ ID NO: 537448 - DNA, 519 bp, Homo sapiens
gctgactgtgtattgaagcagtcctttgattttaacagggcaaagctgtatccaagaccccaaactgaggaactgccatggggcacacatgaaaatcacacacagctaatgtatctctcaccctgaaccagtgatccatatccatggctgcacattaaaatcacctggggagcttttaaaattcccaaaacccaaactacaacagacctgttaaattggattccctggagtgggacccaggcagcagtgttgtttaaagctctccatgtgattatattgtgtggtcaaggctgmaaacccactgctttaaaccagtatcttttgatgacctagttgcaaataatttctcaaataaatgtaaaatgtttgctgctgaattgtaggctttccgtcttatttgtggtacctacttactatctttgcacaaaccgatctctactgcttgttttattcctggatcaaccccattccatgggttttgagggcattttatgtgcaggacagtgtgctaggtgccat

SEQ ID NO: 537449 - DNA, 587 bp, Homo sapiens
accatatatgtgtttgctttttaattattttaagtatgacgcaaaggcttaaatgaatatattatttcactcagaaatgtgagaaattctaaaatttaggtgatgcagctagctgtcttctttctctctatcaatgtttaatggtaatttcttgctcttttaattccctaatgaattaatcctacaaaagaagtaattgcttttaaaaactggattatcgtaactttgtcctttcatggattcaaacatataattcatcatcattccrtaagtatgaaatttcagaaaatgctattagcaaacttaaaacaaataggtgtaaaccttatcagtgttgtgacatagggttggcttttggatttcatattgaagccaacagacctagtaggaaaatgactgaggaaatattaataccttagcacaccttgcatttcatgagcatttcaaccaaaggaaactcctaagagaaagtgttgaggaaaacctggctgcttctgaggagctggagtgtgatttcctctcagtaagaatatgagtagatgatccatctccctttcctctgtgattatcagggaagtataagaggc

SEQ ID NO: 537450 - DNA, 587 bp, Homo sapiens
accatatatgtgtttgctttttaattattttaagtatgacgcaaaggcttaaatgaatatattatttcactcagaaatgtgagaaattctaaaatttaggtgatgcagctagctgtcttctttctctctatcaatgtttaatggtaatttcttgctcttttaattccctaatgaattaatcctacaaaagaagtaattgcttttaaaaactggattatcgtaactttgtcctttcatggattcaaacatataattcatcatcattccgtaagtatgaaatttcagaaaatgctattagcaaacttaaaacaaataggtgtaaaccttatcagtgttgtgacatagggttggcttttggatttcatattgaagccaacagacctagtaggaaaatgactgargaaatattaataccttagcacaccttgcatttcatgagcatttcaaccaaaggaaactcctaagagaaagtgttgaggaaaacctggctgcttctgaggagctggagtgtgatttcctctcagtaagaatatgagtagatgatccatctccctttcctctgtgattatcagggaagtataagaggc

SEQ ID NO: 537451 - DNA, 520 bp, Homo sapiens
ttctacttttaaatagtacttacaagatcatacgtcacctctgagcttacgtctctctttccccattttctcccctccatcctgcagaaatggaactttaaattctgatccaggagaaccagtagcccacaggcagtcctttgacctcctgacctgctatgcatcctctgccctgcagcttctcacatccccaggtggaaatgctgtgccccttcatccataccgtggcacttcctcactggaggtcacctctcctgtgcatgktcacattctgcctgtctgttgagaggctccgttcttcgctgcgttctgcttacctggttaagccacaaaaggttctatgcttagactagacgtgggatttaaaagtttccatgttcgtgtacaggagtgtacaaaatatgcatgagcaagtggtcacagtcatagacacaccgtgccttggggggccccaggtcataagatggtgttctctgtatttcacctgacgcctttggttttgttgctctgtgagaatgag

SEQ ID NO: 537452 - DNA, 520 bp, Homo sapiens
ttctacttttaaatagtacttacaagatcatacgtcacctctgagcttacgtctctctttccccattttctcccctccatcctgcagaaatggaactttaaattctgatccaggagaaccagtagcccacaggcagtcctttgacctcctgacctgctatgcatcctctgccctgcagcttctcacatccccaggtggaaatgctgtgccccttcatccataccgtggcacttcctcactggaggtcacctctcctgtgcatggtcacattctgcctgtctgttgagaggctccgttcttcgctgcgttctgcttacctggttaagccacaaaaggttctatgcttagactagacgtgggatttaaaagtttccatgttcgtgtacaggagtgtacaaaatatgcatgagcaagtggtcacagtcatagacacaccgtgccttggggggccccaggtcataagatggtgttctctgtatttcacctgacrcctttggttttgttgctctgtgagaatgag

SEQ ID NO: 537453 - DNA, 498 bp, Homo sapiens
agaagactccccgattttccccctccatctaaaacrtagcgctcagccacagttctagttgcatgcttaatgtgttggtttctttacctaagctaagctgcgggaagttaggcagcacatatgtttatttactcagtctcacggcattagcacctggaacaacaccaggcagtgctcacttgctcaggtttgttaaacagtgactctgatttttgtgtctttgtcttgttgccagattaagttcttgtctgtggttttatggccagaagaggcacacataaatgaatgagtactctgcctttaactcccttcatactttctgctcttttccttctgtccaatttattaagcacactgcatactatgtgccatgtcatgaggttcactgggtgacccccatgggaccatgtgactgatttgtcctctgaaagccagtgcttgctgggctggggagaagccagttgcacaaaaggttataacataaggcaacaggtaagt

SEQ ID NO: 537454 - DNA, 545 bp, Homo sapiens
cctcttatccttctggcctcagcacagacggcacttcctgggagaagactccccgattttccccctccatctaaaacatagcgctcagccacagttctagttgcatgcttaatgtgttggtttctttacctaagctaagctgcgggaagttaggcagcacatatgtttatttactcagtctcacggcattagcacctggaacaacaccaggcagtgctcacttgctcaggtttgttaaacagtgactctgatttttgtgtctttgtcttgttgccagattaagttcttgtctgtggttttatggccagaagaggcacacataaatgaatgagtactctgcctttaactcccttcataytttctgctcttttccttctgtccaatttattaagcacactgcatactatgtgccatgtcatgaggttcactgggtgacccccatgggaccatgtgactgatttgtcctctgaaagccagtgcttgctgggctggggagaagccagttgcacaaaaggttataacataaggcaacaggtaagtgctct

SEQ ID NO: 537455 - DNA, 458 bp, Homo sapiens
aaatagacaaaatgtggcctatccrcagaatggaatatgaatcagccttaaaaagcatggagattctcacacatgctgcaatatggatgaaccttgcggacatggtgctcggtgacataaggccatctaaaaaggataaataactaaacagttccacttacaagaggtacctagagtaaacgagagtggtgctttaccagggcttggggcgtgggagtggaaagttggtatttagttggagtctggggagacgaaaagttctggagatgcatggtggtgatggttgcacaatagcgtgaatgtgcttaatgccatcaaactgcacacttaaaagtggtaaattgtatgctctgtgccttgtgtcacaataaaaaatgctctagattccatttgctaatatgtaggacttgtgaaaaatatgcatatacaatatatattatgggcaccactggactata

SEQ ID NO: 537456 - DNA, 649 bp, Homo sapiens
aattatttaaagacaaagtccataggtgtccccagtgagacgggactctgctgccaagcctccggcgggtcatgcaaacagtggagggcgccgttcctggaacagcagtgccccagcagctttaagcagtaggagggataaaagcaggagtggttaaagtgaaatggcagagctcattaatcaaattcgttcagttttattgattgattgagatggagtctcgatctgtcgcccagcctggagtgtactggtgtkatctcggctcactgcaacctctgcctcccaggttcaagtgattctcctgcctccgcctctggaggtgggattacagtcacgcgccaccacatgcagctaatttttgcatttttagcagagacgggatttcatcatgttggccagactggtctcagactcctgacctcaagtgatccacccatctcggcctcctaaagtgctgggattagaggcgtcagccactgcacccagccaaatttgttcagttttaaattgcatgtgtgtgtttgtatgtatgtgtggcttctcagtaactgcaccagcatgatacatctgtgtgtgtgtgtgtgtgtatgtgtggcttcttagtaattccatcagcatgatacatccctgagccattcctctggaaaat

SEQ ID NO: 537457 - DNA, 651 bp, Homo sapiens
tgcctctactctgttgttcctgaaccatcacttactttgtgtccaagtttgctctaggcattaggactagaacagacacaaaaacctctgccttcttgaagcttatattctcaaagtgtgtggtttacctacagaattctttagctagatgtctggggaatgtttcatgttttttgcttgggttttcggtttgggcttttgttaataaaatagaagggaatggaagatcatttctgaaattttatattattctcttacctaaaatttcaatagataacagamaaggacaaaaaaacaaataaaaaataaaataaaatttcaatagagctgacagatggataaatggtcattatattgagaaccctcttccgaacctatcacagggacagaaattccccccaaatttgctgttttatgaaagtcctcatattgcaagcttaccttttggaacaaaggtgatggataatatatcgatggcacataacaagttagactgaaataatggaaaaatgtaagtagctatggctgcatgcagagtgggaccatagggtttgcggtatgggaaaagaatagggtagagagtgaggggtgggtttctgagcaactgggaaaagcatgcggacatgaagaggagctggaagccaagggcaa

SEQ ID NO: 537458 - DNA, 540 bp, Homo sapiens
gaatactagaagcatatgctggtgggggagatgcaaagagtagataattttcctgctctgtacagaatcaaggggttccaaaaaagcacttctctgatctcccttctrtctttccctctttacttcaatagaagaaaattcctcctatcaccaaattggtttctttcacttttgtctcaggaactctttaaactatgccctatgtcttaaagagtttaaaatatcacatctgcctaattcatgcctctcgcttctgtgtctacttcaaggttccctttcttctttttcctacattttctaaaccaatgcatgggttaaagaatgttaggctgtaacccttctgctaaaagggagaacgaatgagacaatgaaatggactgtcatctttggaataatgaagagcaaattgcaacatagttccaaagtatagcatacaagtatttgattgttttaaatgctcaagtaaaatgtttgaggaaaaaggtgatgtgtgctaattaattatgataatcatcaaagcactaataatgacagagaagc

SEQ ID NO: 537459 - DNA, 540 bp, Homo sapiens
gaatactagaagcatatgctggtgggggagatgcaaagagtagataattttcctgctctgtacagaatcaaggggttccaaaaaagcacttctctgatctcccttctgtctttccctctttacttcaatagaagaaaattcctcctatcaccaaattggtttctttcacttttgtctcaggaactctttaaactatgccctatgtcttaaagagtttaaaatatcacatctgcctaattcatgcctctcgcttctgtgtctactycaaggttccctttcttctttttcctacattttctaaaccaatgcatgggttaaagaatgttaggctgtaacccttctgctaaaagggagaacgaatgagacaatgaaatggactgtcatctttggaataatgaagagcaaattgcaacatagttccaaagtatagcatacaagtatttgattgttttaaatgctcaagtaaaatgtttgaggaaaaaggtgatgtgtgctaattaattatgataatcatcaaagcactaataatgacagagaagc

SEQ ID NO: 537460 - DNA, 606 bp, Homo sapiens
tcccacacagtcagtgaaatcagcagcaaccgcagacaggtcattgtccggcaactgagggagccacttgaagggacctcaccacatcccaggggctttgaaatcaggagctcaagtttggttctgctgagcaaaccaaaccagctatttatagtacttatctgacttgaaggaaattagaccaggcataaaagaaatgaggcaggtagtgatggaatagatcccccatctgctgtctccacagtacatcacggcacagtgatgtactgtacacccggaaattcttcagggcacgggatctgtcctgggctctgctgtgtcctcagtgcctggcacctaacaacctgtgctcagtaagcatttgttgactgactgatggattaaataaagtccaaagcaatcttcctcaaagtattgatgcataacccattactgggtatatacccaaaggaacagaaatcattccattataaaracacatgcatgcatatgttcattgcagtgctattcacaatagcaaagacgtggaatccacctaaatacccgtcaatgacagactggataaagaaaatgtggcacttcggatagacattatggaatactatg

SEQ ID NO: 537461 - DNA, 623 bp, Homo sapiens
tataccaataattcaaataaaactgtagtatgagaaacctacatcaaaaatgtatttttttgtctttgatgtttcctaggcctgtgctcctttatatcactggagaactcttaaaccgacaccagaaaaggacccagttggcacctgctatgtagcaattcagaacttcagcgcctatgccgagttctctccttgccggaacagtaagcaacttttattccttgaaactgacattagctcaagtgcttttctatcgtagacaggagtgcaggtaggctcaaaacaccattgataacttacagggttgcaaggaaaaagcttcgggggtaggtaaagatttttgtcagccttacaggtgtcttgatgtgacagcaagtcaaaagcgtggaattctactgatcttctgtgttttagaacatttctgatttaagatattttgcagaattgattggttccttattttaggccataaggtgtcagttgctgttcaaaattcacgttccgtgtcctaaagaatgctgactgcccactttayttgtttattgccaaaacggtgttagctagcatggttggacctgggcatatgttcaacttgagatttctgtctggcttgtgttctcaat

SEQ ID NO: 537462 - DNA, 549 bp, Homo sapiens
gagtttcatcctcattagttttaatagagttccagatgtattttattcctaacggaataaatgtatgatttatgtctatccatgtcccaaatgtcagatacagtagttaatgttaaaagaaataaaaatggaaaaaaaaacttctatccatttctgttttttatttatttttaccactctcaggccaacttatttttagttttttttttttgacggagtctcgctgtgttgcccaggttggagtgcagtggcacaatctcggctcagactatagacgcctgccaccatgcccagctaattattattattattattttgtatttttagtagagacggagtttcaccatgttggtcaggctggtctcgagctcstgacctcaggtgatctgcccgccttggtctcccaaagtgacttctatttccttaatattttgttctaggaacagagcggaaagctgccaggtttgggccaacaaagcgaataaagaagctgaaaacataatgggatgtcttccttagagagctaactcctcggcagaccctgtctcc

SEQ ID NO: 537463 - DNA, 549 bp, Homo sapiens
gagtttcatcctcattagttttaatagagttccagatgtattttattcctaacggaataaatgtatgatttatgtctatccatgtcccaaatgtcagatacagtagttaatgttaaaagaaataaaaatggaaaaaaaaacttctatccatttctgttttttatttatttttaccactctcaggccaacttatttttagttttttttttttgacggagtctcgctgtgttgcccaggttggagtgcagtggcacaatctcggctcagactatagacgcctgccaccatgcccagctaattattattattattattttgtatttttagtagagacggagtttcaccatgttggtcaggctggtctcgagctcctgacctcaggtgatctgcccgccttggtctcccaaagtgacwtctatttccttaatattttgttctaggaacagagcggaaagctgccaggtttgggccaacaaagcgaataaagaagctgaaaacataatgggatgtcttccttagagagctaactcctcggcagaccctgtctcc

SEQ ID NO: 537464 - DNA, 283 bp, Homo sapiens
agcagcttcctagttgtcagtgagctaagttcatattttccactttcagtttccagatttggtattatgtgaacataacaccaacatacatgtgaccaatgccctaccaagagccagcctcataatggacaaaaaggaggagaaagtggaagagatcgtactgcttccattttcctggccagaatggtgttgctgtaagggtttctaagcaagtraggtttagaagacagaagggggttagactgagtgctgaatacctagtacctgcctcagacacatagca

SEQ ID NO: 537465 - DNA, 630 bp, Homo sapiens
ggctacagtatcaggaacactgaaaaaaagttactgctttgaagtttttaatttcttacataggactcactttctgcctttgatactacacttgagtctaaacaaatatttacttaaataaccagttaatagatttttggaaatatttaaaaacatattgctttgcagttttagtcaaatttaagtacagtagggtggagaaaataccttattcactattttttcttccaaagactggcataatactcaatgttaggtgttgagagaccttcaactttaggcartatttattaatttgatccatataaaacataaaggcaacttcttatctttttttcaggaattatagttttgttagacttagaaatattactgaaatattctcctttaaatcgaagaagtcctgtaagataaattattacttagagagaacattataactttgtcataaagataggataagaattaactaattatcctctcttttctgaagactgtttctcatggcaggggaagatcaaatattagatagacagttggactgtttgcctttttggctcgagaacaagtgctaatgtctcgcaggaggctgagcaatgttcacaagccatccatggtatagtttatgac

SEQ ID NO: 537466 - DNA, 589 bp, Homo sapiens
aaatgtacaaatatattgtctatattttyttccatggctcttgttatgacaaaatccaaacataagaaaagaggaaaatatttgtgagaaatgaaagaagtattattggattcacagacccttcacaatacccaggaaagcacactgttagaattgcatttacttcacctcctgttgtgtcacatacgatgtcaagaagatatttttatgaagtaagtcatatcattttcaccatattactacagttttcctgaactgctcaatgggaatgttttaattctcacatagactttctaagtccatctgtgaaagtggaaataggctagtaaaagtgccaagaaacaacacctgctcagaaacatgagagccaacctgctcctccctgcccatgcccaagttcagagcatgatctaacagtttgagtgttatcacattagaagcagacaagcagtttacatagaccaaactaggcagtaggtaggataagagcaattggtcattggtcactcatggacagatttcaaaagcaaaaagttaagagatgtatcacacaggtgattctgtttcaatagagcccattcttgctgaa

SEQ ID NO: 537467 - DNA, 589 bp, Homo sapiens
aaatgtacaaatatattgtctatatttttttccatggctcttgttatgacaaaatccaaacataagaaaagaggaaaatatttgtgagaaatgaaagaagtattattggattcacagacccttcacaatacccaggaaagcacactgttagaattgcatttacttcacctcctgttgtgtcacatacgatgtcaagaagatatttttatgaagtaagtcatatcattttcaccatattactasagttttcctgaactgctcaatgggaatgttttaattctcacatagactttctaagtccatctgtgaaagtggaaataggctagtaaaagtgccaagaaacaacacctgctcagaaacatgagagccaacctgctcctccctgcccatgcccaagttcagagcatgatctaacagtttgagtgttatcacattagaagcagacaagcagtttacatagaccaaactaggcagtaggtaggataagagcaattggtcattggtcactcatggacagatttcaaaagcaaaaagttaagagatgtatcacacaggtgattctgtttcaatagagcccattcttgctgaa

SEQ ID NO: 537468 - DNA, 466 bp, Homo sapiens
taactaggtgctctttaatgaatcttcaaacgtcaagccatgcttgcattcccaaaataaaacctatctaatcatgacatattatttttaatatattactagattctccttattaatatttgattttgagtgttcatatctagttttataagtgcaattsgcttattattttttaatctgctcctacaatttccatgtcaagatgatattaacctcataaaatgaatttggtagctttactcttgttatataatctgagaagtttgtataagatattcctggttaatatgctaaataatactaataaactagcttccaaaaactgatctgtgtctggtgttttggataggcaagtggaactttttaacaactttgatacctcttccttgttatcattttctctttgagtcactgttagtttgcttatatttttcctaaaattgtttacattttttctgagttttga

SEQ ID NO: 537469 - DNA, 639 bp, Homo sapiens
tgaggcagccttatggaggtttaatgtgtcaagagaccaagacctacaaaaaaaatacatgagtaatcttggaagtggatcctccccactagtcaaatcttcatatgggacagcagctcagactatcaactcaactgacctctggagcaacatasaggcagaggcacccaggtgacctgcacctagatttctggctcatggaagtgtaaaataacaaatgttagtttcagctgctaagtttggggataattctttatgtagaaatagataactaatatcaagacaattgaatcgaaaaagctggctttccagtgttaccaggagataaatcagggtttggcaaaccattccttgtgggccaaatctaccccatatcctctttagtacagctttcaaactaagaattattttcaccgttttaaaaggttgtaaaaaacaaaatgaaacaaaacaagaatatttaacagagactacgtttggacagcaaaacctaaagtatttactatctggccttttgtagaaaagtttgctgacccttgagagaaaccattgcacttcccagaggacagccaatccttccaaagtcattggaaggaactgcagcctgtaggacgcagttgttcgatgctccagatggtt

SEQ ID NO: 537470 - DNA, 619 bp, Homo sapiens
ctgctaagtttggggataattytttatgtagaaatagataactaatatcaagacaattgaatcgaaaaagctggctttccagtgttaccaggagataaatcagggtttggcaaaccattccttgtgggccaaatctaccccatatcctctttagtacagctttcaaactaagaattattttcaccgttttaaaaggttgtaaaaaacaaaatgaaacaaaacaagaatatttaacagagactacgtttggacagcaaaacctaaagtatttactatctggccttttgtagaaaagtttgctgacccttgagagaaaccattgcacttcccagaggacagccaatccttccaaagtcattggaaggaactgcagcctgtaggacgcagttgttcgatgctccagatggttgacttttaaatgagccatcttctgcagtctgtgccaaatattttgtgtattcctgtgcacaggagtaaaataataattatcaaccatctctaattatgtaacgttatccagataaagaatgcttaaagagagagaaccaaagcatcttatgtggcaatgcatatattgaattttattttcaagtgtatatttcaattaatgttcttagaa

SEQ ID NO: 537471 - DNA, 485 bp, Homo sapiens
cagtaactgatggttatggtgattttcttaaatttcagccagccttctcttcagtcattttcttcacctgacttctaaagttattgttgaggaacactgttttgagcttcctgtcacagttcaataacaaaggtaaagcactattctaggaattagaacaaaccatctcccattccacctattgcactcattccagggttctcttttttaggaatttctatgactacaacttctgcggtaggtaacagagaggccacctcagcagcatgcagtaaagcagttctcacaatgtttgttgagtcaatgattcctttttctaccatrttcacagaatctccaatcatagcatcataaccaacttcagaggaatcttgcataattttttcagctatcaaagatccttcaacacttgcattcttagcattggtcattgaaggaattttgagtgttcttttaataatttctataccacttaaaaaaatcgt

SEQ ID NO: 537472 - DNA, 600 bp, Homo sapiens
ccaccactttagactaatgttaggagtattattgtccaaaatggcacttgactcaagtgagagaatgcccagcagctttctcaaagggtcagcaaatgaaaggggttctcttttcatatctcaaaccttccaagattgccagcttatttaggtggtttatttgccactgtatgtcaaagaacctgaatatcaactgtaatatatgtgcacacatatatttataaacacattatatacattggaatataatatgtaagtgttagagattataatctaaaaacagagtagatgataaaaaaagtcccaaatctgatatttacatgctattcaaccttgagcatgtcccttaacctctctgaatctcagttttctcattcacactacaaaactcaccaagtgcccctctgagggtagtttttygatccagggaggtcagaaaatgtaaaaatgtattataaataataaggtgcaatattaatgattgcattaaattctaaagactcaacgagaaaaagagcttcaaagtttactgaaaattaataatagtgtagaatctgtctcaataatgtgtttttgctggacttatgggccaatagtaga

SEQ ID NO: 537473 - DNA, 542 bp, Homo sapiens
aactcctgctgctgcaccacggcgtctatggggaccctcgcctttgattgatatgggccccctttccttatcatcaaagatcaggaccgcaagtcccgccttatgggacttgaggccctcaagtctcatataatggtrgcaaatgctgtagcacatgcgacaagaacatcacttggaccaaaggggcttcataagatggtggtggataaggatggcgatgtgactgtaactaatgatggggtcaccatcttaagcgtgatggatgtcagtcatcagattgcccagtttgatggtggaaatgtctaagtctcaggatgatgaaattggagatggaaccacaggtgtggttgtcctggctggtgccttgttagaagaagcccaggagttgccagaccgaagtattcatccaatcagaatagcagatggctatgagcaggctgcctgctttgctgtggaacacctggacaagatcagtgacagcatccttgttgacataaaagacaccaaacccctgattcagactgcaaaaaccacgctgggct

SEQ ID NO: 537474 - DNA, 542 bp, Homo sapiens
aactcctgctgctgcaccacggcgtctatggggaccctcgcctttgattgatatgggccccctttccttatcatcaaagatcaggaccgcaagtcccgccttatgggacttgaggccctcaagtctcatataatggtggcaaatgctgtagcacatgcgacaagaacatcacttggaccaaaggggcttcataagatggtggtggataaggatggcgatgtgactgtaactaatgatggggtcaccatcttaagcgtgatggatgtcagtcatcagattgcccagtttgatggtggaaatgtctaagtctcaggatgatgaaattggagatggaaccacaggtgtggttgtcctggctggtgccttgttagaagaagcccaggagttgccagaccgaagtattcatccaatcagaatagcagatggctatgagcaggctgcctgctttgctgtkgaacacctggacaagatcagtgacagcatccttgttgacataaaagacaccaaacccctgattcagactgcaaaaaccacgctgggct

SEQ ID NO: 537475 - DNA, 492 bp, Homo sapiens
tacccaaatattcccctgccgcataaggtttggaatcatggagtgatactagtaatttagccttaatacagaaaatacaataggatggaaggtattcatattcttaatccattccctttcccatttcttcaacaaatacctcagagtttcccttttcttcacaaacccctattatgaactgaatgtttatgcccacccaagccctaactcccactgggactgtatttggagatactgcctgtgaggaggtgataaatgtcaaatgaggtaataaggtggggccctaacccaatagggctggagtacttagatgaagaagagacgtcaaagctctctctgtcttccatgtgaggacacacaagaaagcaaccatctgccagagacccctcascagaaaccacataggctggcaccttgatcatgacttctagccttcagaagtcctcctctcttccttttgcgtgtgcattgtccatggcttccttatgtctg

SEQ ID NO: 537476 - DNA, 632 bp, Homo sapiens
aatgttccttctctgtatattttattcatacgaatccgttattggcccatcccttcctgaaagagctgaaatttgcccttraggcatcagatggagtagtcagattgtcaaatgtgtcccctaattgaagtgaacattggcacaatatttgtcgactggaaataaacagccccagtgaagtagcaggtttatcaccttcatgcacttgttcaggtcttgctgagagttgacggaaacacgcagagagagaagctatttctccaggaaatgaaaactttggcggatcaggggaaagggatctttcttagactttgaatctcctaaagccaagaacagtggcccagggcagtcagcagggcagtcagcaaggtgaatttcagcactcctctgctgtcctttcttctcctgctcccttcagggggcctcttcctccagcacccaagggcccaggatcagcctgctttctctcctccatcagaccctcttttaggttgtccctgctatcagagtgtaaggaacaaaagatacaggtgagatgaagttcagaaagagactcaaatgacctcctctgtctcttcccaatgcctcatgaatcctacaacctcagaagctctagttctgtgataccattc

SEQ ID NO: 537477 - DNA, 537 bp, Homo sapiens
tcatttgctgtacaaaaataaaagttttcaaagcagttggaaatataattgtgtatacttcatttgctgaactgcctttctagggtttgtttggccctttagagtgagagaatgggagactttcagcgaggtgaccgtggaggtttccttcccaccgcccaccccccaccagtgtcccctcccgggaagatggagtggtttctgagtgctggatggttacaggcagggagaacrgttgggcaccagctcctgaatcacaatgccggggatggaggagcaagaaggctctgtctggtgtctgaacaccccggaggcagggctccgggacatcttcttgatgggtggatatttactagaagtcaatagcacagtgggctttggttcgatgctaatgaggccaaggttatccaagggccaactggtttccttctgttctctctgctataaactgcctgccgtcagcggccagttctctcacaaatgcagaaaggggggtaatgaaatgggcaggaggcttctcccagacagatggctccc

SEQ ID NO: 537478 - DNA, 497 bp, Homo sapiens
agacaacctactttggtttctgtgtctggtaccggggtatcaacagagataaaacactgagtgacagggaagcaagatacagaataacacaatctattgttctcccattgactgtaagtataatgggaaagttagcgagtcaccgtaatgtcatggaccgctgtgaacttgggagaactcaaggatcagaaagtaacatgaaacaagaagggaaatgaagataatattgggttactgaacattctcaaattgtactgaaacgcatcccatccctttggagggggcatgtttttgacaaggaagacaatgggaagaaactggtggctgtaacaatatcaccattttcttttactacaggccgtaatgtgaacttcttagaagacaccttctttcaccacrgctttgttgtacagtctattgaggaacccagagaccaaagtcactgccttgttccagggctgtctaaaaccaaggagcctggctctcccagccaatga

SEQ ID NO: 537479 - DNA, 517 bp, Homo sapiens
gttcaaaatttgcttctttgaggaagactaccttggttgccccccgatccttagattattttcctaactctgaacttcctaagcacatgtatttcacatctaaatttgctaatgcattgctaaacatgtcctcaatgtaacttgtgcatatagtttttctcacaagacaggaaacgtatttcttcttcctttgcctatgaacttctttaagttggatttggggctttaacacatcccctcaaacagactcaacccataaagtattaacgaatgatgcagagctgactatgatttcatggggagatggaggagaaagctacatgagaccacatgtaccaagaccacaaagaccaggattttcaccttctctcctcaaggtcctctttagccatggacctctgggtctctttctgcttctctttctctctgaactcttccccaartattcactgaatacctccttctttctgttacaaagaaattcagttctcttctgaattttccagttaaaggcacc

SEQ ID NO: 537480 - DNA, 615 bp, Homo sapiens
ccttttcttcccttgcttcctcccgggctgagcacaaagcaggttctcaatagacactggccagccggtcaggattctcctgtctatttccatcacttttgcatggcagttcgttcttaggagacccatgaatccgtggacaaacaaatgatggagccttagtatacatctatgttttaagaccacatgtgttttcatttcctcctttaaaggcccctgattgtaggaaccatccagcaagcataacacctctgcctgtgtcttaatcagatgcatcctgcacctcctgggctgaaactcatgcccctgcccactgtcttgygacaggctgtatggaagaactcagagagtccttgcctgcttctgctgtgtccatattccagtcccttcctgataattcgctagccttctggaccctagggtcttgttccataaacccgtggtgctcaccctgaggctgtgccaggccctacttccagcctgtctggctctgtgggttatacctgttcccaagccttgcctgcctcttgcctatccagtgctcttccctctccaggcatccaatccttacctcttctgcccagacctgccctgctgaggcccctgcctggcagg

SEQ ID NO: 537481 - DNA, 617 bp, Homo sapiens
tgccttttcttcccttgcttcctcccgggctgagcacaaagcaggttctcaatagacactggccagccggtcaggattctcctgtctatttccatcacttttgcatggcagttcgttcttaggagacccatgaatccgtggacaaacaaatgatggagccttagtatacatctatgttttaagaccacatgtgttttcatttcctcctttaaaggcccctgattgtaggaaccatccagcaagcataacacctctgcctgtgtcttaatcagatgcatcctgcacctcctgggctgaaactcatgcccctgcccactgtcttgcgacaggctgtatggaagaactcagagagtccttgcctgcttctgctgtgtccatattccagtcccttcctgataattcrctagccttctggaccctagggtcttgttccataaacccgtggtgctcaccctgaggctgtgccaggccctacttccagcctgtctggctctgtgggttatacctgttcccaagccttgcctgcctcttgcctatccagtgctcttccctctccaggcatccaatccttacctcttctgcccagacctgccctgctgaggcccctgcctggcagg

SEQ ID NO: 537482 - DNA, 417 bp, Homo sapiens
tcggaacctgtaaatgtcggggtgggggagattagccgaccttcttcaaggaatgaagaaaacagccgctctctgtagagcctgatgtgccaggtagggccacagcaggctttccagatcttctctgggaaagaacaaagcataaataagtataaatacaaattcctttcattctcttgggctgtggttctaactctggactgtagcatttgggtcagggaatgcagggtcttggtagttattcacatgttgcacaggatgtctccaacgtggctgggaggtgaagttgctgaatcgttcaagtgccatctcttatttcatctggaccccgttgtattttgggaggaaggccaagccctgagcaccgaattaaacctcctgtgacytggcctccctccgccttctcggctgtgcttg

SEQ ID NO: 537483 - DNA, 648 bp, Homo sapiens
gtggaacttgctccaaatagcggtgcccaggtacctgcctggagattctgattcctgatgtctggcaagaacctgggcacctcgtttttatcaagccccccaggcatctcagattcaaacaaggaaaaccactgcagactaaaagtcccgtgaaactgcactagactaaaagccccatgaaagtaccctcaagtgagtctcaggggaactcatggtctccgctgctgaagggatcaagtctagctgagatgcacgratttgttccaggccatgtagttactgaggggcctggctggaaggcaggtgtccggagccaaatccgccacctcccagccctgcagaaggcctctctgcctccctgcaacctcccagccctgcagaaggcctctctgcctcccttcctctcccttcctccacagagccaaatccgccacctcccagcactgcagaaggcctctctgcctcccttcctctccctccctccaaagccaaatctgttaccgcccagtcctgcagaaggcctctctgcctcccttcctctctctgcctcccttcctctccctgcctcccttcctctccctgcctccagagcctggccagccgacctcccagctccaaggtctccctcctggctggctgtgagatggg

SEQ ID NO: 537484 - DNA, 648 bp, Homo sapiens
gtggaacttgctccaaatagcggtgcccaggtacctgcctggagattctgattcctgatgtctggcaagaacctgggcacctcgtttttatcaagccccccaggcatctcagattcaaacaaggaaaaccactgcagactaaaagtcccgtgaaactgcactagactaaaagccccatgaaagtaccctcaagtgagtctcaggggaactcatggtctccgctgctgaagggatcaagtctagctgagatgcacggatttgttccaggccatgtagttactgaggggcctggctggaaggcaggtgtccggagccaaatccgccacctcccagcmctgcagaaggcctctctgcctccctgcaacctcccagccctgcagaaggcctctctgcctcccttcctctcccttcctccacagagccaaatccgccacctcccagcactgcagaaggcctctctgcctcccttcctctccctccctccaaagccaaatctgttaccgcccagtcctgcagaaggcctctctgcctcccttcctctctctgcctcccttcctctccctgcctcccttcctctccctgcctccagagcctggccagccgacctcccagctccaaggtctccctcctggctggctgtgagatggg

SEQ ID NO: 537485 - DNA, 635 bp, Homo sapiens
gcatggacctggacccaccccgggtcccagttgrcccgcttcccttggcaggagggcccggacactcacatcttgtcacaaccagtgctgatgggttttctccccacttgagtgcttttggcatgggatgatgaagcccctaaggtcaggtatttcatttcttcttgtccctggtggcaaaggacatgcagactgggtgaggttgatactgttttcttggtctgaggacatcctcttaataagtacacctgtggatttttgcctaagggtgcattttctaaatgcttacctgcccagctcagttgacactcagacggaccaggtgggtgagctggtgactttgtcattcacgtgctcatggctgcctgtggctgagtttccctccctccaacctggagctctgaagctgaagcatctctgcctggcaatttcctgtctgggcattgtgtaggaggcgcttcctagaacagggtgggcagaagggcttggaaacaggagtggctcggtcaaccgtggactagaaaaagctgcatttcctgcagtggggcttgatattgtgtaggggctatgggatggtggagagggcgtgagtctgtgagcagaaggcgggggacctccagctttgctctccacag

SEQ ID NO: 537486 - DNA, 428 bp, Homo sapiens
gcaggggccatggctgcagccctgggggaggagggtgcaggcgccagtcttcactcaggctccagcagcctggctgtctcttactgttcacatgctggtggatggatgagcttgcagaccatcccaacacattcctttcttcctggaaacctctctagaggttctctgttgaccccagaaaaagctagaggtggctcaacacggcttgcatatctctgtgtgatctgatcatgtgcattctctccttttcccctccctcctctcacctcgtctttccttccctcccctcacctcctctttccgtccctcctctcacctcctctttccttccctcccctcccctcctctttccttccctcccctcacctcctttttccgtccctccyctcacctcctctttccttccctcccctcccctcctctttcct

SEQ ID NO: 537487 - DNA, 575 bp, Homo sapiens
ccgtgatggcccatttgctcagtgttgccccacacagcatctgccaacactgtgctttagtggayggcggtatttatggcgccttacacagtattgtcagatgcaggactgaccttgttctggaggacaactgaggcaacctctgctgtctcccctggctgccaccgccatgccatggcatcaacaccccaggaaggaaagctcctgctgcctgcagtccagaggatgcttgggattcctggtggtaaacatgctgagcttccccgctcatcctcccactaacggccaacagtctgggctttccttttctttgttctgtctcccaggtctatgaccttgcctttgagaatgcaaagtgaccataaatagtagggctcctgaaagattaaagaaggcaaacttctgaatattttgtaattacagatagataaatagatagatagataaatagatagatagatagatagatagatagatgacagatagagaggcagagagatgcatgtatgtgatatgcctcctaccttaaccatctcataaaaacacccgtggtagcgctacgatgctcagtgatg

SEQ ID NO: 537488 - DNA, 575 bp, Homo sapiens
ccgtgatggcccatttgctcagtgttgccccacacagcatctgccaacactgtgctttagtggacggcggtatttatggcgccttacacagtattgtcagatgcaggactgaccttgttctggaggacaactgaggcaacctctgctgtctcccctggctgccaccgccatgccatggcatcaacaccccaggaaggaaagctcctgctgcctgcagtccagaggatgcttgggattcctggtggtaaacatgctgagcttccccgctcatcctcccactaacggccaacagtctgggctttccttytctttgttctgtctcccaggtctatgaccttgcctttgagaatgcaaagtgaccataaatagtagggctcctgaaagattaaagaaggcaaacttctgaatattttgtaattacagatagataaatagatagatagataaatagatagatagatagatagatagatagatgacagatagagaggcagagagatgcatgtatgtgatatgcctcctaccttaaccatctcataaaaacacccgtggtagcgctacgatgctcagtgatg

SEQ ID NO: 537489 - DNA, 575 bp, Homo sapiens
ccgtgatggcccatttgctcagtgttgccccacacagcatctgccaacactgtgctttagtggacggcggtatttatggcgccttacacagtattgtcagatgcaggactgaccttgttctggaggacaactgaggcaacctctgctgtctcccctggctgccaccgccatgccatggcatcaacaccccaggaaggaaagctcctgctgcctgcagtccagaggatgcttgggattcctggtggtaaacatgctgagcttccccgctcatcctcccactaacggccaacagtctgggctttccttttctttgttctgtctcccaggtctatgaccttgcstttgagaatgcaaagtgaccataaatagtagggctcctgaaagattaaagaaggcaaacttctgaatattttgtaattacagatagataaatagatagatagataaatagatagatagatagatagatagatagatgacagatagagaggcagagagatgcatgtatgtgatatgcctcctaccttaaccatctcataaaaacacccgtggtagcgctacgatgctcagtgatg

SEQ ID NO: 537490 - DNA, 583 bp, Homo sapiens
aagatatgtgagattttttcagaattgaggatgagaaaactacaaaactgtaattcatacttytttttaatttaaaatttatttttttctgagacagggtcttgctctgttgcccaggctggagtgcagtggtgcattcacgctcacagccttgaacccctaagcttaagtgatcctcccgcctcagtcccccaagtagctgggaccaccagcacgtgcccaccacactggctaattcattttttatttttccatagagatggagtcttgttatgttgcccagggtggtctcgaactcctgggctcaagtgatcctcctgactcaaccacccaaagtgctgggatttcaggcatgaactactgtgcctggcccctaaactttctaattaaatgtttttaaaacaatatcaggtcaagtttgcgaaggttacactgagtttccatcgcaattgcaccgcctttggaaatggcttataagtcagctttccttactcatcaagcacccctgagtgtgcagagagagtgccaaggcagcctcgccagctgcaagtcacgtgagttcgcggctgccaaatggcagtgc

SEQ ID NO: 537491 - DNA, 583 bp, Homo sapiens
aagatatgtgagattttttcagaattgaggatgagaaaactacaaaactgtaattcatacttttttttaatttaaaatttatttttttctgagacagggtcttgctctgttgcccaggctggagtgcagtggtgcattcacgctcacagccttgaacccctaagcttaagtgatcctcccgcctcagtcccccaagtagctgggaccaccagcacgtgcccaccacactggctaattcattttttatttttccrtagagatggagtcttgttatgttgcccagggtggtctcgaactcctgggctcaagtgatcctcctgactcaaccacccaaagtgctgggatttcaggcatgaactactgtgcctggcccctaaactttctaattaaatgtttttaaaacaatatcaggtcaagtttgcgaaggttacactgagtttccatcgcaattgcaccgcctttggaaatggcttataagtcagctttccttactcatcaagcacccctgagtgtgcagagagagtgccaaggcagcctcgccagctgcaagtcacgtgagttcgcggctgccaaatggcagtgc

SEQ ID NO: 537492 - DNA, 549 bp, Homo sapiens
cagctggacgagagggacggatgagggtactacctgctcagggctgccttctttagcccttctcagaatgagagtcagtcttgtctgaatgtgcaatctttgaatgaaatcagattgttcctatttgtcattttattagcaactcattacagccatttctttgggattaaaaagagaagaaagaaggaacataagtaaaaagagtgagctaatggctcacccagaatgctgtggcaatttatggtgtcttgaatgaaatgacagaattgccataatgttaaatttaacatgttttattttagcaatatgatcatctgatcatatctccaagctcagccagcattacaaaagtaatttttataattgtaaattcattcactctaagatgcttcagaattactttagagatcacattaccaaattttcagcttaaaagtgactttatcctgtcatgtgtatcacttcagtgatgggagcagaatgggaatgtcttctgcacatagaaatggagtgaaygcctcgtggacttcaggctttcagagcacgaat

SEQ ID NO: 537493 - DNA, 468 bp, Homo sapiens
ctgtcttgggtaccaaggctctcctcaatgcctctgtccttctcccttttgacattgccaccaggacttaagaaggtcagggaggttgcccgcaatgtgcctgctgtaagtaagagtgtcccggctgtgaggaccaccatgtcgcatagatggggcctgctggaggtgctgctggcagatttgtgggcctaattctggctttggggaagggcaaagccctgttctcatgagtagaggggtcgcacagaatcctcagcgcgtatcctgctaattgctgtagcccctcctagtaactcttaataaacacgactggtcatgcacagaatgcaaaacccttttctctctgttggcagtttctcaggctgagaaaaaaacatcagtgtgggggaagatttgggacccctgtctgcatctacctggactctcattraacagatgatgtgatgaagcaatcagaaagcctggcca

SEQ ID NO: 537494 - DNA, 556 bp, Homo sapiens
taagttcctcaacttccaacaccgtggttgtctccatcctggaatgccaagtgtccagtgggtgatttccaaggagctcaccctctctgagtgctaagtcctgtgcaggcagagacaatctgcataaaaacacctcagagccagaaagacctgcaataartggctgacggaaattcacattttaaactcaacagggagaaacaataaaatgatccctttttatttgttaatatgattttattatttccaaatgtttgattataactacattcaaaaggaaacattgatgccatattaaagaatattaaaatatatgagaataaaaactacagtgccaaataaaccttgtttaattctcctgaatggaactcaggccaaggaaccccggaaaggggaggaggcaggtgtcttcagtttgcttctttttaatgaaatataactaaaaaatattagcttctttcaaatttatgaaagaaactgaattcaatttcaattgaattgcctgatagagcagtcgttattccttagcaatatctagtgtcaacagactacaaga

SEQ ID NO: 537495 - DNA, 556 bp, Homo sapiens
taagttcctcaacttccaacaccgtggttgtctccatcctggaatgccaagtgtccagtgggtgatttccaaggagctcaccctctctgagtgctaagtcctgtgcaggcagagacaatctgcataaaaacacctcagagccagaaagacctgcaataagtggctgacggaaattcacattttaaactcaacagggagaaacaataaaatgatccctttttatttgttaatatgattttattatttccaaatgtttgattataactacattcaaaaggaaacattgatgccatattaaagaatattaaaatatatgagaataaaaactacrgtgccaaataaaccttgtttaattctcctgaatggaactcaggccaaggaaccccggaaaggggaggaggcaggtgtcttcagtttgcttctttttaatgaaatataactaaaaaatattagcttctttcaaatttatgaaagaaactgaattcaatttcaattgaattgcctgatagagcagtcgttattccttagcaatatctagtgtcaacagactacaaga

SEQ ID NO: 537496 - DNA, 611 bp, Homo sapiens
tattcggatttttttcttgctgttttgagtttcttgtagactctggaaaatagtcctttgttgaaggtatattttgcaaatattttctcccattctgtaggttgtatgtttactctgcttgtcatttcttttactgtgcagaagctctttagtttaattaggtcccattgtcaactgtttttgttgaaattgcttttaaacattgagtcataaatccttagcctacaccaatgctcagaagagttttttataggttttttctagaatttttatgatttcargtctcatatttaagtctttagtccatcttgagttaatttttgtatgtggtgagatataagaatcatatttcattcttctacatgttcccctgggtaatatcagccaagcacaaatcccacagctaccagcgtaggtggctctttcctgcaagaaccacctcctagctggaagccaataggcacagcctattacaacatctgctggcaaaataacatagcatttgggaaggagaaaacttttatcgtatctcagctaacaccatacccacatcaccccagctaatcggaaggtcttgagtgtgttcacaaacccaatacattgctagtaca

SEQ ID NO: 537497 - DNA, 631 bp, Homo sapiens
taatctgtctaaatttgatgacacaatttaaaatgacatctttgtacaatggaggaggatgacagagatcagtaraaacagtatggcagtagcaaaataagtaaagcactgatgaagtgtctggatttcagcaaaggtaatttgtggtaaggagagccagcataaattgccctagtattgaatgttggttttattatgaaaagtccactttgaacagtaggttcatttctcattttaaaaattccatgctctaatgctgtggtggggagatgaaaacaatctttattgaagcataagtggaaattctagaattgtactgaggcatcctgacataaattccagtctgggaagtaatctaaaagttagtctcttacaaaggtgtttctatttaagcagaggccatacctaaaggaattttattattctaggagtgtgtttcataaaaatgctatttgaccaaatagggacatttggaagggggtttaataattgcatctttcacatacaacttttctttagaatttacaatttacccttagagtaaactctacatttccttagaatttacatttaaatagttcctgctttgcagcagataacatacctttttccctgtgtcaggatcccactg

SEQ ID NO: 537498 - DNA, 631 bp, Homo sapiens
taatctgtctaaatttgatgacacaatttaaaatgacatctttgtacaatggaggaggatgacagagatcagtagaaacagtatggcagtagcaaaataagtaaagcactgatgaagtgtctggatttcagcaaaggtaatttgtggtaaggagagccagcataaattgccctagtattgaatgttggttttattatgaaaagtccactttgaacagtaggttcatttctcattttaaaaattccatgctctaatgctgtggtggggagatgaaaacaatctttattgaagcataagtggaaattctagaattgtactgaggcatcctgacataaattccagtctgggaagtaatctaaaagttagtctcttacaaaggtgtttctatttaagcagaggccatacctaaaggaattttattattctaggagtgtgtttcataaaaatgctatttgaccaaatagggayatttggaagggggtttaataattgcatctttcacatacaacttttctttagaatttacaatttacccttagagtaaactctacatttccttagaatttacatttaaatagttcctgctttgcagcagataacatacctttttccctgtgtcaggatcccactg

SEQ ID NO: 537499 - DNA, 631 bp, Homo sapiens
taatctgtctaaatttgatgacacaatttaaaatgacatctttgtacaatggaggaggatgacagagatcagtagaaacagtatggcagtagcaaaataagtaaagcactgatgaagtgtctggatttcagcaaaggtaatttgtggtaaggagagccagcataaattgccctagtattgaatgttggttttattatgaaaagtccactttgaacagtaggttcatttctcattttaaaaattccatgctctaatgctgtggtggggagatgaaaacaatctttattgaagcataagtggaaattctagaattgtactgaggcatcctgacataaattccagtctgggaagtaatctaaaagttagtctcttacaaaggtgtttctatttaagcagaggccatacctaaaggaattttattattctaggagtgtgtttcataaaaatgctatttgaccaaatagggacatttggaagggggtttaataattgcatctttcacatacaacttttctttagaatttacaatttaccyttagagtaaactctacatttccttagaatttacatttaaatagttcctgctttgcagcagataacatacctttttccctgtgtcaggatcccactg

SEQ ID NO: 537500 - DNA, 568 bp, Homo sapiens
accttgacagcaaaggccctaagggggagcggtgcraagcaaggtgggctggtgagtgagaggagagggatggcatagagctgggtgggggcacaggagcccgtggggaaggtgttcgcctctgaatgaagtggggttgtatcagataccacgggtgaagcatcgggaagaggatcctgcctgtaaaccctgctcaaggactgcaccatcatcatgcccagtgtgtgcgtgtattaggtttgtatgaatataatgttgccaattgtatctgtttttatgaaatgtttgctatgtgccaatgattattcgatccatggggagaccatagaagaatgatccaaggagttgggaggggaatcaaataataaatcagcgattctgcaatataacgccattggtgatcggtgtcatgaaagaaatacaacatggtggggaagagtgtgctggggatgttcaggtagggcctctgtcaggaggtgacatttgagtggagagcaggtggggggctcctgagcagaggtgtgtgggaagagtattccagcagaggaaacagcgtgtgcttgctcag

SEQ ID NO: 537501 - DNA, 641 bp, Homo sapiens
tcttatctaaatgttcaaagaaatgagtactcccctatagtagtaaccatttgccacaactgtagtctgccacctccaagattacacttgccagtgactcaccagccgtaacacacccgaaggtaatgtgctcttacaatacaaaatactcctggtacccataaaagccaaaaaatatcaggaaactcagaccgggtgcagtgactcatgcctataatcccagcactttgggaggctgaggcaggaggatcacttgagcccaggagtttaagaacagccagggcaacatggtgaaaacccatgggtacaaaaaaattagcmaggtgtgtggtgatgtgcgcctgttgtcccagctaattgggaggctgaggtgggaggatcacctgagcctgggagtttgaggctgtagtgagccatgatcgtcataggaacagaaggcagagaaattctgggagggcagttccccagccaaggccccaccttcaatctgaaaagcctgatactgccgcccaaagtgagaacttacatccctgttttcccattcaaatggtgccttttccaaaaccacctgtggcctgctctgtcccccatcccgtgcccataaaaaccccaggctcaactggcagagagaggggaggcag

SEQ ID NO: 537502 - DNA, 385 bp, Homo sapiens
caagaacccttgataaattggaaggcgggaccttagggagaagaagtgacatttttggttgacactggggcagctcactcctccctaatccacaaaccaaagggtacagaactctctaaggaaaaactgaaagtattaggcgtaaaaggggagggattacaggttctgatattcaagacaatgttaattagactgggaccagaacacattgaggggtcactcttatatattcctgragcaggaactaacctagtgggtagagacctgattgtgagattcagtttaggattagggatacacagaaaggacaaatgaaagtaaggatgggcctcctaacagaggaggagggaagaaaaattagtcccgttttgtggtttgggaaagg

SEQ ID NO: 537503 - DNA, 385 bp, Homo sapiens
cagccagacgcatcctacgtacttactacgcgttgtcctagaaacaaatgaagggctgtgtggtttcttcgcttcctggcagggccctgccaagatgctgctgctgggaacatgctaagtatatgcaaggtcaggacagagcccattctcaagctaacaaaaccwgtaaagaagcaacatttgaaaactctggtgtccttagaattaaacacacacacacttgttcaagtctatacaaggacaaacttgttctttgtgaccaaatcttgtgcacactgaaaacctccagtagaatgcaatgtacagtttatatgctaacaatatcacctttcagccagagcagtgtttcctcttgtgaagaacaatttccaaaaggatgtttttc

SEQ ID NO: 537504 - DNA, 601 bp, Homo sapiens
ctgagatgaggatatcagaagaatcaggctgtaaggcagggaaggagggatgtcagtccctgccctgccagagcgcaggttctgtggacgacacagttgtggaatgtgagtcaggtgccagatggcaaaggagatgagtgtgaactgataggagcctatgaagggaccacagtttatttccttcctcccgctctggttcatttggaccccactgaagactggggaggtttctgcagccaacatcaataaagtggtgacagagagcaccaattgcaatccaaaatcctactgctgaggattcatcacgagcttattcatatggccaaagagaaactgcaagagcaaaggctgtgtgcctggagaattcacacattycccattactttccagcagggagtggaggacacatatacagacctcccctaagttagtcaagtaagagacccagcagcagtataacagttcatgacaagaagggggattggaaagaaaggtaactgttttccaggagaaggtggggctgtccatgccactcctggaagatgtggctacagactcagagataatgatgcttctagttcccacagtcagtatatgaacc

SEQ ID NO: 537505 - DNA, 656 bp, Homo sapiens
tttgtaagagaaaatatgagagggagtccttgagataagcaaatgattcatgctggccttgaattgcgttttgcctgctccatagcaactttcagctgagagaatggggcccagcagcagaagaactacgtttacagacttcgcaattttcccgcagtcctggttccttccaggaacattccttctaatgctcccagaaaacaaattgggctggtttcaccatgacaactacaaatctaatccaacatgaagagttagaggcaggcaatttgttgtgtacaattcaagagttaccaaaaaattcttcggatytgggggccttccacccctcttaggtaagttatacacgtccttttgattctaaggaaaactgctcgtaaaatatttgggagctcttgggacatcaaacagctcttagaggagtgcattttaatggtttacttgtaaaagaatcagtaaaagaagtagaaacatatggttcaaattcctctgaattctgcaaggtattgttgtagatgtcttttttttcttttttcctgagggtctccacgcttctttgagcgcttatcctaaaaatactccaaataaccactacatgtactggcccagcaagtgagacatcacatggtaacatgggtcttgctgaggttgcagac

SEQ ID NO: 537506 - DNA, 584 bp, Homo sapiens
tgggccccagagctgaccaggtgtggcctccccctgtattctagccacagggctgctstagggaaaccgtgaaaatacagaatggcttcttaccactaaagctgagttcccgcagcttttccaatgcaattgagggctccttcaggacatcctggaaatctgcaattctggaaggggagatagggcggcaaatgaagcatgctgatatcggctcagtgagacccacagccctcagctccctcacactgccagtttccaacctgtgcctctctcccctttaggacataaaaatcacacagcttagtcaaggtcctcaccaaagacagctttggagaacaacaaaactatatttcacttcttcctctacaaccagaaacacagaatgccagggaagaaacttgagagatattcttgtctagaagttcccaaatgaggaccataaaattagacatattccaacattctaatacttagtgagctgacatttactgggcacttcctgccggccaggccgggtccacgcacagccaccaactgaactccttggacctcaggaaccaggagtaatttgatatgcagacaat

SEQ ID NO: 537507 - DNA, 643 bp, Homo sapiens
cacctttctctcctgactctgtgtggatggtttgcccagcaaaatcagactcaagaaaagtaattgatttttagtctattcagcatcttcttataaggacaatttgaaacgacttcttctaagttctttgtatgtcagagatgaaagcagaagcctgtatgtttttatagtttatttaatctattgatattggggctgctcatgagggagggaggatcaaagtgacacctttggaagaaatctttcataaattatgcaatactactgtgagtgattttgaatcccaggaggcagtagttgcagtgagccaagattctgccactgccctccagcctgggtgacagagtgctccgtctcaaaaacaaaaaaaaagtatgtgcatattgagttatgtattttcattctaatgctttgaaaggaagaacactaataaactgatatgcaaaartaataggcaggattcagtgttctcttctaattaaattatatttaaaaagtgagaatagttctttttaaactgagatattggatttcatgaaacttgtgggtgagtgactaataactttcttttatctttctacttaaagtaagtgtaaaattaggaagaagacacgttatttttctatcaggaaaattatctacg

SEQ ID NO: 537508 - DNA, 471 bp, Homo sapiens
ggttctcattagaaattgggaactgggggtagaagaatggcatcattgccccactgccaccgcacacttcatagaggttgtgtgcattaaagggttgtggtaaatggaatctgccagtgtttgtcagcctaatacacccagaagagccctccacttatggtgttggaagagatggactgccacttggctgctgaatctaatgcaactgttcttyctcaaggaaaagcagcgagcagataggaacagcctcaagctgccctattgagctctttagatttttactaaattttaccaattttgtcaatttgttgtaagctcatgaaagaaactccagaagtttttaatgactgtatttgcaaattttgaacagcttaatagatgccatatcaaggaagagttttccccaagttcctcacactaatgttctggaagtctcatgtctctgtaagagtttttcatcaattaattaaa

SEQ ID NO: 537509 - DNA, 447 bp, Homo sapiens
catttaaagaaaaagaaaccagacaaatattgcatatttttatacctaagaggagtttcatttctctcttctactctccactacatagttggaatccagctgctattayagatagaaaaacaccacccgaggaaacagaataaaaaatgtgaggcccaacatcgcaagtgcccagcccttctacacttgcaggaaattgatcatgattacacgcatctgatcttaatggatagtcccggctctgagccccagggagaagagccaaaagaggagaggaaaaggcagctcaagatttctgccaaaatgccaaaatgccctgaggaagaaattgtttcctcaagttaaatctgcagatgattttagccttgtgtcatgtgcaaaaaataagtccatattgttaatatctaattgcacgtatgcctctggatagtggtgttctaaccaaag

SEQ ID NO: 537510 - DNA, 598 bp, Homo sapiens
ttgtaaagtgtaatgtaaatctcctgatcaacgggcaatgtatattgtacatatgtacaaatatgtgtgtttttaagtatgtgctgtaggcagatattttcatgtttagtatctcatttaatctcatcaacaactcagcagygtaggagttgtgatcctaattttataacgagaagcctgaggcacacaaaaggtaataaataataatacttttggctttagcggtacagattctgttccagcaaaactccatctgccatagtttacccaacagaggtggttgtcaaggtcacttagatttaaaagtaagtccctgctttcaagtctaagagacttaaatgaatatgtaaataaaattcctgtaagggcaattttggttgcgttatctgggtcatcatctgaattgtgcacttcactttgccaatacagatgaagctaagcataagagagaaaaatggatgttgagaatgagaaagtgcctgattcacaaataatttatgcccagcaagaagtgagaggccacctgggataagaacaagctaggacttgcggcatcccattagtgaatattaaatcccttttcatgcctgtgtttgat

SEQ ID NO: 537511 - DNA, 598 bp, Homo sapiens
ttgtaaagtgtaatgtaaatctcctgatcaacgggcaatgtatattgtacatatgtacaaatatgtgtgtttttaagtatgtgctgtaggcagatattttcatgtttagtatctcatttaatctcatcaacaactcagcagtgtaggagttgtgatcctaattttataacgagaagcctgaggcacacaaaaggtaataaataataatacttttggctttagcggtacagattctgttccagcaaaactccatctgccatagtttacccaacagaggtggttgtcaaggtcacttagatttaaaagtaagtcccygctttcaagtctaagagacttaaatgaatatgtaaataaaattcctgtaagggcaattttggttgcgttatctgggtcatcatctgaattgtgcacttcactttgccaatacagatgaagctaagcataagagagaaaaatggatgttgagaatgagaaagtgcctgattcacaaataatttatgcccagcaagaagtgagaggccacctgggataagaacaagctaggacttgcggcatcccattagtgaatattaaatcccttttcatgcctgtgtttgat

SEQ ID NO: 537512 - DNA, 598 bp, Homo sapiens
ttgtaaagtgtaatgtaaatctcctgatcaacgggcaatgtatattgtacatatgtacaaatatgtgtgtttttaagtatgtgctgtaggcagatattttcatgtttagtatctcatttaatctcatcaacaactcagcagtgtaggagttgtgatcctaattttataacgagaagcctgaggcacacaaaaggtaataaataataatacttttggctttagcggtacagattctgttccagcaaaactccatctgccatagtttacccaacagaggtggttgtcaaggtcacttagatttaaaagtaagtccctgctttcaagtctaagagacttaaatgaatatgtaaataaaattcctgtaagggcaattttggttgcgttatctgggtcatcatctgaattgtgcacttcactttgccaayacagatgaagctaagcataagagagaaaaatggatgttgagaatgagaaagtgcctgattcacaaataatttatgcccagcaagaagtgagaggccacctgggataagaacaagctaggacttgcggcatcccattagtgaatattaaatcccttttcatgcctgtgtttgat

SEQ ID NO: 537513 - DNA, 585 bp, Homo sapiens
ctcagacaactgagcacagagaatgtgtgctctggactagaggtctgggcccatgtcatggagatagagaacagtgacagtatccttgggggtgacagagggcccttaaagaggaaagtgaacccacaatccctccccaatagcatccagccaagcagatcttgccacccttcctgggccttctaaatccttccatcctctctggaccttgatattttccaattctactctttcatcaaatcacaaatagactgcagtactattttctctttattccacctacaacccagatgttagctgggttgtcctttaccctttgggtcatctcagctttgactctaccgattatatagcctttgaaagtcggaagttctcccaggaatttttgctgattcccagggattttgcactctcaggattctctttcaacttcagcttcccacctttcatggacccagacataggacaygaccccaccttcatattcacgcagaagagtctactaggacataaaagcattagtaagcaatgcaggctttacgaaagatattttaagtgatgacgagggccagggaagagaactgg

SEQ ID NO: 537514 - DNA, 595 bp, Homo sapiens
cacgttcgggtttaagaaaaatgctaagtcaggaatgtttatttgccaaagagcacccaactcttccctgcatttgggttctagtgaccttaagttatccccccagtaacccgaattccctagtgaccttaagttatccccccagtaacccgaattccctagtgactttaagttatcccccagtaacctgaattctctagattttcagcattcagatctttatcttttcttagaccccagacttgccaaatgtatgcatctcattcaaactaacacaactaggtcttgaaaatcaacccacttctttgttataaatttttaaaatgagatataaagaaggcagttggccgggcatggtggctcacgtctgtaatcctagctttgggaggctgaggtgggcagatcacgaggtcaggagatcgagaccatcctggccaacatrgtgaaaccccgtctctactaaaaatacaaaaattagccaggcatggcggcagacacctgtagtcccagctattcaggaagctgaggcaggggaactgcttgaacctgggaggcggaggttgcagtgagcagatactgtgccactgtaccccat

SEQ ID NO: 537515 - DNA, 517 bp, Homo sapiens
aatgaaataaaatgcctagattcaagctccaagcttcaacaattaggtaattttattagtattaggcaaaaatgaacaacacttacgtctaccttgggtcagctctatgttaaaacaaaaatgctaccatattagcttggatatatagccctccccaaaaggatggcaattaggacaatgtgctaagtatattaaagcaacccacmcgccatgaacaaacacaaaaggtccagcatatgaactgtagtcccccgtcaaggtgttatagggttacacaattagaaaatgccactatcctttttctacattcaacaaggccacaaatatatagatgattctattactattgctacaaatggcaaatgtcatcaataaacaagcaataaaaagcaaaggactgcctaactagatggagaaattagagccaacacccatgcaagagtaatgaaggaagaggaagctgattcttgggttttgtctttaatatgttttaactttatttttatacttttatcag

SEQ ID NO: 537516 - DNA, 562 bp, Homo sapiens
ttgtgagtatcatatggtattctaatttttatttcaatcattaaacatgatttataaaactcatgaagaaacttcatagtctattaaatatactcatattttgtcattttctattattttcttttctcctgatgttccaaggttcttcgttttatcctctcctttccgtttgaagmatttatttggccaattttaagactagatctgctagcaacaaagtcttttactttttccttcatctgagaatgcttttatttttccttcattcttgaaggagagtttatttatagaatttgtgatagttcttctctttgagcatttgtcactttcttagagcctccatggtttcagaagaaaaattcactgacatttgaatttgcattctcctgtaggtaaatcatcatttctctgtggctgctttcaagacttttttctatgcctttcatttcctgaaatttaatgtgtgtctttgggtttatcctacttgaaatgttgagcttgttgaatctgcaggtttgtgtctttttccaaatttagaaagttttcagtcattatttcttgg

SEQ ID NO: 537517 - DNA, 601 bp, Homo sapiens
tttcaccatatcaaaccatcagatctcatgagacttattcactatgaggagaacagtatgggggaactgccyccatgattcaattttctcccaccaggtccctctcacaacacatgggaattatggtagtaaaattcaagatgatatttgggtggggacacagagccaaaccatatcactatgcaaaatcatttattctttcaaatatgcttttaatatcatacatcaacttagagcaagaaaacctaccatatagctagaataattattgggaaaaaatattgaaagacattgttttattctaccaatctaaacttgtgtttctcaccactgggagtatattagaatcccctatgggacttaaaaaaattatagatgccttaactccagattgcttatgtcccctcccaaaagatcaagctgcctttcaagctttttccatgtagcaatattgtagcaatattgtgaggttaattctgaggcttttatagaaatgtggctaactaatgaataccttgagtatctccattgtacagtaaaaaatattactgtagccatgaaatgtgttcatattccaatcagagtttgccctttccactgg

SEQ ID NO: 537518 - DNA, 601 bp, Homo sapiens
tttcaccatatcaaaccatcagatctcatgagacttattcactatgaggagaacagtatgggggaactgcctccatgattcaattttctcccaccaggtccctctcacaacacatgggaattatggtagtaaaattcaagatgatatttgggtggggacacagagccaaaccatatcactatgcaaaatcatttattctttcaaatatgcttttaatatcatacatcaacttagagcaagaaaacctaccatatagctagaataattattgggaaaaaatattgaaagacattgttttattctaccaatctaaacttgtgtttctcaccactgggagtatattagaatcccctatgggacttaaaaaaattatagatgccttaactccagattgcttatgtcccctcccaaaagatcaagctgcctttcaagctttttccatgtagcaatattgtagcaatattgtgaggttaattctgaggcttttatagaaatgtggctaactaatgaataccttgagyatctccattgtacagtaaaaaatattactgtagccatgaaatgtgttcatattccaatcagagtttgccctttccactgg

SEQ ID NO: 537519 - DNA, 596 bp, Homo sapiens
tggtaaatggataagtagaataaacatccatgtaaataataaggagattgcaattaggatctgcttttaacttaaacctttctgtgatcatctatctgattaaaccattcatcttttttaaaaaaataagagtgttgttytcttacaagttattgcctgagttatcctggatgctcaggttgcaagaatagatacattcaggttatctcaaatgttaaataaatattgtaaggcctatgagaaaggaaagaaactccaaaactaactctgcaatacataccaaagattgaaagcagaatgttctttatcattttttagggtgaatagatggtttctagagagcaactctagaattcatctccttagcaaagtatggcattgtggtcaacacaagaaaactctagatgcttcaagtagaaggaatttaatacaggaattggtttcacaagagatgaaaatgtgagaagatcaataggcaatggtgggtctcattaaaatcagcaataatctgctgtcaccctgagagctggaaagacaaagagagaaggtggtgttacaagaaatgacaaagcatggccacctgggggaaagaggac

SEQ ID NO: 537520 - DNA, 638 bp, Homo sapiens
tccaagttctgaacaaatctttaaagtttaaataaattaaaatgacaaatatarcaagtcttaaattcttttaagcatgccaatactgattacaaacttactggtatgcattttgacaagaatgaaaaattacaagaatcaattgcatgtttaaaattggaatcaagaggctgatttctcagatttcatttcaagccttcttattctaagtgtggtcagaggggcagcagcatgggaacacctggagctcatcaggaatgtggactctcaggtcccaccaggaactactgactcagagtctatagcattagtcaaagagagggcaggaaaggggtatttccttcagtttttgagctgatataggtgccagggtgatatggtccgtcgattcatccatttttccttctctttcttcggttttagtagcatacaacaatccagaaagcaaatcatatcttcaatctcatattaaagttttccaactagaagaagcagaaatactgtggtttaaaagaaccaagtcgtgctggtgaaagataggtctggttgattttaagaaccatactgggcataaaaggaagagaagtaattttttgtaaatggaccccctcgctgagtggaagttactgcctgaatca

SEQ ID NO: 537521 - DNA, 638 bp, Homo sapiens
tccaagttctgaacaaatctttaaagtttaaataaattaaaatgacaaatataacaagtcttaaattcttttaagcatgccaatactgattacaaacttactggtatgcattttgacaagaatgaaaaattacaagaatcaattgcatgtttaaaattggaatcaagaggctgakttctcagatttcatttcaagccttcttattctaagtgtggtcagaggggcagcagcatgggaacacctggagctcatcaggaatgtggactctcaggtcccaccaggaactactgactcagagtctatagcattagtcaaagagagggcaggaaaggggtatttccttcagtttttgagctgatataggtgccagggtgatatggtccgtcgattcatccatttttccttctctttcttcggttttagtagcatacaacaatccagaaagcaaatcatatcttcaatctcatattaaagttttccaactagaagaagcagaaatactgtggtttaaaagaaccaagtcgtgctggtgaaagataggtctggttgattttaagaaccatactgggcataaaaggaagagaagtaattttttgtaaatggaccccctcgctgagtggaagttactgcctgaatca

SEQ ID NO: 537522 - DNA, 608 bp, Homo sapiens
gtggagctgtctaaatatctgtgtatggattagccacattgaaataggaggaagtgatgagcctggaatgtgggaggaaagatstgcttagatagattcaaacctcttggagcactgttcccaggctgacccctgtagatctttacccctttttgcttggtctttctgtatgctgcaaaccagcccatatcagtttctatgatacctgcaatatatgttggggagggaattgggaaactaaattgagacgacctggggagcagagctgcagctaccaatctgctagcttcccaaatgtaatgagaacaaaaaataaattttgttattgtaaattaatgggattttatgattgctgctactgaagcaaatctaagaaaacacagaaatctgaaccagcacacagaagttggtaccagaagtagggtgatgacttcaaaaagacataaaatatgagctactggcctcagagccaggtggtaggtaatggggaaaatattattggaagatgagaagaatgatgatctatattacgcagtgatgtcatatttgggttaaatgtcatctgtgatatcatggaagtgagcaaatatacctgttgaacttgtggt

SEQ ID NO: 537523 - DNA, 645 bp, Homo sapiens
ttccttgtaaacagcatgtccagtttttattgttttattctaatctctcaatctttgtcttatcattggagaatttaatccattcatatttcattactaatacatttggttaaatctacctttttgccatttgtttttatttattatctgttccattatttacctttctggccttattttggattaatcaattttgtttttatcattcatatgtttacgctctcctttcctttctgcatctctgtgcttcctccagatcaatattctactatatgaagaatatagaatttgtgatggtgaaaagttctcaccttttgtctgaatgtgttttcattttgctttcacatttgaagtatattttccctggatattgagttatgggttggcacatmatctctttccataattcaaagattttatactacaacgatcagactcacttcatttctgtggaaaagggattcatcagtatcactgttgcttcctttaatgtaactttttactccagtatttttaaaatttcctctttgacttttaaaaagaatcaatttgactatgaagtgcctagatgtagtttctcctaggtgccgatactcttgcttggaattcatggagtatcttgaacacttttgataagtttgaaaa

SEQ ID NO: 537524 - DNA, 497 bp, Homo sapiens
tttagcacataatttcttaaacatgttaatcagtccacatctgataactgcaatatctggatgacttgtgggattacttttattattttttattatttctccttatttgtgttcaatctatttagtcctctggtgtgcctaattattttttattacatgcaaggcattgtaataaaaacaaactggagakataatttgaggctccagatgatattttctgagatttgggtttaattttgcttcagatattcaattaagttaaagcaaatcactttcgtttgatggggtattttgctgtttgaatctgggttggagttgttatagatgctcttctattttcttttcacttctctttctattgtgcaacttttttgaggctccagacaaaaacctggggtctttccaggtccctttatattggaagtcccagaaatttaattttaatctcctcagccctgtaagtctgctagagttctgcacagcttgtcagcctctca

SEQ ID NO: 537525 - DNA, 560 bp, Homo sapiens
ccaacacatacacagtgagtaaaatttgtacacattttgaagttaaactactcaagtaacatggataaaatctacacaacaatggcatgttataggattttgatcagagcactaaaaaaagggatttcattattttcatcgtttgggtcatcaaggagtttgaaaggtaaaaatcattcataatttcaccaacaattgcttagggcctacaaaacctacaatttgattgactgtttttaaccatctaatttgccaacctataaataaaaatttaaaaggttttgaacaaaaataagatacagacctacacaagcaaatgcaatgaatactttttgaaactacctggaaatggaaaaaaagaaaacttctttcttgacatttggtattaaagttctctttagattaaaacacataaataattatttcactgttcattcmtgtagctgagagtttggaagatagttatttcacatagttatcttcaaaaaatattcttaaatgataaaatatgtactcctatataattgacataacctcaatgaaaaagctttttataaacc

SEQ ID NO: 537526 - DNA, 609 bp, Homo sapiens
atagacaatactcctttaatcatttcatatttcattttatttaagacaattcactactaatataaattgaaatatctttgtgatacattcattctgaggatttttttaactcttaatttctttcactctttaatatcccttagcatattttgcagtagacacctcctaggttatgtgaagaaatttttttttgtttttttgagatggagtctccctctgtcacccaggctggagtgcagtggcgtgaacttggctcactgcaacctcygcctcctgggttcaagcgattctcctgcctcagcctcctgagtagctgggactacaggcgcctgccaccacgcctagctaatttttgtatttttagtagatacagggtttcaccatattgatcagactggtgtcgaactcctgatctcttgatcctcctgcctcagcctcccaaagtgctgggattacaggcgtgagccactgcgcccgccctgtgaaggattttaaatatactttgcttcatacgtgacagaagaaaaaacaaaattattccaaacttaaaaacagataaacaaaagaaaatacaaactttgttctaaattaggaataaaaaccaacctg

SEQ ID NO: 537527 - DNA, 647 bp, Homo sapiens
tggggtgactggggcaaccgggccatgtatgtcaacatccagcaggctgatctgggcttcttcacatggaggtgtcagcagggaccccaggaatagcaagtaaacaagccccagacacaagtccctttcaaacctcaggcagtgtcacatttgctactctcccattggccaaaacgagccacgtgtccaagcccarattcaaagggtagagaaatagactctacctcttcatgggaaaatgtacagtgttgcattgcaagggtatggacagatggtaaggggaagaattaatggccatttttacatttatcacatcaacagtgtataaattcatcaaacctaaatagtatttgtataagacttcgcaataaatagaacagctctcaattactctctttattcccagaacagtttcttgaaacaggatccacataaaagcaacacctggagagacttctagtgcccgtggttgagtatccacagaaccattccaagccatcctacaagttagcattcaggcacccttgatcagatgtggtgagcctccgagcagctttccttaagaccacagacacacagaagaaaaagcatgcgacgtggagtacagaagactcaagtctaacctcaactctcaaagcaaattactt

SEQ ID NO: 537528 - DNA, 521 bp, Homo sapiens
tggggtgactggggcaaccgggccatgtatgtcaacatccagcaggctgatctgggcttcttcacatggaggtgtcagcagggaccccaggaatagcaagtaaacaagccccagacacaagtccctttcaaacctcaggcagtgtcacatttgctactctcccattggccaaaacgagccacgtgtccaagcccagattcaaagggtagagaaatagactctacctcttcatgggaaaatgtacagtgttgcattgcaagggtatggacagatggtaaggggaagaattaatggccatttttacatttatcacatcaacagtgtataaattcatcaaacctaaatagtatttgtataagacttcgcaataaatagaacagctctcaattactctctttattcccagaacagtttcttgaaacaggatccacataaaagcaacacctggagagacttctagtgcccrtggttgagtatccacagaaccattccaagccatcctacaagttagcattcaggca

SEQ ID NO: 537529 - DNA, 598 bp, Homo sapiens
agaaaaaaaaaatggaaggaaatatgccagaatattraagtggttaactgtgtagtaggaacacaaacagatatcatttttgcttctgtctttttcccctagtatctttgttttctcaaatgggcttgtattacttgtttaaaataatctataactagacaagaaaaaaatacatatgaattcattgcacacaagtgatggagctgagtcaggcgtcttgtcctgatctggacccacagatctatctcagtgtagcttagcccatttttgccttctctgccccctgctagactacgtgaggtctccccaatgccttgccatccccactgtgtgccccaatctgagcagcaaggtcctcagcacatagtagctacctaataaacatttataaagtgaataaattcatagcatcttgtatttcctttcacacattcttcctctggacctgtcaatgtagaggatgatactcaggtgaatgatatttcctggaagatactatacaattaattacccttgtaacctcaaaaatcatatttgaaatcaaatctgcacaagtgacaagtaaaggatataaaacatggcattctccttagcctct

SEQ ID NO: 537530 - DNA, 598 bp, Homo sapiens
agaaaaaaaaaatggaaggaaatatgccagaatattaaagtggttaactgtgtagtaggaacacaaacagatatcatttttgcttctgtctttttcccctagtatctttgttttctcaaatgggcttgtattacttgtttaaaataatctataactagacaagaaaaaaatacatatgaattcattgcacacaagtgatggagctgagtcaggcrtcttgtcctgatctggacccacagatctatctcagtgtagcttagcccatttttgccttctctgccccctgctagactacgtgaggtctccccaatgccttgccatccccactgtgtgccccaatctgagcagcaaggtcctcagcacatagtagctacctaataaacatttataaagtgaataaattcatagcatcttgtatttcctttcacacattcttcctctggacctgtcaatgtagaggatgatactcaggtgaatgatatttcctggaagatactatacaattaattacccttgtaacctcaaaaatcatatttgaaatcaaatctgcacaagtgacaagtaaaggatataaaacatggcattctccttagcctct

SEQ ID NO: 537531 - DNA, 598 bp, Homo sapiens
agaaaaaaaaaatggaaggaaatatgccagaatattaaagtggttaactgtgtagtaggaacacaaacagatatcatttttgcttctgtctttttcccctagtatctttgttttctcaaatgggcttgtattacttgtttaaaataatctataactagacaagaaaaaaatacatatgaattcattgcacacaagtgatggagctgagtcaggcgtcttgtcctgatctggacccacagatctatctcagtgtagcttagcccatttttgccttctctgccccctgctagactacgtgaggtctccccaatgccttgccatccccactgtgtgccccaatctgagcagcaaggtcctcrgcacatagtagctacctaataaacatttataaagtgaataaattcatagcatcttgtatttcctttcacacattcttcctctggacctgtcaatgtagaggatgatactcaggtgaatgatatttcctggaagatactatacaattaattacccttgtaacctcaaaaatcatatttgaaatcaaatctgcacaagtgacaagtaaaggatataaaacatggcattctccttagcctct

SEQ ID NO: 537532 - DNA, 632 bp, Homo sapiens
acatgatagcttttatgtctccaacttcttaaaacaacaagaaattgctcaacatacattttagaatcagttttacagcttcaaatctgagtttaactaatttcttcttaaatagttctaacattgtttctctttactaaaataccaacttcacaacctaccagaaggaaaacaatgtgacaaagtagaaccttcgaacacatactccatgtactttgctttttgcctctcttctgctcaccttcccctcctcaaaggacacagtgaatgaagcaattaatgagtaaagaagcaaatcgcatggggacagggacaatattcgagattatgacatccacctatcttttcctgatgcaatgtaggctatgtcagaattgttggttaatttattggaccatgattccttctccagaatccttagtgtcagatgtttttacagaattcaaaatattttatattttaggaatatgtatatttggttacacaagcagcwtctggagcaacaattgtaatcacagatgagtatttctgcagcaaaacatggagtataaattgcctcacaacagatcaggttttgccaccaaatgagtttgcatcaatcttaaaagaaacattttgttgggttttaaact

SEQ ID NO: 537533 - DNA, 398 bp, Homo sapiens
ctgcttacacatctctcctcagagctgtcccttgacttgggggtgaatttcaggccaacagggcttcctgggatacargagcgttctccatggatctgccttactaccatggacgtctgaccaagcaagactgtgagaccttgctgctcaaggaaggggtggatggcaactttcttttaagagacagcgagtcgataccaggagtcctgtgcctctgtgtctcgtgagtagcctcatcttgcacacatctgacatcgtatgttgaatgtggcaatggctgccacacagtacaggaattcatatccctcagtatttcactctgactttggagtctcaatgagtagaatgagaagtaatggacactgccaggagaggaatgtatctgtccatgctcctcc

SEQ ID NO: 537534 - DNA, 425 bp, Homo sapiens
gttaaaataaaaacttgaacacaaacaagtttccccacaacaatggccacaacatgagaccgtgctaatctgtgggctgttcatgcgttgagcaaggactcagagatccgtgcacagcacctcatggaacgatcactttgaaagctaaatagatagagtaaaacaattcaaagatatgggaaaacttagaggtcctgtattccagcctttttgaacctcaactgagaaattaatgcctaagatttttaaatgwtttttataagtccagtgtatttctcataaatgacgacaatgatttccatagaataaacaaaaaggtaggctccactgggtatcagtctcacacagagagtcaagacaccacatatttattgagaacataactgcaaaaataggaaacactttttctatctgaggccaaaaac

SEQ ID NO: 537535 - DNA, 425 bp, Homo sapiens
gttaaaataaaaacttgaacacaaacaagtttccccacaacaatggccacaacatgagaccgtgctaatctgtgggctgttcatgcgttgagcaaggactcagagatccgtgcacagcacctcatggaacgatcactttgaaagctaaatagatagagtaaaacaattcaaagatatgggaaaacttagaggtcctgtattccagcctttttgaacctcaactgagaaattaatgcctaagatttttaaatgatttttataagtccagtgtatttctcataaatgacgacaaygatttccatagaataaacaaaaaggtaggctccactgggtatcagtctcacacagagagtcaagacaccacatatttattgagaacataactgcaaaaataggaaacactttttctatctgaggccaaaaac

SEQ ID NO: 537536 - DNA, 579 bp, Homo sapiens
ctgctcatttagtttcatggatctcactttcctagttcttccttctctgtgtaactgtacctatttccaatggcaaattagatcaaaacaaaacaaacagaaccatgcctctccaactaaatgcatgttagaaaacacaaatctgttgctgattcaaacaccctggagatcctcattcttttccgtctggttacaatcctacatatatgtacacactttccctcacacatgtatatataaacacatgtgtacacacacacacaaaacacacacacacacaccacctgatcctatttccactgacaccctgatgcaccaaggaaggctaacataaaactgaatttatttcctttaatttggactttctgggctacaagaaaaccaactgtggccattagaagaggactgcacttttatttatatataatctaaaggaaagctagggtcgatgaactccattttgggataatcatatccttgccgattgaccctccaataacactgcaatttgcatctgtaccttgttgtctaggataaagacttaattccccgaacrtatgactctagcaggtctcagca

SEQ ID NO: 537537 - DNA, 439 bp, Homo sapiens
agggagctgcctcttcctcagcaatcttagtccacagagcacctcccctgaaatccatggccctgggaacatactccttctattctgtttccccagcgttccccctcctagaggaggtagtttcttcctgcagttaccatttctgagttagttcagkgtcccttttttgccctttcatgcttccaacatctgtgaaactatttcctctactatatatgattccctcaggtaactaagtgtgatatttatttttctgagtgatacataaataactcccccttgtctaggtagtttaaactaaattgatttcttgcaatcaaattgctcttgaccaacacaagtacactttatggttactgagtagaacagcaaaacaaacacagagtgttttttacttgcttattgtctgtctccctacaatagaatgaatataaagtgt

SEQ ID NO: 537538 - DNA, 439 bp, Homo sapiens
agggagctgcctcttcctcagcaatcttagtccacagagcacctcccctgaaatccatggccctgggaacatactccttctattctgtttccccagcgttccccctcctagaggaggtagtttcttcctgcagttaccatttctgagttagttcagtgtcccttttttgccctttcatgcttccaacatctgtgaaactatttcctctactatatatgattccctcagrtaactaagtgtgatatttatttttctgagtgatacataaataactcccccttgtctaggtagtttaaactaaattgatttcttgcaatcaaattgctcttgaccaacacaagtacactttatggttactgagtagaacagcaaaacaaacacagagtgttttttacttgcttattgtctgtctccctacaatagaatgaatataaagtgt

SEQ ID NO: 537539 - DNA, 598 bp, Homo sapiens
gctcaaggcaggaatggtggaggtgaggttctgaatgtggtggacttcaggtgccactctctttcttctcttttatccttggaaggggagctcggtgtgaaggggagtgggccccaagctctagtccaggcctgccactcggtagccatggagctcttggaagtcacttaatctccactgcttgaacctcctcccataaattgcagaatcrattcccttcctgcccactctcagtgccgaggagcaaatgtgaggcgcttatggaagtgctttgaaaatggctccatttccatgcaagggacggctattttcaaagagtgggaaatggggaagcggacacagactggtgggataatggggacagaaacaggcagcaggccttagccaggggctgggggacagagggggaaaggtgtggagggactggggggcagggggaaaatgatgatttagtgctgtatgtccaacactaaaccaagcattctctgatcctctcacagcccgtgatatggacactgtaatatccattttacagaggaagcaacctaggctcagcgaagttcagcaatttgcccaaagtttaaggctagtaagggca

SEQ ID NO: 537540 - DNA, 394 bp, Homo sapiens
taggatttttcctcttgtttggccctccttgtcactggttgagtaaatactgtgagcgcacttratggtgggtgtagcagactcctcctccttttattcctatcttgaagtcagagagtcagccctacaggggagaatgggaatgagacctctcggcctctccccttgcgtcctcctgccccttgtttgacccttttattttccccactctgaagactgtggagtcacagccagcaaccaaatcccttttgagctcctcagcctcctgatctgggctctgtctgagcctgctgctgctgccgtaacacactgctgaggtgcagaactaatttagtgacagcggagccctctcctctgctgcctgacagagaactcagggctctcagagcacacc

SEQ ID NO: 537541 - DNA, 394 bp, Homo sapiens
taggatttttcctcttgtttggccctccttgtcactggttgagtaaatactgtgagcgcacttaatggtgggtgtagcagactcctcctccttttattcctatcttgaagtcagagagtcagccctacaggggagaatgggaatgagacctctcggcctctccccttgcgycctcctgccccttgtttgacccttttattttccccactctgaagactgtggagtcacagccagcaaccaaatcccttttgagctcctcagcctcctgatctgggctctgtctgagcctgctgctgctgccgtaacacactgctgaggtgcagaactaatttagtgacagcggagccctctcctctgctgcctgacagagaactcagggctctcagagcacacc

SEQ ID NO: 537542 - DNA, 604 bp, Homo sapiens
ctgtgaccttaggaagaggaagacatcctggcccttctctactgaaakagcagaaatagctacagtctgtgaaatgatgagcacagatgtagggagcggaggtcacagatgaaaagacaggaactaccagcaagtagcaggccagccagatacttcagaaggagagacgcagttgggggtatcaaaaagatagtgagggtctctgagcatcactgtggacctttgtatgacaagaacctccaaaggtcatgtggactctctcttgcctcaagacatgcccagtctttgagcttgttagccaagagagctcttccacacctagaaacacatttctttctccaaaggaggttccctgaaactttggttggagggtcttattcctaacctgcattgggcaactctttttttaaaatcagctttaacttcctcatggcctgtaatgtccatcctgaatatggaagaccaccgaatcagcctcttctccatgcactgttttcataggcctgttgcattctacagcgtttttctcttgctgtgtttctctccagcatccttgaccagctctggtcaagagtctcactgattcctgttactctgggagaca

SEQ ID NO: 537543 - DNA, 604 bp, Homo sapiens
ctgtgaccttaggaagaggaagacatcctggcccttctctactgaaagagcagaaatagctacagtctgtgaaatgatgagcacagatgtagggagcggaggtcacagatgaaaagacaggaactaccagcaagtagcaggccagccagatacttcagaaggagagacgcagttgggggtatcaaaaagatagtgagggtstctgagcatcactgtggacctttgtatgacaagaacctccaaaggtcatgtggactctctcttgcctcaagacatgcccagtctttgagcttgttagccaagagagctcttccacacctagaaacacatttctttctccaaaggaggttccctgaaactttggttggagggtcttattcctaacctgcattgggcaactctttttttaaaatcagctttaacttcctcatggcctgtaatgtccatcctgaatatggaagaccaccgaatcagcctcttctccatgcactgttttcataggcctgttgcattctacagcgtttttctcttgctgtgtttctctccagcatccttgaccagctctggtcaagagtctcactgattcctgttactctgggagaca

SEQ ID NO: 537544 - DNA, 604 bp, Homo sapiens
ctgtgaccttaggaagaggaagacatcctggcccttctctactgaaagagcagaaatagctacagtctgtgaaatgatgagcacagatgtagggagcggaggtcacagatgaaaagacaggaactaccagcaagtagcaggccagccagatacttcagaaggagagacgcagttgggggtatcaaaaagatagtgagggtctctgagcatcactgtggacctttgtatgacaagaacctccaaaggtcatgtggactctctcttgcctcaagacatgcccagtctttgagcttgttagccaagagagctcttccacacctagaaacacatttctttctccaaaggaggttccctgaaactttggttggagggtcttattcctaacctgcattgggcaactctttttttaaaatcagctttaacttcctcatggcctgtaatgtccatcctgaatatggaagaccaccgaatcagcctcttctccatgcactgttytcataggcctgttgcattctacagcgtttttctcttgctgtgtttctctccagcatccttgaccagctctggtcaagagtctcactgattcctgttactctgggagaca

SEQ ID NO: 537545 - DNA, 417 bp, Homo sapiens
ctggtgatgcacagatcactttatttgactgattatggtgacaattatggtagtatcacagtttgggtaagtccaggtccagaagtagaataaattgaagagtaaggggagagatgcaggagagagaggagagatgaagagacagctcatgagtccaagaagagaggggaataaaagggggaagaaagttctagtaagaagaaatatataagctctggagaaagcatcccagcaagagtgccctaaattaaagactcctatcagktaacaactggttgagatttctcaaatctacatttgttaagtcaagcctggaaggtgaagcagtgaaataaccagcataagacagataagggacaagagggcagcaaatgccagtggatcaagggatgcagatgtcgggaggaagggagaagc

SEQ ID NO: 537546 - DNA, 493 bp, Homo sapiens
aaattcagagcaaagtccccagactacccacaatgaacatatagtgtgaatgaaaaataaacctttttgttgttttaagtcattaagactttggagttattcattacagcagcataagcttgcttaacttgcaagattgaagtggctttaatcttaacaatatattgtttgtttgcaaagaatggaaacccattcaaactagcttgagaaaagtgggctacaaaggtatcacattaaacccaagtgtaggaaacatgaccaagccttgtggaaccaaccacatatttgatgatctctttcttctcgtctattctgtctctctctctctctttctctctctctctctctctctctctctctgtctctctcttgtctgcctgtctctttctcactcttactttctctttcacacacacacaaacamcttaaaccccaagtgcacatgatcgaatttctagaaaagagaagctgattgcctaagcttggattaagt

SEQ ID NO: 537547 - DNA, 576 bp, Homo sapiens
ctggactcttaagtttttattttgatattctttgggagcattgagattcctttttgagatgagtttggtatgaaagaaactggcaactcatacctgattgattaactgggggcattcccattgacatcagcttgaagaaagacgacagaacactggagaccaagtacttacagccttctgctctgtggcccctcctcactccagggatgctgccttgggtctggaaactgttagaggaaaccccaagaggtgcaggcactgagcctctcaggacaatgacctggggtcccagctcccctggaggggcctcctcatggtaagtgaatgccaagaggttaagttggcctgtgtttccgaggtggaaattccaggtcgctggcttcatttgtcttctcttttagattgtttgggggttgatcacagaccaagagtgacgagtgatgtcaccctgtgactcatggcyggaccttcttgcccctattgtctcagcacaacattattcgacttttccctcagcgtgggtgggcagaggaaaagccctgtggctctggggacttgggatccagagttgaagac

SEQ ID NO: 537548 - DNA, 602 bp, Homo sapiens
tggtcacctgccagttcaggcagacaattgactttgtaaacagatgacataaacttatggtatcaataaacacagtacagtgctgtaaatgtaaatgtgttttctcttttatatgatttttttttgtttgagacagtctcactttttcacctagtctggagtgcagtggtgcgatctcagctcactgcaacctctgcctcattgcagcctctgcctcccatgctcaagtgattctcgtgcctcakcctccccagtagctgggattacaggcgtgagccaccatgcccagctaattttttagtatttttagtagagtcagggattctccatgttggccaagctggtctctaactccaggcctcatgtgagccgccccacctctgccttccaaagtgctgggattacaggcatgagccactgcgcctggcccttttttatgattttttttaaagagggggtcttgctgtgttgcccaggctagagtataatggctattcacacctcctgggcgcaagctgtttagattggtgcaaaagtaattgcggcttttgccatattttaattacttttgtaccaacacaatatcttctgcttcaagccta

SEQ ID NO: 537549 - DNA, 602 bp, Homo sapiens
tggtcacctgccagttcaggcagacaattgactttgtaaacagatgacataaacttatggtatcaataaacacagtacagtgctgtaaatgtaaatgtgttttctcttttatatgatttttttttgtttgagacagtctcactttttcacctagtctggagtgcagtggtgcgatctcagctcactgcaacctctgcctcattgcagcctctgcctcccatgctcaagtgattctcgtgcctcagcctccccagtagctgggattacaggcgtgagccaccatgcccagctaattttttagtatttttagtagagtcagggattctccatgttggccaagctggtctctaactccaggcctcatgtgagccrccccacctctgccttccaaagtgctgggattacaggcatgagccactgcgcctggcccttttttatgattttttttaaagagggggtcttgctgtgttgcccaggctagagtataatggctattcacacctcctgggcgcaagctgtttagattggtgcaaaagtaattgcggcttttgccatattttaattacttttgtaccaacacaatatcttctgcttcaagccta

SEQ ID NO: 537550 - DNA, 557 bp, Homo sapiens
tgatctttttttgctccactacacggcttttcaatatagaatgcttcagtttgaggtagatcgatttatctgtcttttggtggtttttatttcatgaatccgaatttattgctattttgagatcagatttacccatattttcttgttagtattattgttattctaacactgaaattattaacgcatttatgtttggaggtcttttgtaactagaacttagtcctttgcagaacataataagtgtggctaataagtgtgtgtgtgtgtgtgtgtgtatgtgtgtgtggttttatttcagagttgctttattttaatttatgatgaatttcagtttctattagagtagtgcttttaggttgagatacatttttttatccatcaatctttgtaccawcactgtgaattaatttaatatcatgactgcttttcaaatgaagagattggggactgatatttgaagtgatttatccaatgtcacagagctctttaagggatagaacaaggattccaagccaagtcagttaactccttgtccggaattactttttactgtaaaa

SEQ ID NO: 537551 - DNA, 553 bp, Homo sapiens
gtccctgatttcttccttcctcctccttcccacaaacaagggctctttgaatagtggatgactgaagacagactgatcttggatcactttaagaaagtggaaacgtgtgcaagagttgagcatgtgggcaagctgcctgtaggcactagctcattcaaatcaaacaatgaaaacttggacagtaaaaattctttgcttggaatctagagtggtccaaaggctgacttaattttacttgcagcacttcatccacgcgtttacattattctgattgcttgatcagatcatcgaacagactgtaagaatataagaaattgttcattgatggccttttaaatgtgacaagccatgagattatctgactttttaaaatgctttatgtagaataactttcaggtttaaggcaggcacattrctacagcagttgtaaactgcaggttcacttttggttttggttacctttgaatagtctatgggagctcagagtgaaaaatgtacagagccagccagctagttttgcagggatgcgtgccatgtgtctccatcagattaa

SEQ ID NO: 537552 - DNA, 601 bp, Homo sapiens
agtcaattgccatttttatccattgatgtgaattcagaatggaggcttagttgaagatacagacatgatactgacagygcccagagagaggaagagcaggttaagggtccagaagcataccccaaagtaaggaataggccatgagggaggagccagtaaaggagacagagaaggaaaatccagagtggaagcacagaagaaggtcaggccaagggaggcgaaggttttaaaggggagaaagtgatcaacagagttaaatgctacagagagaagtgggactgaggcttttaaaaagccatttatcaggaacccgggaggcggagcttgcagtgagctgagatcgcgccactgcactccagtctgggtgacagagcgagactccatctcaaaaaaaaaaataaataaataaataataaaaataaataaatacaaagccatttattttagcaaccttgggggccaccgggagagcaactgcagtaaagtgaggaaaccagacctcagagggtgcagcacccatgggagatgaaggggtggagacaagcatagacaactcgagccaggaacttgactgtggagaggagagaggataacaagcaga

SEQ ID NO: 537553 - DNA, 601 bp, Homo sapiens
agtcaattgccatttttatccattgatgtgaattcagaatggaggcttagttgaagatacagacatgatactgacagtgcccagagagaggaagagcaggttaagggtccagaagcataccccaaagtaaggaataggccatgagggaggagccagtaaaggagacagagaaggaaaatccagagtggaagcacagaagaaggtcaggccaagggaggcgaaggttttaaaggggagaaagtgatcaacagagttaaatgctacagagagaagtgggactgaggcttttaaaaagccatttatcaggaacccgggaggcggagcttgcagtgagctgagatcgcgccactgcactccagtctgggtgacagagcgagacyccatctcaaaaaaaaaaataaataaataaataataaaaataaataaatacaaagccatttattttagcaaccttgggggccaccgggagagcaactgcagtaaagtgaggaaaccagacctcagagggtgcagcacccatgggagatgaaggggtggagacaagcatagacaactcgagccaggaacttgactgtggagaggagagaggataacaagcaga

SEQ ID NO: 537554 - DNA, 601 bp, Homo sapiens
agtcaattgccatttttatccattgatgtgaattcagaatggaggcttagttgaagatacagacatgatactgacagtgcccagagagaggaagagcaggttaagggtccagaagcataccccaaagtaaggaataggccatgagggaggagccagtaaaggagacagagaaggaaaatccagagtggaagcacagaagaaggtcaggccaagggaggcgaaggttttaaaggggagaaagtgatcaacagagttaaatgctacagagagaagtgggactgaggcttttaaaaagccatttatcaggaacccgggaggcggagcttgcagtgagctgagatcgcgccactgcactccagtctgggtgacagagcgagactccatctcaaaaaaaaaaawaaataaataaataataaaaataaataaatacaaagccatttattttagcaaccttgggggccaccgggagagcaactgcagtaaagtgaggaaaccagacctcagagggtgcagcacccatgggagatgaaggggtggagacaagcatagacaactcgagccaggaacttgactgtggagaggagagaggataacaagcaga

SEQ ID NO: 537555 - DNA, 597 bp, Homo sapiens
ttggtttggggcttggtgttctttgtttcttattgtggtttgggaaaaaaatagaaaatctgttataaattagtccctcacagctctttttcaaaggcaaattcaaaagtgagattttatagstcagatatgtccaaaatcaaatgccaatgagttaaattcatatctttttgcttgtaagtattcttgcaaaacacatggttttgcataaaggtaaagatagttgtaatttacttaaatagcattgtgctatatatcgttctatttatcttttctcccctctgcactatgctttgaagttcatctatattgtcagatgtgtatctatttagctgcttctcattttttcccttattctcatagtatacaatctccaaattatacctagccacttttctagtgatgggcactcaggagggcattcatccatctaccaccataaagaatgctgaaatgaacattcttatgtgagttcccacacaggcagccaaagctatgaggaaaggtgtatacacaaagggccttgttatgagattgctgactcagccatgaacagagattctagatagagaatcaaaccagttagagcaatgagct

SEQ ID NO: 537556 - DNA, 626 bp, Homo sapiens
ctttagagatccataaaaatagatgagttcaactttcttaggcagtgtctagctctaaatatctgtgaatgctttaatgataaacacaattactattcagcatctcgcatttaacccaaaattgagtcttccttctgatggtagccttcatgacttggtaaatttattctctagatttgagcaaaaatacttgctttggcattggataataggcctcataaaagaattgagacttaaaaktagtaaaaagtgttaaatacatgattgtatggttttaaattttgcattgcgggctaatttcaattttttctgctttgttaaggttaatgctctggataatcttggtcagacttctctacacagagctgcatattgtggtcatctacaaacctgccgcctactcctgagctatgggtgtgatcctaacattatatcccttcagggctttactgctttacagatgggaaatgaaaatgtacagcaactcctccaaggtattacatgcttcaatgaaattgatttttttaaattaacctttaaaaatttttcacatatcaggtattataggtaggagttggtaataagaaaaattgagaatttttgtttatttcttcttaggttattat

SEQ ID NO: 537557 - DNA, 511 bp, Homo sapiens
ttcatttcatatatataagcggtgtgtgtatttttttaatgctgcccacctgcttcccgatcactcctccctgtcacaagacctgaaaagccttctcaaccaacaggtggaggcctggcctaactcttccccttcaccctcccctcctcacacttctaatgacacagattttctccttgaccaaatgctagccaggcctctctgagcccccttctagaccaggcctcaaccccctcagagtgcctgcttgagaaagcccaagactgacaaaagaattctatgcaccatctgatgaaaggcttctggcactttcttagagtacttactaaaaaggrcttacaattgtgactccttcctctgtgcctttgagatggctgtgtatctcctacaaaggcaatcaaggacgtaaaaaaccattcctttacaatgtaatcatcaggaaggatagggccagtgtctcccagtctctggaaggacagaatccagactttgatcattgccagctagcaga

SEQ ID NO: 537558 - DNA, 609 bp, Homo sapiens
ttttctccgccaagcctcctcccttataagaaagagagtttctttctgggttcctttattgtgccaaatccaaaaaagagccgaggcgttgatggtatagtggttagcatagctgccttttaaatccaaagaaaccaaagagcttgagatttaacagaagtcagcagctaaggatgagagagagaccaaagagagcttggggctgggcagagttcagagaagggtttggggagcttggagtggaagagggagaaattttgggcagccaccctgtgaggatcgtacatctaaaaagagatggggaaagagacctttaacaggctttcatgtatgttatgaatgtagctacctttccyattctcctcaaaacactgcaggcaagacgaattattttcaacaactcttgggctgctggccggctgttccttactggattcaatcatgagatagctcagcttcttaaattttacaaaagttgtgtctttaggttaaaaatcaaatctgggaagtctcaaaatatatgttagagagtgatgggataacacatgtacgggctgggacatggtgttagtgtctctctttcttggtctcgtagtcacacctgcaaac

SEQ ID NO: 537559 - DNA, 610 bp, Homo sapiens
ccactcccatgaccctgtttccacctcagtgacctgggtcaagaataagaagagagaatagtgcctgaataattacctcacctgagattcacaatcaccctgtcaagtacatatatatgtacaatcacatcatatgcacttaagagccgatatggtttggccgtgtccccacccaaatctcatcttaaattatagtttccataatccccacgtgtcatgggacagacccagagggaggtaattgaatcataggggtggttacctccatgatgttcttgtgatagtgagtgagttctcaagagatctgatggttttataaggggcttttctcccttttgctcagcacttctccttgctgccactacaattgtaagtttattgaggcctccccagccttgcagaactgtgagttaattagacctctttctttttaaattacccagtctcgggtatttcttcatagcagtgtgagaacggactaatacaagagataagaamagcttccacttttaaataaaatgtcttactcttccaaaaagaacagtgcttattgaaataaatgagaagaggatggttgttttaaatcagtatgactaatgttaaaaaaaaa

SEQ ID NO: 537560 - DNA, 619 bp, Homo sapiens
gactttatttctcttgataacgggtcgtcatgttttctactttatttacatgttttatagtttgtgttgtgtactagtcattttgttgaaattttggtaaaacttatagaaatttaaagtggtgataattatccccaggaaaaagcatgtccccttcttctattgggctgctagggaaaggagctgatcttatagtataatccatagttgagctgggaacaggctgggctgcmgttttagttagatttagtttactagtggtttcaaacactttgagggtgaaatcagggcttgctttctgtgcaacaggacttgggagttaatattggtgagatttagaaatctgtctctacaattagtccagctattagctatttccaccactggagattctgtctgttacacagctttccacactatgggattcctttctctgctcttttgccctgctcttggcttttgttacacttccgtgcacttgaagaaggccccatggggaagaattcatgggtggtgtggacttgctctgcatctgggtttccttggtcatgctgactaacacaggctgactgtctatggaggtttattcctctgccttttgtgcccctggggatgaaag

SEQ ID NO: 537561 - DNA, 581 bp, Homo sapiens
tgttgcaaagggcagagggcagtggtaactcactgcaggctcgaactcgtcctcctgcctcggcctcctgaatagctgggactacaagtcgtgtgtgcccatgcctagctaatttttttttttaatttaaaatcatttttatagggatgggttttttcagtgttgcccaggctcgtctcaaactggcctcaagtgatcctcatgcctctcctcttctttgaaagactccagtcctattggatcaggatccacccaaatgacctcatcgtaccttaatcacctctttaaagactctgtcttcaagtagtcacattcagagatactgggggttagggcttcagtgtagggatcggggggaccaccactgagcccataacagtaggtacccctatatctctatcccagagagtctgctgggaggcctgtcagttgggaggcaggatggtgggtgtggcacctggagagcctggatgttgcgattaactccaatagtccccacacttccaggcctggggtcrcagagacagagcctgctgggaggcctggatggggggaggtgcatttcctttccttgctcctga

SEQ ID NO: 537562 - DNA, 668 bp, Homo sapiens
tgcagtgactcccaacctgcttttgaaccctctttttccattaggattttctccgtggaggcagatttccatgggagtttgctgtggcattttgaaatctgtttcttacctagttccattggccttaaatgttaaggccaaagyctttacatttctctgtaatgaaaagaaggtcgaggaaattgggtcattgggtttccataatgattgcaggaactgctgacacaagcacggctggggagattctctaggtcagactcccttggtttggctaattcagcagtttgatcccattcagctgattaatgggaatgtgcagtggcttctttggatgtttgattttgcatcctaatccaaagcagctatcagcctcagcacttccttgttggaaggctttccagaacgtagtctatgttggacacttccttctgcctctctgcattttcctgccacttctctagagaatggggtgcagggggtgggagacggggaaagctggtcgctgagtggctgatgggacttgacatcacccagccccacccccacctgcccgtgagtcagcctccggggagagttcatcgcgtcaccggcactctaatgtggacagacacctagcagtgttgtttatctgcacacgtttgggtggtgatttttccctccaaggattt

SEQ ID NO: 537563 - DNA, 668 bp, Homo sapiens
tgcagtgactcccaacctgcttttgaaccctctttttccattaggattttctccgtggaggcagatttccatgggagtttgctgtggcattttgaaatctgtttcttacctagttccattggccttaaatgttaaggccaaagcctttacatttctctgtaatgaaaagaaggtcgaggaaattgggtcattgggtttccataatgattgcaggaactgctgacacaagcacggctggggagattctctaggtcagactcccttggtttggctaattcagcagtttgatcccattcagctgattaatgggaatgtgcagtggcttctttggatgtttgattttgcatcctaatccaaagcagctatcagcctcagcacttccttgttggaaggctttccagaacgtagtctatgytggacacttccttctgcctctctgcattttcctgccacttctctagagaatggggtgcagggggtgggagacggggaaagctggtcgctgagtggctgatgggacttgacatcacccagccccacccccacctgcccgtgagtcagcctccggggagagttcatcgcgtcaccggcactctaatgtggacagacacctagcagtgttgtttatctgcacacgtttgggtggtgatttttccctccaaggattt

SEQ ID NO: 537564 - DNA, 703 bp, Homo sapiens
tggccattcatttatttcttgatggtctggagtggccatcccttaggggcagcttgataaatacatatagaattaactttgcccttttaatctatttgaatttgtgtaaggaracagtagggcatagagggccagagcaccgcttgggaggcagacagttccagtataaagcagggctctaccacttactgtgggatttgagcaggttacttaacatctctgtgcctaagtttattcagctttaaaaaggagaataataataccatcttcataaagttggaagatacattagataatgtgggcaaagtacttaaaaatagagaccatttataataaagtattcaataaatgtcaaactagctcagtgtttctttgtgatttttactctgtggtttctgggtttaggagtcattcccttcttttcattaaacccttaattaacgttaagttatattttattttggttttatggtatactttttaaaaatgtttaccctttagtttggaacttattttggagtattaaataaagtgaacttctaagtgagattggcacaatttgttgaataatttttcccacttgttacgttttatcacaaatttaatttttatatattaatataaaagtgttttttctgtctttgaaatctgtctccctgaccccttttgggttgggactacactgttaggctgaacaggtcaa

SEQ ID NO: 537565 - DNA, 521 bp, Homo sapiens
tcgtgaactctgaatttatggggctgagtctgagagcgaagagatgccaacagtagcgactgagaacattctggatgattttagtaaaccccgaacaaattccttatacaccaaggagcattctccttgttagaaattcctccagaccacgactctggccctggccctggggtgaggagatagggtgcctggccgtagtggatctaaaacgggatgacaccggaaacctgtggggaggacgccgtccttgtcgccccttgacagagggggcacagaggccttagagaaacaaaaataaaaatagcaattgtttgccacttccctccctaataaagtgttctctccaaacctggtttccactctatttctgaactgtttcgccccatggtgtgtagraagccagggtaaatgtgggagtgggaggaaggggacacaggcagcaactcaaaggaaggcagaattagtagccgtctgggaaccgggggcgggggcattctagaaatgcgaagaggtcgaatagc

SEQ ID NO: 537566 - DNA, 383 bp, Homo sapiens
ctgtaggcatattgaaagtawcatgctgaacaccaaaaacaaacagaatctcttaaaggcattttaaaaagaaaatgcatcacctacaaaggaatgacaattagactggcagcaactttctcaacagcaaaaaccaaagccaagagacagtgaaataataccttctaagtgccaagagaaaataacagtcatcctagaattgtccacccagcaaaaatatcttaactcataagagtaaaatgaaaacattttcagagaaacagaaacagaatttactactagcagaccgaagccaaagaaacatttataaaatgcactctggaaagaagaaaaatgatcttgcaaaataaataaataagtaaatgttaacaaacatcatctat

SEQ ID NO: 537567 - DNA, 476 bp, Homo sapiens
tggctttttgccaggttctgccctctgcagccccagagctacacctgtcctttcttagaagctgccaatggccatgagtgtccaggmcactctgggaaggactgtagtaaaatagtcaatgtgtttaatccatgtttcccactggcccacccatgcctttgacccacaggacagtggccacgcatgtgcttgggaaaaccaccataacaggtccagacaagagtgctggcctgagcatgggtcacgctaacgtgggtggctcaattaaggaacagggatggacttcctgtcctgtcgcccccacacactcctgcttcttctagtggccatttctgtgtgaggctggagcacagtggaaggtctgtgaacctgtattaagcaaaatagaaactaaatgtggacttggactgaaaggaaattgagttagacaatgaaaatggattggaatggaatggaattcggatttgaactgaatg

SEQ ID NO: 537568 - DNA, 578 bp, Homo sapiens
tggcttttacaaaatacttatattgtgaaccaaattttgaattaaatgcactttgctttatgtctagataacagtcatgtaggatggggggattttctgaataagaatggcatcggttttcatctaggctaggtataaaaaggcacaatattcagaaatagtgtttgatggtggtgaaatgttttcaactacaaaatcagatctacagtgggaaacaaaaatcagatctaatgaaaagaaaccatgtggctggtatcccagggaagctccagcatactactgctgccctctttctagtccgcaggccaaagacaaagaaatctactgctccaggattctgcaaacattcaattttatgattttataattgcttttaatctacggcagggtttttatatgttttaggtatgatcacaattgaaaaggttgcttttgacccaaggctacttcaattatcttctaacaaagtcgaccaattctgaaacgtgaagaatggaataggtgwaattcatcaaaatgttatgtcatcttttcttttctaagcccctctataatattatgtaaagtaggattcaaaa

SEQ ID NO: 537569 - DNA, 591 bp, Homo sapiens
tgctgcttatgcatctatatgacctaggttgggaccctgtcccagggtctggggatctggggacaggattcagcctctgggagggagatttgccaaagctgagaagtccgagtggtttccataacaacaaccaatagacttggtttccgaatggggtaccattcttgaggcctggtcttgaccatagggtmacatatctaaggcatatgcagaatgatccatctgggttaagggcacagttcagtggcattacaaaaaaatatatcaaaacttctatggacctttttaaagataagtttgtgtttctaacacatctcagcttatggcatttggtggcctgatgatgttttgagtgggctggatgaagccaagggtcaccaggaagcaacattctttctaaccaccatcctgcacatctgctctgtgaggtgtcttctcctggctcacatctccagctcattgacactgttccagtccccaggtagcaaacagcccagtccaaatgaatagcaaaaccttaccattaatgaaatcaggtcttctgccctcacactgggaccacagtagtgtgtgtgtgtgtgtgtgtgtgtg

SEQ ID NO: 537570 - DNA, 474 bp, Homo sapiens
ctgaagctcggggatgaggtgtggctgcaggtgacaggaggagagaggttcaatggcttgtttgctgatgaggacgatgacacaactttcacagggttccttctgttcagcagcccgtgacagaggagagtttawaaatccgccacaccatccatcagaatcagcttgggatgaacttattcagatggttttactttattaattcctccaattattacaataatcataaaaaggtgaaaatggaaaagttattcccaaaactgattctgtgtaacttactatttttccaggagtaaatatttaaaatagctgcatggtttattctaatttatttcacatttcttattcctattatctgaagaatccctcgtctgtgcgtttcttgtgggaagagtgttttaatatcattttagtgctctgaggagtcatatgaagatgtatccctcatctgtgtttctgaggacattaagggga

SEQ ID NO: 537571 - DNA, 474 bp, Homo sapiens
ctgaagctcggggatgaggtgtggctgcaggtgacaggaggagagaggttcaatggcttgtttgctgatgaggacgatgacacaactttcacagggttccttctgttcagcagcccgtgacagaggagagtttaaaaatccgccacaccatccatcagaatcagcttgggatgaacttattcagatggttttactttattaattcctccaattattacaataatcataaaaaggtgaaaatggaaaagttattcccaaaactgattctrtgtaacttactatttttccaggagtaaatatttaaaatagctgcatggtttattctaatttatttcacatttcttattcctattatctgaagaatccctcgtctgtgcgtttcttgtgggaagagtgttttaatatcattttagtgctctgaggagtcatatgaagatgtatccctcatctgtgtttctgaggacattaagggga

SEQ ID NO: 537572 - DNA, 614 bp, Homo sapiens
ctggcgtgggtgctggattccaaacctctgagatttccttcaactttaagattttatggttctggcgggcgcagtggctcaggcctgtaatcccagaactttggaaggccaagacgggcggatcgcttgagctcaggagttygagaccagcctgagcaacatgataaaatcctgtctctgtaaaaaatacaaaaattagctgagagtggtggtgtgtgcctgaaaagagaacaaagaatgaaccactgcactccagactgggtgacagagtaagaccctgccttaaaaaaaaaaaaaaagattttatagttctaagaatatgtaatatatattctaaaaatacaatcctttaatcaacagcagaaaaggtcctgcatcacccctgaggaagaggtaccagtctgaaatgccctctgcttattagctgacacctgctgctggtggtactcatctaactttgctgacctgcagaaactttactagtttccatgtcctcgtggcagcacgtgggatagccctcacaggacgacccagacttggcagaaagaacaaggacaaagaaaaagagactaccaaacaaaactcacctccttgcttgaacatacatagagttt

SEQ ID NO: 537573 - DNA, 422 bp, Homo sapiens
tcacgggctgctgctctgtgggctgaaactatgggtgaaccccaagagctcaggccacggagatgcacacagagggaaagagctgggtcacaggaactgacaacgtcaaaacatgatgcacaatttccagggtccatcccccttcagtggttcccaaacacccagggcctgtggcatctaatcacatggaaaatgtttagaaaaataaagatcctcccctgccctgggccactgagtcaggttgggtggtggtagtggggaaggatgttggctgagaatttattttgaaaagctcctcaaatgattctgacacctggaaaaatttgggaaccactggaccttcaggttaagcttayttaaaccacaccacatgctcaggttgttctaggacatatgccttttgttgcctgtccatgcagcaa

SEQ ID NO: 537574 - DNA, 477 bp, Homo sapiens
ctgtccctgaatcctctgggcctgcagaatgggcccacatcttctttctagagggcagagctctcttgcttgaagattggaagcaagtgtacaaatgtaagcagagaagcctaacaagagattaattttatggcttatatctttattagaacttaaatccaatatgtttrttagaccttacagttctgtctgagagaaaagagggatatgttaaagtcctcactccacaagatttgtaaccataggcataaaacctttaaaggatatactttatggcagtgcattccaaatttacacataaaacagatttctgctattgcattccaaattcagacataaaacagatttccaacttctttcatctgttgggctggtcccatgtcatatactcaatgtgcagtactcacttctttgagcctcagtaacatgtgagtagaaatgggatcattgtaataaatctacttgcatcaatatatg

SEQ ID NO: 537575 - DNA, 477 bp, Homo sapiens
ctgtccctgaatcctctgggcctgcagaatgggcccacatcttctttctagagggcagagctctcttgcttgaagattggaagcaagtgtacaaatgtaagcagagaagcctaacaagagattaattttatggcttatatctttattagaacttaaatccaatatgtttgttagaccttacagttctgtctgagagaaaagagggatatgttaaagtcctcactccacaagatttgtaaccataggcataaaacctttaaaggatatactttatggcagtgcattccaaatttacacrtaaaacagatttctgctattgcattccaaattcagacataaaacagatttccaacttctttcatctgttgggctggtcccatgtcatatactcaatgtgcagtactcacttctttgagcctcagtaacatgtgagtagaaatgggatcattgtaataaatctacttgcatcaatatatg

SEQ ID NO: 537576 - DNA, 477 bp, Homo sapiens
ctgtccctgaatcctctgggcctgcagaatgggcccacatcttctttctagagggcagagctctcttgcttgaagattggaagcaagtgtacaaatgtaagcagagaagcctaacaagagattaattttatggcttatatctttattagaacttaaatccaatatgtttgttagaccttacagttctgtctgagagaaaagagggatatgttaaagtcctcactccacaagatttgtaaccataggcataaaacctttaaaggatatactttatggcagtgcattccaaatttacacataaaacagatttctgctattgcattycaaattcagacataaaacagatttccaacttctttcatctgttgggctggtcccatgtcatatactcaatgtgcagtactcacttctttgagcctcagtaacatgtgagtagaaatgggatcattgtaataaatctacttgcatcaatatatg

SEQ ID NO: 537577 - DNA, 477 bp, Homo sapiens
ctgtccctgaatcctctgggcctgcagaatgggcccacatcttctttctagagggcagagctctcttgcttgaagattggaagcaagtgtacaaatgtaagcagagaagcctaacaagagattaattttatggcttatatctttattagaacttaaatccaatatgtttgttagaccttacagttctgtctgagagaaaagagggatatgttaaagtcctcactccacaagatttgtaaccataggcataaaacctttaaaggatatactttatggcagtgcattccaaatttacacataaaacagatttctgctattgcattccaaattcagacataaaacagatttccaacttctttcayctgttgggctggtcccatgtcatatactcaatgtgcagtactcacttctttgagcctcagtaacatgtgagtagaaatgggatcattgtaataaatctacttgcatcaatatatg

SEQ ID NO: 537578 - DNA, 429 bp, Homo sapiens
acacaactaactgatggtcttatccttctttcatgtataatatgcataagaggagattttacatattttgtgtattaaagggctttgaccatgcayttcatttccaaggtgacagtagttaccttgtgaaatgataatgaaaccacaacaaaagtcagcagtgaggattagcaaagaaaaaactgggaccaggagtggaggtgctgattgatgtaatgtagtcaccatgtacatgttgctatggaaattatgcaaaaatgaaagaaaaaagaaactaagtagttgtattgagaagatagaaatgacatggcatgtctctggtaacattattgaagagatttcttccatttcctgagacaagcatctagaatagttaaaaatgggaaattaaggggttcagtcagaagattaagttagcattacaaatct

SEQ ID NO: 537579 - DNA, 429 bp, Homo sapiens
acacaactaactgatggtcttatccttctttcatgtataatatgcataagaggagattttacatattttgtgtattaaagggctttgaccatgcatttcatttccaaggtgacagtagttaccttgtgaaatgataatgaaaccacaacaaaagtcagcagtgaggattagcaaagaaaaaactgggaccaggagtggaggtgctgattgatgtawtgtagtcaccatgtacatgttgctatggaaattatgcaaaaatgaaagaaaaaagaaactaagtagttgtattgagaagatagaaatgacatggcatgtctctggtaacattattgaagagatttcttccatttcctgagacaagcatctagaatagttaaaaatgggaaattaaggggttcagtcagaagattaagttagcattacaaatct

SEQ ID NO: 537580 - DNA, 435 bp, Homo sapiens
agatgactcacagaaattcaaaacagcctcttttttttaagtccaatgcaaatatagtcaagtgagggagggtacatcattcattctcaactcactgtgtttagtttcttaaaagatggccgaattgtaaaaaaagtttttgaatggggcagttctagtgtcagttgttctctcttttccttttttacttacccactactataaactaccatagatacattctttacattcagttagttagttttacgtttcccaatttccacatttgtaattatagcctaggaagcttctttgcttggagaaagatgttcttatattaaaacataaaactcttcccaagcatccactagttcatccagtaagcaatttcatcattacacaccagaggtcagtattgsattattaatttacatgagtgattaatttttactttcc

SEQ ID NO: 537581 - DNA, 435 bp, Homo sapiens
agatgactcacagaaattcaaaacagcctcttttttttaagtccaatgcaaatatagtcaagtgagggagggtacatcattcattctcaactcactgtgtttagtttcttaaaagatggccgaattgtaaaaaaagtttttgaatggggcagttctagtgtcagttgttctctcttttccttttttacttacccactactataaactaccatagatacattctttacattcagttagttagttttacgtttcccaatttccacatttgtaattatagcctaggaagcttctttgcttggagaaagatgttcttatattaaaacataaaactcttcccaagcatccactagttcatccagtaagcaatttcatcattacacaccagaggtcagtattggaytattaatttacatgagtgattaatttttactttcc

SEQ ID NO: 537582 - DNA, 474 bp, Homo sapiens
ggcacacgtgactagaccagtggtagaaggcatgcaggacttaggatttcacatttctttacgtttgacctttacatttctaacaagaaaggcattgtttattaatgtcttcattttacacaggaaaaaaaatgaagatcaggatagttaaggcagtaattttcctatgtttttcactcttttgaggaaygggctggccccgggagatgggatgcagtgagaaggaagaaaaggcagcctagcttttatctcatcaaagtcaaaagtcttatggacacacctttgcaatacctcccctggaagtgacttaagtgttatgtatttccatatgcccttattttagtaatttttccatggaaaaacaaatccatgactcagtaaaatttgacgaagtaaatcgcctaaaatttcacaacaaaactccccctaaatggcggtgggaagccacagttagaaacaaattttggcctacta

SEQ ID NO: 537583 - DNA, 474 bp, Homo sapiens
ggcacacgtgactagaccagtggtagaaggcatgcaggacttaggatttcacatttctttacgtttgacctttacatttctaacaagaaaggcattgtttattaatgtcttcattttacacaggaaaaaaaatgaagatcaggatagttaaggcagtaattttcctatgtttttcactcttttgaggaatgggctggcccygggagatgggatgcagtgagaaggaagaaaaggcagcctagcttttatctcatcaaagtcaaaagtcttatggacacacctttgcaatacctcccctggaagtgacttaagtgttatgtatttccatatgcccttattttagtaatttttccatggaaaaacaaatccatgactcagtaaaatttgacgaagtaaatcgcctaaaatttcacaacaaaactccccctaaatggcggtgggaagccacagttagaaacaaattttggcctacta

SEQ ID NO: 537584 - DNA, 474 bp, Homo sapiens
ggcacacgtgactagaccagtggtagaaggcatgcaggacttaggatttcacatttctttacgtttgacctttacatttctaacaagaaaggcattgtttattaatgtcttcattttacacaggaaaaaaaatgaagatcaggatagttaaggcagtaattttcctatgtttttcactcttttgaggaatgggctggccccgggagatgggatgcagtgagaaggaagaaaaggcagcctagcttttatctcatcaaagtcaaaagtcttatggacacacctttgcaatacctcycctggaagtgacttaagtgttatgtatttccatatgcccttattttagtaatttttccatggaaaaacaaatccatgactcagtaaaatttgacgaagtaaatcgcctaaaatttcacaacaaaactccccctaaatggcggtgggaagccacagttagaaacaaattttggcctacta

SEQ ID NO: 537585 - DNA, 474 bp, Homo sapiens
ggcacacgtgactagaccagtggtagaaggcatgcaggacttaggatttcacatttctttacgtttgacctttacatttctaacaagaaaggcattgtttattaatgtcttcattttacacaggaaaaaaaatgaagatcaggatagttaaggcagtaattttcctatgtttttcactcttttgaggaatgggctggccccgggagatgggatgcagtgagaaggaagaaaaggcagcctagcttttatctcatcaaagtcaaaagtcttatggacacacctttgcaatacctcccctggaagtgacttaagtgttatgtatttccatatgcccttattttagtaatttttccatggaaaaacaaatccatgactcagtaaaatttgacgaagtaaatcrcctaaaatttcacaacaaaactccccctaaatggcggtgggaagccacagttagaaacaaattttggcctacta

SEQ ID NO: 537586 - DNA, 555 bp, Homo sapiens
tctgaaatcacattctttgctttccttcctttgagagtggctggtctgtcagtaattctagcaaagaccacaccacatcctawcctcttaccagagagcattttcctgaaaatgaccatttctgcattcccccttatgttttcccctatactgaatcattccggttatcatttgtttcaaatgaagaattataattcaagtatttcttttagtgcaatgagtgagagataaagattacatttaacattaagattggttcagaacataaaagttctttttgcaccgtgttggaaactattgaagtactatcttcacagcgtaaccctccgtacatgcacttcattgctcctcaatttttctgcctttctccaacacaatacctgatacttccctactttctattctcttgtatccttattttttcctaattgagagagaacagtgatgataattaaacaattgagtggaaaccaattcctgcgatagtgctagatgcttaataggtaacatcttctgctcgagttactgagacttcacctactttgaagctactga

SEQ ID NO: 537587 - DNA, 555 bp, Homo sapiens
tctgaaatcacattctttgctttccttcctttgagagtggctggtctgtcagtaattctagcaaagaccacaccacatcctaacctcttaccagagagcattttcctgaaaatgaccatttctgcattcccccttatgttttcccctatactgaatcattccrgttatcatttgtttcaaatgaagaattataattcaagtatttcttttagtgcaatgagtgagagataaagattacatttaacattaagattggttcagaacataaaagttctttttgcaccgtgttggaaactattgaagtactatcttcacagcgtaaccctccgtacatgcacttcattgctcctcaatttttctgcctttctccaacacaatacctgatacttccctactttctattctcttgtatccttattttttcctaattgagagagaacagtgatgataattaaacaattgagtggaaaccaattcctgcgatagtgctagatgcttaataggtaacatcttctgctcgagttactgagacttcacctactttgaagctactga

SEQ ID NO: 537588 - DNA, 555 bp, Homo sapiens
tctgaaatcacattctttgctttccttcctttgagagtggctggtctgtcagtaattctagcaaagaccacaccacatcctaacctcttaccagagagcattttcctgaaaatgaccatttctgcattcccccttatgttttcccctatactgaatcattccggttatcatttgtttcaaatgaagaattataattcaagtatttcttttagtgcaatgagtgagagataaagattacatttaacattaagattggttcagaacataaaagttctttttgcaccgtgttggaaactattgaagtactatcttcacagcgtaaccctccgtacatgcacttcattgctcctcaatttttctgcctttctccaacacaatacctgatactkccctactttctattctcttgtatccttattttttcctaattgagagagaacagtgatgataattaaacaattgagtggaaaccaattcctgcgatagtgctagatgcttaataggtaacatcttctgctcgagttactgagacttcacctactttgaagctactga

SEQ ID NO: 537589 - DNA, 478 bp, Homo sapiens
ctggtagtagtccgggaagcatcacctggtgtttgcaatgagttcagactcctccccagatagtgggtctataatggacttctctaacatatcaccactgccatggccaaggcttggaccygaccctccctttaggtggcaaagtatgtgtggtgggaaagccaatggagggtgttaaggaagccaatggtggtttcccagggctctctttttaccaggagtcatttgtttatgaggttggaaatggaggagtatgggcacttagaacaccatgtcccagtgtgtatttctcagatcctgctgcgtagatgtggtggggcttaaggggtggctgaccgacctatattcaaataggtttggaaatgccaagtaaatacatttcggcattcatttcctgcaggaccgaatagatgaatcatgaatgccacaactctaaaaaggggtggaggggcgatgttggggcacagaagccttctct

SEQ ID NO: 537590 - DNA, 478 bp, Homo sapiens
ctggtagtagtccgggaagcatcacctggtgtttgcaatgagttcagactcctccccagatagtgggtctataatggacttctctaacatatcaccactgccatggccaaggcttggacccgaccctccctttaggtggcaaagtatgtgtggtgggaaagccaatggagggtgttaaggaagccaatggtggtttcccagggctctctttttaccaggagtcatttgtttatgaggttggaaatggaggagtatgggcacttagaacaccatgtcccagtgtgtatttctcagatcctgctgcgtagatgtggtggggcttaaggggtggctgaccgacctatattcaaataggtttggaaatgccaagtaaatacatttcggcattcatttcctgcaggaccgaatagatgaatcatgaatgccacaactctaaaaasgggtggaggggcgatgttggggcacagaagccttctct

SEQ ID NO: 537591 - DNA, 361 bp, Homo sapiens
agaggcagctgggcccacctctgcttctcatcacagccaggctccaagaatgggacgggaktgctgagacgggaaggtcagttctccatccccttggcttggggagtagatccgaggctggtctttctggaggtttggcttggggattggagacgccaagccccagcttagatccctgggtcaagactgcctcccagatctactcccagtgtggtttcccagggaagagcatgagcgcaacttctaactctgcccagagcctgcaagagctgcacaaagacctgtgcctacaagggctctgcagttggtttaagactctgcttctgaaatttgaaatttgtaatcggtttctaagaagagg

SEQ ID NO: 537592 - DNA, 361 bp, Homo sapiens
agaggcagctgggcccacctctgcttctcatcacagccaggctccaagaatgggacgggatwgctgagacgggaaggtcagttctccatccccttggcttggggagtagatccgaggctggtctttctggaggtttggcttggggattggagacgccaagccccagcttagatccctgggtcaagactgcctcccagatctactcccagtgtggtttcccagggaagagcatgagcgcaacttctaactctgcccagagcctgcaagagctgcacaaagacctgtgcctacaagggctctgcagttggtttaagactctgcttctgaaatttgaaatttgtaatcggtttctaagaagagg

SEQ ID NO: 537593 - DNA, 361 bp, Homo sapiens
agaggcagctgggcccacctctgcttctcatcacagccaggctccaagaatgggacgggattgctgagacgggaaggycagttctccatccccttggcttggggagtagatccgaggctggtctttctggaggtttggcttggggattggagacgccaagccccagcttagatccctgggtcaagactgcctcccagatctactcccagtgtggtttcccagggaagagcatgagcgcaacttctaactctgcccagagcctgcaagagctgcacaaagacctgtgcctacaagggctctgcagttggtttaagactctgcttctgaaatttgaaatttgtaatcggtttctaagaagagg

SEQ ID NO: 537594 - DNA, 501 bp, Homo sapiens
tatctcgttcaacgctatatttagtctcagcaactagcacagggcctgacacccctgtaggggcccggtaactatttgttaagtaaaggaatggtgtgggaatgttggaggaatgaaggattttcacccagagcaccttgcaccggagaactcgccatgtggacttgtcagatattatcttatcaatatctgtgtcytaagcaccacggcaggcatgaagtgaacacattgaatgaatctctcaaggccccaagaaggagactgtctgtctgcttgggtagcattttcccagctcctaccctctgaccttctagaaagccacaacagcgagcctccctgttctaatggaaaatcccagcatcactcttctacaaaggcaatctatcaatcacgccacagaatttcaccagatcacagaaatcaacctccgacaggctgcccaaagcccccgctatgctgtgcaaagttttgagatgtacagaggggttaattctggcagct

SEQ ID NO: 537595 - DNA, 501 bp, Homo sapiens
tatctcgttcaacgctatatttagtctcagcaactagcacagggcctgacacccctgtaggggcccggtaactatttgttaagtaaaggaatggtgtgggaatgttggaggaatgaaggattttcacccagagcaccttgcaccggagaactcgccatgtggacttgtcagatattatcttatcaatatctgtgtcctaagcaccacggcaggcatgaagtgaacacattgaatgaatctctcaaggccccaagaaggagactgtctgtctgcttgggtagcattttcccagctcctaccctctgaccttctagaaagccacaacagcgagcctccctgttctaatggaaaatcccagcatcactyttctacaaaggcaatctatcaatcacgccacagaatttcaccagatcacagaaatcaacctccgacaggctgcccaaagcccccgctatgctgtgcaaagttttgagatgtacagaggggttaattctggcagct

SEQ ID NO: 537596 - DNA, 392 bp, Homo sapiens
tcatctgtttgggtttatgtcagcagtacttttccccatcactataagctctggactaccttgtcartgtgcccaagtttgctgtaaagaagaaagactttcctctcattactcacctgacgtagcttcattatttatgtacaagttggagatgatctttggcctttttaaattacatttatttttattgtcttctgtaatcctatcatattttcaattacccactcattcattcagaagtagatttccccctttggcagaaaaaaataaagcaagtaattttacaaagtagctcaaaggtttctgtcccaatcagaattattcagctcagcattctgtcctctggattctcagagaatttatagaagaaaggtaattttttagataacaaa

SEQ ID NO: 537597 - DNA, 392 bp, Homo sapiens
tcatctgtttgggtttatgtcagcagtacttttccccatcactataagctctggactaccttgtcaatgtgcccaagtttgctgtaaagaagaaagactttcctctcattactcacctgacgtagcttcattatttatgtacaagttggagatgatctttggcctttttaaattacatttatttttattgtcttctgtaatcctatcatattttcaattacccactcattcattcagaagtagatttccccctttggcagaaaaaaataaagcragtaattttacaaagtagctcaaaggtttctgtcccaatcagaattattcagctcagcattctgtcctctggattctcagagaatttatagaagaaaggtaattttttagataacaaa

SEQ ID NO: 537598 - DNA, 440 bp, Homo sapiens
tgaatgtctcaatggaggaaataccaggatacattcttatgtcaagaaggggtaatggcagagggccrgtttcatatggatggaggaatagatagaagtcagaccatgcaaagctttttaggatatgttaaagattttggcctatatcctgtgtcatgggaagccattggaggattttaatcagagatgtgatataattagttctgtattcttaaatgatcattttggttgtcatagggagaatgaactggaagaggataagggagaaatcagaatgatcagtcaggaggcccttgcagtagtcccagaggggaagcaacagtggtttgtacaagggtggagatagagcaagtggaaatggatgaatggatggatcaaggtgctcttagagttagaatgtgcagaatttggggaagacagtgtgtcaagtataactcaga

SEQ ID NO: 537599 - DNA, 661 bp, Homo sapiens
ggggatcgcttgaggccaggaattaaagacaagcatgggtgacagagcgagaccccgtctctaccaaaaaaaccaaaacaaaacaaaacaaaaacacgattattctcaatcatcatttgattttatagatgtaaatagacattatataaatacacatgtagaaccagataaatatgcatatataaaagatgtagctgtgaccgggcacagtggctcacgcctgtaatcccagcactttgggaggctgaggcgggtggatcacgaggtcaggagtctgagaccagcctggccaacatggtgaaaccccatctatactaaaaatacaaaaattagctggcatggagggacgcatctrtaatcccagctacgcaagaggctgaggcaggagaatcgtttgaacctgggaggcagaggttgcagtgagccaagatcacgccgtttcactccagcctgggtgacagggcaagactccatctcaaaaaacaaaaaagatgtagttattaaatatatgtatgtgtatatatacgaaagatgtagtgttaacattgtgtatgtggagacatgtataaattgatgagcatatgtgtatgtacatgaaattgtaaatttcaaagaaaactatagtatagggacatgaatgtcaattgatgagctccttcac

SEQ ID NO: 537600 - DNA, 661 bp, Homo sapiens
ggggatcgcttgaggccaggaattaaagacaagcatgggtgacagagcgagaccccgtctctaccaaaaaaaccaaaacaaaacaaaacaaaaacacgattattctcaatcatcatttgattttatagatgtaaatagacattatataaatacacatgtagaaccagataaatatgcatatataaaagatgtagctgtgaccgggcacagtggctcacgcctgtaatcccagcactttgggaggctgaggcgggtggatcacgaggtcaggagtctgagaccagcctggccaacatggtgaaaccccatctatactaaaaatacaaaaattagctggcatggagggacgcatctgtaatcccagctackcaagaggctgaggcaggagaatcgtttgaacctgggaggcagaggttgcagtgagccaagatcacgccgtttcactccagcctgggtgacagggcaagactccatctcaaaaaacaaaaaagatgtagttattaaatatatgtatgtgtatatatacgaaagatgtagtgttaacattgtgtatgtggagacatgtataaattgatgagcatatgtgtatgtacatgaaattgtaaatttcaaagaaaactatagtatagggacatgaatgtcaattgatgagctccttcac

SEQ ID NO: 537601 - DNA, 661 bp, Homo sapiens
ggggatcgcttgaggccaggaattaaagacaagcatgggtgacagagcgagaccccgtctctaccaaaaaaaccaaaacaaaacaaaacaaaaacacgattattctcaatcatcatttgattttatagatgtaaatagacattatataaatacacatgtagaaccagataaatatgcatatataaaagatgtagctgtgaccgggcacagtggctcacgcctgtaatcccagcactttgggaggctgaggcgggtggatcacgaggtcaggagtctgagaccagcctggccaacatggtgaaaccccatctatactaaaaatacaaaaattagctggcatggagggacgcatctgtaatcccagctacgcaagaggctgaggcaggagaatcgtttgaacctgggaggcagaggttgcagtgagccaagatcacgccrtttcactccagcctgggtgacagggcaagactccatctcaaaaaacaaaaaagatgtagttattaaatatatgtatgtgtatatatacgaaagatgtagtgttaacattgtgtatgtggagacatgtataaattgatgagcatatgtgtatgtacatgaaattgtaaatttcaaagaaaactatagtatagggacatgaatgtcaattgatgagctccttcac

SEQ ID NO: 537602 - DNA, 621 bp, Homo sapiens
ctggtatcacagatgccacaggagaatcttggtgcaggcaccagtaaccagrtgcacgggtttcggctttaacctaacttgtagctacagcagtgagggacctctcgtgacatagtagtgcctggagcatcttggattgctagaatttgcagcatatgatttagaaccttccactgcctggttgaagtggccgctttgaaattctattgagccgaaatgtgatcctgtagggagggtactgccactgttctcattaaactcagtgaaggttgatgccctgggaactttggtttattgccttagttttatatctgaagaaagatagagcatgtctttaaaatgagcacatgaggctgggtgtggtggatcacctgaggtcaggagttcgagaccatcctggccaacatggtgaaaccctgtctctactaaaatacagaaaattagctgggtgtggtggcgcgcacctgtaatcccagctactcaggaggctgaggcacgagaattgcttgaatccgggaggcggaggttgcactgagctgaagtcacaccattgcactccggcctgggcgacagtgagactccatctcaaaaaggaaaaaaaaaaaaaagaaagaccacatg

SEQ ID NO: 537603 - DNA, 621 bp, Homo sapiens
ctggtatcacagatgccacaggagaatcttggtgcaggcaccagtaaccagatgcaygggtttcggctttaacctaacttgtagctacagcagtgagggacctctcgtgacatagtagtgcctggagcatcttggattgctagaatttgcagcatatgatttagaaccttccactgcctggttgaagtggccgctttgaaattctattgagccgaaatgtgatcctgtagggagggtactgccactgttctcattaaactcagtgaaggttgatgccctgggaactttggtttattgccttagttttatatctgaagaaagatagagcatgtctttaaaatgagcacatgaggctgggtgtggtggatcacctgaggtcaggagttcgagaccatcctggccaacatggtgaaaccctgtctctactaaaatacagaaaattagctgggtgtggtggcgcgcacctgtaatcccagctactcaggaggctgaggcacgagaattgcttgaatccgggaggcggaggttgcactgagctgaagtcacaccattgcactccggcctgggcgacagtgagactccatctcaaaaaggaaaaaaaaaaaaaagaaagaccacatg

SEQ ID NO: 537604 - DNA, 516 bp, Homo sapiens
agctgtctccaactggttattccttttcttaaggacactgctggggagggatgtgctgatgtgtttgtgtgtgtgtgtgtgtgtttgtgtgtgtgtactagtgtgattttttttcccccaatggctgtcatgcgttttatgatcttcacagatgtaagacttcaccatgaagagaagggaggggagaaaggctattatttgggagagggggagaataggtgaaamggatgggaggcaggaagcagaattgtgtagatttaattggcctcgttttatagcagttagctctgttttcacggggtagcgatgaataggcccataatggtgaactgtttttcactattattagtccaggagatgaaagtttcattgttattcttccttggagctcaggaggccactccaaatattaactcattttagcctcagggactcagaatttcagtggaaccatttgaacttggctcagtttataataatgatcccgtatgtttgtaaagtgattcagcttacaaa

SEQ ID NO: 537605 - DNA, 516 bp, Homo sapiens
agctgtctccaactggttattccttttcttaaggacactgctggggagggatgtgctgatgtgtttgtgtgtgtgtgtgtgtgtttgtgtgtgtgtactagtgtgattttttttcccccaatggctgtcatgcgttttatgatcttcacagatgtaagacttcaccatgaagagaagggaggggagaaaggctattatttgggagagggggagaataggtgaaaaggatgggaggcaggaagcagaattgtgtagatttaattggcctcgttttatagcagttagctctgttttcacggggtagcgatgaataggcccataayggtgaactgtttttcactattattagtccaggagatgaaagtttcattgttattcttccttggagctcaggaggccactccaaatattaactcattttagcctcagggactcagaatttcagtggaaccatttgaacttggctcagtttataataatgatcccgtatgtttgtaaagtgattcagcttacaaa

SEQ ID NO: 537606 - DNA, 601 bp, Homo sapiens
ctgaatagaagatctttaccttgtcattctggagaaagttctttgaatctttgcctttggaactctgcttgctatgtcatcctccactaaagtcccacccctaaggcttcttgcctctaattaagtgagccctttaaaatgcaaatgtttctgggaggtcacagtttaaatatttcagacctgggacataacatttttcagctagaagaagctttagcgtcacctgtttccaaacccgtatttagagatggaaatcaagagagtggccrtcctgaggaacacacagtcagaaatgagtgagtgacatgtgattcatttaccatgtcatttgaatgcaggttaacccatacaccatgaactaaaaaaataaaacacaaagttcaacaaagttcttgtgaatttcatccagaaacctatacagcgaaatcctatttgtttatttaatgtatgacttttatccaaaataacattaaagtacatcaggactattcattttaccaacatatatttactgggcacctataaaacgtatgatgataagttaggtgtgaaggtatgcaggtaaaagtaatatgagctcagcaaaaagtaggtatccatg

SEQ ID NO: 537607 - DNA, 664 bp, Homo sapiens
tccccaccatacaagagctctattgatctcctcttagctccacaacctctccacgccaccaggcattctcaaygtgcttttcctcctcccacccatcctccatttcttatttattcttcaagtattggcttaaatttcatttcctcaaaaaggccttcctgagccacaaactagataagccctccaacctcatgctcccataacacagagttctacttttaaaacactcatcagatttttaaaacatactcatttactatctgcctttcctgattggctacaagcttcttaggttgcttatcataagttggatgaatgtttaaggtaagaatcaaccctaaaaagcctcaaattaccactttggcaactcattcatttattcagccatcatcttctaaggacccagaatgtgccagggctttgctagtcattaaagctgcagagactaaggagacatgattctcaccctctgggcacttagaatctactgtactactaaagagcccaagcttcagagtcagagacattggttccctcacgtgtaaaatgcggctatctgttatggcagaggctatctgctatggcaccttcatcacatcctgttgacctacaccttgttccagccgcagctgtgatagatatttccatgccagctcagaatcac

SEQ ID NO: 537608 - DNA, 664 bp, Homo sapiens
tccccaccatacaagagctctattgatctcctcttagctccacaacctctccacgccaccaggcattctcaatgtgcttttcctcctcccacccatcctccatttcttatttattcttcaagtattggcttaaatttcatttcctcaaaaaggccttcctgagccacaaactagataagccctccaacctcatgctcccataacacagagttctacttttaaaacactcatcagatttttaaaacatactcatttactatctgcctttcctgattggctacaagcttcttaggttgcttatcataagttggatgaatgtttaaggtaagaatcaaccctaaaragcctcaaattaccactttggcaactcattcatttattcagccatcatcttctaaggacccagaatgtgccagggctttgctagtcattaaagctgcagagactaaggagacatgattctcaccctctgggcacttagaatctactgtactactaaagagcccaagcttcagagtcagagacattggttccctcacgtgtaaaatgcggctatctgttatggcagaggctatctgctatggcaccttcatcacatcctgttgacctacaccttgttccagccgcagctgtgatagatatttccatgccagctcagaatcac

SEQ ID NO: 537609 - DNA, 664 bp, Homo sapiens
tccccaccatacaagagctctattgatctcctcttagctccacaacctctccacgccaccaggcattctcaatgtgcttttcctcctcccacccatcctccatttcttatttattcttcaagtattggcttaaatttcatttcctcaaaaaggccttcctgagccacaaactagataagccctccaacctcatgctcccataacacagagttctacttttaaaacactcatcagatttttaaaacatactcatttactatctgcctttcctgattggctacaagcttcttaggttgcttatcataagttggatgaatgtttaaggtaagaatcaaccctaaaaagcctcaaattaccactttggcaactcattcatttattcagccatcatcttctaaggacccagaatgtgccagggctttgctagtcattaaagctgcagagactaaggagacatgattctcaccctctgggcacttagaatctactrtactactaaagagcccaagcttcagagtcagagacattggttccctcacgtgtaaaatgcggctatctgttatggcagaggctatctgctatggcaccttcatcacatcctgttgacctacaccttgttccagccgcagctgtgatagatatttccatgccagctcagaatcac

SEQ ID NO: 537610 - DNA, 656 bp, Homo sapiens
ggggccactttttttttaatcacagttctggtgcccctgtagtttcttgtttctgatcattaccaactgcctgtgagctctttgcagacttgagtggtctcacttgtatccccagcgcctagtttgttgcccagcacatagcacaagctctgcaaatattcctagactactacatttaatgaattctgtttgttccacactaagaactaaggtcctttctgagcacatgatcaaaaagtagataaaaagtagtaaatacagggactcttgggtgggaagttgttcatattacttcatttgcaagtgagggacaccatggattcttgacttttctgtttggcagaaaggtctttgggcatttctaaagagaatacttgaaaaccgaagggtggagataaaactgtaaaacctttagaagaagatacaggagtaaatcttcataaccctgaattatgcagtggtttcttagatatgacaccaaaagcacaagcaacaayaagaaaaatatacagataaactggacttcatcaaaattagagacgtgtatgctctgttcaaaggacaccatcaagaaagtgaaaagtcagcctccgaatgggagaaaatatttgcaaatcatatacaaatggcctccaacttatgatggtttaacttga

SEQ ID NO: 537611 - DNA, 639 bp, Homo sapiens
ttctagagagaagttagccagaaaggtaaagcagctaccatgaccattgtgttgtgctagatgttgtggatacacagtgaacacctggccttttggtgctggcaccagttagcacaatttcatttcatgcaactataagaccaaatggttaaccttggcctttgaatatttttaattgacaaataataattgtaggctgggcgtggtggctcacacctgtaatctcagcactttgggaggccaaggcaggcaaatcatgargtgaggagtttgagactagcctggccaacatggtgaaaccccgtctccactaaaaatacaaaaaattagctgggcatagtgacgggtgcctgtaatcccagctactcaggaggctgaggcaggagaatcgcttgaacccaggaggtggaggttgcagtgagctgagatcataccactgtactccagcccaggcaacagagcgagactccgtctcaaaaaaaaaaaaaaagacaaataataattgcatatatttatgggacactatgtgatgtttcattacgtgtatacactgtggtataatccaatcaggctaattaatagatccatgacctcaaatatttatcatttctttgtggtgagaacaattaaaaaaccctc

SEQ ID NO: 537612 - DNA, 639 bp, Homo sapiens
ttctagagagaagttagccagaaaggtaaagcagctaccatgaccattgtgttgtgctagatgttgtggatacacagtgaacacctggccttttggtgctggcaccagttagcacaatttcatttcatgcaactataagaccaaatggttaaccttggcctttgaatatttttaattgacaaataataattgtaggctgggcgtggtggctcacacctgtaatctcagcactttgggaggccaaggcaggcaaatcatgaggtgaggagtttgagactagcctggccaacrtggtgaaaccccgtctccactaaaaatacaaaaaattagctgggcatagtgacgggtgcctgtaatcccagctactcaggaggctgaggcaggagaatcgcttgaacccaggaggtggaggttgcagtgagctgagatcataccactgtactccagcccaggcaacagagcgagactccgtctcaaaaaaaaaaaaaaagacaaataataattgcatatatttatgggacactatgtgatgtttcattacgtgtatacactgtggtataatccaatcaggctaattaatagatccatgacctcaaatatttatcatttctttgtggtgagaacaattaaaaaaccctc

SEQ ID NO: 537613 - DNA, 495 bp, Homo sapiens
agattctccttttcactcacctactctgacactcagtcactaagtctggcccttctcctccattctcttgatggtgagtcctattcagtatctcattatctcccacctggctgattgcaatagctttcttcaaatctctctgctgttattctccttktcctcctccttcttagaccctgtggcaagattttgtcttggaaacacctccttgcctcaggagccgctggtagaccagcagcctccatgatccagcccaagctactttcccaacctagttccccatgattcccctgcatgtcccatttgtaccagcaaaccaagcaactcactttcccagagtatgtactcaattctattccctgagtgcgcgcgcacacacacacacacacacacacacacacacacacacacacagagtgcagttttgcttatgatgtcatggaatgttcacaaaggaggtgacataggagccaaatccttgggaaaggagcagtt

SEQ ID NO: 537614 - DNA, 505 bp, Homo sapiens
gcttatataccatagggaatttgcctgatgacaggatttatggcaagtacaataatatctaggttgttttgagccaagggcaggatttactgtaagtacatgctcttacacaaggaacagtagatacaatagaaatcttcgaggcatacacggaactggtgttaatcagaagtcaacacggtggattagcatcaacgatggagttgctttagtctccacaaacaaccacagactaaccacctaagactagttataatcaaaagaacaaataatcaaaygaacttcctcacccaaataatgtttgctggggatcgtctaccagaaaagagtgatagttttaataacctgtattttaggctgcataatatgcctccaaaaaagttatgtgacttgggaagttataaaagaaaaccaaagaaagaacaaaaacgacttaaaagacagaaaggttttgttgacttttcagaacattgactctgttgagcccttggaaaggaattagaga

SEQ ID NO: 537615 - DNA, 512 bp, Homo sapiens
caattatatggtaagaatgtctatgtaattggtttatttaaagatacaaactttattagaagctcaaaggtaatgcaaagtcagacacatgggttgagtcccaaatatgccttctgttctctttatgattcacagtttatgggtctatagttttacaatcaatgacaccaaacctgttgttacgtgggtcacggtaaagcaattaattagctaataccaatatttccgtgtctttttctgactttcagagaatggaattgagagctacctgactcttgctacattcccgtaactagtatatcatttattctagtaaatgawtaagtacaattaagtatttctgaagttatgtttttagaaaaaattactaccagtataaaacctcttgcaaactaatacatctgtctcatagaaaatacttaaagccactctttcctgaacactgtagtatatgtgcttgaataataagtgcatctactgataaataataagtgcatctgcaaatccaatct

SEQ ID NO: 537616 - DNA, 629 bp, Homo sapiens
tatttgatttggctaattggctgcttcaatagtttaggtgttcaaatgcagaacttaaaaacttaattctgcacatgttactggactccatacaatactcactgtgtattattctgggaaatatgctttttttttttttttttttttttgagatgcagtctcactctgttgcccaggctggagtgcaggggcrcagtcttggttcactgcagcctctgcctcttgggttcaagcgattctcttgcctcagcctcccaagtagctgggactacaggtgtgcgccaccgcgcctggctgatttttgtatttttttagtagagacgtgtttcaccatattggtcaggctggtctcgagcacctgacctcatggtttgccctccttggcctcccatagtgctgggattacaggcatgagccaccgtgcccagccaactatgcgtattgtaaaattgaatagagcacattattgtctttaaggagattaaggcagataagtcatgtacatgtttaatgagtggcaagttcgtagggtggaggccaccaaaacgctatggaataaagtattgtctagttgcacgtgggcaggagaggctccatggaggtgatgacaagtaagagaagccagaaag

SEQ ID NO: 537617 - DNA, 386 bp, Homo sapiens
gctgtgcccacacaggctctrcattgctttcaagaggagccaatgttgccaagctcatctcttcccacgatttgccatttgacttccacagagaggaactgttctctctgtacagatgccaaccatgactgtgatgacaccaggctaacaggttgctcctgaggaagcttcggcaccacccagtggacaagaacaagcattctctgggtccctgaaagctgaattatttttgctctcatgccggctcttacgttcatacgtgtatgagtgtgtgtgcgtgtgagtgtgaacatgtgagtgtgagaactcaagggtgtgagtgcatatgaatgagagtgtgtgtatgaggatgggcatgtgtatgcacgagtgagggtgtgtgagga

SEQ ID NO: 537618 - DNA, 386 bp, Homo sapiens
gctgtgcccacacaggctctgcattgctttcaagaggagccaatgttgccaagctcatctcttcccacratttgccatttgacttccacagagaggaactgttctctctgtacagatgccaaccatgactgtgatgacaccaggctaacaggttgctcctgaggaagcttcggcaccacccagtggacaagaacaagcattctctgggtccctgaaagctgaattatttttgctctcatgccggctcttacgttcatacgtgtatgagtgtgtgtgcgtgtgagtgtgaacatgtgagtgtgagaactcaagggtgtgagtgcatatgaatgagagtgtgtgtatgaggatgggcatgtgtatgcacgagtgagggtgtgtgagga

SEQ ID NO: 537619 - DNA, 386 bp, Homo sapiens
gctgtgcccacacaggctctgcattgctttcaagaggagccaatgttgccaagctcatctcttcccacgatttgccatttgacttccacagagaggaactgttctctctgtacagatgccaaccatgactgtgatgacaccaggctaacaggttgctcctgaggaagcttcggcaccacccagtggacaagaacaagcrttctctgggtccctgaaagctgaattatttttgctctcatgccggctcttacgttcatacgtgtatgagtgtgtgtgcgtgtgagtgtgaacatgtgagtgtgagaactcaagggtgtgagtgcatatgaatgagagtgtgtgtatgaggatgggcatgtgtatgcacgagtgagggtgtgtgagga

SEQ ID NO: 537620 - DNA, 547 bp, Homo sapiens
taaaagataaaatcttttttaaaatgattaaaagattatatagaaaaacatatgttggaattcaagcacagaatgctagtaacttgaaatgaagagcagtcttttatgacatggratatattgattttaaagagaaaattttatcttgaccaaagttgaattttgtttcagcagtagctcttgaatggatcgatggatctctaaatgtgctaaactcagacctaataaagagcagcaacatggaaggaaaaggggtgattgattcgtgaatgcaaagtgcagaaatgcaaatgattaaattcccctgtggattcatgttttgagcaggatattttgagcagggagtctctacggactctgttctgagtcctcggtgttccgtggtgtgtatgttgataggttcctctcatacaagacttactttctagataggagaagggcagaatataacaaacagataagctacaaatatcatttacgatggtgccatgaagaacataaaataggctgatgtgaagaagcggcagagcaagcaagggtggagcag

SEQ ID NO: 537621 - DNA, 547 bp, Homo sapiens
taaaagataaaatcttttttaaaatgattaaaagattatatagaaaaacatatgttggaattcaagcacagaatgctagtaacttgaaatgaagagcagtcttttatgacatggaatatattgattttaaagagaaaattttatcttgaccaaagttgaattttgtttcagcagtagctcttgaatggatcgatggatctctaaatgtgctaaactcagacctaataaagagcagcaacatggaaggaaaaggggtgattgattcgtgaatgcaaagtgcagaaatgcaaatgattaaattcccctgtggattcatgttttgagcaggatattttgagcagggagtctctacggactctgttctgagtcctcggtgttccgtggtgtgtatgttgataggttcctctcatacaagacttactttctagataggagaagggcrgaatataacaaacagataagctacaaatatcatttacgatggtgccatgaagaacataaaataggctgatgtgaagaagcggcagagcaagcaagggtggagcag

SEQ ID NO: 537622 - DNA, 589 bp, Homo sapiens
tgtctttgcttttacaaagctgcctgttcttcttgacttcacccagggtatggccacagcagcaaggaatgaccttgctccaacaggaagcccaggtatcccactgaggaagtgctatccccttttccccatgtgactcactttagtacgttgtttattttgaacttgtgactcactttagcgcgttgtgtattttgaagtaaagacagagcacgacaactatcagcaggagcaaggccgccaggataccaccagcgatgacargcataatcactgtatggaggtcaaaagacttcgatgtacctaggcagataagtgcaagcaagcactgagcccacgtggtctccctccccacacaaccactaagcaatgccaatgtcaggggaggaagaagaaaccccaaacacagatccttatgtgtgtaaaacacaaatgtcttcccagggcggcctaggatcccaagctggcccagagatggaaaaaaagaaataaaaaaagtcagtttgtcaatgaaaaggaatggaaatgcaaagtccagagagaaggctatcagaaggacaaacagtgggaagaatctttccctttcaca

SEQ ID NO: 537623 - DNA, 591 bp, Homo sapiens
ggcctgtgcacttgccctctcttttgcctaagatgcagcccccaagctcagatcacccatgaatgcctccctcttgtctttctgcctttgttcagatttcatctctcaagatgccctccttctcactgtcatatttcctccccaccccaaggcaaccaccatctatgcagtcatcctgtttattgtatccttagctcctctcaccagttgaattcttcatttatttttgttgtytaactctccacttagaatacaagtttcatgagggcaggactgtgtctctcacattcaattctatattgcttaggccctagatcaataagtaatgtttactgactgaatgaatgaaaagagggcagcccccacccaccaccacttgctcctcccaatctcaatgtggacactaggatttctttctctcaactgcaaaacaccgtgcccgagagactaattcacctgcttcagtctctccagacataactggttagaaatcgctgtgggggaatctggatctgcactctttttctcttcatcctctaccctcttcccctcccccacagggtcagccacctggcagggcatctgaatgtc

SEQ ID NO: 537624 - DNA, 615 bp, Homo sapiens
tgctgtttgatagtctgtgggcttgtgcatttaaagtttgctttttcaaggtgtctgtgagctctgtgggggcaggagctctgcaaccctaggtatcagagaacctagaacctattaggtgctggcacatgttatgatcaatgactgaaatctgaattttgtcagtctggtactcactttttctgactgagcctctaaatttagacagtgcagtgactcagacatagcagttaaaccctgaccaatattatttcatttattaaaaagaatgcatactttctacattgcttgtaagtcaccaacatttaactacttccaatgtgttttagtaatatctttctgagttgcaatgaaggcaaccaggaggcaacaactaaaacctctgtttgaaagatgaggaaactaaagctcagagagtggaagtgactcccttgggtcacacagcaagtcactggcagcaaagaaactaggacctagttctataatccttccctccatctcctgcttcccaagtccaatgctcttccacccycagccttcctgaaccttctgaaatgatgtgttgttccccattcccagtcccccaactctattattcaaaggccatgattttgg

SEQ ID NO: 537625 - DNA, 291 bp, Homo sapiens
tgctcttcaataggaatacaattctaaacaagataaataagtaaatgttaatattagtaatcttgtcagctaccttttagagtaattaacagctaacttttggagtatgagtcaggcactgtgcactatttcatctaatccacaaaacatccttatgaagtagggtaatattactatcactttatattaaattaaattgaggagaccaagrctaaaggtggcctggccaaagtaacacacccagtaagtggcagaactgcaacatgaactcaggccacttaaccccacagt

SEQ ID NO: 537626 - DNA, 646 bp, Homo sapiens
ttttcaattccatgtcaggtagttggatgtttgaaataccgggataaacattggcaccatttactgaacaactactaygtgtcaatatgttttctaaaggagtacagcagataagatgtaagaaaaacaaataaagctcttttgcttctttgagccttagttttatcatctgagaaatggagatagtctctgtgttggcaacttcactggatattgtgaggatcaaattaaatcacgtgtatggtggcagtttgtaaatatcaagtgtcctgaatcacagagtattattttctttaattgactaactaggttcaatcacgtgttaatgatgtggtttcattgcttggaagctagcaattcaggtgttacagatgccaaagaaaggtgatgttgatcattcttctatacctttcaactcacatatgcagtaaagggcaagaaaatggaactagtcctaacacagacgaggactaatatattcaaggtgacttttattttctttcctgatgtacagaggttcctgcaggcttgtaccacttagggagcttggatgctgctctttgttcgtaagaagctgtgcatgccagtccctgcagtttgagcctgcaggttaagaaggctctgtggaggcaatcgcagagtacat

SEQ ID NO: 537627 - DNA, 646 bp, Homo sapiens
ttttcaattccatgtcaggtagttggatgtttgaaataccgggataaacattggcaccatttactgaacaactactatgtgtcaatatgttttctaaaggagtacagcagataagatgtaagaaaaacaaataaagctcttttgcttctttgagccttagttttatcatctgagaaatggagatagtctctgtgttggcaacttcactggatattgtgaggatcaaattaaatcacgtgtatggtggcagtttgtaaatatcaagtgtcctgaatcacagagtattattttctttaattgactaactaggttcaatcacgtgttaatgatgtggtttcattgcttggaagctagcaattcaggtgttacagatgccaaasaaaggtgatgttgatcattcttctatacctttcaactcacatatgcagtaaagggcaagaaaatggaactagtcctaacacagacgaggactaatatattcaaggtgacttttattttctttcctgatgtacagaggttcctgcaggcttgtaccacttagggagcttggatgctgctctttgttcgtaagaagctgtgcatgccagtccctgcagtttgagcctgcaggttaagaaggctctgtggaggcaatcgcagagtacat

SEQ ID NO: 537628 - DNA, 436 bp, Homo sapiens
cagctctggtctgggccaagaaggtactactgtgagtgtgtggcccccaccgtgggaatttcactaaccatcgttctgttctgttgtccatgttatcgtgtgctggagggaatgggcttcattgctctcctatcaaatayctacagagggaggaacgatgtgtttttgtttcctgcatcctcttctaaccacttatttctgcttttttcagattctcaaaattaagaggatgctacataataatgatgcaaatatttaccaatttgggaatctataagcagttttttaatacctggtctgaacactatatgtatctcttgggggatattaatccaatcctaacttattttgtttcaattgactgagctcctaaaccatttggagacaactaaaatttccaatgcacaggcatagtttgggcaagttcaggaattat

SEQ ID NO: 537629 - DNA, 609 bp, Homo sapiens
tttgttttttctttttcccttctttcttactgtttcttttttctggatgcattatgttctttaaagactagtgattttccacaccaaattattttagaaatttcagcattatatggcagttttttttttttttttttttttttgagacaggktcttaccttgtcaccttgtcacctatactggagtgcagtggcacaaacacgattcactgcagcctcaacctccccgggcccaagccatcagtcttccacctcagcgtcccccaccaacaagtagctgggaccacaggcacatcccaccacacccggctaagttttgtatatttcgtagagatggggtctcagcatgatgcccaggctggtctcaaactcctaggctcaggcaatcctccctccttagccacttacaggtgtgagccactgtgcctggcctattttaaaggtgttttttctttctttggtttcggagagaaatcagtttcctgtgtatcttaagctgtgtggatagggggattgtgataatgggtcattattttataattttgctattttaaatgagttttaaaacctgtagccagtttctgatctcagggaacatacctattaactc

SEQ ID NO: 537630 - DNA, 609 bp, Homo sapiens
gtctttggaatttacattttagaaatcatttcctctccctgataccttttccctttgttcctacaaaatatacctaaatgtgttaaggcagaaactctaaaactattacaggaaaaagaaaaaaagaaaaaaaaaaaacggtttgcaagaaaataatctaatgctagagggaatagagtaaataatcattatttgaagtgaaaactagaaaattaattaaccaattttgaaaatatactacatactattttaaaataaaagttttatacaaaatagtgaattccaaatgccttcttttgtttgggctaaacataaaatatttatagaaaattgatcatcaaagtcctgtttctataattgcctgatatttatttcaamatttctgatacagcaaatggagtgaccaatgtcaacaggcaacatttaaaaagccatttctttgagattttgaatacttttgccacccctggggacatgctttgaatctggcaggaacattagctgatcatgctacttcaatgtgacagcttcagatttttaacaggggaaaaaggcagaactaatggatgtgaataagcttaaaagcacgggaacttatcaatcactgta

SEQ ID NO: 537631 - DNA, 289 bp, Homo sapiens
tcctgcccctgggagttgtcatgcttatccggagtgagaagagcctggagatgctgattcagtgagtgggaggcatctctcccttcccgtaacttctcccttaactggatcagctctcgttcctgagagtgraccaggactttatattgcctaaggtgagatagtagagaaaatttaacacggaaagggatgagtgatcagttctaatattgcaatagagatttctgagacaatatcctcaaggagacctccaagcaggaggtcagcacatgtttaaagaaatgtctgt

SEQ ID NO: 537632 - DNA, 546 bp, Homo sapiens
cacacatgttgtcagtggcagtgggggagaagagtgtccagggtccaggtcagctccaccatacctgctgtgactgtcatccccctcataagctgagaagcacttacaactaaatagcacccactcgcccaaccttgctcagaagttggcaggcatgtcacctgcatctctcctctccttgaaccagtgctgttgctggggtggaggaggcagagactcagatgaaggagacgaagaagcacttgggtgtatttcttggtcttatttcacttttccacattcaccattactgaactggaacacagcaacctcttatgtacacaatggtttattaaaggaatgtatggcccacatcaacctagcaaggattctactggtaaaccttccyatggccaaaggaaaaacaagcaggagttgagtggctggggtggggtgcaggcaatggagagagggcagaagggtgtagaagctgaaggggtctagaagcttactcctgagtttcttccttctgtcttcaaatctttacttcttatggccaaagaccca

SEQ ID NO: 537633 - DNA, 675 bp, Homo sapiens
tgttcagagggggagctctcgaagtccatgtggggttccatgtgcatacttatcaaggactagactgtacctgcacgaggaaaagactaacagatttaacagaggggtggctgttataaaattgagtttggaccagcggtacttgaggtggaggaggattggggaatggatgatggagttcctgccatccagggtgggaagaacccatgcacacctcattagcacccaggtatccaactaagacactagaatggctgtgctttaggaataagtgtcatgctttaaaaccccttctagaccagccctagtaaagcctgaaatcaaaccctgtcaaaatccacaaaggggtggattggtgattgagtcctgccaaattagagggtcttgggaaatgctgtgggctttccgtgaatccactgtaataaaacataagccaaatccacataagtccaatgtgatcaggcagtaattttactgcccactagaacaaaattaattcacacratcaatgacagaagttagccaagtcgacatttaagcaaaatacgtctaagaacagctaacaaataactcttctcaaactcacatagaacattcaccaagacagaccacatatgctgagccatacttagtattttctgtcctttctctttgactcatgtatactgtgatcaa

SEQ ID NO: 537634 - DNA, 635 bp, Homo sapiens
ctgctggagaagtccctttgcacaccaaggcatgggcagcaaaggcaagactggccacaaggctggggatgggctaaagtgacgggcttgctgacgtagtagctcccagacagatgacccctggaggcagtcactaaaccctgcttttttctctttgaaagaattacatacctccctgagattatcaggcctgagcacaattatgtgtttgctgggaccttggagtagagaggctgagaaggcactacagaaattgcaacaaggcgcctgtgatcccagcactttgggaggccgaggcgggtggatcacgaggtcaggagatcaagaccatcctggctaacacagtgaaaccccatctctactaaaaatacaaaaaattagccgggcgtggtggcaggcacctgtagtcccagctactcaggagactgaggcaggagaatggcatgaacccaggaggcagagcttgcagtgagccgagaccacgccactgcactccagcctggggacagagcgagactccgtctcaaaaaaaaaaaaaaaaaaaacaacaacaaagaaattgcaacaagaaactccatgagacgtgggtggatggtggcratgcctgtctctcccaaaacctgccctatctccca

SEQ ID NO: 537635 - DNA, 536 bp, Homo sapiens
aggtgcccaatcttccagctagcaggaccacggrccaaaaaaaaaaaaacctttttttttttaaataaattactcagtctcaggtattcctttatagcaagtttgttcaacctgcagcctgcaggctgcatgaggcccaggacagctttgaatgtgacccaacacaaatttgtaaactttcttaaaacataatgagatttatgcacagatttttttttttttttagctcatcagctatcgttagtgttagtgaattttatgtgtggcccaagacaatttttcttcttccagtgtggccgagggaaagccaaaagattgggcacccctgctttatagcaacacaaaacagactaagacacccctgttccaacagtcttgaataaaatcttccttgccatttttaacaagttcagaataattcctctttaacagttctaatactaccccaaaacttcgttgctagaaaccaccatttggttttgctcacagtgtgggaggggcatgggagaagtctgtctgggacccatgaggagtca

SEQ ID NO: 537636 - DNA, 571 bp, Homo sapiens
gcataggggaataggaaaaatgcaatggtagggcaatgaaaagaagggaaaaagaagagtttggaggawgaaagtgcccagagtgaaaaatgtacttaaataatatctgcagacctaaaaacaagcctttttaaagttccccttagattggggaagaatttaacttgctgccttcttttctaggttggatgccacacctgcggttcacttctctaaggatccataccttctttatggggagatgttgcttaaagtgtgttatcttctgctacacatattggaatccatttttacttgaaatttttggaaatgctaatgctagttgtcagcatatctttatgcttattgttttatttatatcatagtttggtccagaaagaattttagatggcatatataaatacataaaatccaatagcaaaagaagagaattgaaaataggcagatgaagaaaataagacagaggggaaatgaaaatagaaaagattggcaggcattcctatatttacatctatgtaaattcatatgtatcagtttatatcaagaaacttttagtactaactctgaaagt

SEQ ID NO: 537637 - DNA, 480 bp, Homo sapiens
aggtagcataggtgcctgttactctcattttacttgaagaaactgaccagccaactgatttaggatatggctggctatcttctggaactcacattagagttactccttgagagtaaagtcttgtattttctgaaggttgctgcttttggggtattttccgtggaggtgggtgggcacacacaaaaactcactgtgctcaaatttataaacttgttcttcttaacaattttaaagccagattacattggattgggggaggggaggatactagatttagtgttttttaatrtaaaactttgtatttgaaactttatgtggtaacatatatttaggctcatagccaaagtgattacaatgcattggttttaatattttcagtgaggtaatgtgtgctttagtggggaggaggagaaatattatttaatcaccagcactacactaataaccacatttactaaatcctttgtccctttgcttgaa

SEQ ID NO: 537638 - DNA, 480 bp, Homo sapiens
aggtagcataggtgcctgttactctcattttacttgaagaaactgaccagccaactgatttaggatatggctggctatcttctggaactcacattagagttactccttgagagtaaagtcttgtattttctgaaggttgctgcttttggggtattttccgtggaggtgggtgggcacacacaaaaactcactgtgctcaaatttataaacttgttcttcttaacaattttaaagccagattacattggattgggggaggggaggatactagatttagtgttttttaatataaaactttgtatttgaaactttatgtggtaacatatatttaggctcatagccaaagtgattacaatgcattggttttaatattttcagtgaggtaatgtgtgctttagtggggaggaggagaaatattatttaatcaccarcactacactaataaccacatttactaaatcctttgtccctttgcttgaa

SEQ ID NO: 537639 - DNA, 609 bp, Homo sapiens
agtttactctcctacttagagctgtgatycttatcatgggctcttgtgatctaaccccagcctgcctccctggcctctgtccttgcttaataacctctagccatatgaacctggaataccagtctaattcccacttcaaggcttttacacttgttgtttcctctgcctggggtgctattccctcatatcttcatgacacttgttcatttacattgtagctcaaagcatacctcctcagggaggcctttcctagacactatctgaggtacactcctgcacccccagccttcatgattgctttttatacattactgggttttgtttccaatggaacttatcgcttattactgtcctaaattattttatttattaattttttagccacctttctcttatagaaataaggttcctgaggacagggagtttattctgtatactacggtatccctgacatcagggcttgtgcctgccgatagtagatgctttctaaatatgttctgaatattagatagctagttcccaaatgcactgcactgaaagtgtatgaaaattggaaattggcttctagatttttgtattatattgccaaatgatggagtgatgagattg

SEQ ID NO: 537640 - DNA, 609 bp, Homo sapiens
agtttactctcctacttagagctgtgatccttatcatgggctcttgtgatctaaccccagcctgcctccctggcctctgtccttgcttartaacctctagccatatgaacctggaataccagtctaattcccacttcaaggcttttacacttgttgtttcctctgcctggggtgctattccctcatatcttcatgacacttgttcatttacattgtagctcaaagcatacctcctcagggaggcctttcctagacactatctgaggtacactcctgcacccccagccttcatgattgctttttatacattactgggttttgtttccaatggaacttatcgcttattactgtcctaaattattttatttattaattttttagccacctttctcttatagaaataaggttcctgaggacagggagtttattctgtatactacggtatccctgacatcagggcttgtgcctgccgatagtagatgctttctaaatatgttctgaatattagatagctagttcccaaatgcactgcactgaaagtgtatgaaaattggaaattggcttctagatttttgtattatattgccaaatgatggagtgatgagattg

SEQ ID NO: 537641 - DNA, 609 bp, Homo sapiens
agtttactctcctacttagagctgtgatccttatcatgggctcttgtgatctaaccccagcctgcctccctggcctctgtccttgcttaataacctctagccatatgaacctggaataccagtctaattcccacttcaaggcttttacacttgttgtttcctctgcctggggtgctmttccctcatatcttcatgacacttgttcatttacattgtagctcaaagcatacctcctcagggaggcctttcctagacactatctgaggtacactcctgcacccccagccttcatgattgctttttatacattactgggttttgtttccaatggaacttatcgcttattactgtcctaaattattttatttattaattttttagccacctttctcttatagaaataaggttcctgaggacagggagtttattctgtatactacggtatccctgacatcagggcttgtgcctgccgatagtagatgctttctaaatatgttctgaatattagatagctagttcccaaatgcactgcactgaaagtgtatgaaaattggaaattggcttctagatttttgtattatattgccaaatgatggagtgatgagattg

SEQ ID NO: 537642 - DNA, 497 bp, Homo sapiens
ttgggtgaaggcctagctccaatgtcatcttctctccaaagccttcctcagcttcctggctcctttccctgaggtcctccacggttggtttctatgtattatatataccacttaacaactagttgaacatgtgattactatatgsggacttgcttcagtctctgaatcttactctgaatctatcttgttatttttgttattctcataaaaggctttcaatataggtgtattgaatgaatgttgggaacatagtacacatttgataaataatgatttgagtaggcacttgctgcttacccagtggaacaggcaagcaggcaaagaggaggaggaggacacaaagagaaactatgttaatgagcaagaatcaaatgtgccacctcacagcctcctgactccctgccttagagggtgaaccacaggctatttcccatgattccctcttctttgatgacacagtgatttgtcagctctgtggactggagagttatgcagct

SEQ ID NO: 537643 - DNA, 441 bp, Homo sapiens
cctttctcgctttcaacaaagtacttgctggaggacttatccaaagctgagaagcaacacctgtggggactgggcagaaaacactttagtagtttgtcttggtgcatgcaccacaagcagacagccatttgccttccatttagtttctgcaactgaaggaatactgcgggattctctgccgctaggaagaagagagcygccccccccccaccatccattcttcctctctctctcttccttagtcttacccctgcacattctgattgttgtggtgaccagatcctgcagaaataaaagaggcctgagttcctatgtggctgggctgtatcctcctccttctctaataaagctatggcgttaaggaagccctatcaactgatgagctcagaatgcccatgccttttgtcacctagcctttccccatctctgtgcaaatggcta

SEQ ID NO: 537644 - DNA, 630 bp, Homo sapiens
aaccctgcctctactaaaaatacaaaattagccaggcatggaggcaggctcctgtaatcccaactactcgggaggctgaggcaggagaatcgcttgaacccgggaggcggaggttgcggtgagttgagattgtgccattgcactccagcctgggtgacaaagcgagtctcaaaaaaaaaaaaaracatcttttactttcccccatccctcattttagtcaaacttctcccacctcatttctgccctggttggggaagtgcaagagtttcagataaggtacctatgtgttttagatgggattcttgattttaagtgagtataaagtaaaagatttaattcttagttcaggtatgttccagtgcctcgaaagttagttatgtgacaaatagtacctgttgacaacctagaaaagatgagacattctaaggtgccctaacaatcttcagtctctaacagctgaacaggaaggccatttcactcaactgtgatgcgatcatcactgactggcatttagaattagatttcaagactccactcctgtgggggccactaaataactgaatacattttaagagcaatctacactgagggaaataacggttctaaggtattctgcatagaaagagtatc

SEQ ID NO: 537645 - DNA, 374 bp, Homo sapiens
tatgctccttccctcagacctttttggccttgactcttgattcttrtacttctaccagacagagaggcggtaggcttgtggccatgttttgcgaggaaaatcagaatctaagaatctctaaggcaagagcaagaatggattgggataggggaagtgataggaaaacaaaggcactaagaagagggttggttttcatgtactgcatagttcattcccttagttgagaaatcaggtatctcaacctcagatatcttctgtccagcatatcgctggccagatctgattcatatgagggatccagagtaaggaagcatctgttagccaagtctttggttaccccaaattagctcaggtcctttactgcttgtttcctc

SEQ ID NO: 537646 - DNA, 428 bp, Homo sapiens
gctgggagcaattatgctccttccctcagacctttttggccttgactcttgattcttgtacttctaccagacagagaggcggtaggcttgtggccatgttttgcgaggmaaatcagaatctaagaatctctaaggcaagagcaagaatggattgggataggggaagtgataggaaaacaaaggcactaagaagagggttggttttcatgtactgcatagttcattcccttagttgagaaatcaggtatctcaacctcagatatcttctgtccagcatatcgctggccagatctgattcatatgagggatccagagtaaggaagcatctgttagccaagtctttggttaccccaaattagctcaggtcctttactgcttgtttcctctgattatatagtacatatccaaaccctcaattttccagaata

SEQ ID NO: 537647 - DNA, 428 bp, Homo sapiens
gctgggagcaattatgctccttccctcagacctttttggccttgactcttgattcttgtacttctaccagacagagaggcggtaggcttgtggccatgttttgcgaggaaaatcagaatctaagaatctctaaggcaagagcaagaatggattgggataggggaagtgataggaaaacaaaggcactaagaagagggttggttttcatgtactgcatagttcattcccttagttgagaaatcaggtatctcaacctcagatatcttctgtccagcatatcrctggccagatctgattcatatgagggatccagagtaaggaagcatctgttagccaagtctttggttaccccaaattagctcaggtcctttactgcttgtttcctctgattatatagtacatatccaaaccctcaattttccagaata

SEQ ID NO: 537648 - DNA, 638 bp, Homo sapiens
gctgggagcaattatgctccttccctcagacctttttggccttgactcttgattcttgtacttctaccagacagagaggcggtaggcttgtggccatgttttgcgaggaaaatcagaatctaagaatctctaaggcaagagcaagaatggattgggataggggaagtgataggaaaacaaaggcactaagaagagggttggttttcatgtactgcatagttcattcccttagttgagaaatcaggtatctcaacctcagatatcttctgtccagcatatcgctggccagatctgattcatatgagggatccagagtaaggaagcatctgttagccaagtctttggttaccccaaattagctcaggtcctttactgcttgtttcctctgattatatagtacatatccaaaccctcaattttccagaataaactaggtctgcctattctgtgtggaaaacatttgatggtggttaagattctcttgcctagacgatggtagtgccttagtcgtttaactgcctgtcactttaagattttgaaatactggttctygttgtgtaagccagacacatcttgagaatattttacggggcaacttgccctttctgaaacctcagtcatcctgaaaagtaactctg

SEQ ID NO: 537649 - DNA, 528 bp, Homo sapiens
tcagattcttgaagggctacgtgtaagagaagcagaaggcttgttcttttttgttctagagggtagagataacctggaaattgtagagagacaaagtttgttcttttcaaagttaagacataatttatgtatcataaaatttacccttttaaagtgtttaatttagtagacttyagtatttccagagttatgagaccaccaccattatctaatttcgaaacatttttatcaccctgaaagaaattctctactgcttagtagtcactgtctatttccctttctttacagctcctggcaacactaatctactttctatctctacggatttgcatattctggacatttcatataaatggaattatataatatgtggccttttgtgtgtggcttctttcacttagcatgttttcaaggttcatccatgttgtagcatgtatcagaatgtcattccttttcatggccacatatttcatttatggatataccacattttatttatctgttcatccgcttataggcatttgggtt

SEQ ID NO: 537650 - DNA, 547 bp, Homo sapiens
gtcaagttgagtgttagtcaagttgactcaaaggataggatttagatattttgatttttagacaggtgttctttagatgctaaactaatgcagtagaagagatttagaagcctgtttctyggtacaaatcttaaatcttcttagagtctacagtgaaggcttcttgaatcctcctaatttattattgtgttttgctaaggtaccaattacagcacacccttctaaacttttgagtgttcctgtgtttggcttgtggccaattgttaatttaaacatcacggagtttctaaggcaaggagatgttagcagtatgtctgattgtctaaacagctatccaggaccatactcttgctccttgttttcttttgctttgcaatgggaagtgactccctgattttgctgcctgctagataatttctcagctgaattcttctcttgcttaaacaaaatcggagtaattttctttcagatggtgatgaaatttaacctaaaactatttttcctttcactttcttattattccttttttttttggtgtggtggagag

SEQ ID NO: 537651 - DNA, 547 bp, Homo sapiens
gtcaagttgagtgttagtcaagttgactcaaaggataggatttagatattttgatttttagacaggtgttctttagatgctaaactaatgcagtagaagagatttagaagcctgtttcttggtacaaatcttaaatcttcttagagtctacagtgaaggcttcttgaatcctcytaatttattattgtgttttgctaaggtaccaattacagcacacccttctaaacttttgagtgttcctgtgtttggcttgtggccaattgttaatttaaacatcacggagtttctaaggcaaggagatgttagcagtatgtctgattgtctaaacagctatccaggaccatactcttgctccttgttttcttttgctttgcaatgggaagtgactccctgattttgctgcctgctagataatttctcagctgaattcttctcttgcttaaacaaaatcggagtaattttctttcagatggtgatgaaatttaacctaaaactatttttcctttcactttcttattattccttttttttttggtgtggtggagag

SEQ ID NO: 537652 - DNA, 547 bp, Homo sapiens
gtcaagttgagtgttagtcaagttgactcaaaggataggatttagatattttgatttttagacaggtgttctttagatgctaaactaatgcagtagaagagatttagaagcctgtttcttggtacaaatcttaaatcttcttagagtctacagtgaaggcttcttgaatcctcctaatttattattgtgttttgctaaggtaccarttacagcacacccttctaaacttttgagtgttcctgtgtttggcttgtggccaattgttaatttaaacatcacggagtttctaaggcaaggagatgttagcagtatgtctgattgtctaaacagctatccaggaccatactcttgctccttgttttcttttgctttgcaatgggaagtgactccctgattttgctgcctgctagataatttctcagctgaattcttctcttgcttaaacaaaatcggagtaattttctttcagatggtgatgaaatttaacctaaaactatttttcctttcactttcttattattccttttttttttggtgtggtggagag

SEQ ID NO: 537653 - DNA, 547 bp, Homo sapiens
gtcaagttgagtgttagtcaagttgactcaaaggataggatttagatattttgatttttagacaggtgttctttagatgctaaactaatgcagtagaagagatttagaagcctgtttcttggtacaaatcttaaatcttcttagagtctacagtgaaggcttcttgaatcctcctaatttattattgtgttttgctaaggtaccaattrcagcacacccttctaaacttttgagtgttcctgtgtttggcttgtggccaattgttaatttaaacatcacggagtttctaaggcaaggagatgttagcagtatgtctgattgtctaaacagctatccaggaccatactcttgctccttgttttcttttgctttgcaatgggaagtgactccctgattttgctgcctgctagataatttctcagctgaattcttctcttgcttaaacaaaatcggagtaattttctttcagatggtgatgaaatttaacctaaaactatttttcctttcactttcttattattccttttttttttggtgtggtggagag

SEQ ID NO: 537654 - DNA, 529 bp, Homo sapiens
tgacagcagtgttgatggaagataggagggcaaggttcaaggcaggcagagatgtgagaaatatttgtccactgggtcagagaatgctttatatagagaaatatcatcatccagaaaagttccgtgaaagagaaattattctcagttctgaagccagatttagacattttgcctttgttcctcaggagcctggaccacccagccaactgtgccctattgatgaaaatctctgattattataggggaatacattatgttggcttctgtattccctgagaaccatctacatctcctagtactttgaagtcgtggtatcagatgaaagaaccaagccttccaaactgacttggagctgtgctgaggtgttcatggcctcaagcattcaagcaggttgatyggatatgaggtgtgatattccttttcctcaagtcatttatcctctggagatcctaacctaacctaatctctcctaacctaaaaacaggagcagacccagggtcctgactgggcattctcattatgcttccta

SEQ ID NO: 537655 - DNA, 541 bp, Homo sapiens
ctggcacatggcctctggaagaggctcagtaaaatgaacaaagcaaagttttctaaaatgactgcctgcattattaccaaaaataggagaattgagggcagacaaagagacatcagggatttgcaataattctcatagcgccctgcaatttcaaacaaaactttctctaaattttgtattccattttttgggaycaagccatgaaaaaaaaatccaaacaaacagaagaagtgcggaagcttcaaatcccaagtggtacatttaaataaaaacgaagcggagaaacatgtcttcctccttgaaatttgtcttgattaaaaggaaaaaaaaaaaccaaaaaaaagcaataagagataaatcgattttgttttcctaatagtgttccaaggatttatgtgctctttacagatattatcatatagaaagtgtgttttctacctaagagatgctagtatcagatccagatattaagaactgggctatagggtcatagcaaattattactgcttttcaaaaactgaaaatataccttaagaaaata

SEQ ID NO: 537656 - DNA, 546 bp, Homo sapiens
gaagagaaagaacaatattgatttactttcataatggagaatatgggaataatctgaattaatgttaattcaacattagaaaacacttcttttaaatctgaaaaacaataagggttcttatactacgtttttgttttttgttttgagatggagtttcactcttgttgcccaggctggagtgcaatggcgcaatctcggcttactgcaacctacacctcccrggttcaagtaattctcctgcctcagcctcccgagtagctgggattataggcatgtaccaccatgctcagctaattttgtatattttttagtagagacggggtttctccatgttggtcaagctggtctcgaactcttaacctcaggtgatctgcctgccttggcctcccaaagtgctgggattacaggcttgagccaccacagccggcactacgttttaattattattattttttctctttggtaaaataagctcatactatgatatccacttaatgtggaaaaatcttttttttgggatccctctagtttttttgtgggggggga

SEQ ID NO: 537657 - DNA, 626 bp, Homo sapiens
atgcctttgccctaccagatatttgcttccattttgttcaaagggtaccactgagctccttagtaattcaatgactagatttatgatggctttactcacagagtagctatgcatgaaataataacgaaattcataaaatattaccattgagtcactatgccattgtgccgttttcctttcaaatatyttaacattacaatgctaaataactctaataactctattgagtgaatatcctctctggattgtgactaaaaaaaaatgcagtttcccaaaagaattactgaatcttagttcttaccaatggctctatttcagaagctttaaatatagctgttatgtaatctggaaatagtagtgatttctatcagggatttaggcatagcttcactccctcatcaaaaagaattttaaagtactaattcttcattgtgctattttaggatctgtacaaagagaattatttaaataggatcccaacccctcaggacgttataatctaagcaagtactgccaaggaaaaacataaaaagacatgcaaaatatcaactggagaagaaagccaggaaattgacacagctaatcatgattttaagtatattttatgtataccgcatatatttttc

SEQ ID NO: 537658 - DNA, 626 bp, Homo sapiens
atgcctttgccctaccagatatttgcttccattttgttcaaagggtaccactgagctccttagtaattcaatgactagatttatgatggctttactcacagagtagctatgcatgaaataataacgaaattcataaaatattaccattgagtcactatgccattgtgccgttttcctttcaaatattttaacattacaatgctaaataactctaataactctattgagtgaatatcctctctggattgtgactaaaaaaaaatgcagtttcccaaaagaattactgaatcttagttcttaccaatggctctatttcagaagctttaaatatagctgttatgtaatctggaaatagtagtgatttctatcagggatttaggcatagcttcactccctcatcaaaaagaattttaaagtactaattcttcattgtgctattttaggatctgtacaaagagaattatttaaataggatcccaacccctcaggackttataatctaagcaagtactgccaaggaaaaacataaaaagacatgcaaaatatcaactggagaagaaagccaggaaattgacacagctaatcatgattttaagtatattttatgtataccgcatatatttttc

SEQ ID NO: 537659 - DNA, 626 bp, Homo sapiens
atgcctttgccctaccagatatttgcttccattttgttcaaagggtaccactgagctccttagtaattcaatgactagatttatgatggctttactcacagagtagctatgcatgaaataataacgaaattcataaaatattaccattgagtcactatgccattgtgccgttttcctttcaaatattttaacattacaatgctaaataactctaataactctattgagtgaatatcctctctggattgtgactaaaaaaaaatgcagtttcccaaaagaattactgaatcttagttcttaccaatggctctatttcagaagctttaaatatagctgttatgtaatctggaaatagtagtgatttctatcagggatttaggcatagcttcactccctcatcaaaaagaattttaaagtactaattcttcattgtgctattttaggatctgtacaaagagaattatttaaataggatcccaacccctcaggacgttataatctaagcaagtactgccaaggaaaaacataaaaagacatkcaaaatatcaactggagaagaaagccaggaaattgacacagctaatcatgattttaagtatattttatgtataccgcatatatttttc

SEQ ID NO: 537660 - DNA, 605 bp, Homo sapiens
tgtgtggtttccagcgataggacgtgaaaccattctaccttgcaaagatgattattactttattttaacattcatcaatttcttygtgttttgaatatttgccaacttattttctagaaattttgaactatttctactaagagaggagagatattgtattttagctgtatcaaatgattatcattatgtttaatttcatcaagagcagagaatctagctattaaaaataaggaattttaagataaagtgcttcattgtttcaatagcacgatacttcatttagcttaaaataatgcaactttatttattggtgccctttacttgttttaaacatgcttttttttttaacagattaaatcccaagaggattaaatgtacaattatttatagcaagtttttaaaaagcagaagtgtatattatttaaataataattcccactggttaaataaagcactccaaaaaatttcaggtattttctgtatcttaagagcataatggcccaattatacatgaaatttgatattagcgtaatatcttgcagcttaaaaatcaaattgactttctttttctgcaatgttgtattgcgtacactgaatgtgtgcaa

SEQ ID NO: 537661 - DNA, 605 bp, Homo sapiens
tgtgtggtttccagcgataggacgtgaaaccattctaccttgcaaagatgattattactttattttaacattcatcaatttcttcgtgttttgaatatttgccaacttattttctagaaattttgaactatttctactaagagaggagagatattgtattttagctgtatcaaatgattatcattatgtttaakttcatcaagagcagagaatctagctattaaaaataaggaattttaagataaagtgcttcattgtttcaatagcacgatacttcatttagcttaaaataatgcaactttatttattggtgccctttacttgttttaaacatgcttttttttttaacagattaaatcccaagaggattaaatgtacaattatttatagcaagtttttaaaaagcagaagtgtatattatttaaataataattcccactggttaaataaagcactccaaaaaatttcaggtattttctgtatcttaagagcataatggcccaattatacatgaaatttgatattagcgtaatatcttgcagcttaaaaatcaaattgactttctttttctgcaatgttgtattgcgtacactgaatgtgtgcaa

SEQ ID NO: 537662 - DNA, 605 bp, Homo sapiens
tgtgtggtttccagcgataggacgtgaaaccattctaccttgcaaagatgattattactttattttaacattcatcaatttcttcgtgttttgaatatttgccaacttattttctagaaattttgaactatttctactaagagaggagagatattgtattttagctgtatcaaatgattatcattatgtttaatttcatcaagagcagagaatctagctattaaaaataaggaattttaagataaagtgcttcattgtttcaatagcacratacttcatttagcttaaaataatgcaactttatttattggtgccctttacttgttttaaacatgcttttttttttaacagattaaatcccaagaggattaaatgtacaattatttatagcaagtttttaaaaagcagaagtgtatattatttaaataataattcccactggttaaataaagcactccaaaaaatttcaggtattttctgtatcttaagagcataatggcccaattatacatgaaatttgatattagcgtaatatcttgcagcttaaaaatcaaattgactttctttttctgcaatgttgtattgcgtacactgaatgtgtgcaa

SEQ ID NO: 537663 - DNA, 518 bp, Homo sapiens
aaacaccccaaagtcatgattccacataaaaccgagattctaaaatcactaatctgaatatcacagagaagttacttagcccaaagactatctgttgaatcctggtttatagacctgaattatatataatcttgaagagytttcttccagtggacacagaaataaaacagactagggaaaatcttaggctaaggccatttttgcactgtttctggtcttaccccatttccactctgctctttgcaaagcacctcaaaatctgaaataaattcccgttccatattatataccaactacacgaacttgaagaaaatagcacacaaagaaagcaattcggtatctattatgttccatgtatataacttatctcctccaaaaaaggaccaaattctttcttctgttgcctgtctgtggattagagaactctattttgtcctttgacctctgtcagagcatttcttcccttgaggccgagaacacaatggctatgatgtggcattttagcaacatataaagca

SEQ ID NO: 537664 - DNA, 487 bp, Homo sapiens
tccattgctgccctcctcccaaatctcatgtccttgtcacatttcagaacacaattatgccttcccaaaagtttccctcaaggccccttctctaacattgaggattacaattcaacatgagacttgggagggaacatacagccaaaccatatcagacaccataccttccaaattcccaaccccataaatatgatcagaaacctgccaatacctagttaaccaaattcaacttaatatgtaggactggttttataacctccactgttcaggaatatytaagttcccttttacaaatgaaatggaccccctaaaaatcacccttcctattttttcataaatatatttcttaatgataataagatttagttgttcccttttagaatatttctgcaaaacaggagagttgggaacttggatcagcatttcctaaactcagtttctgagaacactagtaggtatgtgagcttaataaatattcatactaaaa

SEQ ID NO: 537665 - DNA, 597 bp, Homo sapiens
ttttctaaaatgcataccttccccttttaaaaatgcttttattctctccctttacctcaggataaacaaggtagtactaacttgctcaacagagcttatgaggcctttcatgatttaatgccatgcctactactctctggtccttcactaatgctctctccccaaattctagacgtcggccatactaaatatttagttacgcaaccaccatgttgtctctgcctccaggccttggcacttgccactcttccttcctggcccatccttcccctctttcccagcctggctaattacccctgccaccaattatcttgggamccctatgtcttatgcacttgtactctcactgccaccatagtgtttggtgtatggtgatgtttgatgaacggtattttggacggtcagcataatattcttggtttaaatgatggtgctcatctttgttctggcaggtctttgtgtttgatgttggacagaaaacttggaaatcttatgattggtcacagattacaactgtggcaacatttggaaaatatgactcagaacttatgtgctacgctcattcaaaaggagccagagtagtacttaaaggtatgt

SEQ ID NO: 537666 - DNA, 549 bp, Homo sapiens
gaatcgcttgaacctggtaagtgaaggttgcagtgagccactgcactccagtctgggcaacagagtgagactccatctcaaaaacaaaaacaaaaacaaaaaaaaaaaagaaagaaagaaaaaggaacttttctgtactttgacatcataaagctatttcactatagtttattccaaatgttttaaagttttgcatttcataagtaggactttaacccatctgaactttattcctggtgcagtgttagataataatatgaatattttacctttctgtcagtgacatttgaccaacaaacccttgttcctgttgatgtatggattcctgtggtgcgtaccgagtttccactctgtgcaggtctgcttttgcttttctgttctgktctgctgatctgtttattcttgaatagtctttatcaaaactctagaggaaatctcttgctatttggtgtagggtccagccctacggggcttagcaggtgttctccccgtgtgcggagatgagagattgtaataaataaagacacaggacaaagagataaagagaaa

SEQ ID NO: 537667 - DNA, 549 bp, Homo sapiens
gaatcgcttgaacctggtaagtgaaggttgcagtgagccactgcactccagtctgggcaacagagtgagactccatctcaaaaacaaaaacaaaaacaaaaaaaaaaaagaaagaaagaaaaaggaacttttctgtactttgacatcataaagctatttcactatagtttattccaaatgttttaaagttttgcatttcataagtaggactttaacccatctgaactttattcctggtgcagtgttagataataatatgaatattttacctttctgtcagtgacatttgaccaacaaacccttgttcctgttgatgtatggattcctgtggtgcgtaccgagtttccactctgtgcaggtctgcttttgcttttctgttctgttctgctgatctgtttattcttgaatagtctttatcaaaactctagaggaaatctcttgctatttggtgtagggtccagccctacrgggcttagcaggtgttctccccgtgtgcggagatgagagattgtaataaataaagacacaggacaaagagataaagagaaa

SEQ ID NO: 537668 - DNA, 513 bp, Homo sapiens
tatacctttgcctccaaatcaaggaatgtgctaagataggcagagagaagagtatggtagatttaggaaaacccgaaggtggaggttgttgcaagaaggcttgggattacaggtgcgagccaccagacctggccttgtagagcagacagcattttctacttttgcatcacaaggaagagtttcagaaattataaactttgtaagcccatgcaaaggctgaactattgagaaaaatcagatatacaattacctacattcctagaatctccttagccatcttttaatttctgttcttgatagaattgaatgcactttattctagctgaaaacagacactgtccatttggtgagagattgtgaccagaaaaatttagattcttggcagagttgaaattttttctagattctttatgtcccttttcacctaatttrgataagaggtatttggagtcttcagtaaactacttagatcagaaaacacagcagaaaatcatctaaatattgagttgatat

SEQ ID NO: 537669 - DNA, 658 bp, Homo sapiens
gtaccataaaattcacccactgcactgcagaatttaacgatttttagtaaatgtatagttgtacagccatcacaaaaatctgattttagaacgttygtatcatctacctaaaagttccctgtgttcatttggagtcaataccccttttgactacatacccaggtaaccactgatctgccttccgtctctatatatttgcctttgggggacattttatatgaacgcaatcatgcaatagttcccattttccacatgcctttttaatttagcctgtatctgaggctcatcattttcatggcatgtattagttgttctgtcattgccaaataatctctcattgtaaaattatgctcgatttgtttatctagttaaccactactgtacatttgtttccagtttttggctattatgaataatgctgctagaaacattaatgtctttttgtgaaaaagtactttcgtttcccttctagacacctagaagtgaaatgactgggtcatattgatacggcagcagcaggcagtcctgagcggccgctgccatcgcgccggctgcagcggaaaggtacaagcggtggcggcaggagccgctgtgggagcagcagtggcggcagtgggagccctgtgccacgcgtcccctgtgcgccgtgtccccaagg

SEQ ID NO: 537670 - DNA, 658 bp, Homo sapiens
gtaccataaaattcacccactgcactgcagaatttaacgatttttagtaaatgtatagttgtacagccatcacaaaaatctgattttagaacgtttgtatcatctacctaaaagttccctgtgttcatttggagtcaataccccttttgactacatacccaggtaaccactgatctgccttccgtctctatatatttgcctttgggggacattttatatgaacgcaatcatgcaatagttccyattttccacatgcctttttaatttagcctgtatctgaggctcatcattttcatggcatgtattagttgttctgtcattgccaaataatctctcattgtaaaattatgctcgatttgtttatctagttaaccactactgtacatttgtttccagtttttggctattatgaataatgctgctagaaacattaatgtctttttgtgaaaaagtactttcgtttcccttctagacacctagaagtgaaatgactgggtcatattgatacggcagcagcaggcagtcctgagcggccgctgccatcgcgccggctgcagcggaaaggtacaagcggtggcggcaggagccgctgtgggagcagcagtggcggcagtgggagccctgtgccacgcgtcccctgtgcgccgtgtccccaagg

SEQ ID NO: 537671 - DNA, 295 bp, Homo sapiens
ccgcctgcacccagcccgcccgggaggggagacgccgcggggccgtgaccttggcggaggaggtaaatagggraggcgggcggggaggaggcagcgccacccagagccctcccggcccccggcccgcacccagccctcgctctgcgcagcgggagcgtccgcgggcgcagggcggccgcccccgggagccccgcgccggggctgggctacgggcgccgcgcgcaccccgcggtccacggtgctgaaactgctgcccggctccggcggccgccgcggcgcggggcacaggctcgcc

SEQ ID NO: 537672 - DNA, 391 bp, Homo sapiens
gcctgcacccagcccgcccgggaggggagacgccgcggggccgtgaccttggcggaggaggtaaatagggaaggcgggcggggaggaggcagcgccacccagagccctcccggcccccggcccgcacccagccctcgctctgcgcagcgggagcgtccgcgggcgcagggcggccgcccccgggagccccgcgccggggctgggctacgggcgccgcgcgcaccccgcggtccacggtgctgaaactgctgcccggctccggcggccgccgcggcgcggggcacargctcgcctgccatttgctgctgccgtgagagcgagcaaggggagcaggggcttgcctgttttctcctctttggctggttgctctggaggcttctgcagttaggct

SEQ ID NO: 537673 - DNA, 580 bp, Homo sapiens
tgatgtctacactcttaatttaaatttatactttcctgaaatcataaccagtatgcagttgtagtgaaaaaatacttagatgtttctgggccaaaaaatataatgtgttaatactgaatatagtatgaaacctatattagtccattttcaaactgctataaagaactacctgaaactggataatttataaagaaaggaarattaattgacttatagttctgcatggctcaggaggcctcaaaaaacttacagtcatggcagaaggcaaagaggaaggagttatgtcttacgtggctggagcaggaggaagagagtgaaggtggaggtgctacacacttttaaataaccagaggttctccatgggggctctgaccctgcagcagacttctgcctgaacatccaagcattttcatgcatcctccgaaatctaggtggaggttcccaaacctcaactcttgtcttctgcataccttcaggcccaacaccacatggaagcctccaaggcttggagcttgcaccctctgaagcaatggcccaagctgtaccttggccccttttatccatggctagagctggagca

SEQ ID NO: 537674 - DNA, 630 bp, Homo sapiens
tcatggcatgatattttatatcatagtatttgtgcacatgtctttcatatccccaaactgtactagtttcctggaagacatgttccatatttaattcatccttgttttttccgagtaacataatgcctgctttgggttgttacctaaggtgcttgtatatgtttgttgaataaacaattgtgtttgaaagtctgagccaaaagacccccccacccaatcttccctttcttctccccttcttcatktcagtaaaagagtacatatcttaaagtagttcctttctttttttaaagggtaaatttagtgattgtctttaattaaatatatttcttctggggggaggtgaatggcagttcttttgtgagatagaaaggtctttctagccttctaaattagaatttggaattaattttcaagttaggaaaaatgtatatgttggttaggtgtagttaaagtaaggcaattaacacaatatttcagaggtggggaaagaaaacattgaggactattttgagaaccaaactacaattactgcaatctctatagagaaatgttccccaaacttcaaaaaatgattaatggtaagctttttaatacaacatatacataacttggattgctaatatgcag

SEQ ID NO: 537675 - DNA, 570 bp, Homo sapiens
agctgtgtgggggctgaaatgaagcagagggagagctagctggtgcgctggtttggggtgggtggtctcctctctctgtgtgcctgagagagaatggatgtataattgtcctgcctgtgcaaagatgctactgacagggcacttttcaattcaggtgcagctaagcayataggcatgtcactgttgaaagctgtgactgcacaaggactaacagaggcagaggctgcttctctccaaacgtagattaaaagctttgaacagttggaaaagctttgaaagtggaggacctgcaaatttagagcatatagaatggaagaaatgagactgaataatgaagtggtcctttaggtggtaaaatgagggtggtgggacagggactccaggggaggctcacactccagaggagtaggctgggtaataggggtgggatctatggatagcagtggaaaatgaaaagagcattacactttttcttgactaaaacacttgaaaaaggtgtcatgaattaagatttttatcttctgctacttcttaattctttcctttatacttaataatgttatacaataa

SEQ ID NO: 537676 - DNA, 576 bp, Homo sapiens
aaacctgcacgttctgcacatgtatcccagaacttaaataataataataataaaaaaaagtcctaacactctgtctacagactcacagtgagaggcagattaatctagttgttaagagaccaggttctgggccagattgctggatctgaattctagcatgagttacccaaaacctccttgtgcctctagtctcttcatttataatctgttaattatacttcctcctaaggcaggatgatcacatgagctactgaaggaaaaagcatactgaacaaaagaaagcctttagtaaatgttagttatcattacagcagagaaggrataagaactgcttttcaagaggtactcagtgttagctattattatttaccatttacatttatttaccattttgaccaataagcatacactgcatccccaagtactagaagctatggagataaataagaactatataacatccctctaggctgcttttccatggtctctgccctcaaggggctcctaatctaatatgtgagtcagagaagcagacaatcacatctccaataaggtaaaaggcaaagttttatgaaa

SEQ ID NO: 537677 - DNA, 478 bp, Homo sapiens
gtgataggtgtaatttagtttttattctcacttaatagaattcctcctgctgatagcagaagacagacaaattcccaggcagaaaggggcaggtgccccgtgaaactcgactttcaagccaacgacagtctgaagtctgaaaactgggctgccagttctggttgcagtctgcgacycggagtgagaacttccttgatgtcttttagccaattgaatggtgctttttccaggcctgcccatggaccaatcagcatgcactcccccattctgaacccataaaaaccccagactcggtgtcacttagggactttcttccttcgcctcggggtatgggcaacccatcttgggtcccttctcctgtcgagagctgttctgtggctcagtaagactcttctctaccttgctcactctccagttgtcatgtaacaccattcttcttggatgcaggacaagaacccggaaccataggtgcgaacac

SEQ ID NO: 537678 - DNA, 422 bp, Homo sapiens
tcactgtaatcaacttctcatccattatctgttttgttattgggtttcctgacttcttactgttgattcaggatttcttggtatattttaactattacatccttactactttcagatgtcacaatcatttctcttattctcattcttttaaaattttatagcatactgggttgaaaataaaactctaatcaaaatattttctctctctccggttgtgtatatgtccctgattttttgtttgctttatagtttcagcttttcatttcaggtcataaatttttgaactttttcytgtgtctgtgttagaagtcagacttttttctccccttagatgaagccagttttctcatcattaccattaatttgtccttgctccaccctgatcagtgatcttatacaaatctccatgcataccattctgt

SEQ ID NO: 537679 - DNA, 573 bp, Homo sapiens
tcactccagcctgggcaaccaagcaagattccatctcaaaagaaaaaaaaaaaaaaaaaaaaggaaagaaaaaggaaggaaggcagggaggtagcaaaaccacactgcacaatctagagaaagaatgggctacctcaccatccctgcatctagcaaaaaagatgaagtctctccaaacaatttagagaatgtgggaaaacagaagtgatcattccaggacagaccacaggagtragacaagagcaatgtgggttccagtgaagagggtaaagaacagtttttaggatgcagatatgtggatacacatagaaaaggtcatgtgaagacacagtgagaaggcacaatctgcaaaacaaggagaggctttagatgaaataaaacctgccaacaactggatctaaggcttctagcctccagaagtgaaaaaaataattatctattgtttaagtcactcaatttgtgaaagtttgttatgggagcctaagtaagctagtacagttattattagttgtttggcgagagcaacttgccagagacatggctcaagaatgaaatgctttaagacacattgta

SEQ ID NO: 537680 - DNA, 589 bp, Homo sapiens
ataaaaaaggaggcaatttctagtggcaagagaccttgtaaaatttctggaacagaaagtgtctggaagtatttgaaagatgaagtgttttgttagtttttttttgagacagggtctcatcctctcccaggctggagttcagtggtattatcatggctgactgtagcctctaccatttaggcttaaatgatcttcctgcctcagcctcccaagtaactgggactacaggagtgtgccaccacacccagctaattttttatttcattttaatcttttttgtagtgatgggccctcactttgttgcccaggctggtttcaaactcctggactcaagcaaccctcctgcctcagcctcccgaagtgctgggattacacatgtcagccaccgcaccaggtgagggatgaaattgactgtagtgatgagcagttatggtctgaattttccaggaagtasacagaccaagattaggcatgctggaagtttattagagaatgtgcttagcattgatacctgagaggggaagaaaagaaagcaagtttgggcacacagagaaactcgagttgcaatacaaatgcagcagaggcttca

SEQ ID NO: 537681 - DNA, 646 bp, Homo sapiens
tggcaccatgcttcttgtatagtctgcagaatcctgagccacataaatctcttttttaaatataaactacccagtctcaggtattyctttatatcattgtaaaatagactaacacaattttgttttacacctgctttctttcttttccaataacaatgtaacagagggcacaatacctagtaagaaggcatggctagtattttaaaattttgttttcttggaaggtgcatatggatagttcttctggtatatacatgggaggaaattttatattaatttgctttattgcaattttacctaaattcagtgtggacccatgaggacctactactactccaagatattctgaaataaaatttatttataggaaatttaactaataattttctatttgtaaaacaattaccctatcttgtaatcaactctcataatatatttacaagttattttctattttgcaaagaataaagatgtatttgttaaaatatggaaacttgaacatccaaaatagtccaaataaatgaagcttactacttgtagcctaaaggacaatcttttatcaaatatgtattagagtactggttttcagccaggggaacttttgctcactaggagacatttagcaaggactggacacatctttgat

SEQ ID NO: 537682 - DNA, 479 bp, Homo sapiens
ttgttggttgtatgaataatatcggttatgtttgcaatggtagaccagaagacgtaatatagtccctcttatacttccattttctctcaaatcacacaatctrtctcaaataacacatttattcattatgtcttcagacaaaatgtcctcatagtcagagcaaatctgataattatttaggttgttgatgtcgaagtgaaagtaagggtacattatgggttgatgagaacacaattctttcttgttttctagccttaaattagagttaggttagctctctatgttaaaaagaaaagtatgtttgaataacacaattctctttctacttttcttactgattctatgtctaagattatcattaacatttaataataagtagtattaatagtatattctataaaacagaattagatatcaattttaaaatctgaaaaataatgggaaaatgtggaaaatttatttcgtattttaagatgttt

SEQ ID NO: 537683 - DNA, 560 bp, Homo sapiens
ttcaagtatatcgtgatagtccaaacattgttcttcagagaagcaaagaccaattctaaagtggaatctagagtgaaatcatatctatctatctatctatctatctatctatctatctatctatctacacatatatgaacctttgacattatcttccattagaaattgcaccgattggtcatcaaaaggaagaagaaacagattgttgaaaacacattaatggttcttgaaactgttctaatcagcaaaggcatcagtactgggaagaagtctgagaaggtaactattagttatctatttatgcataataaattaacctagaataacagcttaaaacatacatctcacaattttttaagcccaggaattcaaggtgaattagtggagtggttctggctcagggactctgatgaggttgtaattaggatgtcaactagggctgctgatacctgaaagctgctcccaggactggaggatgagcttccacaacagctcacgcacgtggctgttgggtggagscctcgctgttgggtggaggcctcagttcttcatcacatagt

SEQ ID NO: 537684 - DNA, 625 bp, Homo sapiens
ttgaatagtgtcagttagtcaattagcaaacatagatggtctaatcacattgaaaatcttttctcctgacgttctccagtgcttttctagcagcttaccacagggctggaaaaatctccaccrttttttccagaattcagttcagtccatgtgaaagattctttcccctactgcagtagcctggataaaatgtcttatgctttttaaacaaatgtccagttaaatttctctttgacggtcctttattttatgttatttttacctataaatcacctttaaaatccctttaatatcagcttgaatggttaggatacagttttcatacaggatatatagcaggcctagataaaaatgccataaagcaaagctttgtggattgctttacgtcttgttttaattttagatttgttttccttttttttttcttttaattttcaaagtgtattttttgttccctgatttattatcacccagagaggaaaatgaaatatctgacattaaaatatactttggtagaaagtgtagtggaggaaagtgttagtattccatgatgtgtatgtatcacattatctggatccagtttgtcattgctggacagttaggctgatttcacgtcattcatatt

SEQ ID NO: 537685 - DNA, 625 bp, Homo sapiens
ttgaatagtgtcagttagtcaattagcaaacatagatggtctaatcacattgaaaatcttttctcctgacgttctccagtgcttttctagcagcttaccacagggctggaaaaatctccaccgttttttccagaattcagttcagtccatgtgaaagattctttcccctactgcagtagcctggataaaatgtcttatgctttttaaacaaatgtccagttaaatttctctttgacggtcctttattttatgttatttttacctataaatcacctttaaaatccctttaatatcagcttgaatggttargatacagttttcatacaggatatatagcaggcctagataaaaatgccataaagcaaagctttgtggattgctttacgtcttgttttaattttagatttgttttccttttttttttcttttaattttcaaagtgtattttttgttccctgatttattatcacccagagaggaaaatgaaatatctgacattaaaatatactttggtagaaagtgtagtggaggaaagtgttagtattccatgatgtgtatgtatcacattatctggatccagtttgtcattgctggacagttaggctgatttcacgtcattcatatt

SEQ ID NO: 537686 - DNA, 615 bp, Homo sapiens
actgtggaccaaataaacctattttctttataaattactcagccttagatattcctttatagcaatgcaaatggactaacacaacattaatggtaatagaataagattctatgttgacaatcaaggtagatacaagagaaataccaagctcagtcatctttggaaggaaatgatgtgtacctagatgcacaaacctcacacaagagattgttggtgatggtttttgtttcactgggggaagggctactattagagtcaatattctagactctctcagcaccttcatttactcctacacagagaagaagaaagattaattaatatattatgagagtctgagagaaggcatgctcctcagcccatttcttctttcctctttcttgcttaagggattgttgaccacaaaagtttacattccagtcttcttattcaaattttacaggaacagggtcatatraagaagtcacaagtttgcacaccacattctggcctcaagaggtaaaaaacttcattctgggagccacattaacaagccccttagcttaaagccatattcttgatcctaattttttttggtaatagccatttttgtcttcacctgctaaaattgtatgc

SEQ ID NO: 537687 - DNA, 618 bp, Homo sapiens
tcaaaattaatcagaataaagatgagcttgagaattgatatgaattaattttagtaataatttggtggttggctttttaaaagaaacaaaataaaatatttaaaaaattgtctctcagttttgtccatgatggatatttgtgatctgaaattcttattttaagaaaattatcaaatgcttgtgtttggctttttgattttgaagcacattacttacccttcagtcccaaggtcataaagatatttacttaaattttatcctattaattccaaaaatttacttttcacatttaattttttgatccaaaattaaaagacaattgaaagaatactagaagttatttgttatatcagaaaatgaaaagtgattactatccagaataggcaagggatgcctgcaaataatcaagaaacatacagcaattctatagcacaatgaacaaatwgtataaggaagcaagtcacagaggggaggatcataaaaggtttcaagatattcagagttagtcaatgcaacttaaggcaacagtgcaatcacgttactcctaaagagttgggaacattcagaaagttggataaagccaaatgtaagtagagatataggtacataagacccttt

SEQ ID NO: 537688 - DNA, 625 bp, Homo sapiens
ctcatggtataaatctgtgaaatgtctgctttcagaattataaggtaaagcttaatatgccttccatttcaaaagtacagttgcactgaaatggtaaactatgctataaggggaactaaaaaaaacaatggtcctgacccttatgtaggctgtgggggaaaaatgaaacaaaattgatatttgtgctgtctataacattaagtccacaaagacaaaagagtatataaaactgctaaaataagttaactctgtaccatgggccatttcttactttacaaataactaaatacaaaattttagaaaagggagattaataatagaaaagtgcgttaaaataccatgtcatcacagtcttaacattaactcacagattttccagattttcctattatatgttgacacacagagcctcatttggagggtgggtgataattaagttttgactatgttaaggccgtataagtcttgcgatcttgagaagtcaggaatagagctgctgttgagaaagatagtcttatgaatgcagtgttttgacccccaatgggccataaragaattgtcctttggcatgtaacactttcttaccaagagataaagtgtcctcatagcctatactggacttatt

SEQ ID NO: 537689 - DNA, 642 bp, Homo sapiens
cccctatctcttaaaaaatgaaaagaaagagaaagagagagagagagagaaaagtacgaaatacaaacaagacattgatgaaggcaagaaggtaaaataaataaataaacaaataaatgcaattgaaaaggaagacattaatccagtgaagtatttttctttggcttaatagcagaaaacaacagatataacacacatcaatctacactgtctcatggttacatgaactttctgactctgctacaagttagcacatagggatcctgacccatcttaccatctcacaagatatgctggcccactgaactcatgacatcaaactaatagggcatatggagtaaaaaatagcaagtatcttacacgctttaggaaatatatgtataccggaaggtagggaggttcaagtacaaaggcttttcacttcactgatatttcttgatgtttagtgatcttgcatacaggtgctcccttcaaaatgaaggacaagttgctttacttgtgctacctacccctaaaccaaaagagtcacatcacttaggtgaatttagagacaacattgatcatatttgggttactgctctgacctccttayctggtcacttgaaatgaagccatacttgagtgagattcagaggaagaaaa

SEQ ID NO: 537690 - DNA, 603 bp, Homo sapiens
ttcccaagcagtaagttagtgaacttcacttatctacccatatcggtcattacccagaaaactatctttaaatttctaaagtcatatgtttgtttctgcacccattggcaaggtacctacagatttattaagagtaataaagccatgagctttctaaatacatactacactttccataataaatgaatttagaaagatgaatataaccaggcagagtacagctagtgagtaataaagctgggatacgaaaccaggtctataggccaggcacagwggcttgctcctgtaatccccagcactttcggaggctgaagcaggtggatcacttgtcaggagtttgagaccagcctggccaacatgatgaaaccctgcgtctactaaaaataccaacatcagccaggtatggtggtgcttgcctgtagtcccagctactccagaggctgaggcaagaggactccttgagcctaggaggcagaggtggcagtgagccaagataaccaccattgcactctggcctgggcaacagagagagacgccatctcaaaaaaacaaaacaaaacaacacaaaacaaaacaaacaaaacaaaactaggtctgaggctg

SEQ ID NO: 537691 - DNA, 709 bp, Homo sapiens
ctgctcgaacacacccagaataatgtttaatctgggcactccatggccagttaagtagacacataaaattaactatcacaagtagcaagttataagtaatatatatttgcatttcggagtccccaaggatctgatcccataaataccacttactcttaacactaagcatgcccgacttaacgctcagcagatggagaagttcccactgcatgaagcacagctcagtttacacagacaccaggtatctcttgagcagtaattccgtttctaacagagcctagtcatgagcaagaactgtttctccaaaggatggtagcgatgcattgaagaagtcttaatgttttcctttcaagtccagtggcaccactgtaatcattttattagggtttaccatagcacacatactatacctggtctgcttcaaagagatcacacactctaaggtttcttgagtagtggggagtgggtagcagcctgagtcacctagagagcttcctgctcctcctggcctcctggacataaggagtcacatgagtcatagagcccttcatggtatcagagaggccacttctgctcttctagctctgaagtcctcgccagagaacatgtgcataaccactgccatcatgcacctcagccacttactccagtcacaamagggattcaaggttcccacatctttccttgttatttggacctttatccccag

SEQ ID NO: 537692 - DNA, 585 bp, Homo sapiens
tttggcagagaggaagagagggtgaagttcatgtagagaaagttataaaagcctttacaaacatgataaaaacatacaaggccaattttggaactggcgcaacacccggttgtaagggatgctgggaaacagtctaagctatgacatcattgcaatttttagtctgatgtaaaatatgtgttccttaattcaaatttattttgtatgcctcaataaagttttgtactccacacactccctcctttggaacccgcaggaagactagatggcacaaattctagactgcatgtgggaacacacaccccagtcccatcccctaatgacaataaaaacccaagccattttcagattaaacagagtgtccaccctgcttttcctagaaagcttcaatatgtaataaattacttcattatgtcttggtgtatgtgtggcacctcagtctcrgcctctcaacaacttttgggtggaggatggtgggtcctgtcctccatagggcaatcagaagacagtccattttcatattacattatttacattttgtgtcattaggcacatgatttgtaagaattcttcatatatattttt

SEQ ID NO: 537693 - DNA, 586 bp, Homo sapiens
tagcaaccctcagaggatacctcagagtcactaacgatcttaaggaaaatgcagattatagagtcccgttgagtcagaatcactagacctcaggtccaggatgctacattcttaacaagctttatctcaactacatttggagaacttctgagtcatagaattgaagcatgactcccctgcttcaagacaggattttggcatgagctagattggacaaccaggccccagccaagaatatgggatttgaggtggtttgcagagaggatgagtaagaatttgaaagcaggcatactgttgttgttgttgaacgtactttgtagttgattttcttgaatgtttttgtctgtccttgactttttttatatttttaaaaatcaatagatgttatttttagaataatttaagatttacaggccaattgagcagatagtgcagtgttcccttatatcctcttctcctacacacagtttcccctattattaacatcttgccttagggtggtacaatagttacaattaataaaccaacattgaggccrggcacggtggctcacacctgtaatcccagaactttgggaggccaaagt

SEQ ID NO: 537694 - DNA, 590 bp, Homo sapiens
ctgctgcgtgctgagcaactctgcacgggctgtgaccaacttctcaggagcttgaaactgcctcccatcctaggcatgcatgagcaactgcttagtgcctcgcctccagcctggggcttttctgttgagctctgtcgtgagacatccacggaccacatagtgtctacctgtgtccawccagaagcaaggggcatcaccatctgccgtgccaacctttgacccatagacgaatgcagcaaatggctaaactgtatccctcttttcccacagaagggctgtcctgagatgcagccattcacatggcctgtcagaagatggacctgcaagattgcatcatcgattgagctgaaaatccagcagtagcgagctcagttacccattattggctctccctctttttctgccttgctcccctcttccctcactcttctgtccttaggaaggcactccccaatctagaaatagcacacatactttgcctcaggctctgctttctagggaagtcaggctaaggcaggtaggtctcttccctccgtccaggctcccttcctccctcctccccatttcccattgtgcttctggttgaagaa

SEQ ID NO: 537695 - DNA, 489 bp, Homo sapiens
ctgcgtgctgagcaactctgcacgggctgtgaccaacttctcaggagcttgaaactgcctcccatcctaggcatgcatgagcaactgcttagtgcctcgcctccagcctggggcttttctgttgagctctgtcgtgagacatccacggaccacatagtgtctacctgtgtccatccagaagcaaggggcatcaccayctgccgtgccaacctttgacccatagacgaatgcagcaaatggctaaactgtatccctcttttcccacagaagggctgtcctgagatgcagccattcacatggcctgtcagaagatggacctgcaagattgcatcatcgattgagctgaaaatccagcagtagcgagctcagttacccattattggctctccctctttttctgccttgctcccctcttccctcactcttctgtccttaggaaggcactccccaatctagaaatagcacacatactttgcctcaggctctgct

SEQ ID NO: 537696 - DNA, 596 bp, Homo sapiens
caggacagggtgcccagcagggggcgctgtattgcacgygcccccggagacaaaggctgccaatggaggggtgggtcctagccccagcaaggacgccaggagtgtgactcaggtgctgttgttggttagaggagtggctaaggcaggagaaatcctgaatcatgctgtggccacgtggcaccaggatcacacacttggtgagattgtgctcatgccctgagccatttcctcatccaaaacaaatatttgagtttaaagagctgagtaaagctgcagaacgttttgtagatttatcacattttctctgctgcaactagaggccttggagagccttacttgtggcagtccacacaagaaccttgtttctgtaagtagtttgcactgaaagccagtgacttcatacataaagaatgttctctctggctggctcgcccagtctccacttcttctgttttgtttgtgtaattggtgcctagacagaattttcaaaagcattcacccaaaactgaagggccatggggtatatggcttgggaacagtctccttctccagcctcgcatgccattctagggctagcctggcgttccccagctcag

SEQ ID NO: 537697 - DNA, 596 bp, Homo sapiens
caggacagggtgcccagcagggggcgctgtattgcacgtgcccccggagacaaaggctgccaatggaggggtgggtcctagccccagcaaggacgccaggagtgtgactcaggtgctgttgttggttagaggagtggctaaggcaggagaaatcctgaatcatgctgtggccacgtggcaccaggatcacacacttggtgagattgtgctcatgcyctgagccatttcctcatccaaaacaaatatttgagtttaaagagctgagtaaagctgcagaacgttttgtagatttatcacattttctctgctgcaactagaggccttggagagccttacttgtggcagtccacacaagaaccttgtttctgtaagtagtttgcactgaaagccagtgacttcatacataaagaatgttctctctggctggctcgcccagtctccacttcttctgttttgtttgtgtaattggtgcctagacagaattttcaaaagcattcacccaaaactgaagggccatggggtatatggcttgggaacagtctccttctccagcctcgcatgccattctagggctagcctggcgttccccagctcag

SEQ ID NO: 537698 - DNA, 596 bp, Homo sapiens
caggacagggtgcccagcagggggcgctgtattgcacgtgcccccggagacaaaggctgccaatggaggggtgggtcctagccccagcaaggacgccaggagtgtgactcaggtgctgttgttggttagaggagtggctaaggcaggagaaatcctgaatcatgctgtggccacgtggcaccaggatcacacacttggtgagattgtgctcatgccctgagccatttcctcatccaaaacaaatatttgagtttaaagagctgagtaaagctgcagaacgttttgtagatttatcacattttctctgctgcaactagaggccttggagagccttacttgtggcagtccacacaagaaccttgtttctgtaagtagyttgcactgaaagccagtgacttcatacataaagaatgttctctctggctggctcgcccagtctccacttcttctgttttgtttgtgtaattggtgcctagacagaattttcaaaagcattcacccaaaactgaagggccatggggtatatggcttgggaacagtctccttctccagcctcgcatgccattctagggctagcctggcgttccccagctcag

SEQ ID NO: 537699 - DNA, 596 bp, Homo sapiens
caggacagggtgcccagcagggggcgctgtattgcacgtgcccccggagacaaaggctgccaatggaggggtgggtcctagccccagcaaggacgccaggagtgtgactcaggtgctgttgttggttagaggagtggctaaggcaggagaaatcctgaatcatgctgtggccacgtggcaccaggatcacacacttggtgagattgtgctcatgccctgagccatttcctcatccaaaacaaatatttgagtttaaagagctgagtaaagctgcagaacgttttgtagatttatcacattttctctgctgcaactagaggccttggagagccttacttgtggcagtccacacaagaaccttgtttctgtaagtagtttgcactgaaagccagtgacttcatacataaagaatgtyctctctggctggctcgcccagtctccacttcttctgttttgtttgtgtaattggtgcctagacagaattttcaaaagcattcacccaaaactgaagggccatggggtatatggcttgggaacagtctccttctccagcctcgcatgccattctagggctagcctggcgttccccagctcag

SEQ ID NO: 537700 - DNA, 447 bp, Homo sapiens
agggtctgggaaccaggctcaacttgctgtgccaggccagcctggacctcctctgacctgggcctgagctgataagttgggggaacagtcaggagacagttgggctgaggttgtttttaagactcctctgtggcccatgtgcttggatttcttgtcaaaactctccctcctgacctgcctaacttgcccctccccgccatgcctaggcacacattttcttcccataatatcagacctgattctcagaatgggtacagggcgtattcatgggggcgcagcttcaggaaggggcctgctgcartggcgtgctgtgcttgggggcatgaagtgtgcaggggtaggtatgctggccctgagactttcccccgtgagaatttcattgccacagcgccagtgggtggatcgatagctttaggaaggtgaggtttcttttgtggagaaagcacc

SEQ ID NO: 537701 - DNA, 577 bp, Homo sapiens
ctgcagggtctgggaaccaggctcaacttgctgtgccaggccagcctggacctcctctgacctgggcctgagctgataagttgggggaacagtcaggagacagttgggctgaggttgtttttaagactcctctgtggcccatgtgcttggatttcttgtcaaaactctccctcctgacctgcctaacttgcccctccccgccatgcctaggcacacattttcttcccataatatcagacctgattctcagaatgggtacagggcgtattcatgggggcgcagcttcaggaaggggcctgctgcaatggcgtgctgtgcttgggggcatgaagtgtgcaggggtaggtatgctggccctgagactttcccccgtgagaatttcattgccacagcrccagtgggtggatcgatagctttaggaaggtgaggtttcttttgtggagaaagcaccaggaacactgtgtccacccccaaccccaccccaagccacaggctcctggatggcctgggttcttccactacactcactcagcccttctctatgtggtgcccatgcctggagcacagcccagtccca

SEQ ID NO: 537702 - DNA, 588 bp, Homo sapiens
caacctctgcctcctgggttcaagcgattctcctgccttagcctcccgagtagctgggattacaggcatgcgccaccatgcctggctaattttgtgtttttagtagagatggggtttcgccatgttggtcaggctggtgtcgaactcctgaccccaggtgatccrtcgtctcggcctcccaaagtgctgggattacaggcttgagtcaccacgcccggcctagccctctctttaaaggggcttgtgacccattccagggctgggtcagaggacacttgaaggatgccacagagtccaattgtatagtattctctctggcatcattcagcacatcaggcccaggtgaaggtctccccatctcctatagtagtgagaatcccccacctatccaaggctgatggcagtgcccccaagactgttcaagagagtgcgtccccaagtcctggggcctctggcatcaatctcggcctcttcactttcctcccagcagggcatgtaggctgtcttataaacagcgtcctgggtgcctgctctggcatctcaggatgcctgaggtgggcaggtaagtgggctacgccctccctccca

SEQ ID NO: 537703 - DNA, 634 bp, Homo sapiens
cattttagtttccagaggccacagcttttcttggctcatgctctacttcctccatattcaaaatcaacaatgtttrgtagagcctttatcatttttcatctctttgactcactcttctatctacctcttctacttttacgaattcatgcaattagtattgtccctcccagaactctccttatctcaaggtccttaacattattcacatctgcaatgttcctattgtcatataagctaatcactttagtgaataggatgtgaataactttgggggacctattattctggttaccataggcttctgctggatttctgacctaaagaactataaggaaataaatttgcatggttttaagtcagtaaagttgtggtattttcttatggcagcaataaaatactaatacaagtgccaatagaatttttcagatattaaattgacatgtggttaatttactggttttaagcagtaaatttgtggtaatttgttatggcagccatagacaactgatataagtacaaatagcatctttcagatattaaattaacatttatatagtgctgtatagttctaagaatgacacatacatgttttaatttagtttagtgagctaagtaaccattcacaaatgagaga

SEQ ID NO: 537704 - DNA, 634 bp, Homo sapiens
cattttagtttccagaggccacagcttttcttggctcatgctctacttcctccatattcaaaatcaacaatgtttagtagagcctttatcatttttcatctctttgactcactcttctatctacctcttctacttttacgaattcatgcaattagtattgtccctcccagaactctccttatctcaaggtccttaacattattcacatctgcaatgttcctattgtcatataagctaatcactttagtgaataggatgtgaataactttgggggrcctattattctggttaccataggcttctgctggatttctgacctaaagaactataaggaaataaatttgcatggttttaagtcagtaaagttgtggtattttcttatggcagcaataaaatactaatacaagtgccaatagaatttttcagatattaaattgacatgtggttaatttactggttttaagcagtaaatttgtggtaatttgttatggcagccatagacaactgatataagtacaaatagcatctttcagatattaaattaacatttatatagtgctgtatagttctaagaatgacacatacatgttttaatttagtttagtgagctaagtaaccattcacaaatgagaga

SEQ ID NO: 537705 - DNA, 634 bp, Homo sapiens
cattttagtttccagaggccacagcttttcttggctcatgctctacttcctccatattcaaaatcaacaatgtttagtagagcctttatcatttttcatctctttgactcactcttctatctacctcttctacttttacgaattcatgcaattagtattgtccctcccagaactctccttatctcaaggtccttaacattattcacatctgcaatgttcctattgtcatataagctaatcactttagtgaataggatgtgaataactttgggggacctattattctggttaccataggcttctgctggatttctgacctaaagaactataaggaaataaatttgcatggttttaagtcagtaaagttgtggtawtttcttatggcagcaataaaatactaatacaagtgccaatagaatttttcagatattaaattgacatgtggttaatttactggttttaagcagtaaatttgtggtaatttgttatggcagccatagacaactgatataagtacaaatagcatctttcagatattaaattaacatttatatagtgctgtatagttctaagaatgacacatacatgttttaatttagtttagtgagctaagtaaccattcacaaatgagaga

SEQ ID NO: 537706 - DNA, 611 bp, Homo sapiens
ttagacaaggtctgaaaccaggttaatgaaagaattgtagtgtaacttgaggtaagcagtgaaacacaaataaaactagattattttatccttttagaaattaatatcttcttatttctcaagagacacacatttgtgttatgaaaatttggagattcatatattgagggagcctggagtagtggaaagtgcactggattaagaatcagagttagaaaatgttagttctaatctcagtttgccattaactagttgcrtgattttggaaaattaatataagctctttgggacagctaaagttccagttttaaaacaagaaattagggattaataatactttaattttaaaatttaaaatgggattctataaatggcaacatataattaaaaaatagaaacttcctttattgatgtggttaacagcctgggtcctcttgtatattttatcagaattaatttgtcatatagaattccagtattatattcatcactcaataattattttaaaacaaaattgttcttacatgtatgctttaaattcttgcagcttaactatctttttgttttagcatatttggcagagatcaggggttaaactatttccttaagtc

SEQ ID NO: 537707 - DNA, 615 bp, Homo sapiens
aggtaaaggaagttccaaagatataaaccagaagaatcccaggctctaggatccaagacagtgagccattctcaatttcattgaaaaagactggattaaaaagtgactgaggctgtttgaatactgtctgcctaggtacagattggttctaaaacagaactgagcctttccatgggagctcaggtggccgcattgatgaaacaaggaagcaaagatttaaaaattggggcaaagataacaggggcaataatagaagagacagtagcagtattgtaggaaataaacagcaaccctcaactcccgttttaagatttcccctttctcctatgcggaatttttaattggtagctagtgaaaagaagagatgtcaggatttcttcttttcctaaccatcccagcaaggtgatgatcaagacagaggtggccaaaaggatcattgataaggcttaacttggacagttttgccaattagaaaatagtccagaataatcagaagtcagcctcctgttttaatctctcctcattaaataatttaaattcctctcggcyttgtgtttattttgattaaaaatatacaagatctcattgtcatcttccagtcagcctgcaaaggca

SEQ ID NO: 537708 - DNA, 463 bp, Homo sapiens
catcaaaattgtcaatttgaccaaaacacaatacatgaatatggtccccaccttctctacatccctttcctacttgtaactcctctccctatgcctctttttcttactcaaagtccaacaagaatagatatctgatatcctactttagcttattttaaattccattatatctcattaccatattattataattaataactaaaatagggtaatactagctactgtaactaatgaactcacaaatacatgtctcaaatccagcgtaggcatacctaaaagatatttcaggcttggttccagaacacagcaataaaattaattttgcaataaaataagtcacacacattttttagtttcccagtgcacaaaatagttatgcttacattattctgtattayattaagtatgaacagtattatttctcaaaacacaatgtaataccttgatttaaaatattttattg

SEQ ID NO: 537709 - DNA, 638 bp, Homo sapiens
ctgcatttcctgtgaatatttcactgttggtattcaacaaatgttcaccaactatagagggaatgtttagacctaagtctttatctatggatcagacaaaagccaaagagatgtttctctactctagttgtgttttttccacagcaggggaatacagccatcaacaccagcatgacaggatcttgctgggagggaggaatgggattttaaatagcatatgctctaggcacaattgtgttttaaaactactcctcattccctcacccagtcagcacatattattcccagccctgaccagatgctctttacctcagaactacagctcatacttgaaagacaccccaccccactcttcaaatcaaaggcagcagaaagttcttcaggcaagagtttttcctccctgtcacatagggagtaattcaatattctttggagtaagcttcattttcaagtacattgcaatcacaggacaattaatatgttgcagagaacttaaaatctayaagtacaatgtagatggctatcaaaaactatgtgggatgaaaaaagcaagttggagaaaacatgaaatacactgacatttacgtaaattttacaagtgcctatggaaatatatctgtaataataagtaaaaaaac

SEQ ID NO: 537710 - DNA, 603 bp, Homo sapiens
ctcctcggccagcgtcccccaccacgtagcacgtgacccaggtctccctcaaatcaaatgtaggggacatcacaaccaggccaggtccctgctgataaccacggcagcttctgttgtagagaatctttaataggatctccacccacgggctcactcccctgtccactgggaggggcctcagcatcacagcggggcttagtgtggctgcagarggtctgcagccagggtcctggggacctggcaacttggcattcagtccttttaccggcctgagcctggggcaaggtgcgggcaggattccatagagccatgctccgcaggaaggagccactgccagagcggcctctgcctctccatgtccacagccaccctctcaggccaggcctgggcacaccccagagggtagggatggccgaagccaggagcccaggcagggtctccaggcgacactcacccagcaggtcctgctgtcagtgtggagccggaagccgggcttgcactcacagaggtaggagcctggggtgttcacgcaccggtgctggcagccaccgttgtgggttcggcattcgtccacatctgagcaggaatggggaaggatcagca

SEQ ID NO: 537711 - DNA, 596 bp, Homo sapiens
  misc_feature (1)...(596): n = A,T,C or G
ggctgctgcccctccccgggtgttgcatggcncaggccatgggggacagccctcccgcccagggcccttttacctgctgccttttccgctcctcagtggagagctggtccaggatgcccaattccaccacctggggggacacaggcccaggagctctcggtcacacgtcctagaagcctgggccaaagtctcccttctttcctcctcctgatggaccagggccaacatggacagccaccccacggggctcaggtaggtccgatcctggagtaggcctgtcctgccgagggcctatccccgtcaccttcctctctgtgyaacccgccttgggtcagccccccgctcctcccagccgccagagccccaaagcagcccagaaagagcatggggcatccagagggagaggccagagggcggggggggatcttgtcccaaagatcttcctggcagatggagaggtgcggagcccacccagggagggagtgtggagggcaggactgtgactcagaccccacctgggcgaggcgagtcactgccctgcctggaagctatgggtgacgctgtttccgcccgggctccctactcctcggggccca

SEQ ID NO: 537712 - DNA, 596 bp, Homo sapiens
  misc_feature (1)...(596): n = A,T,C or G
ggctgctgcccctccccgggtgttgcatggcncaggccatgggggacagccctcccgcccagggcccttttacctgctgccttttccgctcctcagtggagagctggtccaggatgcccaattccaccacctggggggacacaggcccaggagctctcggtcacacgtcctagaagcctgggccaaagtctcccttctttcctcctcctgatggaccagggccaacatggacagccaccccacggggctcaggtaggtccgatcctggagtaggcctgtcctgccgagggcctatccccgtcaccttcctctctgtgcaaccckccttgggtcagccccccgctcctcccagccgccagagccccaaagcagcccagaaagagcatggggcatccagagggagaggccagagggcggggggggatcttgtcccaaagatcttcctggcagatggagaggtgcggagcccacccagggagggagtgtggagggcaggactgtgactcagaccccacctgggcgaggcgagtcactgccctgcctggaagctatgggtgacgctgtttccgcccgggctccctactcctcggggccca

SEQ ID NO: 537713 - DNA, 596 bp, Homo sapiens
  misc_feature (1)...(596): n = A,T,C or G
ggctgctgcccctccccgggtgttgcatggcncaggccatgggggacagccctcccgcccagggcccttttacctgctgccttttccgctcctcagtggagagctggtccaggatgcccaattccaccacctggggggacacaggcccaggagctctcggtcacacgtcctagaagcctgggccaaagtctcccttctttcctcctcctgatggaccagggccaacatggacagccaccccacggggctcaggtaggtccgatcctggagtaggcctgtcctgccgagggcctatccccgtcaccttcctctctgtgcaacccgccttgggtcagccccccgctccycccagccgccagagccccaaagcagcccagaaagagcatggggcatccagagggagaggccagagggcggggggggatcttgtcccaaagatcttcctggcagatggagaggtgcggagcccacccagggagggagtgtggagggcaggactgtgactcagaccccacctgggcgaggcgagtcactgccctgcctggaagctatgggtgacgctgtttccgcccgggctccctactcctcggggccca

SEQ ID NO: 537714 - DNA, 490 bp, Homo sapiens
ctggctgtcttcccagtgcagcgggaaacccggctgcaaggtgtgttccttccaggcaggatggcagcatttccgacagggcgtctgtggtcagaggcctgctccgtccgaggcgctgcgagtgaaaagctttcatttccgactctaatgagcacaccctggcaggcacgttctcagttaaggccaagccgggaaaataatagccttcagcgtcagcggtgagagccagcccagcaacagaaagacaagaggctttctctgactgcctagaaccaggacgctggggcagtttcctggaggacaccccgagctgggcagcctgcaggcatctgtggccgtgctccagataaacacggagggctgaagggctggtgggtttaggcagcagcccagaaggcctgggtttggatcccagcctcgatgctggacaggtgcgaccccgggggcctgcgtaactctcgsaggctgcagtcctcagacttggagcttg

SEQ ID NO: 537715 - DNA, 538 bp, Homo sapiens
tgaccaccctgcagccccacacggggtctggcgttggtgggagcctccacacctgggatgccagaggggactttctgtcccatgtctgttgtccatccagacgctctgcctcaagacccagggccactccgaaaggtacaaggctgccagccgtgcactgaaggccatcagcaaggtaagatggggcctggccccagccctacccgagtcctgtaccccgaccctgtccccacccaaccccaccctacccgatggcatagggctggcttcccctaccttccagggcagcgagtgttctcagattatccatcccaagcctttcacagcgctgacagggaaactgaggcccagaggttcccagattatccatcccaagcctttcacagcgctgacagggaaactgaggcccagaggttcccagattatccatcccaagcctttcacagcgctgacagggaaactgaggcccagaggttcccagattatccatcccaagcctttcacagygctgacagggaaactgaggcccagaggttcc

SEQ ID NO: 537716 - DNA, 581 bp, Homo sapiens
agattatccatcccaggcctttcacagcgctgacagggaaactgaggcccagaggttcccagattatccatcccaggcctttcacagcgctgacagggaaactgaggcccagaggttcccagattatccatcccaggcctttcacagcgctgacagggaaactgaggcccagaggttcccagattatccatcccaggcctttcacagcgctgacagggaaactgaggcccagaggttcccagattatccatcccaggcctttcacagcgctgacagggaaactgaggcccagaggttcccagattatccatcccaggcctttcacagcgctgacagggaaactgaggcccagaggttcccagattatccatcccaggcctttcacagygctgacagggaaactgaggcctagagccagtggagctctcacacagttgatgagcccgtggcacggctggtccagggcaggcactgtgggcagccagaggctggctgggcaggtgtcctgggcacactgtgggccgtgtgggctgtgccagggccctgtagcaccagcctctcacacgggaaccatgccctgc

SEQ ID NO: 537717 - DNA, 536 bp, Homo sapiens
ctcagctgagtcttttgaacacaggtatgaagtacaaagtgaatctaaaccaatgttacccctaccatayaggtatgttgtgttcacaaacacacacacacacacacacacacacaccctaactcaatgtagtttattcaattttatttttacatttttattattaatttttattcggtattttcattattttaaattttatttccttaatccaggtatattcacttaactgtcttatgattttgcagctatagtttattttaccctgattttaatattagtttaaatattttatcctttattctttattattcaattccctttaactatttgtatcaatacataaggtttgtacatagttatgtggtacatgtgatatttagattcatgtatacaatatgtattgatcaaatcaaagtatttaggatatttactcaaatatttatcatttatttgtgctacgaagatttcaattcttctacctattttgaaatatacaacatattgttaactatagtcaccctactgtgctatca

SEQ ID NO: 537718 - DNA, 536 bp, Homo sapiens
ctcagctgagtcttttgaacacaggtatgaagtacaaagtgaatctaaaccaatgttacccctaccatacaggtatgttgtgttcacaaacacacacacacacacacacacacacaccctaactcaatgtagtttattcaattttatttttacatttttattattaatttttattcrgtattttcattattttaaattttatttccttaatccaggtatattcacttaactgtcttatgattttgcagctatagtttattttaccctgattttaatattagtttaaatattttatcctttattctttattattcaattccctttaactatttgtatcaatacataaggtttgtacatagttatgtggtacatgtgatatttagattcatgtatacaatatgtattgatcaaatcaaagtatttaggatatttactcaaatatttatcatttatttgtgctacgaagatttcaattcttctacctattttgaaatatacaacatattgttaactatagtcaccctactgtgctatca

SEQ ID NO: 537719 - DNA, 536 bp, Homo sapiens
ctcagctgagtcttttgaacacaggtatgaagtacaaagtgaatctaaaccaatgttacccctaccatacaggtatgttgtgttcacaaacacacacacacacacacacacacacaccctaactcaatgtagtttattcaattttatttttacatttttattattaatttttattcggtattttcattattttaaattttatttccttaatccaggtatattcacttaactgtcttatgattttgcagctatagtttattttaccctgattttaatattagtttaaatattttatcctttattctttattattcaattccctttaactatttgtatcaatacataaggtttgtacatagttatgtggtacatgtgatatttagattcatgtatacaatatgtattgatcaaatcaaagtatttaggatatttactcaaatatttatcatttatttgtgctacgaagatttcaattcttctacctattttgaaatatacaayatattgttaactatagtcaccctactgtgctatca

SEQ ID NO: 537720 - DNA, 633 bp, Homo sapiens
ggttttggtcactattgcagtaataacaaaagattatgaaagcacaaatggtctgtactatcattctaaagagaagccatcagaaaagaaagcctagaaaaatggttcagaagagaccacagtggacaccaacactcagtagctataagcccaacatgtaaataacaatcaaaactaaatctccagagatctctgacttccaaactcagaccgatctaggagtcatcaaaagtcagatctcaagtgttaactccatatttgaataaatatcagaaaagacaagtaaagatgaatactgctagacatgtcttcaaaatacttcataatgttctttacaaaattctgaatagagttgtacatttgtttaaagtttaaatatgcaaaagatagttctggaatgragtaaagcaggtagactttcctccctgaattccctgcacgctgtcaggttaaattcttctagccttggggccacagtcacctcatttttcaattcattgcctacctccttttgcagctccctctttcatcattttatctctgtccaccttcttttccttcaatggtggtgggatcagcattgactagggatctaagtccaacatctaacctcctcctagaccccatacccac

SEQ ID NO: 537721 - DNA, 633 bp, Homo sapiens
ggttttggtcactattgcagtaataacaaaagattatgaaagcacaaatggtctgtactatcattctaaagagaagccatcagaaaagaaagcctagaaaaatggttcagaagagaccacagtggacaccaacactcagtagctataagcccaacatgtaaataacaatcaaaactaaatctccagagatctctgacttccaaactcagaccgatctaggagtcatcaaaagtcagatctcaagtgttaactccatatttgaataaatatcagaaaagacaagtaaagatgaatactgctagacatgtcttcaaaatacttcataatgttctttacaaaattctgaatagagttgtacatttgtttaaagtttaaatatgcaaaagatagttctggaatggagtaaagcaggtagactttcctccctgaattccctgcacgctgtcaggttaaattcttctagccttggggccacagtcacctcatttttcaattcrttgcctacctccttttgcagctccctctttcatcattttatctctgtccaccttcttttccttcaatggtggtgggatcagcattgactagggatctaagtccaacatctaacctcctcctagaccccatacccac

SEQ ID NO: 537722 - DNA, 421 bp, Homo sapiens
gtgaaaccctgtctctagtaaacatagtctactaaacacaccaccgggtgtggtggckggcacctttactcccagctactcaggaggctgaggcaggagagtcacttgaacccaggaggtgaaggttgcagtaagccaaggttgcacctttgcactccagcctgggcaacaagggcgaaatctgtctcaaacaaaaataataataataaaaaataaataagatgttcatagcagccatattcataatagaaaaacaatgacaacaacattgatgtgtgccacactaaggggatagtttataaaattgtggtatattctcttgatagaacataattgttttatttaaaaaatggtaagcttaatggctctgtaacagcagggtaaaatgggtgatataatgatactggaaaagggtggtaca

SEQ ID NO: 537723 - DNA, 421 bp, Homo sapiens
gtgaaaccctgtctctagtaaacatagtctactaaacacaccaccgggtgtggtggcgggcacctttactcccagctactcaggaggctgaggcaggagagtcacttgaacccaggaggtgaaggttgcagtaagccaagkttgcacctttgcactccagcctgggcaacaagggcgaaatctgtctcaaacaaaaataataataataaaaaataaataagatgttcatagcagccatattcataatagaaaaacaatgacaacaacattgatgtgtgccacactaaggggatagtttataaaattgtggtatattctcttgatagaacataattgttttatttaaaaaatggtaagcttaatggctctgtaacagcagggtaaaatgggtgatataatgatactggaaaagggtggtaca

SEQ ID NO: 537724 - DNA, 421 bp, Homo sapiens
gtgaaaccctgtctctagtaaacatagtctactaaacacaccaccgggtgtggtggcgggcacctttactcccagctactcaggaggctgaggcaggagagtcacttgaacccaggaggtgaaggttgcagtaagccaaggttgcacctttgcactccagcctgggcaacaagggcgaaatctgtctcaaacaaaaataataataataaaaaataaataagatgttcatagcagccatattcataatagaaaaacaatgacaacaacattgatgtgtgccacactaaggggatagtttataaaattgtggtatattctcttgatagaacataattgttttatttaaaaaatggtaagcttaatggctctgtaacagcagggtaaaatgggtgatmtaatgatactggaaaagggtggtaca

SEQ ID NO: 537725 - DNA, 606 bp, Homo sapiens
taaagcctgaaaggacagatgcagctttcagttcaagtgagacaggggattggaactgagacccctgtgtgaagctgaggctaccctgttcagtgaaaaagtagactagaaatcaatgtgaccatcagcatcaggaagtgacatggagtcttgtctgtcctagcttagaatctaggttaaaaaaaaattatcccctaagaattagtcatcacatgcttkccccctcctaggttttggtgaatcccttagcctcaccccaatttctatgtttctgaaatggagtggttgtgaaaattaaatgagttcacaaatgtaaagtgcttgacacatggtaagttctaagtctgagtgagatgttgttgttatttattatgtaagaaattgagagttaatggaactttttaagtgaggactacccagtagtgtgctcatggatgtttaacaaccagctctccaagatgccggaggaggaccctggcttgcagtgtttgctgatttccatagtgtaaatactcccaccatggccagtttcaaactaccaacctgctgccacaagcatggagttgagaagaggtgcacacggtcagctttcatgagcgggtggca

SEQ ID NO: 537726 - DNA, 593 bp, Homo sapiens
tttcatgtgctctgtaaagtacactaacctccaactgccctccccaaccctgcccccrcagcccccggccaaaataaaacacaacatagaaagcttcacttaaagactccattctggtgtacacaaatgaaagttggacaggtggaaaccttaatttggaagcctcttgactgaatgataaaacaggccagaaattgattaatctctttcaactacaaaatggaatgcaatgtgctattaagcatattaaagcaacaatttcatttcctccagtgcaaactaaggaggaaaagctgcttttccagaaaattatctattttgtaggcataggaggtttcagttgagtgacctgccttaccctttttggagtgggtaaattatcgtaagactcacaacaaaacatccaaatgtgttccaatgatatttcacatagctttgcccacggtagaggtaaacagaagtcacatttctgcacttatggaaacctttctgtgttaaaaataatggaaaactgaccttgaagaatatttgtgccttgtaaagtgttagagaatatcattcaggtaaaatagttatagctacatgatgtcaaa

SEQ ID NO: 537727 - DNA, 593 bp, Homo sapiens
tttcatgtgctctgtaaagtacactaacctccaactgccctccccaaccctgcccccacagcmcccggccaaaataaaacacaacatagaaagcttcacttaaagactccattctggtgtacacaaatgaaagttggacaggtggaaaccttaatttggaagcctcttgactgaatgataaaacaggccagaaattgattaatctctttcaactacaaaatggaatgcaatgtgctattaagcatattaaagcaacaatttcatttcctccagtgcaaactaaggaggaaaagctgcttttccagaaaattatctattttgtaggcataggaggtttcagttgagtgacctgccttaccctttttggagtgggtaaattatcgtaagactcacaacaaaacatccaaatgtgttccaatgatatttcacatagctttgcccacggtagaggtaaacagaagtcacatttctgcacttatggaaacctttctgtgttaaaaataatggaaaactgaccttgaagaatatttgtgccttgtaaagtgttagagaatatcattcaggtaaaatagttatagctacatgatgtcaaa

SEQ ID NO: 537728 - DNA, 513 bp, Homo sapiens
gaagtggaatgggatgagaacccaagtctttgacacttagtctagggcagtggttctcggagtggggtcccccaccagcagcctcagcaagccctggaaacttgttggaaacataacttctcaggccccactgactctgaaactctggggacagggcccatagtctgggttccacygagtcctctgggggattctgatgtgcgctgaagctgagaaccatcaaccagagtgcttttgtgtttcagcattcactgactggaggcccatgaatgaggcccctcctgagatgtgcctggcaatatcctgctttctaagccataagaggaaacatgacccctcctggcttataggctacatgtgttttatctcaatgaggttgacatccccaagctcagatatgtggaatgacccggcaaggtcacacggcagtgtggtagtttctctggaattagaactcacatcttccaagttttcagccagcattcaagtgcatcttttggacctgattcccct

SEQ ID NO: 537729 - DNA, 513 bp, Homo sapiens
gaagtggaatgggatgagaacccaagtctttgacacttagtctagggcagtggttctcggagtggggtcccccaccagcagcctcagcaagccctggaaacttgttggaaacataacttctcaggccccactgactctgaaactctggggacagggcccatagtctgggttccactgagtcctctgggggattctgatgtgcrctgaagctgagaaccatcaaccagagtgcttttgtgtttcagcattcactgactggaggcccatgaatgaggcccctcctgagatgtgcctggcaatatcctgctttctaagccataagaggaaacatgacccctcctggcttataggctacatgtgttttatctcaatgaggttgacatccccaagctcagatatgtggaatgacccggcaaggtcacacggcagtgtggtagtttctctggaattagaactcacatcttccaagttttcagccagcattcaagtgcatcttttggacctgattcccct

SEQ ID NO: 537730 - DNA, 513 bp, Homo sapiens
gaagtggaatgggatgagaacccaagtctttgacacttagtctagggcagtggttctcggagtggggtcccccaccagcagcctcagcaagccctggaaacttgttggaaacataacttctcaggccccactgactctgaaactctggggacagggcccatagtctgggttccactgagtcctctgggggattctgatgtgcgctgaagctgagaaccatcaaccagagtgcttttgtgtttcagcattcactgactggaggcccatgaatgaggcccctcctgagatgtgcctggcaatatcctgctttctaagccataagaggaaacatgacccctcctggcttataggctacatgtgttttatctcaatgaggttgacatccccaagctcagatatgtggaatgacccggcaaggtcacacggcagtgtggtagtttctctggaattagaactcacatcttccaagttttcagccrgcattcaagtgcatcttttggacctgattcccct

SEQ ID NO: 537731 - DNA, 457 bp, Homo sapiens
ccatgcagggccttgaaaaagccacagggtaatgcctactggttatgcaaggaaagagaactagaaagattcrgaggcccttgtccagagcataccaaatgtctgtgcatgtgcaagaagggaattcttcctgcaccagagcaagtgccggctcatgccagggctgtccccaggcattccagaaataacagtcggtgccagggggtcacaatgaatgctaggcaagttaacttgatactagggatgtagcagtgcatgccagaagacagacaatagaagctgagaggagtaacaaaggagtagctttggcatgttggggaggatagtgaatgcagggagtgactttgtatgtcaggggagtgacctggcatgtgagggaaccagaggggtcaaggaataagcctgggacaggccatgtgccattggactagccatggatgcagcaggagtgagatcc

SEQ ID NO: 537732 - DNA, 457 bp, Homo sapiens
ccatgcagggccttgaaaaagccacagggtaatgcctactggttatgcaaggaaagagaactagaaagattcggaggcccttgtccagagcataccaaatgtctgtgcatgtgcaagaagggaattcttcctgcaccagagcaagtgccggctcatgccagggctgtccccaggcattccagaaataacagtcggtgccagggggtcacaatgaatgctaggcaagttaacttgatactagggrtgtagcagtgcatgccagaagacagacaatagaagctgagaggagtaacaaaggagtagctttggcatgttggggaggatagtgaatgcagggagtgactttgtatgtcaggggagtgacctggcatgtgagggaaccagaggggtcaaggaataagcctgggacaggccatgtgccattggactagccatggatgcagcaggagtgagatcc

SEQ ID NO: 537733 - DNA, 457 bp, Homo sapiens
ccatgcagggccttgaaaaagccacagggtaatgcctactggttatgcaaggaaagagaactagaaagattcggaggcccttgtccagagcataccaaatgtctgtgcatgtgcaagaagggaattcttcctgcaccagagcaagtgccggctcatgccagggctgtccccaggcattccagaaataacagtcggtgccagggggtcacaatgaatgctaggcaagttaacttgatactagggatgtagcagtgcatgccagaagacagacaatagaagctgagaggagtaacaaaggagtagctttggcatgttggggaggatagtgaatgcagggagtgactttgtatgtcaggggagtgacctggcatgtgagggaaccagaggggtcaaggaataagcctgggacaggccatrtgccattggactagccatggatgcagcaggagtgagatcc

SEQ ID NO: 537734 - DNA, 533 bp, Homo sapiens
tcagacgtgatccctggccttggttccctcctcaakcccctcaaattttgcaaagtctttgttatggtttggctctgtgtccccacccaaaactcatcttgaatggtaatccccataatccccatatgtcaagggagggaccaggtgggaggtggttggatcatgggcatggtttcccccatgcagttctcatgatagtgagtgagttcccatgagatctgagagtttcataatgtggttttccctgctctttccctgctcttgctcactctgtcttgcctgccaccatgtgagacgtgcctcttccccttctgccatgattgtttgtttcctgaggcctccctagccacgtagaactgtgagtcaattaaacctcttttctttatacattacccagtcttgggtatgtctttatagcagtgtgaaaaaggactaatatagtcttctactagagtacttctcaagctctaaaatgcagattctgattcagtagtctggggtgaggcttgagggtcacatttccagcaagctcc

SEQ ID NO: 537735 - DNA, 533 bp, Homo sapiens
tcagacgtgatccctggccttggttccctcctcaagcccctcaaattttgcaaagtctttgttatggtttggctctgtgtccccacccaaaactcatcttgaatggtaatccccataatccccatatgtcaagggagggaccaggtgggaggtggttggatcatgggcatggtttcccccatgcagttctcatgatagtgagtgarttcccatgagatctgagagtttcataatgtggttttccctgctctttccctgctcttgctcactctgtcttgcctgccaccatgtgagacgtgcctcttccccttctgccatgattgtttgtttcctgaggcctccctagccacgtagaactgtgagtcaattaaacctcttttctttatacattacccagtcttgggtatgtctttatagcagtgtgaaaaaggactaatatagtcttctactagagtacttctcaagctctaaaatgcagattctgattcagtagtctggggtgaggcttgagggtcacatttccagcaagctcc

SEQ ID NO: 537736 - DNA, 533 bp, Homo sapiens
tcagacgtgatccctggccttggttccctcctcaagcccctcaaattttgcaaagtctttgttatggtttggctctgtgtccccacccaaaactcatcttgaatggtaatccccataatccccatatgtcaagggagggaccaggtgggaggtggttggatcatgggcatggtttcccccatgcagttctcatgatagtgagtgagttcccatgagatctgagagtttcataatgtggttttccctgctctttccctgctcttgctcactctgtcttgcctgccaccatgtgagacgtgcctcttccccttctgccatgattgtttgtttcctgaggcctccctagccacgtagaactgtgagtcaattaaacctcttttctttatacattacccagtcttgggtatgtctttatagcagtgtgaaaaaggactmatatagtcttctactagagtacttctcaagctctaaaatgcagattctgattcagtagtctggggtgaggcttgagggtcacatttccagcaagctcc

SEQ ID NO: 537737 - DNA, 637 bp, Homo sapiens
ttatgtcaccgctcagtgcttcctcagtttccccatgggtgaagcaggtctgctcactttcccccctcagggtttcaggaggcataaacaagatgcagcctatgacacacggagcctggtatgtcacaggcacttgacacatgtgagctgtttgctctctagattttggaagtgcagatgtttatgaaatactaggatatcgatgctgcacataaaaggaatcggagagatcctcttcgttttgtgtggaggcaaccaaggttctgaaaagcctgaggagaggaacctggagagcgatattcaatccccctaccacactccccagcagacaggtggagctggggacgctgggaagtgactttgtagctgtgcgtggacttggggctgttgggacaggggagaagagggaggatgcaaagagggaaggaagcagtaagcaggtgccatgcagggtggaaatggsctgccctgagcttaaagcacgctggtctgctcagtgtgtggcaggaagtgactgtagggggtgtgtgctgcagcctgttcagtgcaaggccagagctggctgggcagacagagccttcccaactgcccacaccctcaaactatgcccaagcctgggatggggactgagcagcag

SEQ ID NO: 537738 - DNA, 476 bp, Homo sapiens
gcagttcctaccttaccttcctcagtcggaaacagtggattgagtcttccagacttcacacccagcccatactaagcactgctgctcttatctcctgggcaccagggtgccttggagttctatgcacagtgaataacccaggtgatataaaggggtgagacaattgtttctggaagcaagtgattggagtcagggctctgctagacagtatctgaatttctactaggagtcatgggctgtcagggaagacccatgttgtgtgcttataacaattacacttgaaacattgaggatagatgggaagagaacaggaatgaaaacccagagaccaattaggaagcttttaaagacatgagctgcatctgggcagctctatccagctctgccytagatattcagggcagacacaagaggcagcagtgaatagagagcgtgtgactgtcctctcctggatcgtcttatccaaggccttatcg

SEQ ID NO: 537739 - DNA, 498 bp, Homo sapiens
gcagtaacttcccataagctactgctctacaccagaaggatcatagcagatagcctaattagtaaagtccgactcaaaaggaagaaagggtgggacaagagtttgaagggagtaaccaagagttttccaactaagacacaaacccagagacccaagaagttcaaacctcaaaccaagtaggttaataaaagataggccatgtcagcttggataaccaccgagataaaaatcccaggaacagccaggaagacacactatggatcatggctcatctctcaaacccacaagaagccagaagacagtaaccatctaaacagtgccgagggagagaacccagagctctatatctgaccaataaaaaaaaaaaaaatcccctttagaagttgatgtgagacagagatacagacaaaagcttaggatgttaccagcagagtcatacttaatacwgagggaaattctttagtgagaaggcaggtcattccagatagaattgcaggt

SEQ ID NO: 537740 - DNA, 594 bp, Homo sapiens
atattacacctatccagattgagggtggrtcagcctctcccaatttactgactcaggtgttaatctcttttggcaacaccctcacagacacacccaagaacaatactttgcatcctttaattcaatcgagttgacactcaatattaaccatcacagggacttagaattctttctagttcctgtctaccaagagcagcagcctcagctttagaactttttttcctatgccatctacaactacatcttgcccactgccacacatatacactacacatatacatgtaaatcaccatcatcaccacaaccagattataacttccaggtcctcttgccagtctcattgaaccctgttaagggactggccaatctgagaaatttgttgtgaagtgcatgcatggaaaaagcatcttctgagagtcagacaaccaggaccatagccagatcggtccctggccagccatgttagctagggtatatcccttgacaattcagagtcactgagtctttagcaaaatgtagtggagtacatttgtttcgcttaagttagagaatagtcacttggacaatgctaatatagggcaactaagtacccat

SEQ ID NO: 537741 - DNA, 453 bp, Homo sapiens
gggaagagagaatggatcagcttcaactccattggtaaatgctttgtttcttaagctgaatggtgggcatgcaggtatgaattatgttatattttacacctctttggcatatctaagaatcacttattagatcttttaaaaagacaatggtagaagcagtgttagagcaagaccatgagtagcacagaaaagaatcaaatagaggcaactttggcttcacccaggctctgctcccagactggctttggagttagggtctgaatatagcctctgaataagcctcatggacagaagaaacaagacttgaaagggmaagggtgggtgtattcatccgttttcatgctgttgataaagacatacccacgactggcccaatttacaaaagaaagaggtttaattggacttacagttccacgtggctggggaagccttacaatcatggcagaaggcaac

SEQ ID NO: 537742 - DNA, 600 bp, Homo sapiens
ctgcattctggttcctccctcaccgatggcggtcctggtcacggccctttcttccctggggcagggcagcctgatatgacatcgtcgaggcaggtttgttggaatcataagattccccctgatccaggagtttggaaagaagagagggaggaggtgagagggagggagaacaggaggatgggctgggacaatgtgtctgcagaggaaactcctggtcgtctgcagggcttcctgggggaagggagactcccgtccagcctgcccatccctcctgtgtttcctgagccaatggggtttagggcttattctgcccctagctgccccatcaccaccttgcctgactctgcccatcacacccccgagccctgcctcgtcccctgccagcagcrtgtgggcccccgacccgtgtctacccccatggagctccattttcctaacacctggcacaagcacgacctagtgaaatgctcacagcatctcttcgagatcggtggcattttctcattcatttttcagatgggtaagctgaggcttagaaagttatgatgtgtaaggtcatgttggctactaacagcttagactggattggagccctgtttg

SEQ ID NO: 537743 - DNA, 600 bp, Homo sapiens
ctgcattctggttcctccctcaccgatggcggtcctggtcacggccctttcttccctggggcagggcagcctgatatgacatcgtcgaggcaggtttgttggaatcataagattccccctgatccaggagtttggaaagaagagagggaggaggtgagagggagggagaacaggaggatgggctgggacaatgtgtctgcagaggaaactcctggtcgtctgcagggcttcctgggggaagggagactcccgtccagcctgcccatccctcctgtgtttcctgagccaatggggtttagggcttattctgcccctagctgccccatcaccaccttgcctgactctgcccatcacacccccgagccctgcctcgtcccctgccagcagcgtgtgggcccccgacccgtgtctacccccatggagctccattttcctaacacctggcacaagcacgacctagtgaaatgctcacagcatctcttcgagatcggtggcrttttctcattcatttttcagatgggtaagctgaggcttagaaagttatgatgtgtaaggtcatgttggctactaacagcttagactggattggagccctgtttg

SEQ ID NO: 537744 - DNA, 501 bp, Homo sapiens
tcactgcaacctccgcctccccggctcaagcgattctcccgcctcagcctcccagtagctgggattataggcgcgcgccactatgcctggctaatttttttgtattttagtagagacrggggtttcaccatgttgcccagggtggtttcgaactcctgagctcaggcaataatctgcccgcctcggcctcccaaagtgctgggattacaggcgtgagccaccgcgcccggccgggagcatcttatccacctcctcggtttacagatgagggagctgagaaggcacctgggaagggcctacaacaaacgggagccgactatgtcctcacctgggctcactcacgatgggaatgagcccagcctggggacgtttgtgcccgctagaccctagaggagagcgacaccatgcacacggcccatggctcttccgtgttgggaccccacgggcctcctccaccgaggaaaatcaccccaggaagagggccaggcgcaagactgggac

SEQ ID NO: 537745 - DNA, 590 bp, Homo sapiens
ggctacagaaatgcatgacattgcctttctctttagtttattttcagtctagtgactgcatagtgctggctagacaccccctagaagatactggtgtcctccttcacatgtggactccctcagcaagcaatctggtggacatcaatatctcattcttggcttcccatgttgaaggcaagctctgagggcctagatccaggaaccaggcaaacaaagcagcagtggccaaaatggaggtagaaacctccactaaaggttagagaaaagaacttttgaacagtgggtggttccctgaaactctgccttctgacctggtcccaatcatcccttccatccttccttcatcccaggcctgccttggaacaggatggatagctaaagacctggtgcacatctcaccactttagaaatggccaaaaaaccccatggagatactgtctttttggtggtgcccggttgggaagaatccagtcaytatttggttcccagactttagtaactttcattgttagtaaatgcagaattagtcagcatgctggaatttaaaaaaataaacatctgtacccaatggtgaatctgtccaggctatc

SEQ ID NO: 537746 - DNA, 478 bp, Homo sapiens
ttaagctttgttaagtgactgaaatgtgatggaagggtattgtgaagttggtggtatctttctattttacagataaggagattgatccgggaaggggcacaaaggctacccaagcatacggctggtaagaatggtttcctggaacatgagtggtgatgggtttcagtccatctggatttcaagtttgatatagtaaaagccttatgatttgataraataccagagggttgattcctggtccgcaagtgaatcagaagatgggagattaaataaataaactgtagttgaaaccagaaaccaagacttgtactggccttggggaaatgatttagactgctagagccctgagacaggatgcacgactatgtcattacctctgggcagtggtcagtgcagcacaaagccctgctctggacatgtgatgtggaccttgaaggacagggcagattcaaatctctgctctatctgcaactgaagt

SEQ ID NO: 537747 - DNA, 538 bp, Homo sapiens
gctgggctttgggaggccaaggtaggtggatcaccygaggtcaggagttcgagaccagcctggccaacatggtgaaaccccatctctactaaaaatacaaaaattagccaggtgtggtggctggtgcctgtaatcccagctactcgggaggctgaggcagaagaatcgcttgaacctgggaggtggaggttgtggtgagccaagatcacgccattgcactccagcctgggtgacaaaatgaagactctgtctcaaaaaaaaaaaaaaaaaaagtgatgggcctctgggatgatggccccaaccattgggatcacacagccgctggggaaataaacccccaaaatgctgtttgagcaagatggccaaaaaatggtacccttgccgccacacccactctgcatcagtcaatcctggcactcaagacccagagaggctgcaaatgcttctcaatggagtgcctgagggagccaccaccatgtttggggattgatgtgaaggtaacacttagtgggcatccccgtctggaaaaataagcgaa

SEQ ID NO: 537748 - DNA, 522 bp, Homo sapiens
agctgtcaggccatcgaggaaatagaactgactggacttggagagtccagggcgtggggagcagggtgaagggaacagttgaaagcaactctgtcttttaagaaggagtaactgaaacctagatcagtggttcttaacagttttaagtgcaaagatttcttttcaacttaaaaaagaagtatgtgatgatagttggacttgtatgaatacataatgacacaaagctacatgaatttaaagatgattttaaataatctgcattttattcatcacaacagtatacatacacacaaacaagaacatcataggaagacgacctgggttcaaatcttatctctgccattactagatttgtgacctttggaatgtaaactgtctgtgcctcmgtctctcacctgttaaatgagtattatagaagtccctgcctcattgagctaagaagggtgggctaagaagggtgctttgcctataataattctcaagaggctttattattgttactgttattcaatttagagacgt

SEQ ID NO: 537749 - DNA, 596 bp, Homo sapiens
aagagctgagtttcttctggaggttctagggtagaagctgtttcctggtcttttccagcttttagaggctacctgcattccttggcttgtggccccatcctccgtcttcactccaacctctgcttccgtcatcacacckcttctctgactttggccctcttgccttcttcttgtaaaggccattgcaattacactgggctcacctggataatccaggataatctctccacctcaggatctttcatcacatctataacgtctcctttgctgtgttagataacatgtctacaggattgggggattagaatgtaggcatctttgtggggcagggtggggatgggggtgcattattctatccaccacagatactgagccagaactaaaacacaggtccctggctcccagttcatgaggtgcttctcctgttagcatgaagaaagggctatatcaggtagtgatcacctcaaagcacagcacaactgaccaacccccaaactcaggggcttgaaaccataagtgtttatttggacacaaacctacaggttgctgggtggttcttttcatctcccctggccttgctcacatgtttgtggatc

SEQ ID NO: 537750 - DNA, 596 bp, Homo sapiens
aagagctgagtttcttctggaggttctagggtagaagctgtttcctggtcttttccagcttttagaggctacctgcattccttggcttgtggccccatcctccgtcttcactccaacctctgcttccgtcatcacacctcttctctgactttggccctcttgccttcttcttgtaaaggccattgcaattacactgggctcacctggataatccaggataatctctccacctcaggatctttcatcacatctataacgtctcctttgctgtgttagataacatgtctacaggrttgggggattagaatgtaggcatctttgtggggcagggtggggatgggggtgcattattctatccaccacagatactgagccagaactaaaacacaggtccctggctcccagttcatgaggtgcttctcctgttagcatgaagaaagggctatatcaggtagtgatcacctcaaagcacagcacaactgaccaacccccaaactcaggggcttgaaaccataagtgtttatttggacacaaacctacaggttgctgggtggttcttttcatctcccctggccttgctcacatgtttgtggatc

SEQ ID NO: 537751 - DNA, 479 bp, Homo sapiens
gtccttctattctggcatttttctagaggcrgatcaagacatctgcattgcttttttgtttgtttgtttgtttgtttgttttgagacggagtctcactctatcgcccagctagagtgcaggggcgtgatctcggctcactgcaacctcttctgcccgggttcaagcgattctcctgcctccgcctcccgagtagctgggattacaagtgcctgccactgtgcccggctaattttttttgtatttttagtagaagtggggcttcaccattttggccaggctggtcttgaactcctgaccttgctatccacccacctcggccccccaaagtgctgggattacaggcgtgagccactgtgcctggctgacatctgcactgtcataggggatcgctcagagtggtgggaaaaactacagggaaaggatgcaaaacttctgaaaggtcagaaggttctgcagagccctgggggagaatgactga

SEQ ID NO: 537752 - DNA, 500 bp, Homo sapiens
tccgcccagtacccggtgccagggctgctcagatctcgatgaggctggcaaggcgcaggcagaggggcgcgtcggcaggcatggcgctgcgcttgatctcgttcccgtccaggcgcagcacctgcagcttggagaagttcacgacgtccaccacggtgcagaagctgctgatggagaactctgtggggacaagaggagcacgggtcagggagagaagcccagattacgaacctgaagccacagtgagattagcctttgtgaagcagcttagataaaggggtggaagttggggayggagggcagatgttttccaggattggagtcatacttactggcgccactaggggcagaactagggacagagtgaggactgtgcctgcgtctgcagctcacctcctaaccaccaacctgaactttactctgcaggcccaggaatgttcttaagcgtccttccctctgggacatttttttttttttagcaggataggggggcaggtggg

SEQ ID NO: 537753 - DNA, 644 bp, Homo sapiens
cctccagaagtttgtggaaaacttgagatggacattagactttgcaaactccaaagggtgatgctggttcaaggcacatttgccctgacctgaagggtcaatgtgaccacttctagtctttatgagcagggctgtgtgtgtttcagtggcagtgtgtctctaagaagtgtgggctttcattgtctgtataattaaaccctgtgcttgcaattatccttgaaggtatatgtgtttatgtgctgcttttggaatgatataytgatatgactgcatgttgagtccctgtgggagaggctgctaaatggtcatgtgaccatacttttcttcctcacctaggaacaccaagccccttcgcactccatgagaagtagaggccttcccgggatcaaaacagcactccctctctgagcctccccaagtaacatacactacctgccccattttctccttctcctgcccctgcctgtttccttgtcttcttcctccagccccaagaatagctgaggctcttaactaagaacaagaaaacaaaaaatcgggtcaccagatgtgcttcattccacctctccctctctagctatcctccccacaagccaacgcattctgagcatatatacagcaagcacctggcatccccccaaacc

SEQ ID NO: 537754 - DNA, 513 bp, Homo sapiens
gggtcttcctgggtgggtttctcgtagtgcccgtctggttctggcaccgcttgagaaggtctctctggatacagtcagagaagaatgagacacttctcagccctgtgctctgagggtgtagagtctgagctgaatgcctctgctgctgccttggtctgtcctccattcgtttgtcttcacactcaccatgcaaggtcctaaggtagggacggagtcctgtgcatgtctctctcttatgtcccaaagagccagtaaggtcctgggcmtatgaaacactgtcactcaaacctactgtattagttaggatataagttcatgtgctgtgacagaaaccacaaatacaaatactttaagcaaagcagaagtttatttgttgctggtataaaaagcatgggaaagcatgacagttggcttcatagagtcagcaggtgctaaggtgctttctacctcatcctcccctcttttccagctgactctttgtttgcatggcccaagagggcacatcctcatacc

SEQ ID NO: 537755 - DNA, 541 bp, Homo sapiens
aaggagccagctcaggctagactgtcccgggtcttcctgggtgggtttctcgtagtgcccgtctggttctggcaccgcttgagaaggtctctctggatacagtcagagaagaatgagacacttctcagccctgtgctctgagggtgtagagtctgagctgaatgcctctgctgctgccttggtctgtcctccattcgtttgtcttcacactcaccatgcaaggtcctaaggtagggacggagtcctgtgcatgtctctctcttatgtcccaaagagccagtaaggtcctgggcatatgaaacactgtcactcaaacctactgtattagttaggatataagttcatgtgctgtgacagaaaccacaaatacaaatactttaagcaaagcagaagtttatttgttgctggtataaaaagcatgggaaagcatgacagttggcttcatagagtcagcaggtgctaaggtgctttctacctcatcctcccctcttttcyagctgactctttgtttgcatggcccaagagggcacatcctcatacc

SEQ ID NO: 537756 - DNA, 614 bp, Homo sapiens
cacaaaggcaaagagcacacagagaagcaaaggcctttaggtctggggcccaggaagtcctctgccggccattttccttccctcggctctacaaggggccactcaggaatgggggctagggagtaggtggggggacagaagccacaggtagaaggaagtgtgaggtgtgtgtgtgtgtgtgtgtgtgtgtgtgtgtgtgtgtgtgtgtggtggaagggccagggtcggtttcttttgtctccttccaccttattaccccctgcccctcactctctcctaaggcctgtcttaatacatamgtcttggttgacctgtactgtttggtaatgggtaaagtcttattagcattttactaaacttagctaaataaaataagtaaataaataaacaagtggaatctttgctcacttgtgtgtaattcttaccaggcatcctttgtatcaaagtgtttacttggtctataagctctcccctgtcaggtactgccccttcctccttgagtttcctgggtgctgcccctttctcccaggttcccccagtcatgggatctggcctctcagaggctggaggagggggtgccaggcccgggatccagcttggaaaagtgcccgtga

SEQ ID NO: 537757 - DNA, 614 bp, Homo sapiens
cacaaaggcaaagagcacacagagaagcaaaggcctttaggtctggggcccaggaagtcctctgccggccattttccttccctcggctctacaaggggccactcaggaatgggggctagggagtaggtggggggacagaagccacaggtagaaggaagtgtgaggtgtgtgtgtgtgtgtgtgtgtgtgtgtgtgtgtgtgtgtgtgtggtggaagggccagggtcggtttcttttgtctccttccaccttattaccccctgcccctcactctctcctaaggcctgtcttaatacataagtcttggttgacctgtactgtttggtaatgggtaaagtcttattagcattttactaaacttagctaaataaaataagtaaataaataaacaagtggaatctttgctcacttgtgtgtaattcttaccaggcatcctttgtatyaaagtgtttacttggtctataagctctcccctgtcaggtactgccccttcctccttgagtttcctgggtgctgcccctttctcccaggttcccccagtcatgggatctggcctctcagaggctggaggagggggtgccaggcccgggatccagcttggaaaagtgcccgtga

SEQ ID NO: 537758 - DNA, 328 bp, Homo sapiens
ctccacagagggtctggttaccagtggaggtcgtcatctgtctcccgtagarggcctggttaccactggaggtcgtcatctgctccccacagagggtctggttatcaatggaagtcatcatttgccctccatagaggtctagactggttgtcatttggcccccagagagggtctcatcgctaccggaagtcactgtatgaccatcagtgagggtctggtcactactgaaggtcacctggtccccacagagagtctggttatcactgagggtcttcatctgatctccaagcagggctggtatctgactctcattgagggtctggtcact

SEQ ID NO: 537759 - DNA, 516 bp, Homo sapiens
aaattttcaaataaattatctcatttcatttccaccatgaccccagaaaataagggtcataattaatcccattttaaggaaaatagaagtccagggaggtaaattgacttggcccaggtggaagactcttaatttgtactggacctatctggctgtgggtccttacagtcccctagataaatgggatatttctcccagagatctcactgggggcacccactgattctagcctcctgagaaccatcctggaaaccaccagcttctaggaaccattctactatggactgaatgtttgtgtttctccaaatttcrtatgctaaaactgaatttccagtgtgattgtattagaaggtagcgcctttgggagatgattaggtcatggagacagaaccttcaagaatgagatgagtgttcttctaaggggctgagggtcagagttctttacttctaccaagtgaggacacagctaaaaggtgccatctatgaatcagaaagtatgcccttaccagacaccga

SEQ ID NO: 537760 - DNA, 470 bp, Homo sapiens
ctgccataaagccaaatcttaactgagggtgaattctttggtggtttaagtgagtttgagagttagactagacactctgacctctctccataggaacctaggagagaccctggtttcttccaggctgtatggtgagtgascaaccattcagggtggcttctattcaatagaaggatctgtttcagcaatttctaaaagttagccactttcttctctttaggatgtgacttgatttgaccaaagtttctacaaggcagccctctaagctgccatgggcctcctgcaggtatggcctgagatatagtctatgatatagaccaaggcagtctgtagaatctggagttaagcatcttattatcatctcctcagtaatcaattttatcaacccagagatttgactaaagagagtatggaatgctcaggtgtggcagaccaacctgactcaagcacacattctttctaaagggaaa

SEQ ID NO: 537761 - DNA, 619 bp, Homo sapiens
caaactttggtggtaagattaggactgtaatctgtgagttatcttggggtaaactctgcagcwgcaagtgttccggggcaaatgggaaatgggttaagaaacccctttcccgctgcctctttagattacataattcactctggttctccagacgttctacttttaataacacaagctaaaatttattgagcacatcatatgtgctaggcactgtgctaagcacttagctttcattgaatcatctaattcctaccacgaccctgtaaagcaggaactattattccttcacctcagaactgaggtgctgagaagttaggtaactttcctgcatagctagaaagtgatggactaatgatgaagcctgtgttttttatctctatgctctactgcatcttactgagccttattatgtctgtcagccatttcctttaccaaagagaacaccctacttcctgcccacccagtgagtagataagtatgtttgaccagctgtccttagcttggcacatgtaatgggtatcaagtagtgtttgggggatggatggagaggtagatgagtagggggataggtaggggggatgggtgggtagataatgggcagacagttggatgaataagt

SEQ ID NO: 537762 - DNA, 642 bp, Homo sapiens
cctcattatccccggatgcctaattcattctcattattgtgacttcaatctttactatctcaacaaatatggayatccagccacttctcaaccccaaattctcaagaaaaagtgggatcatgagctgcatatttgatccaatgaagctttgtcaagtcctgggagtgtcatcttcttattttagatataactgtggccaaaatatttatctaccacatagctcatattttccttctccaagaacataacagttgccctgattaatatctcttttgaaaaactctaaaatgccaactactcactgtttccaattattcgaaggaaagctaacttccagagagtctatctgcatgtaattatttcaaatatttctaagtacttgggaggaagagctcttgaaattttagtctctgatcaccagtatatgaattcaagtgcctttgggacctaaagaaaacaagagtgttcatttgaaggagggagggtgggaaaaatagaaggaagtgtagtgtttagattcactggtttggaaagactttaaaaatatttatatcagtattgaggatttgtgtatgttttatttcttgtcatggctttgaagaagttatgtgtatatcctcaaagattttaagtattatttca

SEQ ID NO: 537763 - DNA, 500 bp, Homo sapiens
cattagaatctcatggagtgcaaactctgttgtgaactgtgcacgtgcaggatctaggttgccygctccttatgagagtctaatgcctgatgatctgtcactgtctcccgtcacccccaggtgggactggggtcccactgatgctacattatggtgagttgtataattatttcattatatattataacgtaataataatagaaataaagtgcacaataaacccaatgcacttgaatcatcccgaaaagatcgccccaccaaccccagtctgtggaaaagttgtctcacatgaaaccagtccctggtgccaaaaaggttgggaactgctgtgtgagatgactatcgatttacaattcatcaaataaaacaaagcatgtctgatctggcctgcaaaaggtgagataatggctgcactaataagaagtgcaataaggggatcaggaagcgagacaccaagcagagctgaatgacctggatgaatgcatggccattgcgtttct

SEQ ID NO: 537764 - DNA, 500 bp, Homo sapiens
cattagaatctcatggagtgcaaactctgttgtgaactgtgcacgtgcaggatctaggttgcccgctccttatgagartctaatgcctgatgatctgtcactgtctcccgtcacccccaggtgggactggggtcccactgatgctacattatggtgagttgtataattatttcattatatattataacgtaataataatagaaataaagtgcacaataaacccaatgcacttgaatcatcccgaaaagatcgccccaccaaccccagtctgtggaaaagttgtctcacatgaaaccagtccctggtgccaaaaaggttgggaactgctgtgtgagatgactatcgatttacaattcatcaaataaaacaaagcatgtctgatctggcctgcaaaaggtgagataatggctgcactaataagaagtgcaataaggggatcaggaagcgagacaccaagcagagctgaatgacctggatgaatgcatggccattgcgtttct

SEQ ID NO: 537765 - DNA, 500 bp, Homo sapiens
cattagaatctcatggagtgcaaactctgttgtgaactgtgcacgtgcaggatctaggttgcccgctccttatgagagtctaatgcctgatgatctgtcactgtctcccgtcacccccaggtgggactggggtcccactgatgctacattatggtgagttgtataattatttcattatatattataaygtaataataatagaaataaagtgcacaataaacccaatgcacttgaatcatcccgaaaagatcgccccaccaaccccagtctgtggaaaagttgtctcacatgaaaccagtccctggtgccaaaaaggttgggaactgctgtgtgagatgactatcgatttacaattcatcaaataaaacaaagcatgtctgatctggcctgcaaaaggtgagataatggctgcactaataagaagtgcaataaggggatcaggaagcgagacaccaagcagagctgaatgacctggatgaatgcatggccattgcgtttct

SEQ ID NO: 537766 - DNA, 561 bp, Homo sapiens
gccacagggttctcatccataaaagaatgtctgtgaggttctcccatcctctgacatcctaaaatccaatgagaaagggactggtcaagccagagagattattgttatagtttagtaactttttgaacttctcagagcctccaagatagatcatggaggagggaactgttaactgctaagcttgactttactgacaggagtaaaaaaaattgtgttaaggttagggaataattttaacagtcaatttgttcttgtgaacaaatttcaacagtgaaattttagatatgtactttttaatggtgccaagcagcagttattatagatcaactgctgtttggcaccattaaaaagtacacttcgcaccgtcaaaaagtagatctggccacaattagatcagtcagggaaaaacacttcgcaatgaaatattatttaccacgttttcttcctccctcttcttgaaaatagtaatgaytttagcatttttaaatcttgaagaatgtcattccgtactgactaaaaagcctgtgcaaacacccaacatcttctctttcctgtctattt

SEQ ID NO: 537767 - DNA, 349 bp, Homo sapiens
cagccagcttcagcagtggtgagtgatgctgagattttcctaggatgtatcgaagctgtacaagaaaccatccttcccaggccatgttaacaaatgggtaggctgccaggaagggtctgtaaaatcatttccagttggaagaagggggatgaatagaatattcatcctcttctctcagctagaaaccagcttctccagcttcactttcagatagaaaagaagaaccagggacataattgatttccaaagctgctcctttaggagaccagcactagccaatctgtgacacttgtgagtgtcccccattactatkctcttcaagccacaaaagttttcagaaaatgaggca

SEQ ID NO: 537768 - DNA, 301 bp, Homo sapiens
ttttttctctagcttacataggtgaaattttaggttattgattttaaatgtttcttcttcgctaatatatgcattcaatactacaratttccctctgagcactgctttttctgcatttcacaaagtttgataagttgtatttcatttagttcaaacattttaaaatgtcttttgaaatgtcttctatgacctacattttatttagaaatgtgttgtttaatctgcatattttggaacattccagctatcttctgttttttttttttctagtttaatagtatttattggggtctgagagcat

SEQ ID NO: 537769 - DNA, 555 bp, Homo sapiens
agctgtgtgatcaagctcacgtgagcactattagattctttaggaaaaataaacaccttcccaatcatgtctgtgagagaaaaaaaaaagatataatcttcacctgaaatgtgaacaggaaaaaaatcacaaattcaattttatattcggtaacctcttgtcttttcttcctaccatctatccctgacacccccacctaccctactccacatagtcatatacctttgacctccctacttgtctgagcaatggcttccacgaggctagtgaggacagaaacccaaacagtagcttgtccatgttcttagcttgggctcttacagcagcagcagtgaccgggatgagggtatcagatagcacaatggttgtgcccacccagcttctaacttagttattatgtagagattcacattcttaggctgcaggctattcagggtttatatgcaccttgggtgaggatgggggaggaagagcaccaataatgtgtgagtaattttccagccctgcsccctgggtgtcagcaatcagagctgctgctggggaaggaagggtgag

SEQ ID NO: 537770 - DNA, 529 bp, Homo sapiens
ttatattctgttaagtgatataaactgcatgtgccatttagcatatctttatctctgcagattgtatctaataggcaaatttattttccctgtgtgaaagtttcttgctgattcttggaaggtttgtgtgttattattcatgtccttactcaccgaagaggtgagtggtaggatggctagaaaagatgttcagacataacatttcatcaccggagaaaagagtgggaaaaagacttggccagactgttgcctgttctggactgtaattgtcccatatgtgatgttatttaagaaaaataacccagatggtgtcataggtactgtctaccatgttttattgcctttgggaagtctaagggtaaaacgccacctccttraataggagtaaatttcagctttccaagagaaataagcagtcacactgttatcctcataaacaggcaagctttcacaaatagtaaaacttggaacctcacctgaggagagtagaaaactgttccatatatagccctgtcttctagaagctgaa

SEQ ID NO: 537771 - DNA, 529 bp, Homo sapiens
ttatattctgttaagtgatataaactgcatgtgccatttagcatatctttatctctgcagattgtatctaataggcaaatttattttccctgtgtgaaagtttcttgctgattcttggaaggtttgtgtgttattattcatgtccttactcaccgaagaggtgagtggtaggatggctagaaaagatgttcagacataacatttcatcaccggagaaaagagtgggaaaaagacttggccagactgttgcctgttctggactgtaattgtcccatatgtgatgttatttaagaaaaataacccagatggtgtcataggtactgtctaccatgttttattgcctttgggaagtctaagggtaaaacgccacctccttgaataggagtaaatttcagctttccaagagaawtaagcagtcacactgttatcctcataaacaggcaagctttcacaaatagtaaaacttggaacctcacctgaggagagtagaaaactgttccatatatagccctgtcttctagaagctgaa

SEQ ID NO: 537772 - DNA, 506 bp, Homo sapiens
ttattgcatgtagaaggtgtgaatgcagatccgaaacacagtgcaggtaggacccaataggagagtcatctgcatgatggagagagctaaacctttgggagtggctaagcttactgagcacaaggcagaaaatagcaaagtaaacaaaaccaaatacttgaggaatattcacagtttgggatcagtagagtaagtggatggcaaaggytgggaagagagatgggagaggtagaagaacaaggaagaagcagtgctagagtaactggccaccactcactacctatgatagtagggctcttggagaacatatcaaaaaaagaccgtttatctttgttaattataaaacaagaagccctcatcctcctgaataggtaatttgaatggaaggtggaaaaagagactcccaggattctgtggaccttccaaacagatccaaaatttgtccctctgaggcttccctggtactacatgctgtttcagtcaagatcaagggggatagaatttgg

SEQ ID NO: 537773 - DNA, 582 bp, Homo sapiens
atcctggctcttcttaaagtcatatgctcagatatctccataaatgtgtttataatgacagtgtcaagtattgttttattggtgattcctcttaatttttatctcctatgtgtttattctctcttccatcttgagaattaattctgctgagggaagaaagaaagccttttytacctgttcagcgcacttgactgtggtcatcttattctatggttcagttcttttcatgcacatgaagcccaaatcaaagttcacaacagcatctgatgaaatcattggattgtcttatgaagtgatcaccccaatgaaccccatcatctacagcctgaggaataaggagataaaagaagctgtgaagaaaatcctcagcagacacgtgcatctatggaaaatatgaaaggccttgaggcatgtgacgttctcaacaagggatcagatcaggtgttttgtattcacagataaagtcacagaatctggtatcaagagagtgtgtatgtttgtaaagacaactttgggattcccattcttctcatcacagaatgctcatgtacaccttctgaataatgtcttgtgtgcagagtt

SEQ ID NO: 537774 - DNA, 548 bp, Homo sapiens
caccacaccagcttatagagataatatacttgcttgtagagataatatgctaggacagaattttgagttttgaatgcagaaatgtataagaaaaataactaatgttatgacatacctggtaagcattcaatgttagcttagcagggaggcaaacttgactttacaaaaagtttccaaattttatatattggttctctaaagcagagatatggtatyataatcagctaaaaaatatttattagtcacattaaacagctttcaggatatctcaacatcagaagaatggatgtgttattttaattgtggggttctatgccaactatataatttacctaatacctaataaagcctacatgtccagctctatagaagacactgtccactgttgggccctataacatgccacccaactcttttctatttcagtgtacatggactagaatttcaactgctggcacatggatacgtttgccattcatgtctgtcttgggactccagagcctctctgcctctcttccctgtagcatgaagtatcagggaattaatgc

SEQ ID NO: 537775 - DNA, 525 bp, Homo sapiens
gctgcaccacaccagcttatagagataatatacttgcttgtagagataatatgctaggacagaattttgagttttgaatgcagaaatgtataagaaaaataactaatgttatgacatacctggtaagcattcaatgttagcttagcagggaggcaaacttgactttacaaaaagtttccaaattttatatattggttctctaaagcagagatatggtattataatcagctaaaaaatatttattagtcacattaaacagctttcaggatatctcaacatcagaagaatggatgtgttattttaattgtggggttctatgccaactatataatttacctaatacctaataaagcctacatgtccagctctrtagaagacactgtccactgttgggccctataacatgccacccaactcttttctatttcagtgtacatggactagaatttcaactgctggcacatggatacgtttgccattcatgtctgtcttgggactccagagcctctctgcctctcttccctg

SEQ ID NO: 537776 - DNA, 567 bp, Homo sapiens
aatggtttaaatctatgtgaaccaactaccattgcactatgaacatttattgaggttctactatttgacactactggaatttataccagactgaaaaaaaccttaatatttatctgtctttgtggatcccacttttcagtgggagagacagacgtctaagaaatagtaatgtcaattataattatgcaacaatgtagtgaaggccgtggtcaaagtacatttgaatactatgaaaacaggaggtggcaaaggatttgctctgcccaaggactaaaaggggttttgttttacaaaggaagccaagaaaacccatgagttaatacatttcaaacactgatggattttggaaattagttgtttgtgtatgtttggcatccatttacccatacaccaataactacaccctgatttttcaaagggaacccatctgtcttctactttcattccaaattttgacccatgcctagccaattagacrcactttaggcaatccagttagagtaactgattcaaagatggccctaggaccccagccattgaaatacatgtatgggaattgtttgtttt

SEQ ID NO: 537777 - DNA, 273 bp, Homo sapiens
actttgcatggtgtggtttacaggtatggtgaatgttagcttacctccatggcttcctggtcttttaatgacattgattcatgtcagggcacccattttcacattatcagtttagaaaagtttagagaaggcctcctgagactcttcrctaacaggaggcttcctgaccccaaggtctacagattggctccaatggagagctgtaatcctgtttcattctagggtaaaagttttcaatttaaggaggaaatctcagaagagggatacatgttt

SEQ ID NO: 537778 - DNA, 421 bp, Homo sapiens
tggctctccatgtgggtgagtgggtggaaaccctgatgtgtaccatttgctggattccagtgtgtaaatatttctaccatggccaatttcaagctacccatggttaataactgcctcacaagttccagaaaaacttakccatcagttctcacaagccgttatgagctggctacagtacatcactggaagaattgaaagataaatgcatatgttcatcttctaagccttatattatatgtaaggcattcttttgaacttaaaacaaatatgggcctggtatagtggctcacgccagcaatcccagcactttgggaggccgaggcaggcagatcacctgaggtcaggagtttgagaccagcctggccaacatggtgaaacctcatctctactaaagatacaaaaattagccgggcgtggtggt

SEQ ID NO: 537779 - DNA, 636 bp, Homo sapiens
ctggggagatggaatgacttatgaatttgcccttgttttaaattataacactatagccgggcgcagtggctcacgtctgtaatcccagcactttggaaggccaaggtgggtggatcacctgaggtcaggagttcaagaccagcctgaccgacatggtgaaacctcatctctactaaaaatataaaattagcctggcatggtggcgcatgcctgcaatcccagctacttggggggctgaggcaggagaatcatttgaacctgggagatggaggttgcagtgagccgaggttgcaccattgcactccagcctgggcaacagaagtgaaactcgatctcgaaataaataaataaataaataaataaataaataaataaatrataacactatgtcttgaaaagcggtgaaaaaaaagctgggcattaattttgttacattttcacgttattgattttattgtaagacctacagcacttattctcagattttagtgttcctaggagtcattcctgatgcctattaagatgggaaaattctttttccacctcagagctactacagtaaatgaggaatctgaattttatgcgcaataaagtttaagattagctgccataaaatattcccccatttcttcctgt

SEQ ID NO: 537780 - DNA, 664 bp, Homo sapiens
gggtaggtctcacatgcttaaagagatcttgtgctttcatctctctggctcaaactgaccacctagtctatgagtcactgggatggagagaaacttagcttgctgccctctttggtggaggaagccctgctcctccgcccagaagcagggagactttgagaacgtgtgtgtgtgtgtgtgtgtgtgtgtgtgtgtgtgtgtgtgtgtgattacatttttactccttctcctcagggataaagaggtgacttagggtcctctctcagttctagtataggcagcatgatggggacaaaagcattcctggaatgggaggtaaaggagttgagttccgatcatcaagaattgtttccctccctggaatttggcaatatattatatataatagtaatactttgataataacaatcccaatctcttttaattttataatgcttcatgacttcaaaacttttatctaaactattttttgtgaggcttataaccatgtgagatggttaggcatatatttttacatatatttgttctaaactgaaaggtagttatttgtcactataagttatttgtcactataagtaataagtgacttgcccaaagtcacactagcagataggaagggctcaaacacmaatgagatttccagtgctcttttcaaaatcctgat

SEQ ID NO: 537781 - DNA, 630 bp, Homo sapiens
gcatctagttatatgacatctccagatggggagagcagcattctgattctgaaggacacatattttaagtggattaagaaaggaaattattttaaatgtaggaaggtataattaacctgaggaccctggctgccataagatattgttgaggggaaggactaacggaaactcagaacccattaggcttatggctgaatacatggggcggtcccatctccctgggagtattgttctgtgagtgaattttaatttgtgggacaacaaakctttgtggggactatgccccaggcaggcttgtgctctttcgcgtgaggacttcataaaagcaccacctatatgtggatgcacctgtatatgtgtgcttaacaaatggctacttctttgctttaagatatttggaaatcatctttggcttttcatgtaggactggagacagatgccagagcaaggtttgtggaagtaacagttacagactactgctggggttccaaaaaccaggtgtggaaaaaaacacagtaaagggaaactcttccctgaagagattagggaccatcgagtacaaggaagctttgtggcaggaaatagaagagaaagccaggagagttgggaatcagaaagacacacatgtaa

SEQ ID NO: 537782 - DNA, 630 bp, Homo sapiens
gcatctagttatatgacatctccagatggggagagcagcattctgattctgaaggacacatattttaagtggattaagaaaggaaattattttaaatgtaggaaggtataattaacctgaggaccctggctgccataagatattgttgaggggaaggactaacggaaactcagaacccattaggcttatggctgaatacatggggcggtcccatctccctgggagtattgttctgtgagtgaattttaatttgtgggacaacaaagctttgtggggactatgccccaggcaggcttgtgctctttcgcgtgaggacttcataaaagcaccacctatatgtggatgcacctgtatatgtgtgcttaacaaatrgctacttctttgctttaagatatttggaaatcatctttggcttttcatgtaggactggagacagatgccagagcaaggtttgtggaagtaacagttacagactactgctggggttccaaaaaccaggtgtggaaaaaaacacagtaaagggaaactcttccctgaagagattagggaccatcgagtacaaggaagctttgtggcaggaaatagaagagaaagccaggagagttgggaatcagaaagacacacatgtaa

SEQ ID NO: 537783 - DNA, 611 bp, Homo sapiens
cagccctgaagccagcattatatatcctaacttatatgtctgcatcattccaagtgacgtgcacccctctcccatatgcccaaatgctagaggcttttttttctctctagggagagattgaacactacctgaagggattatttaacttcccaactttcaaaattggactaaggttatatcagactcgacatgtccttaatttattttcccactaagcggaagttcaggagaaaaaccaaattaatcataggcaaaagtgaaatttcagatttaattcttttcacatctgwgttaggtaggaacttaaatttgtgattccattacacacagtttgggagaaaggttttcacaataattctaagattttgattctagcttctaagagtccaataagagaatgtaaatgttaggctcaagaaagtatagaaataaggaaatttgcataggggcttgagcaggaagaacaaagtcagtttctcctactgtactctcaatagtcaatacagaagacttctgtaacctgtagtcacccagaagggtgtggggattttccccccagcaaccactaatctatcaattctgcagcaaattatttatttagtggcacccag

SEQ ID NO: 537784 - DNA, 593 bp, Homo sapiens
tcctcaggcatacacattcttattctgacctgcctgtttgctcttcctaagacagaaagttggaatcagtgtttttcgtttgtttattctaacagttcatgttcctgaccttaaattattctggtctrctgggtcttggactcacttctgatgtctcccattgctagataatgtgtctggtgcttttgaaccaggatcgatgtgaatacagcacttccaaatggaggcctcaaacgtattccttccaaaacccatctatgatgtttgtgatgatgatacgataattttagtacggctattgctattattgggtatactttacatccaaggcttgtatatgcactcatttttgtcctccatgtaaatgttactctctccatattattgaaaggaaataatgactcagagtcattatacagcaactaaggtcacaccactgattaagagttggagctaggattcaagagtctgatcactgagtctgtgctttttttttttttttcatttatatcacaggggcttttaaagttgtccaggtctgtacaggaaaacatcccaaggccccccaggatgttgttaactaagctaagcag

SEQ ID NO: 537785 - DNA, 649 bp, Homo sapiens
gggcaaatgtgggagatgggaaatcaagaggacactgcaataacgcaggtgaattgcagctttggataggggaagaagtggtgagatttggcaaatgtttaacaccagagacaatgctggcagatgggctgtggcaatttcctgggataataggatacatgtgtgaaattttcatagccctgtagaataaaggcatgattttaaaaaacaaattcaagaaattaactagagcaatattaaatacaccttaatatttaaagacatctgcctccttttcttttcatgattccactgtctgaaagcttacattttagtttttgagtttgcctttaccaatccatttaggaaaagttattttatggaaaatatcacatttttgttgtagatctttgtaatttggcgctgcccagcatctgagcacttaccttctgggggaagagtttcaagaaaggtaggaggcagcagcccaccccctttccctatggtagaaagctaaggctggcagaattttatttaacaagcacctaaaataaatagcactgactatgtgccaggcactattctaaacgctctaaaaatgacaactcatttaatcctcataatagtaygtgcctcattgggttgttattcccctttaacagatgaagaa

SEQ ID NO: 537786 - DNA, 596 bp, Homo sapiens
acatatatttaattggcaacctacaaagctatgtgagaaataatacggaggaagcaatatttgagtaaatgatactcaaaaatctttctcaataaaccaaaaacagaaagcatcattcaagagtattatgaacccaaaatagaataagtacaaggaaattcagatctcagaagatcacagtaaaacttctaaaacaaaaacaatcagggataaaaaggcacaatcagaaaaatagtaataatacggccaggcacggtgacacatgcctgtattcctagcactttgggagacccaggtgggtggatcacttgaggtyaggaggtcgagaccagcctggccaacatggtgcaaccccatctctactaaaaatacaaaaattagcctggcattgtggcacatgcctgtaatcccagctactcaggaggctgaggcaggagaatcgcttgaacctgggaggtggaggttgcagtgagctgagactgtgccactgcactccagtctgggggacagagagagactccatctttaaaaaagaaaagaaaagaaaaatagtaataataaaactggcagctgttcattaaacagaaatgagaata

SEQ ID NO: 537787 - DNA, 582 bp, Homo sapiens
agctgggctttgagagactcacagagttcagctcaaaggaagggcatttcagaaggcaggtgggaggatggaggagagcataataatgaggcatggtgaacggcaggaraggttgggtcaggggcttgtgcacagaaggtggccacaaaacatgggactcgacgtggcaggctgcaggcgggctccaagcctgagagacgatgtggactgtgggctttggctcagccgtggctcaggaggcaccggcgctgacgtgtaggtgctgtcctgggctgggctggtgtctgcaggatgaagcaatggggcatcctccagtttattccaattttgggtttagttctcctttttgaaattccttttcttttatggttactttaattctgttcacttttgtgagcaatgactttgaaatcatgactcggaaaggtcagagaaagagacacccggagaccaataatcaccaacagggctggggacagattcaataggaaggaaaaaaaaaccaaaggcttccccaaaggcaggctctgggtgtctggaaatgtggttttgctgacagaattaggacaaggagccagtctg

SEQ ID NO: 537788 - DNA, 583 bp, Homo sapiens
ctccttcacattgttacggcaggccctccccatggctggggtactaatctgaactccccatcattctgtgagcccccaaagagcctgctttgatgayccccttcccatggagacacaacccagaatggcattcctctgagagtattgtctgtgcgcgtccgtgtgccacggtgaacagtcatcctcaacaacctgcctgttttccaataaaaatgaaagctgcttaatggacaaagagtttcagttgaggaagatgagaaagttctaaaggtaaatgatggtgatggttgcacaacagtgtgaatgtacttaatgcctcagagcttaaaatggttaacttaaaaaatggttaaaacaggccaccaggcacagtggcttatgcctgtaattccaacactttgggaggctgagatgggaggatggcttgagccctagcaattcaaggctgtcgtgagctatgatcatgctactgcactccagattgggcaacagagcaagaccccatctctcaaaaaaaaatttaaaacagtaaattttacgttatgtgtgttatatatgtgtaatatatcacattattgtttgt

SEQ ID NO: 537789 - DNA, 583 bp, Homo sapiens
ctccttcacattgttacggcaggccctccccatggctggggtactaatctgaactccccatcattctgtgagcccccaaagagcctgctttgatgacccccttcccatggagacacaacccagaatggcattcctctgagagtattgtctgtgcgcgtccgtgtgccacggtgaacagtcatcctcaacaacctgcctgttttccaataaaaatgaaagctgcttaatggacaaagagtttcagttgaggaagatgagaaagttctaaaggtaaatgatggtgatggttgcacaacagtgtgaatgtacttaatgcctcagagcttaaaatggttaacttaaaaaatggttaaaacaggccaccaggcacagtggcttatgcctgtaattccaacactttgggaggctgagatgggaggatggcttgagccctagcaattcaaggctgtcgtgagctatgatcatgctactgcactccagatkgggcaacagagcaagaccccatctctcaaaaaaaaatttaaaacagtaaattttacgttatgtgtgttatatatgtgtaatatatcacattattgtttgt

SEQ ID NO: 537790 - DNA, 669 bp, Homo sapiens
ctgaggctccatgccaggtctccacttcctcctccaggcatgctacctcctcatccctttcagcagggtcatttagggctggtatgctggcttccctgtgcaagaatcgccaatttgccactcttgtcacttttcccttgtcatgttctgtctgtctctcacacacagacacctgccctactgttatttaaaacattgcttttggcactttccaggccaagctataaataaagggtggactgaccttgtcaactgttaaattggagccgtggtgcgttgcctagaacattgcggatgaccccgagcagcacagcagatcaacggctgagaaagagctcattcagctcatctaactaggatgctgtcctgccagagccctgggggttctcgtctcctggggcaaaagcagcatgcaacccttatgaacccatcttggarggcattcggggagcccaagacaagaccattgggagcctcagggtcacttgtgggggtctctgtgctggacggctgtacctctcatgaaatggacaactgaccataagaaggaggtaagttacgcatggacgggaaaataagaagctcctacttagggctgtgatatgtgcggtaaccatttaacgttaatagcatccatgtgagacaggtgctagtactgccccatttcat

SEQ ID NO: 537791 - DNA, 629 bp, Homo sapiens
ctattccatcaagaaggggtatggtgtggtggcaatgccgttcctccagctcctagtacaaagcacattttctggctgaaagtcttcaaatgggtcaaagccatctttcatcatggctccttctctgtaaacagaagacacctagatgtggagggaagagatgggagctggggctgaagactgccctgtggcttccaggaaagtctgtggattctgttgagggccgtgattaagaaaaaccagatccgcgtctaccagtgtcgccggctgttctgggcagtccgggtcagagggctcagggttgcccctccagatgtggctccaccaggccggcaaaagacacggcgaagggaagggctggggaagcaggaatacctgagatgaggggtgcagccaagattacagcattgggttgtaggactttggaaatggggaagctactctcagtggtatcaggctggagaayggcaaaaaggcaaacaaataacttattttgctttatatttttatttatttatttttgctttgttcctttcatctgggaatctcaggaactcacctggaatgaacttctcgtcaaacatggcatttgaaagccacaaggagctcagagctcagccagcctagca

SEQ ID NO: 537792 - DNA, 629 bp, Homo sapiens
ctattccatcaagaaggggtatggtgtggtggcaatgccgttcctccagctcctagtacaaagcacattttctggctgaaagtcttcaaatgggtcaaagccatctttcatcatggctccttctctgtaaacagaagacacctagatgtggagggaagagatgggagctggggctgaagactgccctgtggcttccaggaaagtctgtggattctgttgagggccgtgattaagaaaaaccagatccgcgtctaccagtgtcgccggctgttctgggcagtccgggtcagagggctcagggttgcccctccagatgtggctccaccaggccggcaaaagacacggcgaagggaagggctggggaagcaggaatacctgagatgaggggtgcagccaagattacagcattgggttgtaggactttggaaatggggaagctactctcagtggtatcaggctggagaatggcaaaaaggcaaacaaataacttattttgctttatatttttatttatttatttttgctttgttcctttcatctgggaatctcargaactcacctggaatgaacttctcgtcaaacatggcatttgaaagccacaaggagctcagagctcagccagcctagca

SEQ ID NO: 537793 - DNA, 426 bp, Homo sapiens
acctcgccccacccctgactctctctcacttgctcctgctgttgccatgtgccgtgcctgctccctgttcaccttccaccatgactgtaagcttcctgaggcctccctagaagccaagcagatgccagcgcaatgcttcctgtaaagcttgcagaagcatgagccaactaaacctcttttctttataaagtacccagtctcagatatttctttatagcagtgaaagaacggcctaacgaggggcacaggcacaaccacagtggagatggtctgagaaggcctcgcagcacrgatgctgagggggatgcagcgacctcctgaagggaggctggaggcagtttccacacagaaggtaagattttaactggttatttaaatgaactagaacttaaatgaacaagacctcccccacccccagtcaagagg

SEQ ID NO: 537794 - DNA, 607 bp, Homo sapiens
gcttcatgtaaacatcaccgaagcctggggtgagttagaaagtcataatttaaaatgcagtgatttcgaggttagatttctcctcctgaaaaataatgataatcacctctcacttcacagtgctttgaaggctaaacatttatagtccaatatgactcacccattcttacaaggtcctttaayggtgcacgctacatggtgctgctggacagtgtgaggcacactcacgtgtgtgtgctggcagatgaagcccctgctcctttaatcattttatcttgtttggaagaaaacacatgtacattctggaaagtgaagcaatttcactgccatctgagtgacagaaactgtaaacatgggtataataatctcaggaggaaagatggaacccccagtaccctaaggtttacctgcgtgagactaagctgggtcgttctccacaaacatactcctcttttgtcttccgtgtcttggaaaatgacacctctattcagcagtctgaaatttgggagcccttcttgacattgttttccatcccctctacatccaatccaccaccatgtcctatttatcccattcattccacctttaagacatttcatccatctcc

SEQ ID NO: 537795 - DNA, 607 bp, Homo sapiens
gcttcatgtaaacatcaccgaagcctggggtgagttagaaagtcataatttaaaatgcagtgatttcgaggttagatttctcctcctgaaaaataatgataatcacctctcacttcacagtgctttgaaggctaaacatttatagtccaatatgactcacccattcttacaaggtcctttaatggtgcacgctacatggtgctgctggacagtgtgaggcacactcacgtgtgtgtgctggcagatgaagcccctgctcctttaatcattttatcttgtttggaagaaaacacatgtacattctggaaagtgaagcaatttcactgccatctgagtgacagaaactgtaaacatgggtataataatctcaggaggaaagatggaacccccagtaccctaaggtttacctgcgtgagactaagctgggtcgttctccacaaacatactcckcttttgtcttccgtgtcttggaaaatgacacctctattcagcagtctgaaatttgggagcccttcttgacattgttttccatcccctctacatccaatccaccaccatgtcctatttatcccattcattccacctttaagacatttcatccatctcc

SEQ ID NO: 537796 - DNA, 607 bp, Homo sapiens
gcttcatgtaaacatcaccgaagcctggggtgagttagaaagtcataatttaaaatgcagtgatttcgaggttagatttctcctcctgaaaaataatgataatcacctctcacttcacagtgctttgaaggctaaacatttatagtccaatatgactcacccattcttacaaggtcctttaatggtgcacgctacatggtgctgctggacagtgtgaggcacactcacgtgtgtgtgctggcagatgaagcccctgctcctttaatcattttatcttgtttggaagaaaacacatgtacattctggaaagtgaagcaatttcactgccatctgagtgacagaaactgtaaacatgggtataataatctcaggaggaaagatggaacccccagtaccctaaggtttacctgcgtgagactaagctgggtcgttctccacaaacatactcctcttttgtcttcygtgtcttggaaaatgacacctctattcagcagtctgaaatttgggagcccttcttgacattgttttccatcccctctacatccaatccaccaccatgtcctatttatcccattcattccacctttaagacatttcatccatctcc

SEQ ID NO: 537797 - DNA, 520 bp, Homo sapiens
tgcggggctttgcagttcatggtgtcgaccttagcttttactctgagtcagactgaaaaccatttgagggtttttgacaagttggtgacamaatcctggttttaaagagcctcctggctgtagtatgaagagagactgcagatgtgggagtggggcctttgaggaggtgattgcaacaacccagcaaagagatgacagcgacttggggaggcctagtgtatgagatggccagatttctcctattgtcctgtgatgaaatacagatttgtagtgaggattattatcattatcatgaagaaagggaggctgagagaggtaaagtgtcttgtgcaaagtcactccactgctgtgagaatcccacttataaggacacgctttcactctgacatgtgctttcaggaagcacgttgcccagggactctccctcctcgtctccctcaggcctgcctctggggttctagaatcaattctgaggaaagctctggagcctgagcacagactagcgttgtgggctcccagc

SEQ ID NO: 537798 - DNA, 650 bp, Homo sapiens
ttctttgattaatcattatcactgccattcaatgtgacctgccaaacatacacaacttacatctttacagcaatcctaaatcctaagatttagtgatgttagtatgcttaaagaacacaagccagttactagctagttccaaaatctcagccagaaatatgtgttaacactggatttgccacatctagaagcacaatcactccagttatggtgtctaaacgaatgtctaaagttaggtgaatggaatgtaatcagactatactaaacttggttccaaaagttatagaagttgtaaagttagtctaaactaaagcacttaagtgaaaaagtgtaactgccatatcagaaagaagagctcccaccatgaaaatgtcactgaatgtattttttatttttgaaggtatttttaaaatctgggcacaccatatctatctgtaggaccytgggtccaaaggtcctacataactgatatgaaccataattctccatattaacaaaggctcggaaattgaaaccaagatcacctaactcgctcactttggccaatatagtacaaatttcagcttctttacaagagaaaagtcctgagatgttaatatgcagcaattctgctgatgtgcattttaactttatgcaccaaggaagaaagg

SEQ ID NO: 537799 - DNA, 650 bp, Homo sapiens
ttctttgattaatcattatcactgccattcaatgtgacctgccaaacatacacaacttacatctttacagcaatcctaaatcctaagatttagtgatgttagtatgcttaaagaacacaagccagttactagctagttccaaaatctcagccagaaatatgtgttaacactggatttgccacatctagaagcacaatcactccagttatggtgtctaaacgaatgtctaaagttaggtgaatggaatgtaatcagactatactaaacttggttccaaaagttatagaagttgtaaagttagtctaaactaaagcacttaagtgaaaaagtgtaactgccatatcagaaagaagagctcccaccatgaaaatgtcactgaatgtattttttatttttgaaggtatttttaaaatctgggcacaccatatctatctgtaggaccttgggtccaaaggtcctacataactgatatgaaccataattctccatattaacaaaggctcggaaattgaaaccaagatcacctaactcgctcactttggccaatatagtacraatttcagcttctttacaagagaaaagtcctgagatgttaatatgcagcaattctgctgatgtgcattttaactttatgcaccaaggaagaaagg

SEQ ID NO: 537800 - DNA, 489 bp, Homo sapiens
ctcaaaaatttgtgtttctagtaagttcccaggtgatgctgatgatgctcatctggggaccacattttgcaaactattgcattagagcaaccccttcattaaaacttttctgctcagtctttcctagtccctctcacgttttcgataggtcacttcttgyttcttctttctccttccacctaaataggtagagtaacaaaaccattgagaatagaagttgatctttattactatctggtacttgttccctaagaagctggccctaatgcccttatacttctttaattcatacttcccagcttgtagattcaagtctcaccattattgaagacaatacaaaggcaataattctaacccagccatggtcctattccaattgtctatctggcatctcaccatagatattcattaaatattcccttttattcctcatttccattaaaagcgctactatttctctatggtcaacatcaatatcatcgatgaatc

SEQ ID NO: 537801 - DNA, 620 bp, Homo sapiens
tgccaaaaatagtggaaagactaattgttatttcaggtataaagaaacagcacaggtaacaaaaaagcagaaagcatgarggttattgtggtatgagctggccctctatcggtgagttcctcatccatggattcaaccaattgtagaccaaaaaaaaaaaaaaaaattttttttcagaaaaaaataacaattttttaaaatacaaattaaaaagcaatatagtgtaacaacttttacattgtattacatattgtaagtgatctagagatgatttagagtagacaatgtatgcaggttatgtgcaagtactatgccattttatataaaggagcacctacagattttggtattgtgggggtcctggaaccaatctcccacggctatggagggattatactgtgtctatcttctcatgtaattctcctagtaattctaccatggtcattttacaggtagccaaggtaaaaaactagagagcttcaaggttacattgctagtatataatagggatctgaactcaggacaaccaaaatacaaattaagccagtcttaattcaaactccttggctcattcaacttgctatgccgtgccgctgtcttagggagccaaaaagacctgt

SEQ ID NO: 537802 - DNA, 609 bp, Homo sapiens
tgcttctctgagatactgtagtacacagattaggtgatttcttctcttcctggggctgtccttttcagaactgtaaaacatattttctaattgcctaaaccaaccttaagttggtagtaggatatagcaaaacatttctgcctttatagttctcccaaatcatggagacataccttggttttatgtgttatccagaaagcattctgcagagctggtcacacacacgatgtgatggtgacaaattaactcactttgcaggtgacacttccatctggacccagaaattttaagtatcatttaatcttgcttaggaacagtgagatttatttctcatatgtagccaaaatatgaaaggaaatatgttcttgattttttttttgactgacattactgaacagtatatggctcttttttgtttggttaactaaatgcagaaagagccctgatctaaattcaaagttggattcataaacagaatgagtaaaaatgaagaggattctatttataaacattgtcagagtgtcataaatgagtaaatatgaaaataactagaawcacataaaataaaatctgagaactcagcctgcatttcaaagaacatcattctat

SEQ ID NO: 537803 - DNA, 611 bp, Homo sapiens
ccaggctctctttctccccagattgccattgtgtctgtggtttttcttttagaaaagacttcacttctactttcacttcttcaggtaactaactgcatctacatctttaaggtcctttgagcatcttgtggttgcccttagcaacagctgcatacrtgggttttacaggctctgtttctgaccaaaccataggatcaaagcctttcagggtggcacaggatcagagcccagccctctctctgatgtctggacattgtctacaacctccctgctgctccatccacgcccggcctcaccctcaccccacccacaccatgcacagaccattttcactgtcagaaagttctttattaggctgggctcagtgactcatgcctgtaatcccagtactttgggaggccgaggcgagtggatcacaaggtcaggagttcgagaccagcgtggccaacatggtgaaaccctgtctctactgaaaaatacacaaattagctggacgtagtggcgggcacctgtaatcccagctacttgggaggctgaggcaagagaattgtttgaacgtggaaggcagaggttgcagtgagccgagatcgcgccactgcactccagcctgg

SEQ ID NO: 537804 - DNA, 611 bp, Homo sapiens
ccaggctctctttctccccagattgccattgtgtctgtggtttttcttttagaaaagacttcacttctactttcacttcttcaggtaactaactgcatctacatctttaaggtcctttgagcatcttgtggttgcccttagcaacagctgcatacgtgggttttacaggctctgtttctgaccaaaccataggatcaaagcctttcagggtggcacaggatcagagcccagccctctctctgatgtctggacattgtctacaacctccctgctgctccatccacgcccggcctcaccctcaccccacccacaccatgcacagaccattttcactgtcagaaagttctttattaggctgggctcagtgactcatgcctgtaatcccagtactttgggaggccgaggcgrgtggatcacaaggtcaggagttcgagaccagcgtggccaacatggtgaaaccctgtctctactgaaaaatacacaaattagctggacgtagtggcgggcacctgtaatcccagctacttgggaggctgaggcaagagaattgtttgaacgtggaaggcagaggttgcagtgagccgagatcgcgccactgcactccagcctgg

SEQ ID NO: 537805 - DNA, 512 bp, Homo sapiens
aacaaatgcacagaggaggcccggaaagaggcacctccactcaccttctctgcttcagtcatgttcttcaggatagtgtacatgcagccaatgttgaagcaaatccgggagtgggggtcctggacggcactgaaggcatccagggctcccttccagtccttcttgtccgctgccagcaccccttcattccagaggctgatggcctccaccagggacatgattaggtagaaactaggaggccaagagagctgccaggagacagagagaagacaggttggagcgtctcccctagcagggctgccttagtggcccccaaggtgttcactttctgggccagatgagtagaatggggcccagcctcccttaagataacttctcagtgttgcaaatgcatcaggaaatgtccccaccttttggcaactgactcataaccctaccatgagagagaaaaggaaagmagcagagagagagagggcgagtaggggtggagtgtggaggagagaggaagtaca

SEQ ID NO: 537806 - DNA, 517 bp, Homo sapiens
acagaagtaggagctgaagttttctgtctttttcaatgggggcaaactttattataggtataatcctgaatggaaagagaccagtgagcattattactgagtgaagaggatgagtggagtacctttgttctctgaacctggaagagcatgtgactgatgcttttctatggagaaaacctcagttcaacttgtttctgagatctgctagctttcccctccaaytttcttagctgaaacaaacaaacaaacaaacaaacaaaaagtaatgctactgatccccgagacttgcagtgggattgaatacagcaatggatgtaaagtgtagtacagtgcctagcctagagaaagcagacaatgcagggtggctgttgttattgcagccgttataaggcccttgtaaagatgaagtaagcaacagtagcttgttttcattacgtttaaggtgtatgtatgttttattttgaggaatcgttatttaagatctttttttttctgtatctttccatttagtttcttc

SEQ ID NO: 537807 - DNA, 457 bp, Homo sapiens
tgaaacagccagttcctgccttaactgataacccaccttacgacattccaccattatgacttgttcctgccctatcctaactgatcaatcaaccttatgacattcttctccaggacaatgggtctcatgatctccccaccatgcaccttttgacccctcccctgccgacaacagataaccaccttcaactgtagctttccactgcctacccgagtcctacaaagctgcccctctcctatctcccttcrctgattctctttttggactcagaccacttgcacccaagtgaataaacagccttgttgcttacacaaagcctgtttaggtggtcttctatatggacacgcgtgacagtatcatcatttcctggctggttgaattcttttggatgtatattttttctttttctttttaactgacaaataattgcatacatttagggtgtattttgatgttt

SEQ ID NO: 537808 - DNA, 631 bp, Homo sapiens
aatcaggtgactcctttcaagaagccaaggtgtctgagagatgttcttctgakggactggaggaaagcaaacagccatgttgaaagagggcggtgggggcatttggcaaggagctgagtatgccctttaggggcagagagtgatcctgggtgacagccagcaagaaaatggggacttctttttcacaatggcaagtaagtgaattctgccaacttgaatgagcttgcaagaggactctgcttctcaggtgagatcacagctccagatgataccttgatttcagcctgctgagacacccgagcagaggaccccactaacctatgctggactcctggcccatggaaattaagagataataaatttgtgttgttctaagcctttaagtttctggtaatttgttatgcagcatgcaatacagatttcaataccctagagtgaggtgctgcttttatgcttctttgtagatgtagattttgattattggagcttacatctgggtgtgagggaaagaagtaggacatacatgctgtgagacacagtgaatagatagactgtcttctgggtttggaagcttccttaggctctgctctgctttcctgattctagggtccttactcatggtttttgtttc

SEQ ID NO: 537809 - DNA, 631 bp, Homo sapiens
aatcaggtgactcctttcaagaagccaaggtgtctgagagatgttcttctgagggactggaggaaagcaaacagccatgttgaaagagggcggtgggggcatttggcaaggagctgagtatgccctttagggkcagagagtgatcctgggtgacagccagcaagaaaatggggacttctttttcacaatggcaagtaagtgaattctgccaacttgaatgagcttgcaagaggactctgcttctcaggtgagatcacagctccagatgataccttgatttcagcctgctgagacacccgagcagaggaccccactaacctatgctggactcctggcccatggaaattaagagataataaatttgtgttgttctaagcctttaagtttctggtaatttgttatgcagcatgcaatacagatttcaataccctagagtgaggtgctgcttttatgcttctttgtagatgtagattttgattattggagcttacatctgggtgtgagggaaagaagtaggacatacatgctgtgagacacagtgaatagatagactgtcttctgggtttggaagcttccttaggctctgctctgctttcctgattctagggtccttactcatggtttttgtttc

SEQ ID NO: 537810 - DNA, 631 bp, Homo sapiens
aatcaggtgactcctttcaagaagccaaggtgtctgagagatgttcttctgagggactggaggaaagcaaacagccatgttgaaagagggcggtgggggcatttggcaaggagctgagtatgccctttaggggcagagagtgatcctgggtgacagccagcaagaaaatggggacttctttttcacaatggcaagtaagtgaattctgccaacttgaatgagcttgcaagaggactctgcttctcaggtgagatcacagctccagatgataccttgatttcagcctgctgagacacccgagcagaggaccccactaacctatgctggactcctggcccatggaaattaagagataataaatttgtgttgttctaagcctttaagtttctggtaatttgttatgcagcatgcaatacagatttcaataccctagagtgaggtgctgcttttatgcttctttgtagatgtagattttgattattggagcttacatstgggtgtgagggaaagaagtaggacatacatgctgtgagacacagtgaatagatagactgtcttctgggtttggaagcttccttaggctctgctctgctttcctgattctagggtccttactcatggtttttgtttc

SEQ ID NO: 537811 - DNA, 631 bp, Homo sapiens
aatcaggtgactcctttcaagaagccaaggtgtctgagagatgttcttctgagggactggaggaaagcaaacagccatgttgaaagagggcggtgggggcatttggcaaggagctgagtatgccctttaggggcagagagtgatcctgggtgacagccagcaagaaaatggggacttctttttcacaatggcaagtaagtgaattctgccaacttgaatgagcttgcaagaggactctgcttctcaggtgagatcacagctccagatgataccttgatttcagcctgctgagacacccgagcagaggaccccactaacctatgctggactcctggcccatggaaattaagagataataaatttgtgttgttctaagcctttaagtttctggtaatttgttatgcagcatgcaatacagatttcaataccctagagtgaggtgctgcttttatgcttctttgtagatgtagattttgattattggagcttacatctgggtgtgagggaaagaagtaggacatacatgctgtgagacacagtgaatagatagactgtmttctgggtttggaagcttccttaggctctgctctgctttcctgattctagggtccttactcatggtttttgtttc

SEQ ID NO: 537812 - DNA, 626 bp, Homo sapiens
ttaattttttttttttttttgagacggaatctcactctgtcgcgcaggctggagcgcagtggcgccatctcagctcactgcaacctccgcctccagggttcaagccattctcctgcctcagcctcccaagtagctgggattacaggcacctgccaccactcccggctaatattttgtatttttagtagagacagggttttaccatattagccaggctggtctcaaaccctgacctcaagtgatccacccaccttggcctcccaaagtgcwgagattacaggcatgagccacctgcttttaacttgttcagctacaaaggcatgtctgtgaatgcacaaccataatgactcatcatgggcccagagctataacaatgataaggtaccaagcatcttacaccatgtgcgtgttgatgagaatcaacatccttgcctgttcttgtgattttgtggcagagtatagcttcttgggggcaagtatgtattctacaccactaggagcaagcttctttatcatacacttctgggcttctctggggaagccaaactctaaaggccttttctgaggagtgtcgcaaatgctgcctgcagtacgaggcacattgccagttcctgactgcattagca

SEQ ID NO: 537813 - DNA, 500 bp, Homo sapiens
gagcctgttttctcatttgtaacaggggaatattactgcctagctttcaggattgctgcaagggttaaatgaggtgataggcatctaatgatgggcacaagataggctcttattgaatactcaaaatattattattctctatctttttctcactacctttcccaaattcagctaggtctttcagcctctctgttatatggccattgtaataggcttctaactggcatcccagcctagcacctatagawgcatttgctcatcaatgaagtgaaaagaggaaaaggaccctttccaccccttcagcccaccttccactgggctgccagaattaacctcaaaagcacagttctgatcttatcagtctgctggtcaaaagactttcattgtttttcattaccctgaaacactgaccacatctcttagcccacaatttaaggccctcccagaccttagcctacctcagtagtctcatttcgccacttcttggaacaacccctttc

SEQ ID NO: 537814 - DNA, 358 bp, Homo sapiens
ctggatgtgtgactgactcacaccacaactattgaaacaaagcctttaacactctaactgcacccttgaagcaatcaccatggcaggggatggcattatcttgattggcttggacctatcaggatccaacattcaagctgakgatgggtatgagtcaacaccacccaaacagaatggctactgcgtgttaggagagatgcaaccacggggcttacgaagtaagtggcagaactagaattaaaacctaatgtttatcctttcagcaggcaaataaacaagatgattcgttgacaattttatctgaaatgacatttaatctgataaaaaagtagcttaaattttatattgatatgatagc

SEQ ID NO: 537815 - DNA, 540 bp, Homo sapiens
cttcctgatctaatcacctcctaaaggccccatctcctaatactatcacttcagggttagaatttgcagggggcacaaagccagtgcaaattcaacatatgaatttgggtgagacacaaagccagkgcacatccagcaatgtccaacttgtagctggttgtgaaggcaaaataaggtaacttatgtgaaaagtctagcatagtgcagggcactggtatagttactcaataagctgtcttgacagagagtgcaaactgtgggcctgagtggaggacttcaatcagagaagaagtggcatttgattgggtctggaggatgggttgcattcagaactaggaggactagagggaaaaattgaaatacataatgtaagagatcatatcaggttaaaaaaggaggacaagaagaagaactggaaaggctgatttttaggaactctgtggcgccagaagtgccctggggcagtgtaaagtcaggaggctctgggaaaccctcttctccagaggagtttgaagaagactgccagctacactcaggctg

SEQ ID NO: 537816 - DNA, 582 bp, Homo sapiens
acttacgaaatcctcctcactgggaacaagaggaaattaaattgctcactgagtcggtaacagatggttggctccatcttctttctgactgggacccccccagagagagtaattgagggcatcctgtcacacgaaagagaccgagggggcgagggagactgagggatggttgggaggcctctctccagcacatcactcattctgatgtctccccatttctcagtgaaggagaaaatcaaataacacccggaaggaagtaagcggtttgtaaatagggcacactggggtgcctccagctttttcattctgctttatttattgtgtgcgtgtgtgtgcatgtatgtgtgtgcgtgaatgtgcatgcatgtgcacgtatgtgtgcatgaatgcacatgtgaaccctcaaacccaagttggaggtttcccaagcatccaactcaggaaactcaacttggtcagtttcaagggaacccctgaatggacctggagkctgactgagccctgctcattcatgcacatgctggccccgctccaaaacctccagaatgctagttttaaccagatgacacaagatttcttatt

SEQ ID NO: 537817 - DNA, 582 bp, Homo sapiens
acttacgaaatcctcctcactgggaacaagaggaaattaaattgctcactgagtcggtaacagatggttggctccatcttctttctgactgggacccccccagagagagtaattgagggcatcctgtcacacgaaagagaccgagggggcgagggagactgagggatggttgggaggcctctctccagcacatcactcattctgatgtctccccatttctcagtgaaggagaaaatcaaataacacccggaaggaagtaagcggtttgtaaatagggcacactggggtgcctccagctttttcattctgctttatttattgtgtgcgtgtgtgtgcatgtatgtgtgtgcgtgaatgtgcatgcatgtgcacgtatgtgtgcatgaatgcacatgtgaaccctcaaacccaagttggaggtttcccaagcatccaactcaggaaactcaacttggtcagtttcaagggaacccctgaatggacctggagtctgamtgagccctgctcattcatgcacatgctggccccgctccaaaacctccagaatgctagttttaaccagatgacacaagatttcttatt

SEQ ID NO: 537818 - DNA, 624 bp, Homo sapiens
gatatcttacaattttatcttaaacatgggtcatattgatcatttatgtcttaatttagtgatataaaattagagcctgaaagagtacctaaaaacarttgtccacacacaggacagttctgaaagaaatttatataacactattatatgcagtgtttttcaagttttcatttattaaaatcaccaaattaagtcatcctttcatacgctgtgattcagttaaaaggggcttttgttgcagaagctctagttaaggtttgaaaatcgatttctctacttctgcttccaagaggatggagtaggcatactttgccctattcttcccactaagtacacctaaaatccctagacatacataaaacaaatgtaagaacattctggaaggtaaagagaagaagacggactgattagggtccttgagacttgaggggcgccatagtgatgagctccaggggactttctttttgcctcatgtatccagacttggagccgaagtcgctgggaacccagaaacagtaatcggcacagactttagaaaaacaacaataaaagctgactttctctaaccaaataaccaggaaagggacagcccagcaagacacaaaagttttagaccataaatgt

SEQ ID NO: 537819 - DNA, 642 bp, Homo sapiens
  misc_feature (1)...(642): n = A,T,C or G
cggcccaggaacaggaacgcaatggcagcctggcagcctggcagcccagcagagggagcggccagccttgctttyccagaagccctcaatgcttccagttacccacaaccaaaagctgctgaaattcagcttgatttggaaaatgcgcataagccacccagctaggccctttggggccccacctggccacacagtgaggcctcagaggttgtgaagggccccttcctccttgctgtcctctcctacccaggccactgtctccacaccacagcaggggtgcccccatcctgggttctacaggagagagcaccttctctcttgacacttctctccctttgtctggccctcgtcctgtcccctccctgccagcctgtctgtgcactgactgcatcaggagtccaatctggccaggttctgccaagctcagggagggctctacaggcaggctcgtcggcctgggccctacttcccagtctgcaaaatggggtttggctaaacggttactcagcacccccacccagctctaaacctcaatgcatctacctagcaggaatgcgatggccggngccatcctgctgtctcttctctgagtggccctccctcccacaggctgctcccatttctcctatctctgtccacccc

SEQ ID NO: 537820 - DNA, 642 bp, Homo sapiens
  misc_feature (1)...(642): n = A,T,C or G
cggcccaggaacaggaacgcaatggcagcctggcagcctggcagcccagcagagggagcggccagccttgcttttccagaagccctcaatgcttccagttacccacaaccaaaagctgctgaaattcagcttgatttggaaaatgcgcataagccacccagctaggccctttggggccccacctggccacacagtgaggcctcagaggttgtgaagggccccttcctccttgctgtcctctcctacccaggccactgtctccacaccacagcaggggtgcccccatcctgggttctacaggagagagcaccttctctcttgacacttctctccctttgtctggccctcgtcctgtcccctccctgccagcctgtctgtgcactgactgcatcaggagtccaatctggccaggttctgccaagctcagggagggctctacaggcaggctcgtcggcctgggccctacttcccagtctgcaaaatggggtttggctaaacggttactcagcacccccacccagctctaaacctcaatgcatctacctagcaggaatgcgatggccggngccatcctgctgtctcttctctgagtggccctccctcccacaggckgctcccatttctcctatctctgtccacccc

SEQ ID NO: 537821 - DNA, 603 bp, Homo sapiens
gtgattcctatcttgtgcccttacatgtaacagcagaagaaaccaatggaatgctcaacttcctatcgaggtgaaaagaaaaaaaatgaaagaacaggacttgctctgtctggggagtccaatgggctctactatggtttgaatgtrtgtgtcccccatgactcctatgttgcaacttaaaactcaatgtgacagtgaacagccacggcttttaggaagtgacaaagtcatgaggactctgttctcatgaatgggatttgcaacctttcaaaagggctagaaggaactagctaagtctctttctgcctttctgtcccttgtgccatgtgaggacacagcgtttgtccccttcaaggaagtgatgttctctgagaagcacagacctggccctcgctagacactgaacctgccggtgccctgatcttggacttcctcgcctccaaaactgtaagaaataggtttctgttctttatccattatctagtcacaggtattttgttacagcagtacaaactaagaaagttcccagtgatgtcacctctgggagcagcagtttgactttctgtggtgtaaatcatgtcaagtcctgaagcatatagctgt

SEQ ID NO: 537822 - DNA, 603 bp, Homo sapiens
gtgattcctatcttgtgcccttacatgtaacagcagaagaaaccaatggaatgctcaacttcctatcgaggtgaaaagaaaaaaaatgaaagaacaggacttgctctgtctggggagtccaatgggctctactatggtttgaatgtgtgtgtcccccatgactcctatgttgcaacttaaaactcaatgtgacagtgaacagccacggcytttaggaagtgacaaagtcatgaggactctgttctcatgaatgggatttgcaacctttcaaaagggctagaaggaactagctaagtctctttctgcctttctgtcccttgtgccatgtgaggacacagcgtttgtccccttcaaggaagtgatgttctctgagaagcacagacctggccctcgctagacactgaacctgccggtgccctgatcttggacttcctcgcctccaaaactgtaagaaataggtttctgttctttatccattatctagtcacaggtattttgttacagcagtacaaactaagaaagttcccagtgatgtcacctctgggagcagcagtttgactttctgtggtgtaaatcatgtcaagtcctgaagcatatagctgt

SEQ ID NO: 537823 - DNA, 302 bp, Homo sapiens
gctgccggctgaagtggtcctgagacccagaacacccaccatggagaagagaagacacaagtgctggttgggggctagggcagcctctgaggggatgtgarttcctagtggtcctgagcaaggtgagaggacacccttcccatccagtccaatgctcagcctctaactggggccaaggacaaagccctgtcctttcagaagctcctaaaaatacacatatctctgacccttctgagcagcccagcaaccttgtcccccacatctgtgacaccaggacattcaaaatagtctttgataggctg

SEQ ID NO: 537824 - DNA, 582 bp, Homo sapiens
ctggcagcaccatgtgggagtccacatcacagatctgagacagggcaactccagaacagaccgtcagcaaagtggagctgggaaacaggttagaaactgcagtgtacttttttaatgacactgccccatctactggtagcaggcagamatgctgctcggtggatggtttctcgtcaaaccagataagctagtggttgaaactacacaccaccgggtcgcagttggaaggaaatgctgccatcaggagtcccagccctaaacttgacatccaggagtaagcctttcatctcacagaggatttggaccagcttcctcccaccttacgtcttacataatgctccttcctctcgcccctcctccaacatcctactcagtggacattgacttcagagatgacacatgacgaatctggaatcttcaatgtcatctagtaaatacttgtggagagtctcccatgaatgtcacatagttgctggggatatagcactaaagaggacagatagagaggtctttgcctgcatgggatttatagcctctggtggaggcaggagggcagacagtaaacaaaaaactaatgaaata

SEQ ID NO: 537825 - DNA, 582 bp, Homo sapiens
ctggcagcaccatgtgggagtccacatcacagatctgagacagggcaactccagaacagaccgtcagcaaagtggagctgggaaacaggttagaaactgcagtgtacttttttaatgacactgccccatctactggtagcaggcagacatgctgctcggtggatggtttctcgtcaaaccagataagctagtggttgaaactacacacmaccgggtcgcagttggaaggaaatgctgccatcaggagtcccagccctaaacttgacatccaggagtaagcctttcatctcacagaggatttggaccagcttcctcccaccttacgtcttacataatgctccttcctctcgcccctcctccaacatcctactcagtggacattgacttcagagatgacacatgacgaatctggaatcttcaatgtcatctagtaaatacttgtggagagtctcccatgaatgtcacatagttgctggggatatagcactaaagaggacagatagagaggtctttgcctgcatgggatttatagcctctggtggaggcaggagggcagacagtaaacaaaaaactaatgaaata

SEQ ID NO: 537826 - DNA, 642 bp, Homo sapiens
tactccagcctgggcaacagagtgagactccgtctaaaaaaaataaattaaataaaaaatataaaaaaatggaaatttaggcatgttctgggtcttagtatgtgtgaggggccctatcatcattttatttctcatattttgttttccccgacttctagttcatatgaaaaaacccttgaagtgtgttttatacgtgggagctaaggtggtattgtaaattttcaagtcatccttgaacaaaatgaaccagctaagatcttgcttctgttaaatggtaaaatcaggactgaagttgtatcttctgaaggttgttttttcttgttttgtttaatttatgtgtaagtaggtactattgagttaattcatttatatttactacatcatttttagaaaacattttttattatttatttctttttagattttacctgtagtttatmctttgaaatactcaccaggtagtgtgttataattctagcatttgtctaaatgtgagcatcacatggtggagtcgtgaacttcagtagtatagtctacaagttattaatatattttccatccaaatattaatttcagaaggaagtatgaactaatatatattcttaagagggctaatttgaattaatctggctttatgtttgg

SEQ ID NO: 537827 - DNA, 610 bp, Homo sapiens
gccagccttccagcacctgggaacattggctgatcctcccacagggaaagaagcagccattgttcccagttcattgccaggcaacccagagaaagtccctggggtcattggttgaagagctctgcttgtgtcttcacagtgcctttgctcactgcattcctagctatgctgttgctgacagttcacgttcccagcatcactatccaccagaccatgttcactttctcagaaggcctccctgcccctctgggagtgggaaaatggtcaatggagggcctcactgaagtgatatttaagcgaatgagtatctccaaaaagagtgttctaggcttcctcataaaatttggagagcagacatgaaaacagggaaggtgagaaacaacatagaaatatatgcagtgggtacacctcataggaaagagtatggaacttaaatcagaccagaagcrtaggggtcatttgagacagggcccttctgggtaggaaaacagcacaatagagtgatccaatgtgcacgtgctggatggagttggggagtggggagagagagatgaggctatctttaccaggaaggagcagagaatatttaagcagagaatatttaagtggt

SEQ ID NO: 537828 - DNA, 653 bp, Homo sapiens
tgtattgctctttagagaaaaaacatccatagctttgtacttaggatttacccaaaggaaagcaaaactagaagctgacaggccattcaggtacataaaagtcttgctgagctttttgtaacyttttaaaaattaagaaatgcccatctccttttgattagtgtgaagaaagccacaagagttaccactgttctctctctaacaaacacaactatctgcataaactacaaaattagttttggggttgttggttttttttttttttttggtctttatttttgttttgtttgtaactcattagattactgagaatgcaaagaatctacatgaattgaactccagcaagtgacaagctgctccataggaaacagaaagttttctctcctacatgctgatttacaattatgataaagcagcaaaaaataaacccaacagaaaaaaataaggagaaatcaacagaaaatttaatgtacttttaatggatatgtgtggattggtttgataaactagaattccaagaaactgtagccacagagtaagtctttctctatctgccaactttccgtagagcttcaccatgtgctcagaccgagatcaggggtgcaagctgaaagaaatctgaggcattgcacaccttcatgtaaaataaggca

SEQ ID NO: 537829 - DNA, 656 bp, Homo sapiens
gcccaggcacccaactttctttctgagccatgagtctagatcataaaagaaaaatgtcaagagcaaggcaggacatgggcctataagcagatggagataatttctagaattcagcaacaggaaccgtagttgaagctcaggtacacaggttaagaggaaagagccaggaagaatcttcagggaacaaaatggaacccctgtttctggaccacttaagcagccaaggcactagattagagactaagatgtttgctgcttcctactagggatcaggaytgggcttgtggctgggattcaaggatgcaggggaggaaggatgctgaagctggtaccatgactggcctagaaggcgtagccagggagcaacctttgcttgggtctcaagaaattgtgatgaggttacttttggttcctctgctcagtgcagggactgaatctattcccctttgattgtcatccttggtgagccagaatattacagatctgaccaagactcctaccctagaactccctagattaccctaattatcaagaggaaagttattgagtcatatgagactagtgattcttttctgtgggtcctccttagctctagtgttgagaggctggactccaataaaggactgagcagaagactgctttctgtagcactttgc

SEQ ID NO: 537830 - DNA, 656 bp, Homo sapiens
gcccaggcacccaactttctttctgagccatgagtctagatcataaaagaaaaatgtcaagagcaaggcaggacatgggcctataagcagatggagataatttctagaattcagcaacaggaaccgtagttgaagctcaggtacacaggttaagaggaaagagccaggaagaatcttcagggaacaaaatggaacccctgtttctggaccacttaagcagccaaggcactagattagagactaagatgtttgctgcttcctactagggatcaggattgggcttgtggctgggattcaaggatgcaggggaggaaggatgctgaagctggtaccatgactggcctagaaggygtagccagggagcaacctttgcttgggtctcaagaaattgtgatgaggttacttttggttcctctgctcagtgcagggactgaatctattcccctttgattgtcatccttggtgagccagaatattacagatctgaccaagactcctaccctagaactccctagattaccctaattatcaagaggaaagttattgagtcatatgagactagtgattcttttctgtgggtcctccttagctctagtgttgagaggctggactccaataaaggactgagcagaagactgctttctgtagcactttgc

SEQ ID NO: 537831 - DNA, 656 bp, Homo sapiens
gcccaggcacccaactttctttctgagccatgagtctagatcataaaagaaaaatgtcaagagcaaggcaggacatgggcctataagcagatggagataatttctagaattcagcaacaggaaccgtagttgaagctcaggtacacaggttaagaggaaagagccaggaagaatcttcagggaacaaaatggaacccctgtttctggaccacttaagcagccaaggcactagattagagactaagatgtttgctgcttcctactagggatcaggattgggcttgtggctgggattcaaggatgcaggggaggaaggatgctgaagctggtaccatgactggcctagaaggcgtagccagggagcaacctttgcttgggtctcaagaaattgtgatgaggttacttttggttcctctgctcagtgcagggactgaatctattcccctttgawtgtcatccttggtgagccagaatattacagatctgaccaagactcctaccctagaactccctagattaccctaattatcaagaggaaagttattgagtcatatgagactagtgattcttttctgtgggtcctccttagctctagtgttgagaggctggactccaataaaggactgagcagaagactgctttctgtagcactttgc

SEQ ID NO: 537832 - DNA, 582 bp, Homo sapiens
tccccacattaaagaaacaaggatgcaaataacacagaagcctcaatttacaaaacagattatagctcagttaaatgtctttgctttatcaaaaacaaaaccaaaccaaaaaacctctatgcaggtatttttttwaaacaaataaagccctctgaagtatccaacatattttcaaattttcagaatgttgatttttcctaattatctagaacctaaacaatgtattcttgtgccttttcctgtattttttatcagactcaagtcattgctgtgtgaaattaatttttatagtaccattataaaaattattctgttacttataataaactactgtctcaacaaatgagatacgaagttctttgggcaagaaagaagtaaatatcatcagctcacacagaataaatgtgactataacatgttctcaaggattcagatgttatccaattcaaatcatgcctcacagactatagtcagataaaccctgatataagattccaattgcataaatcttctgagccgctattacatgtcaaatgctttcagaaattactcaacaaggatttcctaagtactggttaatac

SEQ ID NO: 537833 - DNA, 609 bp, Homo sapiens
acacatgacagtgtttaaaataataatagtagcaacgtatttgattatatattttatatatgtatatgtaatttatacatatttaaatatttatatatgtcttacatatatacatatacatatatacacttatgtatacacttatatataagtgaaatgaatgacagcaataatatgagagatagaagaaggaattagtaatactttgttttgataagatacttgcactattcatgaagtgacacagtgttgtttgagggtggagttggattaattgtaaatgtatattgtaaaccctagagcaaccactaaaaatttaaaaaagaaatatataattgatatgctaagaaaagaaagaaaatggaatcagtgaaaaccccagaggcagaaaaagcatggaagacaaaataggaaccgaaaataagggcaacaagtagaaaacagtaacaaatatggtagatatcaattcacctatattaacaaccactttaagggtcaaagktctaaatacaccaattaaaagacagagatggtcaaagtagatcaaggcaagatccaaatacatattgtttacaaaaaacttacttcatgtaatatataaaaatatat

SEQ ID NO: 537834 - DNA, 509 bp, Homo sapiens
ttctttttctcctatatagttctagtaaaagcagttacttatcargtattcactttgacccaagagctttggccacacatcggctctcagcacacaaaacagctctcagcaaagctaaaacagacacagcagacaaaataatgtcagaaattctagcttttctctgatatggatttgatattttataatacgcattgagggtaatgagttaaactttcagtacatagaatagcactcaggttgtctagaaagtcacactaaaacttggaaacagccttatgaaatagagaactatgtatttggaattaatgtcttgcataatcatcctggttgtatctgtgacctgtgggtattttatctaatctttggcttctttatctataaagagaggatgaagatgatacttaccaaacagggttgttactataaattctctactaagctaaaaatatatggttttcttagtaaatgagtacagtaaatgaattcagattctctcctaagcacta

SEQ ID NO: 537835 - DNA, 556 bp, Homo sapiens
ccaacttggatagtaaattttagctgaaagagcagtgaccaagtagacaagagagtaatcgctacagagtccaaaaggaacacccatagatacagggctctctttctaagacaagaacacagtaatctgctatagaaatccaaatgccatttgcgggaaaagcagaagtttgcagaactgtgaaaaactgagcatgtacctataagaatttaaactaatttaaactaaaaattattaccactaggtagtttgtaaatttaaaatgatctttaaaaataaaaagcaactccctaactacccagaaaagtgasggtgaattagaaatattagatttgaaaatattttaaaagttcgcattttacactttacgtgattgtgctgagtgcatttaaaatggcaccaagaaattccccagatataattacagcaaaactctttctttctttctttgtttttagcacccattagcatgcaatagaagagatattctgaggaacttacttgattactctctgctctacaaatttattttcatgataatttgctttcacagttt

SEQ ID NO: 537836 - DNA, 550 bp, Homo sapiens
catttgactttcatatagtagccttttctatgcaggaaaagcctcatgattcaggacaaatgtctccatttcttagctctgagatagccctcattattctaagagtcctattcctccttgtcagaaattggtcaaagaacatgcaaatgtgttagtcagttcaggctgctattgaatataaaatgtatagcagactgagtagcttataaacaacagaaatttatttcccacagttcaggagkctagatgtccaagatcagggtgccagtatggtcaaattctgatgagatcccttgctaagttttgaatgtcacctccaaaactcatgttgaaatttaattgccattgtagcagtgttgcaaggtgaaagcttcaaaagatagtttaagtcatagagggctctgcctttcctgcatgaattgatgctgttatcatgggaatgagttagttatcaagggaggggactcctgataaaaggatgagtttgaactccattttctctgtgtcttgcatgctcatttacccttctactttcctccaaggtatgacc

SEQ ID NO: 537837 - DNA, 630 bp, Homo sapiens
aatattggaaatactatttattggaattgcattaaatgtataggacatagataaatttgaaggtggcaaaaagaaggttgggataatacaagttcaatcacttcaattttcatagtgaagtaggaggcaaagacccaaagctgggagcaagtaaaatagaggtgagatgcatactagaggtaaatgatgaatgttccagggtatcatatgtgctctagtgagtgaagttattggatctcagataggaattgctcttcagggtatgcaaaacaytggccaaatatcacaggactaaaaatgaagagatgtcaccatttgtgctttgatgtttcctttctctaaaaatataaaacatgctacaaatgggtcccaaaattagtatttgttttaccaaactgtggccctcccaaacagatctcttgtcatccaatttctttgaaaatacctgctccatggttcactgttatatctccagtcccaaacatcttgcctgcccatagttgtcactgaataaatgatgatggaatgaatggatgaatttctgaatggcttccttagaattctgcttaagatactatgttgttatctctgcccgtctttcttcaaattcaaggcagccaaaaatttagc

SEQ ID NO: 537838 - DNA, 633 bp, Homo sapiens
tatcatataataattaaaattcctagttcaaatttcatctgttatagtcctttcaacaatttttatctaaaattagaaatgttaaatttggttgattcatctaaatatacttttatcaattccttccttcccacttttccctgctcccccatcctacccctttctacacagaaatagtcacttgtcactcagattttgctgtagaaacttttgtataggatataattaatatttacttctatagctgattattatgcaattmattgagtgaatctgtaagtacctctaactttcatctctcttagacaaaaaaacagctaactgaggttttgcaatgtcatccctcagtcctccgatcagtcacattaggctccctctctaccctccccaagaccgttaaaacgtctttatgttttaattttttcaaagttatgcagtgctaaattttactcatcagccctagttcaaggattggctttagtaacacccttgcaactggcagggaggtaatggccaagatttgacctctgagtcagacggaactgagtttgaatcctggttctacctcttctttctgcctttgggaatggcaagtgtatcattcagaacagaaaaacttacgctgcagaacaa

SEQ ID NO: 537839 - DNA, 633 bp, Homo sapiens
tatcatataataattaaaattcctagttcaaatttcatctgttatagtcctttcaacaatttttatctaaaattagaaatgttaaatttggttgattcatctaaatatacttttatcaattccttccttcccacttttccctgctcccccatcctacccctttctacacagaaatagtcacttgtcactcagattttgctgtagaaacttttgtataggatataattaatatttacttctatagctgattattatgcaattcattgagtgaatctgtaagtacctctaactttcatctctcttagacaaaaaaacagctaactgaggttttgcaatgtcatccctcagtcctcygatcagtcacattaggctccctctctaccctccccaagaccgttaaaacgtctttatgttttaattttttcaaagttatgcagtgctaaattttactcatcagccctagttcaaggattggctttagtaacacccttgcaactggcagggaggtaatggccaagatttgacctctgagtcagacggaactgagtttgaatcctggttctacctcttctttctgcctttgggaatggcaagtgtatcattcagaacagaaaaacttacgctgcagaacaa

SEQ ID NO: 537840 - DNA, 541 bp, Homo sapiens
aacaactcatagcttatgcatgtattatcaggaaatcgaraatcttatttttgaattcttctctcccgcctctcaatcataccctcagattgtccaagagttccaagaacttactacacattatcttctagtgaaagaattgaacattttccagatccactaatcactgtaggcccacagaagttgacagctacccttggcttctgatgttaagatggccttgcttaggtcactgtagttctccatgcaatgattacaacccttttaagctcacatttccttactcggccatcattctccagagcactgttaaagcaaagtaaatatggcctgagaaggactctgtacttctatatttcagtccttgtggatgaactgtaacctatcttaataggcagacaagattgaaaacttaggagtgtgcacctgtaataatagctgagtcttgaccactcccagtggccatacttcaaccactcctacactgctaagtgttcaaactgtgctcaagtaaggcaaatgccaacctgtaatgaatcca

SEQ ID NO: 537841 - DNA, 526 bp, Homo sapiens
tgctgatgggcatccttttcaggagattgtccgcagggagggaggaaaggaatgctggaaagtcataactggtcccaaagattattttagcacatcacatgtggctgtataatttctcatcgtatttcacaaggtcttaatgtctcagatggtgagggcctaccctaaataccctcttcccccatcttcaggttgatctgctgtgtctacggaaagcacggagagaaagcaataggcatgctaaatagagctagagtttgagatggctgctgaatcatcagggaatatgtttatgatgattttctttttccaagtcaaaaactgggatacaagacccacaagtggatttttttgaggggaattaacagaccaaggaacagaagcagcagagtgaaagactgggcccragaaatcctgtattttctttccagatcagccacacccactttcttggtcacccgctccctgggcagtagagcagggagtcacatagtctaacctcccgtttggcagtgtggaagctctc

SEQ ID NO: 537842 - DNA, 479 bp, Homo sapiens
cttgcatgtggcctcctcatgtgacagggcttcctcacaacatggtggctgagttcccaggtgagcatcccaagaaagagacttccaggtggaagccatagtgtctttatgacttagaagtcatgaagtatcatgtatgacacattttatctgccaaggcaatcacaaagccctccccagtttcaaggggagggaaaacatatttacctcgtgatggggagtggcaatgtttagaaaagcacgtaagaccagaaatattgctgkggtcattttttaaattgtgatcttccacagacccatatattcagtgtgtatatacataaatctgaaatattatataacaaagagttagctatggtcatttctggggctgtcttttattttctataatgtttattgttgtacaggtgtaacaagcactgtggcaacattacttttcaaagacttgatgtctattctcaaaggttcacactgaaggt

SEQ ID NO: 537843 - DNA, 270 bp, Homo sapiens
acgagcgccattgccttcctgcacaaaaaccatattgtgcacagggacctgaagccagacaacatcctcatcacagagcggtctggcacccccatcctcaaagtggccgactttggactaagcaaggtctgtgctgggctggcaccccgaggcaaagagggcaatcaagacaacaaaaatgtgaatgtgaataagtactggctgtcctcagcctgcggttcggacttctacatggcycctgaagtctgggagggacactacacagccaag

SEQ ID NO: 537844 - DNA, 230 bp, Homo sapiens
tatcactcacattgtgcacattacctaacttccacagaycttcatttgctcactgataccacttcccttgacaggattgttttcaacattaagtaagaagccatgtgtaagcacttgttaaacggcctggcacagcagatactcaatcaaggtgtttcttctcactagaagcattactggttatctgtgttggcacagaagttagtctccctactgcagaatgaagtaaa

SEQ ID NO: 537845 - DNA, 560 bp, Homo sapiens
agcatctcttagcttctgattgttataaacaaagaatctctccttttttctttctagaaatcttttttaatcactcgaaagaattgccataatccctgacttcaaattgcttcaagtaattgtggagataagacttatacacaaatgtcttgtctgattttaaatyctacacatgcaaatctggggatttcctgtagggacaggcggagtagtgctgccgcgcaggcgccagctcctcgtttattatgcagtgatgtacagccctctagtgggtctttaatgcaacataaaaaaacgaagctgagggcaatgaaatatggctttgttcattcatccattcatttgatgtacaagtgctgggttcctgctttgttccaggcacattttaggtgctgggaatactgcagtaaatcaaacaaacagcaacaaaatcagatacattagttactggagactaagaagatggagaggagaacaaatttgggatgaagatcaggaacttgatttttggcacattaagtctgggatgctcattaatcttcaagtagcttcttttaaac

SEQ ID NO: 537846 - DNA, 574 bp, Homo sapiens
tgtgcagtgaagtgtgtgccccaatatttggtgttagcatccaacattcatgctgcacattgcagaaattggtagaaatgcccttcagaatgctcttgctactgaaaatgggagaaagatgaaagaggacagtacagaattaagggactatttacccaattttcaacgtttagctggaaaggaacatggaatagtctaaaagagtgggatatataactgtaatgagtttgtaagttatattgttgcaaaatgatgaacagagttttattgttttagaggtttcctgttgatctttgtttttttttaaaaaaacctgacctcagtggatttcacggctgtaggatggtggccactgccacctacagaccagaagtgtgaagtggcgtggctcttttgcagtggagtccctcagagactcggcatcaaaygttctataaaaagcaatttttcaagcaaaagttgaaagaatttcaaatgaaatagtaaatattctagagaaataaaaaatgaataatcacattttccccagagatcactctttgacagtatatagcatatatattagaagattaac

SEQ ID NO: 537847 - DNA, 488 bp, Homo sapiens
atcgtgcacaccaacttgagartcttcagatttcaaaactgcaagtaagccctgcagtatgattctccaaatcctttcaagcagttgcaaacccgcaaatcaatgtttctctgtttgtatgtttcacaatgccttccatcttatatccagcatgggaaaaatgaattcattgtcacaagcggttcatttgccatggcttgaacccgatgaatgcaacgtgcagaagctgagatatgctgtctttgtgttcagttctggcccgagcttccccaaagcaaaactcagccttcctattgaccatttataaaggtctcatggttaacaataatttacattttatacatatgaagttatcattaaagaaccaaagtgaactgcatttgatgttgtagagacaggtcattaagctgacagaggagggttctgggagaaccaacagcactgacatcagccatccttctcattcttaattttaaaggttttgagga

SEQ ID NO: 537848 - DNA, 484 bp, Homo sapiens
tgcacaccaacttgagagtcttcagatttcaaaactgcaagtaagccctgcagtatgattctccaaatcctttcaagcagttgcaaacccgcaaatcaatgtttctctgtttgtrtgtttcacaatgccttccatcttatatccagcatgggaaaaatgaattcattgtcacaagcggttcatttgccatggcttgaacccgatgaatgcaacgtgcagaagctgagatatgctgtctttgtgttcagttctggcccgagcttccccaaagcaaaactcagccttcctattgaccatttataaaggtctcatggttaacaataatttacattttatacatatgaagttatcattaaagaaccaaagtgaactgcatttgatgttgtagagacaggtcattaagctgacagaggagggttctgggagaaccaacagcactgacatcagccatccttctcattcttaattttaaaggttttgagga

SEQ ID NO: 537849 - DNA, 484 bp, Homo sapiens
tgcacaccaacttgagagtcttcagatttcaaaactgcaagtaagccctgcagtatgattctccaaatcctttcaagcagttgcaaacccgcaaatcaatgtttctctgtttgtatgtttcacaatgccttccatctyatatccagcatgggaaaaatgaattcattgtcacaagcggttcatttgccatggcttgaacccgatgaatgcaacgtgcagaagctgagatatgctgtctttgtgttcagttctggcccgagcttccccaaagcaaaactcagccttcctattgaccatttataaaggtctcatggttaacaataatttacattttatacatatgaagttatcattaaagaaccaaagtgaactgcatttgatgttgtagagacaggtcattaagctgacagaggagggttctgggagaaccaacagcactgacatcagccatccttctcattcttaattttaaaggttttgagga

SEQ ID NO: 537850 - DNA, 622 bp, Homo sapiens
tagctcatcccagaagtaggcacaggcaacagggccactgtgctgaggttctccagcaattatgggaacaagcgtaagaagaagagagcgtggtatgtatgagtctaccgcatgatgctactgctaggacaaatttggaaacggaaacaaaaggttaagcatatggaacccacccccacatacacacacatcctcctcctggctctatgagagcagaagatccaaaggaaggaattagagtggggtgaatttcaaaaactatagccttataaaaggaaaccaattttgagttaagggaaggaataaaaggaatgtaaggctttttcttttttttttttaaatgagctcggagtatcaaaagggyccagtgaagagcacacagattctagacagggcctagagaagacagaggatcaggactggattagacagagaggagaattatgtgtattctgtaaatgccagagcccatggtggtacctaccctcaagaaggaataagaaaagggaatatgaaaagtgctgatagcagggtttaatttagaacagtgacatgcattaaaaagtccattggaggccgggcatggtggttcacgcctgtaatcccagcactttgggaggcc

SEQ ID NO: 537851 - DNA, 622 bp, Homo sapiens
tagctcatcccagaagtaggcacaggcaacagggccactgtgctgaggttctccagcaattatgggaacaagcgtaagaagaagagagcgtggtatgtatgagtctaccgcatgatgctactgctaggacaaatttggaaacggaaacaaaaggttaagcatatggaacccacccccacatacacacacatcctcctcctggctctatgagagcagaagatccaaaggaaggaattagagtggggtgaatttcaaaaactatagccttataaaaggaaaccaattttgagttaagggaaggaataaaaggaatgtaaggctttttcttttttttttttaaatgagctcggagtatcaaaagggtccagtgaagagcacacagattctagacagggcctagagaagacagaggatcaggactggattagayagagaggagaattatgtgtattctgtaaatgccagagcccatggtggtacctaccctcaagaaggaataagaaaagggaatatgaaaagtgctgatagcagggtttaatttagaacagtgacatgcattaaaaagtccattggaggccgggcatggtggttcacgcctgtaatcccagcactttgggaggcc

SEQ ID NO: 537852 - DNA, 622 bp, Homo sapiens
tagctcatcccagaagtaggcacaggcaacagggccactgtgctgaggttctccagcaattatgggaacaagcgtaagaagaagagagcgtggtatgtatgagtctaccgcatgatgctactgctaggacaaatttggaaacggaaacaaaaggttaagcatatggaacccacccccacatacacacacatcctcctcctggctctatgagagcagaagatccaaaggaaggaattagagtggggtgaatttcaaaaactatagccttataaaaggaaaccaattttgagttaagggaaggaataaaaggaatgtaaggctttttcttttttttttttaaatgagctcggagtatcaaaagggtccagtgaagagcacacagattctagacagggcctagagaagacagaggatcaggactggattagacagagaggagaattatgtgtattctgtaaatgccagagcccatggtggtacctaccctcaagaaggaataagaaaagggaatatgaaaagtgctgatagcagggwttaatttagaacagtgacatgcattaaaaagtccattggaggccgggcatggtggttcacgcctgtaatcccagcactttgggaggcc

SEQ ID NO: 537853 - DNA, 595 bp, Homo sapiens
tacagttctgattttgctccttctgactcctttttgtttcctaatactaaaaaatcctttaaatggcacccattttttcttccattaataacgtaaaaacgactgaattggcatgcttaaattctgaacactctcagtcctttaggcatagactaaatgggtgacatcattgctcacaaaagtgtcttgaacttgttggagattatgttgagaaataaagtttgtatttaaaattcttatcttttaattcaattttttcatgaactttttgaggtcctcttgtaaaggagataagtcaacaggttttatatttttgttctctaawggtcaaaaaaggtatctttgcactgactatttcttcatttctttcaactgtcaactgtgaagtgtaatttgatttgacatatggtgacaaagccatgagacaacagaaacaagtacagtttggattttcttccacatttgcagttaaacaaccatgggccagaatttcaagggagacagcgataacagatgttgtccctggaggatttccaagtcaaccaggtgtaatggctaaaagagagacataaaatcagagtgtaggatgaagcag

SEQ ID NO: 537854 - DNA, 404 bp, Homo sapiens
ggcagccagctaagccatgcttatattcctgacccattgaaattataagatagtaactacttgttttaggtcactaaattttagactaatttgtaacacagcaataggtaagcaatacaaattgctattggctaactcgagaagggtgctgcaaaggattttgaggatttctctactccttaggaaaggagagtccattagttataagtgtytgccatggacacaggacaggagaaatggtggcatgtgtgctattctcttatattcatgttctattgggatttggttatgatgagcagaatggcagccaacagaatggactaatttggtggttctaggaaacaccctagtgttaatgttacccataattctgttgtgaatcattaatacttgacttatattaa

SEQ ID NO: 537855 - DNA, 528 bp, Homo sapiens
aagaaacttctgaatgaagacacctaggctaggaatgcaaatatgtttaagagcatggrccattaggggaatctgagttccagaatgcaattctctttaaagattgcaatgcactgggtatgccccaagtctggggagggcaactttcctcggaggggtttgccagataaagcctttgtcattgcctgtggttgggcctgaaatatcaaacatagatttttggccaggactcctcagcaggatctagtcagggccttcacaaagtacattcagaatgacaattgacccaccagaaagccatcatgccaccacttgatattttaaatgaaaagacccaccaacatatctgatatccatatctgatacccagtagaattggaatgctgctatcaccactgtcactattgtcactaccacacctgcctctagaaacccagcaatctggaggatggaccctggataatgttgcaggcaaacctcatttctctacaactgtgctttccaccaacagtcgattaaaggaagacg

SEQ ID NO: 537856 - DNA, 669 bp, Homo sapiens
ctttggtaaagtataatagtcaatattattataggtattttattcttcaagacaattgacttctccaaccaaaggaaaacaatacacattctgagaatatgtgcagataacaaatcagagtacaaagtaccaaattctggacaaatgtaattgctgttcaatcagcaaccctggtgagtttgctctatttttggcttcagcactaacttgttgtgctaccctgaatgagtcattaataacatctgcttccccttctgtgaattgtcttctgctctttaactcaagggtwttaaaggaggctttggggataaatgaaggagaaattattgctccagctaatatgctgctccaaagagaactcttttgaacttgttgattagaagataggagaagtacacacagaaagaaaaaaagcttttcttgcatgcttatacctgaatgaattccatctgtatggatgaccagtgtaagcagaaggattctgaacaatattgcttttctcaattctgccataaatactcattgaaaaatgctgtggtcatttgaatacaactgttattctctctcaagcccaaaatttaaacttgctaagagaactgatctattgcagttgcttttataatatagatttataatccaaatgacagtcatttgtttctggcaaccagt

SEQ ID NO: 537857 - DNA, 669 bp, Homo sapiens
ctttggtaaagtataatagtcaatattattataggtattttattcttcaagacaattgacttctccaaccaaaggaaaacaatacacattctgagaatatgtgcagataacaaatcagagtacaaagtaccaaattctggacaaatgtaattgctgttcaatcagcaaccctggtgagtttgctctatttttggcttcagcactaacttgttgtgctaccctgaatgagtcattaataacatctgcttccccttctgtgaattgtcttctgctctttaactcaagggtattaaaggaggctttggggataaatgaaggagaaattattgctccagctaatatgctgctccaaagagaactcttttgaacttgttgattagaagataggagaagtacacacagaaagaaaaaaagcttttcttgcatgcttatacctgaatgaattccatctgtatggatgaccagtgtaagcagaaggattctgaacaatattgcttttctcaattctgccataaatactcattgaaaaatgctgtggtcatttgaatacaactgttattctctctcawgcccaaaatttaaacttgctaagagaactgatctattgcagttgcttttataatatagatttataatccaaatgacagtcatttgtttctggcaaccagt

SEQ ID NO: 537858 - DNA, 151 bp, Homo sapiens
aaagtgaaaagagcagtccagaaaacatctgatttagtagtgttgggtcgcacatggaaaacaactgagcaggacctgaaagaatatttwagtacctttggagatgttcttatggtgcaggtcaagaaagatactaacactggtcattcaa

SEQ ID NO: 537859 - DNA, 652 bp, Homo sapiens
tggtaacctgcagacagtggctgtataaatatctctattaactgtagatctcactcaatacaatcacataagtgagggcaagaaaaatattttcctctaacatgaatattatgaacaacaaggtactataataagatatataactggctttataaagatacagacattcatttgtcttctccttacctaccaaatgtcattgaaattggcataaaatcactaactgctgtgtttgtgtagaataaaatgattgtcagaagattcagaaattgtcatcattcctaagrtttggttttttagggaaaactttcacagttatgcagagtataatttagataactgaagccaggctgccaaaatattcaagtttctttaagacttaagaacatccaggatccacagaaaaaaacgagatgtatttgtttaaaatgaacaggcaaatcaaaagttatacacaggcatacatatatactctcatatgatcaactaggcctgcaacatttgcaggtagcaattttccacagtcccaaaggaaaagtgggatgattaagtgtttctcttggacaggcttcattgctcttaaaaaggataacatctggtagtgatacattattgaaatacattctggacagttcttcttttggtcaaacag

SEQ ID NO: 537860 - DNA, 343 bp, Homo sapiens
cttccttcaggaggcttgcaccactctccctggcaccctggaatttcacctctgaagctaggtagagaaaaagagagacttctctgtaaggactggagaagagctttcattgtcttctttccctggtgtcacccagctgtccatttaaaccttccaaatttaaggcattcccaataagaattctgctggtaaacagccttctgtttgctctcagatatcccagtattccaaagaactacactgtttaagttgtagtagggtggagttcccctatgggaaatacccccaggctctgccttgatgtatagtcacayggaggggatgagaatgaagaaaatcagtc

SEQ ID NO: 537861 - DNA, 621 bp, Homo sapiens
tgcctggtcctgtccctgcctacagattctccccagcctctacctctagtcaggggcctcagaccccctgatgtcggagccctggtgtragatcttgatttcctcgcttctgctcctgctcgtccaaggctcacacccggctgccctcctggcttggtgctgtccacctctctactctctgggtccacagtttcatgaacctgatgccacctcctgccttggtgctgtcaagagaaagaaagagaaaaaattacgaccttggagattaagattcttagcagcacacttattgagagttgtacaaacaagaaagggagaaaataagttaaaaaaaaacttttttaagagtacacaaatgtcttaaaatgtggaagttttctttaggaaaataattttaaggaattcttttagaattatttcagaatgtttttgaaagacttagaaacacaaacacttttacataagcctcaattatctaattcagggtgaacacagagtgactgcttttcttaggaaatcaagcctcctctcacctaagcatgtggcatctgacaaaatatgttgaccaccactaccttaaaagttattttctcatttttatatatttgtcaagatctaaat

SEQ ID NO: 537862 - DNA, 527 bp, Homo sapiens
ctgtttacatttgacatgttttgaggtagcaagactttttttttaatatctgctatatgtaaggattttgtttttatttgtcctccaaattttagagggcttctcattataggatttactaaatgaattatatctttttcacatttacgtatacccgcaggattttataagttctgatcrtggccattgttagctaaaatgtgtaaactttaaaaagagtaaaatcttcatattttgaaaaatagtccagataggcccttcttaacttttagtttcttggtgtcttttgtgaagtatgatgacctgaactatactggttctcagtgttaaaagtatggacaaatagagtgttttattatacatatgtagataacaggttattttatattgctttacttttaatacctttctcgaggtcatgagcatgttttcgcctgtagcagcacgttgagttaatcaaatccctcactggagacgttacattgtaaatctggctttggattattttccttctaagttattactct

SEQ ID NO: 537863 - DNA, 527 bp, Homo sapiens
ctgtttacatttgacatgttttgaggtagcaagactttttttttaatatctgctatatgtaaggattttgtttttatttgtcctccaaattttagagggcttctcattataggatttactaaatgaattatatctttttcacatttacgtatacccgcaggattttataagttctgatcatggccattgttagctaaaatgtgtaaactttaaaaagagtaaartcttcatattttgaaaaatagtccagataggcccttcttaacttttagtttcttggtgtcttttgtgaagtatgatgacctgaactatactggttctcagtgttaaaagtatggacaaatagagtgttttattatacatatgtagataacaggttattttatattgctttacttttaatacctttctcgaggtcatgagcatgttttcgcctgtagcagcacgttgagttaatcaaatccctcactggagacgttacattgtaaatctggctttggattattttccttctaagttattactct

SEQ ID NO: 537864 - DNA, 527 bp, Homo sapiens
ctgtttacatttgacatgttttgaggtagcaagactttttttttaatatctgctatatgtaaggattttgtttttatttgtcctccaaattttagagggcttctcattataggatttactaaatgaattatatctttttcacatttacgtatacccgcaggattttataagttctgatcatggccattgttagctaaaatgtgtaaactttaaaaagagtaaaatcttcatattttgaaaaatagtccagataggcccttcttaacttttagtttcttggtgtcttttgtgaagtatgatgacctgaactatactggttctcagtgttaaaagtatggacaaatagagtgttttattatacatatgtagataacaggttattttatattgctttacttttaatacctttctcgaggtcatgagcatgttttcgcctgtagcagcaygttgagttaatcaaatccctcactggagacgttacattgtaaatctggctttggattattttccttctaagttattactct

SEQ ID NO: 537865 - DNA, 418 bp, Homo sapiens
tatctttttcacaaagcccaaattcttccacacaagcatgcccacaaagggcaataccaatggaaaactgaagttcttccatcttgctatttacagtcaaaatgacatatatgactcagaggccactgtcaaaggacagtaaacatttaayaccaaattggaaaacagaaatagttatctctaaataaaatatatgtacctttttgaaaacccacaagtttagcagaaaataactattttaataaattgctatctccatacaatggaatactctgcaggcagttgtaaaaagataaatttttccatttattaatatggaaagatgtccatattaattgaaaaattaaagttaaaaaatgtatagagttgttcttatccaaatataactagaaaaaccttaacagtaaactcacctaaa

SEQ ID NO: 537866 - DNA, 565 bp, Homo sapiens
ttccccattgaaagaagcaaaagaacatcagcttcattgcaatttccaccgggctgccctagagtcatggaaagtcatttattcaatcttttgggttccttggagagggatgttgtatgaacactagacatttaccgatagtgacatttatttcacactctatttatarttcattgaggtaagcacacagggacgaaggagtcagccagcttctaaaagctccctccccattttgattggcgttctctgggggcccagtggaacattccactttttcaaggtttcctcttgatcctcttggctggaataaatagggaatgctcaccaggaggcttaatcccgcctcttacttgactaggcagggagcctggttgggtcagacatgacaacagagacctgccaacccaaccttaagataacggggttatggcaaaagccaaacgctctgaacttttttccgcctatttttctgggcgtggggcaagatagatttcccttctaaggacctgctttaggtggatagcctgtggtgaccatagtgtgtatgggaatctctgtataatgg

SEQ ID NO: 537867 - DNA, 565 bp, Homo sapiens
ttccccattgaaagaagcaaaagaacatcagcttcattgcaatttccaccgggctgccctagagtcatggaaagtcatttattcaatcttttgggttccttggagagggatgttgtatgaacactagacatttaccgatagtgacatttatttcacactctatttataattcattgaggtaagcacacagggacgaaggagtcagccagcttctaaaagctccctccccattttgattggcgttctctgggggcccagtggaacattccactwtttcaaggtttcctcttgatcctcttggctggaataaatagggaatgctcaccaggaggcttaatcccgcctcttacttgactaggcagggagcctggttgggtcagacatgacaacagagacctgccaacccaaccttaagataacggggttatggcaaaagccaaacgctctgaacttttttccgcctatttttctgggcgtggggcaagatagatttcccttctaaggacctgctttaggtggatagcctgtggtgaccatagtgtgtatgggaatctctgtataatgg

SEQ ID NO: 537868 - DNA, 622 bp, Homo sapiens
ctgcataattagcagtaaaacttatgtaagcagtcccttgtgaagggctgtgtctttttgcgattatatccggtgctatagtgtacatccttgtgtgtgcatcttggtgtgcctgtgctacgtatttctgtaggataaatctgtaaaagtggaatcactaggtcagagggtatgrtccattttctttacttatttattttatttatttattcatttatttttgagacagagtcttgctctgtcgcccaggctggagtgcagtggcatgatcttggcttactgcaagctccgcctcccgggttcacaccattctcctgcctcagcctccggagtagctgggactacaggcgcccgccacccacgcctggctaatttttttgtatttttagtagagacggggtttcaccatgttagccaggatggtctcgatctcctgaccttgtgatccacccatctcagcctcccaaagtgctgggattacaggtgtgagccaccgcgcccggccccattttattatctttatttgcttggatccttcttagcttcttcaatgttaaagatattgacagttttcctcttactgaaatttataaatccattgactcccttgatattattgccc

SEQ ID NO: 537869 - DNA, 622 bp, Homo sapiens
ctgcataattagcagtaaaacttatgtaagcagtcccttgtgaagggctgtgtctttttgcgattatatccggtgctatagtgtacatccttgtgtgtgcatcttggtgtgcctgtgctacgtatttctgtaggataaatctgtaaaagtggaatcactaggtcagagggtatgatccattttctttacttatttattttatttatttattcatttatttttgagacagagtcttgctctgtcgcccaggctggagtgcagtggcatgatcttggcttactgcaagctccgcctcccgggttcacaccattctcctgcctcagcctccggagtagctgggactacaggcgcccgccacccacgcctggctaatttttttgtatttttagtagagacggggtttcaccatgttagccaggatggtctcgatctcctgacctygtgatccacccatctcagcctcccaaagtgctgggattacaggtgtgagccaccgcgcccggccccattttattatctttatttgcttggatccttcttagcttcttcaatgttaaagatattgacagttttcctcttactgaaatttataaatccattgactcccttgatattattgccc

SEQ ID NO: 537870 - DNA, 642 bp, Homo sapiens
tgaggcaggagaatcgcttgaacccgggaggcagaggttgcagtgagctgagatcacgccactgcactctagcctgggggacagagtgagactctgtctcaaaaaaaaaaaaaaaaaaaaaaaagtgatgggaatagattgttttgtctcaaaaagctctttccaacactaaaatgaaacatataattaaaaatatttttctggctataraaatatcgatgcttattatagacatctgcaaagtatgaaaatatatcaagaaaaaaattaaaatcccatcatcccccatgaaaactattgttatcatttttgtctgatttctttagtgtttctctttttctttttttaatttttaatttttttgagtatgtagtaggtatatctatttatggggtatatggcatattttgatacaggatacagtgtgtattagcaaggttttctttttaatgtttatatttatttagttgagatcatactatatatggctctatagattactttctcacttatattactaacttgtgttattaaatattctgcataaagataattttaagatgaaatttgatgttataaaaacttctcattttattaagagattaacgctatgaaacctgctgctatatattcttggaacca

SEQ ID NO: 537871 - DNA, 642 bp, Homo sapiens
tgaggcaggagaatcgcttgaacccgggaggcagaggttgcagtgagctgagatcacgccactgcactctagcctgggggacagagtgagactctgtctcaaaaaaaaaaaaaaaaaaaaaaaagtgatgggaatagattgttttgtctcaaaaagctctttccaacactaaaatgaaacatataattaaaaatatttttctggctatagaaatatcgatgcttattatagacatctgcaaagtatgaaaatatatcaagaaaaaaattaaaatcccatcatcccccatgaaaactattgttatcatttttgtctgatttctttagtgtttctctttttctttttttaatttttaatttttttgagtatgtagtakgtatatctatttatggggtatatggcatattttgatacaggatacagtgtgtattagcaaggttttctttttaatgtttatatttatttagttgagatcatactatatatggctctatagattactttctcacttatattactaacttgtgttattaaatattctgcataaagataattttaagatgaaatttgatgttataaaaacttctcattttattaagagattaacgctatgaaacctgctgctatatattcttggaacca

SEQ ID NO: 537872 - DNA, 554 bp, Homo sapiens
actctagacttcttttgtcccagaagcaaataayggcgtgtattgtataaggcagttgagctatgcttttcagtttcttgatgttcaaaaaatgacccgaaatagagagttataaaaaattgaaactagaaaggtattagagggttaaatcatgaaaggctttccttgccccattctaaggcattagactttatgcaggcagtaggaaatcccattgaaaactgttgaggagggaggtggcacatcaaatctgttttaggaaattgatggcaggatgaaagatagactggaagggagagggattagaagcaaaccaacaaaaacaacgattgattagtcatgagtctcggctggtaaaggacattttatcaaatatctccagatgtccacatggcctggagtggggaagagtaagaaagcagagatacctatggcaacctctcttcttatcagaaccaatggcctgcccttcacccttaagagcttagtgtatacagcagagagtccaaatcctaatactgtattacaatacctcagaaggctacccagttgtc

SEQ ID NO: 537873 - DNA, 554 bp, Homo sapiens
actctagacttcttttgtcccagaagcaaataacggcgtgtattgtataaggcagttgagctatgcttttcagtttcttgatgttcaaaaaatgacccgaaatagagagttataaaaaattgaaactagaaaggtattagagggttaaatcatgaaaggctttccttgccccattctaaggcattagactttatgcaggcagtaggaaatcccattgaaaactgttgaggagggaggtggcacatcaaatctgttttaggaaattgatggcaggatgaawgatagactggaagggagagggattagaagcaaaccaacaaaaacaacgattgattagtcatgagtctcggctggtaaaggacattttatcaaatatctccagatgtccacatggcctggagtggggaagagtaagaaagcagagatacctatggcaacctctcttcttatcagaaccaatggcctgcccttcacccttaagagcttagtgtatacagcagagagtccaaatcctaatactgtattacaatacctcagaaggctacccagttgtc

SEQ ID NO: 537874 - DNA, 508 bp, Homo sapiens
cctccaaactgcactgtggtgccatcagttagcatgaattaggagagacacgaggttagacagcccagcacgttgtagtcaacctggagkgggtaatgaatgctgagcagcgtcaggggaaattaggaggagaggtcacagaggtgtggtgcagctggagtctcatgccttggtgagaagtggagaacaaagaaaagggaggagttccattctgacccagtgtgtgtcacttggtttagcaaatttataatcatgggtcccagagaaaatttatgtaaaatacccttatccaacccactgctccaggaagcacctatttttcatgccttctgtgagttgtcaaaatgtatcttccaactttaatgaaactctaaggtcagcagagcctcagctttgacaaataaaaccattcaagtctgtatctccctcattgtcctccagtgatcctcatggaacacctttcctgaagagatgatgatggggccatttgacatgggacacagcaggt

SEQ ID NO: 537875 - DNA, 508 bp, Homo sapiens
cctccaaactgcactgtggtgccatcagttagcatgaattaggagagacacgaggttagacagcccagcacgttgtagtcaacctggagtgggtaatgaatgctgagcagcgtcaggggaaattaggaggagaggtcacagaggtgtggtgsagctggagtctcatgccttggtgagaagtggagaacaaagaaaagggaggagttccattctgacccagtgtgtgtcacttggtttagcaaatttataatcatgggtcccagagaaaatttatgtaaaatacccttatccaacccactgctccaggaagcacctatttttcatgccttctgtgagttgtcaaaatgtatcttccaactttaatgaaactctaaggtcagcagagcctcagctttgacaaataaaaccattcaagtctgtatctccctcattgtcctccagtgatcctcatggaacacctttcctgaagagatgatgatggggccatttgacatgggacacagcaggt

SEQ ID NO: 537876 - DNA, 328 bp, Homo sapiens
cccacacatgaacagggagggcacgtacccatgacaatagccacctcaggggctggaggaaggtaaatgggctggaggggtggcagggtgggtggratgaaggaaatacaaatgtgttctttcttttattttaaaaacaaacaaggtttaaagcccacatatacctcatggtatgttgttagataaaaatacttttaaatgcaaataaaaattgttaaatgtaaaaaatgtcaacatttgttcattttggttgatgggtacctggctattcattactgtattttctgtatagctccattttttcttttttgtttttgaaacaaggtct

SEQ ID NO: 537877 - DNA, 612 bp, Homo sapiens
agttaggtcttttgggaagtgattaagccacaagggcaaactaatgaaccatgaatgggattagtgccctcgtaaaagactgaagggagcttttttccccctttgtgccatgtgaggacacagcaacaaattaccatctgtgaagcagagagctcccaccagacaccggagctgctcgtgcctgagcttggacttcatgcctctggaatggtgagaaatagatttcttttttgsgggtgggagagcagattcactttatttatttatttattttttgcaaagcagcatgtatttggagggctttaggtctcagtattacaaattatctccattgagaaataaatttttgttgtttataagctacctagtctaaggcattttgttatagcagcctgtattcggtcattctttcattgctacaaagaaacacctgagactgggtaatttataacaggtttaactggcccatggttctgcaggctgtacaggaggcatagcgatggcttctgcttccggggaggcctctagaagcttccaattatggtggaaggcaaagcgtgagcctacacataacatggtgaaagaaggagcaagagagaagcggagaggggg

SEQ ID NO: 537878 - DNA, 612 bp, Homo sapiens
agttaggtcttttgggaagtgattaagccacaagggcaaactaatgaaccatgaatgggattagtgccctcgtaaaagactgaagggagcttttttccccctttgtgccatgtgaggacacagcaacaaattaccatctgtgaagcagagagctcccaccagacaccggagctgctcgtgcctgagcttggacttcatgcctctggaatggtgagaaatagatttcttttttgggggtgggagagcagattcactttatttatttatttattttttgcaawgcagcatgtatttggagggctttaggtctcagtattacaaattatctccattgagaaataaatttttgttgtttataagctacctagtctaaggcattttgttatagcagcctgtattcggtcattctttcattgctacaaagaaacacctgagactgggtaatttataacaggtttaactggcccatggttctgcaggctgtacaggaggcatagcgatggcttctgcttccggggaggcctctagaagcttccaattatggtggaaggcaaagcgtgagcctacacataacatggtgaaagaaggagcaagagagaagcggagaggggg

SEQ ID NO: 537879 - DNA, 297 bp, Homo sapiens
ggtcagttgcttgagaggaccctatatactcgctttgttttagagggwtaggctaaaaacttatgcccgtatctatttcctcatagaaaaagatgagacttagcaattcccttctcccattcacccaactttgtttccttgaatcatctgacatttgtcagagttgctgaggaagccttcctgttcattgctttattcccaatgcctactatgctgcttatatagccaatatacattttaatggagtagatttgagtcatacagcaactagctagaatagctccctgccagcagcag

SEQ ID NO: 537880 - DNA, 523 bp, Homo sapiens
gggaacatgagacaaaatatatatcactagctggaaagagatgtatccttcagtaagctcctcacgaaaatacctacatcatttgtgttggggatgtaggtatagaggctgatataatgayacataaattactctagaaaaaatagcccaaaagattgatgagaatgaccagtattacaaagactaacaattaagataattttatactaaagaatgacaactcagtgggacagagtagttcagaaacagatgcaaatactcacggaaattaaaagatgataaagatcttttgaagtaatgaaatgaaaaataatttaataaatgacattagtaccatggacaagctatttggggggaaatgataaaaatggatgccaaccttgctttttaaataaaaataaattctgaaatgagcatattttaatgcaataagaaggaataatcacaagacagaatttgatgccttaaataatagtaatactcatttttacatggagaacggtctgagtatgacataaaactc

SEQ ID NO: 537881 - DNA, 523 bp, Homo sapiens
gggaacatgagacaaaatatatatcactagctggaaagagatgtatccttcagtaagctcctcacgaaaatacctacatcatttgtgttggggatgtaggtatagaggctgatataatgatacataaattactctagaaaaaatagcccaaaagattgatgagaatgaccagtattacaaagactaacaattaagataattttatactaaagaatgacaactcagtgggacagagtagttcagaaacagatgcaaatactcayggaaattaaaagatgataaagatcttttgaagtaatgaaatgaaaaataatttaataaatgacattagtaccatggacaagctatttggggggaaatgataaaaatggatgccaaccttgctttttaaataaaaataaattctgaaatgagcatattttaatgcaataagaaggaataatcacaagacagaatttgatgccttaaataatagtaatactcatttttacatggagaacggtctgagtatgacataaaactc

SEQ ID NO: 537882 - DNA, 480 bp, Homo sapiens
ggctttgacgttttagggtttaaacaataagatgctatttcctccccaggtctcctctcttttgtattctagatattaaagtagaaaakaatttcagcatcatatttcatatatactatgtgagggaagggtgttagtatgttttcttctagcttaatttctaagattccatcttattacctgacctttccaatgtctgttatgtccaaaataaccaaacaatacaatatagttgtatgtccctgaatgtgttcgtaatatgattacctcattagcacagatggttcagagccaagatactagatacaagatgctagaaaattttccattttctccaaagtgagagagaaagtgctaggcggagtatgcagtatacacttttgtttaaaagacagcaacatgcaaaagccaaatgtttgcttcacaactagaaatactgaaacaaaaagaggcaatatagaatgcaaaaattctcatttc

SEQ ID NO: 537883 - DNA, 652 bp, Homo sapiens
cttattgagtgtaaaaataacgtgttttctaagagggcaaagttataacttcgaagaaagtgtgaagccagcaggtctcaggagggaaaaggagcttaaaacagctcaacacagtgtttctgattgtcacagtcaatgaaattatggaagcttacttataagggacttgtgaaaaaagtgatttggggcctggcaccatggctcatgcctgtaatcctaccactttgggaagctgaggcgagaggatcgcttgagcccaggagtttgagaccagcctggtcaacaagacgaaaccctgtctgtacaaacagaaattatcagggtgtggtggtgtgcgcctgtaatcccagctacttgggaygctgaggcaggaggatcgcttgagcccaggaggttgaggctgcagtgagctgtgattgcaccaccgcactccagcctgggtgacagagcaagactgtctcaaaaaaaaaaaaaaaaaaaaaaatgacttgactgggcatggtggctcacgcctgtaatcccagcactttgggaggccgaggcaggcggatcacaaggccaggagatcgagaccagcctggcctaacacggtgaaaccctgtctctcctaaaaatacaaaaattagccaggtgtggcagtgtgtgcctgtag

SEQ ID NO: 537884 - DNA, 243 bp, Homo sapiens
gcagttgttgatcagtaaggcaggaagaattttatacactattataatcatcttgattgtagttcctaaaatacrgggtctcataaacatgcttcagatggcataaaacagcttacaactggcagggaaggatgagcaccagagtcacatgggacaattattgaatacattgcttctccttgggttttgtggaccaggcctgtctgcaaggggcagacctaagcaggtgcccctctacagggt

SEQ ID NO: 537885 - DNA, 243 bp, Homo sapiens
gcagttgttgatcagtaaggcaggaagaattttatacactattataatcatcttgattgtagttcctaaaatacagggtctyataaacatgcttcagatggcataaaacagcttacaactggcagggaaggatgagcaccagagtcacatgggacaattattgaatacattgcttctccttgggttttgtggaccaggcctgtctgcaaggggcagacctaagcaggtgcccctctacagggt

SEQ ID NO: 537886 - DNA, 608 bp, Homo sapiens
tcactctgggtccagaattctgacctaccaatctatgagagaataaatgttttttgcttaataaatgattgttgaytgttgttttttgtttgttttgttttgtttgagacagagtctcgctctgctgcccaggctggagtgcagtggtgcaatcttggctcactgcaacctctgcctcctgggttcaagtaactctcctgcctcagcctcccaagtagctgggattacaggtgtccaccaccacgcccagctaatttttatatttttagtagagacggggtttcaccatcttggccaggctggtctcgaactcctgacctcgtgatttacccacctcagcctcccagagtgctgggattagattgttaagatgccacatttgtggggatttgttatgatagcaacagagaaactaacattagtagaggcacaataatattgcaatatagtgtctgaggtgaaaaatacatgagagagaattaacagaagtttagactgagtaagacaagactagtgaacttgaagaaacagcaataaaactaccccaaatgaaatacagaaaaaaaaaaaagactgaaaatggggactttatttaaaaaatgaatgga

SEQ ID NO: 537887 - DNA, 608 bp, Homo sapiens
tcactctgggtccagaattctgacctaccaatctatgagagaataaatgttttttgcttaataaatgattgttgactgttgttttttgtttgttttgttttgtttgagacagagtctcgctctgctgcccaggctggagtgcagtggtgcaatcttggctcacygcaacctctgcctcctgggttcaagtaactctcctgcctcagcctcccaagtagctgggattacaggtgtccaccaccacgcccagctaatttttatatttttagtagagacggggtttcaccatcttggccaggctggtctcgaactcctgacctcgtgatttacccacctcagcctcccagagtgctgggattagattgttaagatgccacatttgtggggatttgttatgatagcaacagagaaactaacattagtagaggcacaataatattgcaatatagtgtctgaggtgaaaaatacatgagagagaattaacagaagtttagactgagtaagacaagactagtgaacttgaagaaacagcaataaaactaccccaaatgaaatacagaaaaaaaaaaaagactgaaaatggggactttatttaaaaaatgaatgga

SEQ ID NO: 537888 - DNA, 608 bp, Homo sapiens
tcactctgggtccagaattctgacctaccaatctatgagagaataaatgttttttgcttaataaatgattgttgactgttgttttttgtttgttttgttttgtttgagacagagtctcgctctgctgcccaggctggagtgcagtggtgcaatcttggctcactgcaacctctgcctcctgggttcaagtaactctcctgcctcagcctcccaagtagctgggattacaggtgtccaccaccacgcccagctaatttttatatttttagtagagacggggtttcaccatcttggccaggctggtctcgaactcctgacctcgtgatttacccacctcagcctcccagagtgctgggattagattgttaagatgccacatttgtggggatttgttatgatagcaacagagaaactaacattagtagaggcacaataatattgcaatatagtgtctgaggtgaaaaatacatgagagagaattaacagaagtttagactgmgtaagacaagactagtgaacttgaagaaacagcaataaaactaccccaaatgaaatacagaaaaaaaaaaaagactgaaaatggggactttatttaaaaaatgaatgga

SEQ ID NO: 537889 - DNA, 676 bp, Homo sapiens
tacaaccatgtgcctatagtttattaggttactagctcctatttcttccaggctagaggattgttttgcctcaggtcaatacacagtgctctttygttagctcagattgtgaaggtcatgttttctctacatctgaatatgaaccttctcctgtgttagcatcggtgtgatttttaaccagagtcaagtaattgatttctgaagacaccctggcctttacatacttgcatgtcttacttcatgtaattttctcttgcttttcaagtacatgattagccacaatgtgataagtatataaatcaactgcctgccctctaggacttctcacatttaaatgtagacctaaattacttttgttacactgaaaagatttgaaaatgctcggttgaatcacattcaagccacttcagaaggctgcaataatttcctacattgccgaaggaaattattctcccaaatacattccggtttgtttgtttgtttgcgatagagtcttgccttgtcgtccgggctggagtgcagtggcacgatctcagcccactgcaacctccgcctcccagattcaagtgattatcttgcctcagcctcccgagtagctgggagccatcacacccagctaatttttagtagagacggggtttcaccatgttggccaggctggtctcgaactcctgac

SEQ ID NO: 537890 - DNA, 602 bp, Homo sapiens
ctgatggaactacaaccatgtgcctatagtttattaggttactagctcctatttcttccaggctagaggattgttttgcctcaggtcaatacacagtgctcttttgttagctcagatkgtgaaggtcatgttttctctacatctgaatatgaaccttctcctgtgttagcatcggtgtgatttttaaccagagtcaagtaattgatttctgaagacaccctggcctttacatacttgcatgtcttacttcatgtaattttctcttgcttttcaagtacatgattagccacaatgtgataagtatataaatcaactgcctgccctctaggacttctcacatttaaatgtagacctaaattacttttgttacactgaaaagatttgaaaatgctcggttgaatcacattcaagccacttcagaaggctgcaataatttcctacattgccgaaggaaattattctcccaaatacattccggtttgtttgtttgtttgcgatagagtcttgccttgtcgtccgggctggagtgcagtggcacgatctcagcccactgcaacctccgcctcccagattcaagtgattatcttgcctcagcctcccga

SEQ ID NO: 537891 - DNA, 658 bp, Homo sapiens
tggagggtcttgaaggtctggcttgggactgatatgtgacagaagagctatttttgagacaaattgctcaaatccaaattcccaaagtcttagtagaagctgaactgtaataaggtaaaagtcaaaataatatgtcacattagtgacttaccccacaggttgttggactatcccagtttacacagatgaggcggcagagacagttacccaagcacactgggccacagagtggctgaaaggcaaaacctctcctgctgagcttccaggggtgctgagatgccaaggccaccagcttcctcctgtggacctatcctgtgcgaggacctataaaaagagatacaaagccgagggagttaaatggaacactgtgtttgacatttccaactcaaagtggagaaaatcaagagagctactagaatggaaaagaatggaggcaggtgctaccatggaaagggcacagaatcagaaaaactcaaatccaaactgggattcctgagtggatctactagtgccctcaggttcctgggctctgtagaaggyaggaagtcatagagcaaacagataaatgaaatctggagaggagatgtatgtgatgtcctggaaaatcggggatttaaattgcttctctgtcatttctcagacttgtagaactgggggt

SEQ ID NO: 537892 - DNA, 472 bp, Homo sapiens
gggctgctcagtgccacaggattattgtctctgcaaaggaaccatgggggaaagaccaaacctcagaagcaagtgaggttaccattaccctgactaacccttcagggtgactcccacggccagcgagagagtccctgctggttcccaggctcagagctctgggtttgagactgtcttgtgtgaacccaggaggccagaataaagctgctgcatacctggctgcctctgcttggcctcatttctcctgctgacagacacaccctagatgtggtcctgtcacatacgggtctgaatcttgcatgaggctcctgaaaggctcagtctgtagatgctactttgaggatggggatgggggcagataataacgtctgtcatgtctccgatgcttatcatttggtagaaatgcatgagtttaaatctgggttctgyccctttcaagctgggtaaccttggacctttgtaccccttttcc

SEQ ID NO: 537893 - DNA, 486 bp, Homo sapiens
ggtgggagttggggagaggggctttgtttaagctgggaaggttcaggaagacctctctaggaggtgccagttgccaaggcagccattagaagaaaaagcagcagatgcaaaggccctgcagtaggaatgagagcggccagcatggctggagcataaagcatgaggacagggtggtgggaggtaggactrgagagatggccagggcctgctctgatggagcccgacaggtcaggataaggaatggagagttttcttcaataacaataagaagctttggagggttaaagcaaggaagtgattcagtcctacgtggggggttggaaagatcactctgacactgtggcgggggcctgctgggagcaggagtggaagcagggatgggacttttctctgcagcctacctagatcatggtactcacaagccttgttctcgcaggcctcacctgcttttcagcccggggcgccctgggcaaccagagtgcagag

SEQ ID NO: 537894 - DNA, 623 bp, Homo sapiens
gttcccccggggaagccttgagggatcaggaggcctcctcagcaaccagacaggagcaccccagaccagcccctcctggtgctcccgctgcggctcccagccctgggaactgagcacagaaagagaaggtctttgggggctggcccctggtaaaacaacaagattctggtcatatacatggacatatatgcctggcttcccagacggtggtggcctctctgtccccagcacatcaatcctgtaggctgctaaacaaagcaggggtgtcggggagtcccctcctggttgagggcctttgcgccctgttgagtctgggtctgatcggagaagtgatcatgtaggtggatggagtgggcagaaggaagggaggagggacagtcttgagtgggggaacttagaaggagcagtcaagagtacggccagtggcrttcctaacagtgagatggaggaagggagggctgggccctgggccccactttcccagaggtgattatggattggactcacaagggagatgagcagagagggtcagcaggtcctctgtccatcccactcctcacctccatggtggtgggcacttcagacaggagcccgatgggaccactggatggtaagtgcagaaa

SEQ ID NO: 537895 - DNA, 569 bp, Homo sapiens
ggctcagatgcccagaacttgytcccagccagagctgcccctgggagaactccaggaagctgatggggctctgttccaatcacctagggggtctctcgccattcggaggaaagagttttcagtggaatagaggacctagaaatgaagaattaacaaacatcccttacttcttctggtagagaagagtgtttctggaaagtccaagttctacatgttgtttaaatctctaactgcagaggaagttagttaattctacagaggaagactcttcaccacctcagtctcttggcctctgctctactctgtgtgacagtgatgggctctgcccaggatggcagaaggtcaactgactcagttccaaaagcagcaggccgatttctagcgtcgtctgggcaaggagagaggggccctggtggtgatgctgatggctgtccaggctcagctcagcgagcatgttatcttgttcttgacatccctgctcctccccctgccaatgctgttagtcctgtcctggctgctgaggccactccgaggtcctgggcagactacactgtccttcccagcccagc

SEQ ID NO: 537896 - DNA, 606 bp, Homo sapiens
tgcattttgaaaacacagttcattttattgtttaggactgtttaggcatataaaatagtttctaacaggcggctactttaataaaaaatgcatacttacagcagcaaaattcatttcatgatttcttctcttatacagatatttttggtttaatttgatttaattytgggtgtttttttgttgttgctgtctttttaattttgatttgtttggcattgatcaatatagtttattctagtagtaactcagaagaacacattttggacaggagaaaaatcaaaaagagtatttagtgtttctaattttacttagagtatctctgacagaatttttttttttcaggaatctagggtgtcacttagtaatatactgaaagagttcatagagttttcagagaggtccaatttataaataagaaatagtttagatatagaaagcacctggacctaccatttatgctccttgaagaaagtaggcataatatttcatgtcatttttctgcccagtgatttcccagtggtgagaaagttgcctctggaaattggagtgttatttggattcaggttttctatcaattttaatagttaaatttgcgaagcacattaa

SEQ ID NO: 537897 - DNA, 606 bp, Homo sapiens
tgcattttgaaaacacagttcattttattgtttaggactgtttaggcatataaaatagtttctaacaggcggctactttaataaaaaatgcatacttacagcagcaaaattcatttcatgatttcttctcttatacagatatttttggtttaatttgatttaattctgggtgtttttttgttgttgctgtctttttaattttgatttgtttggcattgatcaatatagtttattctagtagtaactcagaagaacacattttggacaggagaaaaatcaaaaagagtatttagtgtttctaattttacttagagtatctctgacagaatttttttttttcaggaatctagggtgtcacttagtaatatactgaaagagttcatagagttttcagagaggtccaatttataaataagaaatagtttagatatagaaagcacctggacctaccatttatgctccttgaagaaagtaggcataatatttcatgtsatttttctgcccagtgatttcccagtggtgagaaagttgcctctggaaattggagtgttatttggattcaggttttctatcaattttaatagttaaatttgcgaagcacattaa

SEQ ID NO: 537898 - DNA, 659 bp, Homo sapiens
gcctctcctttgtcttgtagatagtgtcttctctctgtgtccccataccttgccttccctgtatgtgtgtctgtctctgtatttaaatgtccttctctttataaaaacatcagtcatattgaatcagatttcaccctaatgaccttatctagttacatctccaatgactctctttccaaataaggtaacattctgaggtactgggggttagaacatcaacacatgaattttggrgtgacacaattcaactcatcgcattctataactttaggcaggaggtctcaattcctagctggttgttggcaggaggcatcttcttcactatgtgggcctctccacagaactggttgagtggcctcaggacatggtagctggcttttctcagagccaatgatccatgagtgacagcaagagactcctaatggcctctattcctggtttaggacacctaatgcagtaatttccaccatgtttgactcttttgagttattcagttagtgcatatataagaaagggaaaatcagcctccacctcttaaaggaggttatatcaatgaatttgtagatatattctaaaacactacatttgctctcaaagaaatgagaattaaaataataatcatatatcacatcatctaaaaaaccacaaaagtaggaaaa

SEQ ID NO: 537899 - DNA, 421 bp, Homo sapiens
caaatatgcacaagtggcaaaacatgaggggatttgttcataaatccatgggaggcactgtctgtacacacttgtagaaatatctggggaaaagacattttgcatggagtgagatgtcctgtccaatgaggggtgctacaccaacagcaacatgcaagttattactattaataggaatttcacytgtacatactgacaggtgaagacttggaaagtctgaatttcataccaaagtttccatttggataactgaaaattttcgttttatttatgtaatctgaatatgtttatccaatttattcaatattaaagtatggtgctattaaatgaagaatggaaggattccttactggttcatcatttgtgtttctaatctgcaggtggtgagaaaagatgtaacaagaaccttttctgcatacca

SEQ ID NO: 537900 - DNA, 421 bp, Homo sapiens
caaatatgcacaagtggcaaaacatgaggggatttgttcataaatccatgggaggcactgtctgtacacacttgtagaaatatctggggaaaagacattttgcatggagtgagatgtcctgtccaatgaggggtgctacaccaacagcaacatgcaagttattactattaataggaatttcacttgtacatactgacaggtgaagacttggaaagtctgaatttcataccaaagtttccatttggataactgaaaattttygttttatttatgtaatctgaatatgtttatccaatttattcaatattaaagtatggtgctattaaatgaagaatggaaggattccttactggttcatcatttgtgtttctaatctgcaggtggtgagaaaagatgtaacaagaaccttttctgcatacca

SEQ ID NO: 537901 - DNA, 427 bp, Homo sapiens
tataaatgtcaggccattgtgttccaacatggacagttctgcttcctccccattcctttcacaggtcttgatccctaataaacatcttgtacccaaactctgtctcaacatctgcttctggagagtccaacctgtgacaaacttaaaccctatatatgacaactgaattattcagtatgccacaccaaattaatgaatacccttttcccaactgcaaaccaaaamggtcactttcagtatcacaactgtacacaatttttttgttattctagtcaacatcttacattttttaatttttttcatatctaaactttaaagaataatagaaactaattgtgatcttattcctgtgttttatgagatttcttacctctttagaagtccttgtttgagtttcaagtttgtggcaaagccctcaatcattctt

SEQ ID NO: 537902 - DNA, 628 bp, Homo sapiens
ttaaaaactaagttatatcattcatatgtggatatacatatgtatacctctctatatatattttgtatcatccttagcaattmagtccatcattgcagataacaagctatgctttatatattttgtattcccagcataatatattttacatgatagctgttcagtaaatttgttgtgtaaacacacaaaaaaatgcatgcctggtttgttagtctattgttgcactgctataaagaaatacctgagactgggtaatttataaagaaaagaagtttaattggcttacagttttgcaggctgtataggaagcatgatgctgatatctgcttctggagaggcttctggaagcttacaatcatggcagaaggtgaagtgggagcttgcacatcacatggccagagcaggggcaagagggcaacctgggaggtgctacacatttttaaatgaatacgtctcatgagaactcacactatcctatcgcaatggcagtgccaagggggaatggtgcttaacccattcatgagaaatcccacaccaagatccaatcacctaccaccaggcatcacttccaacactgaggattacatttcaatatgacatttgggcagggacacagatccaaaccata

SEQ ID NO: 537903 - DNA, 490 bp, Homo sapiens
agctcaggatgaacccagtttccaggcccggggccatcatcagccaggagaggcatccgcggcacttcccagcaatggccacaggaagtaccaactcaggcccatcaggggcttcctcactgtgggggtttttaaaagtagagcacagaggttcaggtctagtggcacagtcaaacgttgacagactccatggaaacacggacttggcccctccatcccaccagcctgcatggccgcccctctcckctcccatcatacacatccccatccagccaagccccttctccttttcccttctccatttctccactggattcatcaaatcaaaccttgctgtccttggcaaatgtaccatgaatttacttactgcccagaacaaaagcacacttccagttaacatgacacccccactatggtagaacacagccctaattcagacattaggtgaaggaacaagggaggggagtcgagggcagtcctgagtcagcag

SEQ ID NO: 537904 - DNA, 517 bp, Homo sapiens
tgaggatccctctcctgaggacaaaactgctccagagccacacagaaccaagatccgggccaactccaaagcgggcgatcttgacccctcacccgtggtcctgaggcagggatcggagccccctggacacacagacactcccaggaactgcaggaatgggaagtagataccccagaccagcggcaggacccagggtttctgcccctcagggcacactgggaccagccactgcataggtggacacatggtgctttaacccacactgggggaaggaagccctcactctcagagtggagaccacagcctccagcaggcccagcctcactgctttaacccgtactgggggaaggaagctcaagctgtcagggtggagaccgcagcttcaatcaggcccggcctcactgctttaacccgcgctgggggaaggaagccctcgctctcagggtggagaccgcagccttgatcrggcccagcctcactgctgggcacagcctgaggatcgccatacatgatgctg

SEQ ID NO: 537905 - DNA, 501 bp, Homo sapiens
aggtttcccacatgtggtgctgactggctsctcgttggcagcgcagccctgacagcagcatttgcactgtcaccttctccctgtgtggacggctgggctccccctctgtggaccgctgggctgcatcagtctgttttcacgctgctataaagaactgcccaagactctctaatttataaaggaaagcagtttgattgactcacagttacacatggctggggagacctcaggaaacttatgatcatggcagaaggcgaaggggaagcaaaggcctatcttacatggcggcaggtgagagggaggtgtgcgagggggaggacaggacctactgaaatagtaccatataatatctgacagagcagccaagggctggtggctgcaggtcgcaggaagggaacacagttaccaaaaaaacagatctcgtgagatctcccaatcgcgaggacagcataggggaatccacccccaggatccaatcacctccccaggttttgcccttgg

SEQ ID NO: 537906 - DNA, 619 bp, Homo sapiens
tgggttgatggtgcatgagaggtcattaaacctggaaagaccaggaaagacaatgtaaaagatgactaaatcggggcaaacagacctataaaactgggtagatcaactctcaacaaagggcattcttgagtagcagccaagattcacacacatacggatgacccagagtcatcaaggaaaggtgactgtggtcattatgagttttctatttagaaggcatggagtatgaaacccaggcaggaagagtttcatgcaaaatggtcaaacattttaggcaggtgttggcattcaaagctgaggcctcaattatccagaatattctctcagagagcttccgagagtgaaggatgtcctcatgctgtcagtcctacatgaagtgaggcctgtcctatccctgaccctgttcagggagcacacatgtctttagttgttcatgccttgtggggaatacagacagtcaaaagacaggtgcttttgacacaaaataggtcacttttgtccacccctttcttccttttagctggatagcccagaggaaggatcaatgaagtcctttgttggagagactgagaaagctttatgggaaggrgaatggtttcagccatgcataaaaaagtat

SEQ ID NO: 537907 - DNA, 643 bp, Homo sapiens
tctctccttcgtaatccaaagtgtgttattttttaaatgtaaacattattctaagaaggggctcaggatcaaccctggaggaycagaggggctacagcacacacaaaaaagcttcagtacactgtattagtgtgctgaggatgtcgcaacaaagtacttcagatggagggacttacacaacagttttttaattttttttttttttagagataggatctcgctctgtcacctaggctggagtacagtgctgcaatcatagcccactgcagccttgacctcctgggctcaagcggtcttccccttcagccttccaactaactgggaccacaggtaagtgccaccaggctcagctattttattttttgtagagacaggtctccccatgctgcccaggctggtctcagtctcctgggctcaagtgatcctcctgcctcagcttcccaaagtgctgagattatgggaatgagctgtcgcaccggcccacaacaaaaatttattttctcctgattctggaaggtgggagtccaagatcaaggtgtcggcaggactgggtcctttgaggctgcgggaaggagctatccaggtgtctgtccttgacctgtagtcagctgtcttcactccctcttctcatcaccttctctct

SEQ ID NO: 537908 - DNA, 643 bp, Homo sapiens
tctctccttcgtaatccaaagtgtgttattttttaaatgtaaacattattctaagaaggggctcaggatcaaccctggaggaccagaggggctacagcacacacaaaaaagcttcagtacactgtattagtgtgctgaggatgtcgcaacaaagtacttcagatggagggacttacacaacagttttttaattttttttttttttagagataggatctcgctctgtcacctaggctggagtacagtgstgcaatcatagcccactgcagccttgacctcctgggctcaagcggtcttccccttcagccttccaactaactgggaccacaggtaagtgccaccaggctcagctattttattttttgtagagacaggtctccccatgctgcccaggctggtctcagtctcctgggctcaagtgatcctcctgcctcagcttcccaaagtgctgagattatgggaatgagctgtcgcaccggcccacaacaaaaatttattttctcctgattctggaaggtgggagtccaagatcaaggtgtcggcaggactgggtcctttgaggctgcgggaaggagctatccaggtgtctgtccttgacctgtagtcagctgtcttcactccctcttctcatcaccttctctct

SEQ ID NO: 537909 - DNA, 643 bp, Homo sapiens
tctctccttcgtaatccaaagtgtgttattttttaaatgtaaacattattctaagaaggggctcaggatcaaccctggaggaccagaggggctacagcacacacaaaaaagcttcagtacactgtattagtgtgctgaggatgtcgcaacaaagtacttcagatggagggacttacacaacagttttttaattttttttttttttagagataggatctcgctctgtcacctaggctggagtacagtgctgcaatcatagcccacygcagccttgacctcctgggctcaagcggtcttccccttcagccttccaactaactgggaccacaggtaagtgccaccaggctcagctattttattttttgtagagacaggtctccccatgctgcccaggctggtctcagtctcctgggctcaagtgatcctcctgcctcagcttcccaaagtgctgagattatgggaatgagctgtcgcaccggcccacaacaaaaatttattttctcctgattctggaaggtgggagtccaagatcaaggtgtcggcaggactgggtcctttgaggctgcgggaaggagctatccaggtgtctgtccttgacctgtagtcagctgtcttcactccctcttctcatcaccttctctct

SEQ ID NO: 537910 - DNA, 643 bp, Homo sapiens
tctctccttcgtaatccaaagtgtgttattttttaaatgtaaacattattctaagaaggggctcaggatcaaccctggaggaccagaggggctacagcacacacaaaaaagcttcagtacactgtattagtgtgctgaggatgtcgcaacaaagtacttcagatggagggacttacacaacagttttttaattttttttttttttagagataggatctcgctctgtcacctaggctggagtacagtgctgcaatcatagcccactgcagccttgacctcctgggctcaagcggtcttccccttcagccttccaactaactgggaccacaggtaagtgccaccaggctcagctattttattttttgtagagacaggtctccccatgctgcccaggctggtctcagtctcctgggctcaagtgatcctcctgcctcagcttcccaaagtgctgagattatgggaatgagctgtcgcaccggcccacaacaaaaatttattttctcctgattctggaagstgggagtccaagatcaaggtgtcggcaggactgggtcctttgaggctgcgggaaggagctatccaggtgtctgtccttgacctgtagtcagctgtcttcactccctcttctcatcaccttctctct

SEQ ID NO: 537911 - DNA, 628 bp, Homo sapiens
cattagattttgaaataactaactgagttatggttcttacattgcacaaaactcttactttcctcttactggacttgcaagcacaagtgattttaaggaaaaacatatcactacttacaatatttttgcagactaacattattaaaatatgttattattttactacatgaacaaaaatttcatccttctccccttgttctatatagctttgaatacgatttcttattttatctgtgctcttatayctgtgctctagagtgaatcttgaatttctcattttctccttaatttatgtctgttagtctcttgttctagtttttcactccttccaagctgcaggaagcctgacagtgaattatttagtgtttatgtggctgaatctcaagtcttagagtttcaggcagcagacaagtattaaagtgccaagcatagatgtatagcaattgatgagcaaatagtactattataaaaatatacaatttaaaaagcaagataatatttgaacttaaaatgatttgtccttggtctgcctaaaccatgcattggcattttccatgtcatttatctaatgtttatttgcaacttggtagaatcttcattattgaaatgtagggtatttttacaatta

SEQ ID NO: 537912 - DNA, 507 bp, Homo sapiens
agagctgctgaggtcttggcagggcgatgaaaatgggaaaccgtttagaaagtggaataaaaataaaaagaatagggttaatttagttggagaaggagtggagatgaggccmcacaagtctttaatacaccaagaaaaactgaggcagcatgcacgctactggtactacttctgctcttaagaacgtctcctgtccccaacctgcccctgacacccccagagctctcctcctgctcaaccagcctaggagccttccagctaacaagatctcttccagctctaaaaggttgttttgcaatgtcttaaacctgaaacttcaggctgtggagcatgtaaacaagagtgactgtgggatatcctgctcaggtgattttaaagaaaatagggacatagtttggaggatggtttaagcaagaccttttaaacccttttaactcttcagctcaccctgcattaaatcaaatgtgaagataaatgctcattaaacattaaatatatatttatttt

SEQ ID NO: 537913 - DNA, 507 bp, Homo sapiens
agagctgctgaggtcttggcagggcgatgaaaatgggaaaccgtttagaaagtggaataaaaataaaaagaatagggttaatttagttggagaaggagtggagatgaggccacacaagtctttaatacaycaagaaaaactgaggcagcatgcacgctactggtactacttctgctcttaagaacgtctcctgtccccaacctgcccctgacacccccagagctctcctcctgctcaaccagcctaggagccttccagctaacaagatctcttccagctctaaaaggttgttttgcaatgtcttaaacctgaaacttcaggctgtggagcatgtaaacaagagtgactgtgggatatcctgctcaggtgattttaaagaaaatagggacatagtttggaggatggtttaagcaagaccttttaaacccttttaactcttcagctcaccctgcattaaatcaaatgtgaagataaatgctcattaaacattaaatatatatttatttt

SEQ ID NO: 537914 - DNA, 414 bp, Homo sapiens
gaatgagggaccacggtacggagggaagtggctgagttgacagccactgatagagctttttcctgattgtctctggcttgagctaaccaggtggcatgacaaagtacttaacaaaaactacagatgcagagaattttggaaatttttaaaagacaggaaaaaaggtggttgaggcagaaaaaggtagttctagagtgagaggggtttctttcctcctcttggctcacagcagaggccaagtccttagcagtgtttccagagcaggtgaatgagactctctgaaggccggcccaggggtctgccttgtracacgttcccccagcttctcatgtacaccaccactcttcggggaccaccaccttctgggttggatgggtctggaagattctacgaatatatccagccctacctgag

SEQ ID NO: 537915 - DNA, 579 bp, Homo sapiens
agtgggcaatcataagggtttaatgaatgaataaatgatcaagtcaggtaggttttccccgaattcttgtctttggggctgaacccagggtaggtttcctggcatcattcctgtgttttctactctccctccctaatcctctgaaagtttgaacaaaaataagattatgggccaggtgtggtggctcacgcctgtaatcccagcactttgggaggctgaggtgggaggatggcttgagcccaggggtttgagactagcctgggcaacatggcgaaatcccgtctctacaaaaaatagaaaaattatctgggtgtggtggtgcgcacctgtagtcccagctactcgggaagctgaggtgggaggatcacctgagcccgaggaggtccaggctgcagtgaaccaagatcacatcactacactccagcctgagtgacagagtgagaccctgtctcaaaaaataaaaataaaaawaaagaaataagattatgaccaagagccgtatgtctcagatgttgaagggcaatatacctgtgcttcagaaaaatctgccctgtgtgccaaaatgtgcagaaaggagag

SEQ ID NO: 537916 - DNA, 491 bp, Homo sapiens
aggacctgggatgattatttcagccactcctggctaagggcttcccctaatatcccaatgaggaggatttgctaaacaaaagctggagcgcctggttattagcttatgctgatttagtcatcctcacttcttattcattttatacagctctatgtgcaaagaattttgccagatattattcactgtcaggtagtctttcaataaatatttatgtagtgcccactctgagcattgggaatacgaaggtggacaggatagacaacattcctgctctcctggagctcccattctaccagtggagacaataaacacgtagctaaaaaaataaatactgttattatagtatttatttttgttgtgatgaattaatgattgctatgaaagaaatagagttrgctgagggagagtaactggggaaggcctctcggaaagagtgctctaggagtcactgctgaggagtgacatctaagtggaggtcccagtgggagtga

SEQ ID NO: 537917 - DNA, 659 bp, Homo sapiens
ctgagtgaaattacctcacctctgttacacaactcagcctcacagggccaggtgtctgccagagccagctttacaagatgacaaactcttgcactaacaccaccatacagtctttataacaacaattacagtggaaatttgaggccaggcctaaaagattaagacttgctccaaaaagacgtgaccaaagcttaaagtcataaagaatggaggccaggtgctatgagcttattgaccagtttccagaatagcagaatcaggagcacccgtgagagaatgagacaggccatcttagaagaagcaaaaggaatgtcccttacatggagcagggaagggcagcgggggcaataaattcatgaaaccrccgaccccaagcttaatgtcttaacaggtcctgaactggtaagttcaaatttgtacatgggatattgatagtagactaacaatccctttgtgcgtctatatgagggactcctgggccagtagtttaaaaggtcttgacgggcaataacaaatgttggtgaggatgtggggaaaaggaaacccttgtacactgttggtgggaatgtaaattagaataaccgctttggaaaaaaatttggagttcctcaaaaaattaaaaatagaggtaccatatgatccagcaatcccacagctag

SEQ ID NO: 537918 - DNA, 659 bp, Homo sapiens
ctgagtgaaattacctcacctctgttacacaactcagcctcacagggccaggtgtctgccagagccagctttacaagatgacaaactcttgcactaacaccaccatacagtctttataacaacaattacagtggaaatttgaggccaggcctaaaagattaagacttgctccaaaaagacgtgaccaaagcttaaagtcataaagaatggaggccaggtgctatgagcttattgaccagtttccagaatagcagaatcaggagcacccgtgagagaatgagacaggccatcttagaagaagcaaaaggaatgtcccttacatggagcagggaagggcagcgggggcaataaattcatgaaaccaccgaccccaagcttaatgtcttaacaggtcctgaactggtaagttcaaatttgtacatgggatattgatagtagactaacaatccctttgtgcgtctatatgagggactcctgggccagtagtttaaaaggtcttgacgggcaataacaaatgttggtgaggatgtggggaaaaggaaacccttgtacactgytggtgggaatgtaaattagaataaccgctttggaaaaaaatttggagttcctcaaaaaattaaaaatagaggtaccatatgatccagcaatcccacagctag

SEQ ID NO: 537919 - DNA, 471 bp, Homo sapiens
ctgctagaatacacagctcctccaggtacagatttttcgagtgataagagaggaaggaagaaggaagcaagagagcaaccgaggcaggcccagggtagagaaacggagagggagtgtttcacagaagctggacaggatcggaaaatgtcagccaggccaygtttcgtgctgcgacgttctagtcccttcagcttctttcaccctctggctggctccgtcactcagcccctttctttcttcctttgccaacaaagaagattttgttggtcagtcaaggtcatggcctgaaacactccaatgggcccgggagtaagtggggtaaccaaggaggagaggggcacaggcaggaagcaccgggtggcagcctccacagcgccttcgccacctcatggccaagcgtccgtgtctaggctcagccttgtcatggctgtccccacacccacgcctgggactgccgggtgacgcaccatc

SEQ ID NO: 537920 - DNA, 532 bp, Homo sapiens
ggtgacgcaccatcccaggctccgtgactcaccccagcctgccccttaggcggccatctagcccagccagagggcccggcattgacagaacacggggcagatgagacgatgtgcctggttaagtcaccaccacgagcagcgcccagccaacaagagtgcttgctcctcacctcattcccgatcgtgggagcccagctttgctgcaagcctttagcttccaccatgttttctagcccaggtaatgaggaagaaaaccagtgaaaagaggacaggacaaactgctcagggggatcagcctcgtggcatcttcctgagaagtggggcaggctgaatttcaatctaaagaaacagggaaggtgaagcaagcaaatgtcctcggcccacctgatcgctcctggyagctcacctgggtgtgggaatttgtttaggggccctgttgggagggcaggagaggccatgggcacttctgctcccaccagggagccaggcacagcccgggccagcgcctcgggggattctgaggcccgtgcag

SEQ ID NO: 537921 - DNA, 532 bp, Homo sapiens
ggtgacgcaccatcccaggctccgtgactcaccccagcctgccccttaggcggccatctagcccagccagagggcccggcattgacagaacacggggcagatgagacgatgtgcctggttaagtcaccaccacgagcagcgcccagccaacaagagtgcttgctcctcacctcattcccgatcgtgggagcccagctttgctgcaagcctttagcttccaccatgttttctagcccaggtaatgaggaagaaaaccagtgaaaagaggacaggacaaactgctcagggggatcagcctcgtggcatcttcctgagaagtggggcaggctgaatttcaatctaaagaaacagggaaggtgaagcaagcaaatgtcctcggcccacctgatcgctcctggcarctcacctgggtgtgggaatttgtttaggggccctgttgggagggcaggagaggccatgggcacttctgctcccaccagggagccaggcacagcccgggccagcgcctcgggggattctgaggcccgtgcag

SEQ ID NO: 537922 - DNA, 406 bp, Homo sapiens
ttttctcagaaaagccttgtggggtctaagtcacacacacagtgtggcagagtgagggtgcctgagcttgctcagagcagcccatccttgygtgctggggacaaggggacccagaacgctggaatttagtgacttcaggggagacagccaggggcaatagctccagcctctgagcttcaggcttgagacaccacaccagggagctcatataacctttcagggtctttacctgcagtttcctcactggtccatttgtgttcggcttggagagaccaaggtaggggcaaagtgaagttagaaagaaaaatgaaagattgttgggtggcggtggctgccaagcgtggtaaacagaaccccacccagcagacaagatgggggccgtgcctcatttccacaaatagggggc

SEQ ID NO: 537923 - DNA, 623 bp, Homo sapiens
tgagttgttgagtctgttttgtaaagtccccagagaaagcgcagatgctagcacatgccctaatgtctgtatcactctgtgtctgagtggcttcactcctgctgtaaatttggcttctgttgtcaccttcacctcctttcaaggtaactgtactgggccatgttgtgcctccctggtgagagggccgggcagaggggcagatggaaaggagcctaggccaggtgcaaccagggagctgcaggggcatgggaaggtgggcgggcaggggagggtcagccagggcctgcgagggcagcgggagcctccctgcctcaggcctctgtgccgcaccattgaactgtaccatgtgctacaggggccagaagatgaacagactgaccttgatgagctgtgcacaaagtggcataaaaaacatgtggttacacagtgtgaataaagtgctgcggagcaagaggaggccgttgattcacttcacgctttcagcgaatgacaaaatcatctttgtgaaggcctcgcaggaagacccaacacwtgggacctataactgcccagcggacagtggcaggacaggaaaaacccgtcaatgtactaggatactgctgcgtcattacagggcacaggcc

SEQ ID NO: 537924 - DNA, 660 bp, Homo sapiens
agatgcaaaagacacatattcttacccaagtggtagttactcagggaaagagtggcatccctgacttagtctttatctacctggagcctggcttggttctgtgtacacagcgggtcctcaataaatgcctgtctcttcattgttctcggcctctccttggctggtagatggtcgtcttctcctgtgtcttcacatggtcctccccctgtacaggtctgtgtccacatttcttcttcttagatgacaccagtcatattggattagggcctgccctaggacctccttttaacttaaatgcctctttgaagaccttatccccaaatacagtcacattctgaggtactgggggttaggacttcaacagatgaatttggggaaaatggagggggccacaattcagccccaaacagctacctccttagccaagttggaactgcagaacctgctctgccatgactgacagggatgtcatccctgtcaggatactgaggtatcctgacctaggggactatatgaggactaagaacacacccgaagatccaacgttctccacaggatcttagagcttgctggccaacttcggtcctatgacgagtcataaaggcccagtaatgtgccttctcacagcatggccwttctggatccttctgtaccagggtg

SEQ ID NO: 537925 - DNA, 530 bp, Homo sapiens
ttacaacagtcacttctaataagctagactttccattctgggtttctttttttttttgatggaatatcgctctgttgcccaggctggagtgcagtggtgcaatctccgctcactgcaacctctgcctcccaggttcaaatgattctcctgcctcagacccccgagtagctgggattacagatgtgtgccaccacacctggctaatttttgtatttttagtagagacggagtttcactatgctggccaggctggtctcaaactcctggcctcaaatgatctgcccaccttggcctcccaaagttttggtattacaagcatgagccactgtgcccggtcacttctgggtttcttacagatttttttttttggtgcgtctcatttctgtgttcctgtgcctttattctgttttttcaggtggcaacagcattaacagactttcccctaaccacttgtttaaatacatcctcaaacagtgttatatgagagmccccaaagggacagtaagacaaaaataatcattgtcacgaaa

SEQ ID NO: 537926 - DNA, 616 bp, Homo sapiens
tcatgaaacagagcattgctggattcccatgacttatggtttgcctagtgcaaataaaatttcctcatgttctttcaggcaaactgtgtttatcttaaattaccctggtacacattgaaacggggaagaactggatgactcaaaagactgaggcaatgtagtatagagataaaataatgactacagtaatactacctatgttgtgtttagaagaatccctgcacttaataagcactatgtatgtgtstgataaatttaaaatatacttaatggatatcttaagtacagattattacttctggaaatttagctagggggaaaagaagagagttagtgtttgcatgggtaggggaaagggggaacacaggaattacttatttatatattatttgattttatttcaagataggagacataaacatgtttataaaccgaggtgaataattcattggaaggagtgcagattctgaggtcccactcacagatactgaatttgaaattctgaacatgggtaaaattcatctatctatctatatctatctacatatttgtattacatattacgtacgcatatatacatatacatatatttatatatacatttctacaagattct

SEQ ID NO: 537927 - DNA, 616 bp, Homo sapiens
tcatgaaacagagcattgctggattcccatgacttatggtttgcctagtgcaaataaaatttcctcatgttctttcaggcaaactgtgtttatcttaaattaccctggtacacattgaaacggggaagaactggatgactcaaaagactgaggcaatgtagtatagagataaaataatgactacagtaatactacctatgttgtgtttagaagaatccctgcacttaataagcactatgtatgtgtgtgataaatttaaaatatacttaatggatatcttaagtacagattattacttctggaaatttagctagggggaaaagaagaragttagtgtttgcatgggtaggggaaagggggaacacaggaattacttatttatatattatttgattttatttcaagataggagacataaacatgtttataaaccgaggtgaataattcattggaaggagtgcagattctgaggtcccactcacagatactgaatttgaaattctgaacatgggtaaaattcatctatctatctatatctatctacatatttgtattacatattacgtacgcatatatacatatacatatatttatatatacatttctacaagattct

SEQ ID NO: 537928 - DNA, 616 bp, Homo sapiens
tcatgaaacagagcattgctggattcccatgacttatggtttgcctagtgcaaataaaatttcctcatgttctttcaggcaaactgtgtttatcttaaattaccctggtacacattgaaacggggaagaactggatgactcaaaagactgaggcaatgtagtatagagataaaataatgactacagtaatactacctatgttgtgtttagaagaatccctgcacttaataagcactatgtatgtgtgtgataaatttaaaatatacttaatggatatcttaagtacagattattacttctggaaatttagctagggggaaaagaagagagttagtgtttgcatgggtaggggaaagggggaacacaggaattacttatttatatattatttgattttatttcaagataggagacataaacakgtttataaaccgaggtgaataattcattggaaggagtgcagattctgaggtcccactcacagatactgaatttgaaattctgaacatgggtaaaattcatctatctatctatatctatctacatatttgtattacatattacgtacgcatatatacatatacatatatttatatatacatttctacaagattct

SEQ ID NO: 537929 - DNA, 616 bp, Homo sapiens
tcatgaaacagagcattgctggattcccatgacttatggtttgcctagtgcaaataaaatttcctcatgttctttcaggcaaactgtgtttatcttaaattaccctggtacacattgaaacggggaagaactggatgactcaaaagactgaggcaatgtagtatagagataaaataatgactacagtaatactacctatgttgtgtttagaagaatccctgcacttaataagcactatgtatgtgtgtgataaatttaaaatatacttaatggatatcttaagtacagattattacttctggaaatttagctagggggaaaagaagagagttagtgtttgcatgggtaggggaaagggggaacacaggaattacttatttatatattatttgattttatttcaagataggagacataaacatgtttataaaccgaggtgaataattcattggaaggagtgcagattctgaggtcccactcacagatactgaatttgaaattctgaacatgggtaaaattcatctatctatctatatctatctacatatttgtattacatattacgtacrcatatatacatatacatatatttatatatacatttctacaagattct

SEQ ID NO: 537930 - DNA, 568 bp, Homo sapiens
ctgcttattacaggaaatgatttaccagagatcctatagcaagttaggagcggactcagggctagaaacagaatcaataaaataggtattaataataatggaagtctctgaattctcttcatttctttccttttcttcttttttttctttcttyctttcttttttttttttttttgagagggggacagggtcttgctctgtcacccaggctggagtggcacagtgtacaatcatggctatggctcactgtattcttgacctccagggctcaatcgatcctcccacctcagcctcccaagtagctgggactataggtgcaggctactttgcccagttaattttttgtattttttgtagagacagggtttcaccgtcttgccaaggtttggattgtttttgtgtgaagtaaacctcagtgttactgagccgttcatttatttagatttttaagagattgccattgaggctggatgcggtggctcatacgtacaatcctagtgactcaggaggccaaggcaagaggatcgcttgaggccagaatttgaaaccagcttgggcaacatagcaa

SEQ ID NO: 537931 - DNA, 566 bp, Homo sapiens
tcactcaaggtcagcagttcgagaccagcctggccaacatggcaaacccctgactctactaaaaatacaaaattagccaagtgtagtggtgcatatctgtagtcccagctactcgggaggctgaggcaggagaatcacttgaacctggaaggcagagtttgcagtgagccgagatcctgccattgcactccagcctgggcgacaagagtgaaactccatctataaaaaaagaaaagaagaagttctcagtgtagggcagtacttgccaagatagaaaatgctaagttcatggagaattggaggcttctaacccagactggagcgatcaggcaagcagagccaaacagaagcccaggagccttttggaagactcattccctgctgcctattcaaaccaatatggtctatccattttgktgagagtctcagcctgttctctaggtcctaagcaatttagctctgcccccacatttgtatcttctctcccaaagcaaaagtctaaaacagaccttcctattctccttttcccttgagggtcttattccctgcctacaaacacacacata

SEQ ID NO: 537932 - DNA, 566 bp, Homo sapiens
tcactcaaggtcagcagttcgagaccagcctggccaacatggcaaacccctgactctactaaaaatacaaaattagccaagtgtagtggtgcatatctgtagtcccagctactcgggaggctgaggcaggagaatcacttgaacctggaaggcagagtttgcagtgagccgagatcctgccattgcactccagcctgggcgacaagagtgaaactccatctataaaaaaagaaaagaagaagttctcagtgtagggcagtacttgccaagatagaaaatgctaagttcatggagaattggaggcttctaacccagactggagcgatcaggcaagcagagccaaacagaagcccaggagccttttggaagactcattccctgctgcctattcaaaccaatatggtctatccattttgttgagagtctcagcctgttctctaggtcctaagcaatttagctctgcccccacatttgyatcttctctcccaaagcaaaagtctaaaacagaccttcctattctccttttcccttgagggtcttattccctgcctacaaacacacacata

SEQ ID NO: 537933 - DNA, 480 bp, Homo sapiens
tgccccttctttggtataactcctctccactatccaacaatgattgtggttttgatgggactgccattcataaaacctaccctatggctacattgacctgttcagwtgtagacaaatcatgaaccagagacctttgcaaagacagacaaaggcattccttgagagttttggacccagaactaagagaagaggggctggccctctttggaggttaaactgtggagtataatgcaaagaaaatgccagtggacatttcttgacaatagaagaagttagtcagaggggatattgtgaacacataaatgagcaaaatggaacaagagaggtagaggataagaaagataaagatagaggtaagagagagagacagaacccagttcctcttctcccccagaccaggctatccctcctcaacactcacatgagtcttctaataaatttccctttggggctactttcttgaagctgggtttctgtcac

SEQ ID NO: 537934 - DNA, 470 bp, Homo sapiens
tcacttaggctaaagtgggcctgcttttcactgggagaccaattctccaccctggggaggctgggaaaaggccccttcccttttaacccatctacctccaccacctccccacccggggctctctctggggctgctaatcgtcatctgggccttctgggagatggtttaaaaggaggatttgcaggcacttcacygggctgtttttctggtgctgcctgcctgctctcactcccttcctcctccctaccagcttctgcctagttacagggagtggctgggggctgcctacaaaccttgttctggctttgtagcagcttggctgttccagtcccacctctgcttccctgtgcaggagccacatctttgggagataatgaatcatgggctcccagtcaggttgggtggcttgggcaagtagaggaacctaagtctggggcagggaggagacgaagggttaaggagagcctgca

SEQ ID NO: 537935 - DNA, 599 bp, Homo sapiens
tgcctcttcctttttagcaagaaaagaatcagggagatgggctggaattattccattgttgtaattctatgataatgacttaattctctcctgactcagggcaagrtattggctaccattcatctccctggcatttctcagaaatcagtatgtcagaattttctgacctcgctgtcctggaggcagtggagctcagaccacatcaggcaagcggggccatccctgtctgggagcaggggtggtgagtgcatggagctctccagggagacaggacactggcctggcactgcccaggccctccctgtgacctgcccaccctcctgtgtccccgtctcttcatgtggaacagccaggaagatgtggcaaagtagattgctttgtctgggccaatgtcagggagggaaaatgtggtatttattttttctccatcatttaattatgaaagattttgaacacacagtaaagttgaaagacttttacagtgaatgcccctgtgcccacatggcgtttgttcgctctccatctgcagcttgtgaaggcactgtcctgggcgatttctttatgcaatcatttcagtcctcacacaaacccaatggaag

SEQ ID NO: 537936 - DNA, 348 bp, Homo sapiens
ctggctgtcctccttgccctctcctttcataggcccccttggtggtctgcgtttttgccctccaccttcccagaagccaacagggaatcccagacccaggctaagtagctaytcaggctgcctctttctctgagatctgggcccagcaggctgggttgctccacagagaggctgaggcagccaagcagagcctttgcctatgggacaggaggtgcctgaccagaggaggtcaactggaggcctctccttcttgtctctggattgttcaatgagaaggacatttggggttgaagattcagagcagagagctccttggggaagttctggagatggaagattggagatgga

SEQ ID NO: 537937 - DNA, 495 bp, Homo sapiens
ttcactctcatcttaaggactcattagcattttaagagctgttgataaagaacctaagtgaaaggaaagaagtctggaaaaggaacttcacataaagacagatcattgctgaaaagtctcccctcttcctaagggctcacgtgtggcaggaagttckcagcactcatggcaattgatccaacaggcatgtttcaaatggtaggcaggtatctcagaaagttggtatgaccatgctttaacgtaaaaaagatttgtctttccacacttttgataacacaattagaacagtctcactggttctcaaaattaaaatgattttaacactggcctgtaaacaatgaggtgacaaattaaaaatccctggctggcttctccaacggtctgaacagatcttggggtaactgttccctgattccattttcatctgaatgatgccatggagctccctccacccacacttcaaatccaaaaatcttagcaactggagtccactgc

SEQ ID NO: 537938 - DNA, 442 bp, Homo sapiens
atatacaagtgccttcctccatccttgcatattcactacaaatcccctcaaattcaaaatctttgagaatgttgtcctagccaggtgaataacaaaaacaaacagcaacagcaaaaacagtttatctactatttacaacatatcwgacaccaaatttgtaaggtttctttttcataccaaccacttgtttgaatgatggtattccctctcaaatttattttgaaacataattgtcaatgcaacactattgagaggtggtgtggcctttaggaggtgattaagtcatgaggggtctgccctgatgaatggaatgagcatccttataaaaggatgctgggttgaagggagggctctcttactcttctgcttttcaccacatgtgggcacagcagatacagcaacaaggcaccatcttggaagaagagattgggcccttagacac

SEQ ID NO: 537939 - DNA, 652 bp, Homo sapiens
cattctcatgccaggataatgtctatcccagacaccaacatactgaaagaaacctacattttttccctctctctaacttctgtgaaatattgtattattttacagatattcattgccaatctgtgagagaggattctgtttgcctactgggttgacacctgacttggccacatgacttgctctaccaaagaaatgtgagagaagtgatgtgcttatgtttcctttgccatcatgaccagcratgctccaggttttagaacactgatgcaaaaatgactgtcacttctcacttctccctttgtaatatgattctatagcaacttccaccaaatttggagatatggagatcgctgtccctagaagctgggctagcctgagacatgatttggtcaatagaatgtggtagaagcagtaatgtgcctttttgttaactaatttgcaggagggtttacactcttccattcactgttttggaattctgataccatcgtgtaattcagcacgggttagctgaaagaggagagaccagtggaccagggatgcattgtcttagctgaggtcatcctagaccagcctatgccagtccatccccaaataggtgagtgagccaagctgagctcagccaagccaggcccagatcagcagaactttc

SEQ ID NO: 537940 - DNA, 464 bp, Homo sapiens
aatgtttattcctgagtgctgctgaagtttcatggtggtttggaattacaggattaatgtggcaagaaataactratacacagattgaagctgctctgttggcctgcacctggagtacagaagatgtaggacagagctacagcaagcaggcacaaggcacaaagcattaacaagaaagaaacattcatgtaagccactgagatatggagtctatttgttaccccagagtaacctagcccatagtgactgatataccaactgacatgcctaactgtgcttgattcctcaatttctcatttctttttttcttgctagttgatttcttttctatgctttctatttcatagaaactgcggttgcacagatctcctgtgacatggacatgcagcctcttctttcttggttattcatcctgaattttccctgactttggtcctatttctttaacttttttaaattttaat

SEQ ID NO: 537941 - DNA, 495 bp, Homo sapiens
gctgccatgtagactcacgagaaaaaaataaatgtttattcctgagtgctgctgaagtttcatggtggtttggaattacaggattaatgtggcaagaaataactaatacacagattgaagctgctctgttggcctgcacctggagtacagaagatgtaggacagagctacagcaagcaggcacaaggcacaaagcattaacaagaaagaaacattcatgtaagccactgagatatggagtctatttgttaccccagagtaacctagcccatagtgactgatataccaactgacatgcctaactgtgcttgattcctcaatttctcatttctttttttctygctagttgatttcttttctatgctttctatttcatagaaactgcggttgcacagatctcctgtgacatggacatgcagcctcttctttcttggttattcatcctgaattttccctgactttggtcctatttctttaacttttttaaattttaatt

SEQ ID NO: 537942 - DNA, 495 bp, Homo sapiens
gctgccatgtagactcacgagaaaaaaataaatgtttattcctgagtgctgctgaagtttcatggtggtttggaattacaggattaatgtggcaagaaataactaatacacagattgaagctgctctgttggcctgcacctggagtacagaagatgtaggacagagctacagcaagcaggcacaaggcacaaagcattaacaagaaagaaacattcatgtaagccactgagatatggagtctatttgttaccccagagtaacctagcccatagtgactgatataccaactgacatgcctaactgtgcttgattcctcaatttctcatttctttttttcttgctrgttgatttcttttctatgctttctatttcatagaaactgcggttgcacagatctcctgtgacatggacatgcagcctcttctttcttggttattcatcctgaattttccctgactttggtcctatttctttaacttttttaaattttaatt

SEQ ID NO: 537943 - DNA, 495 bp, Homo sapiens
gctgccatgtagactcacgagaaaaaaataaatgtttattcctgagtgctgctgaagtttcatggtggtttggaattacaggattaatgtggcaagaaataactaatacacagattgaagctgctctgttggcctgcacctggagtacagaagatgtaggacagagctacagcaagcaggcacaaggcacaaagcattaacaagaaagaaacattcatgtaagccactgagatatggagtctatttgttaccccagagtaacctagcccatagtgactgatataccaactgacatgcctaactgtgcttgattcctcaatttctcatttctttttttcttgctagttgatttcttttctatgctttctatttcatagaaactgcggttgcacagatctcctgtgacatggacatgcarcctcttctttcttggttattcatcctgaattttccctgactttggtcctatttctttaacttttttaaattttaatt

SEQ ID NO: 537944 - DNA, 617 bp, Homo sapiens
ttttgaggtggttctttataaaatattattgtgacaatccatccatttaataaaagcaaaggtaggactagagaagataatgactaaaatcttatttttatagtagtatctctttatagatactggctgccctgttgaccattagtggcctaggcattgaagatgcaacatatccaatttaaagagtttctatttccctccattccctggagcattatccatcttgagtagctctgtgacttatcagtgggaaagtacagagatacttatttacatcatggactcctcatgattttctaacttccaaattatctttcttattggaaatataattttttaatggcaattatccctagctatcctacattgagaaatatgtacctagtccagttgtgaatggtgaactatggagacgatggcattcactcctgagaggtaagacttaagttttatatgtaagtctcaggggcagaaatgtgagatatgaagagatggataaagagtctgtagaggaggtttattccaagttcccccttacaatcagatatgaagagcccagagagagagaagaagatcrcaaggcatgagctgaaatgagggatttggatggggtttgg

SEQ ID NO: 537945 - DNA, 514 bp, Homo sapiens
gcagtgtgtttgtatgggtttttaattgattaataccttaccatttaaaaaataaggatttaatgtaattaagttacttcagatggttaaaaacagtgctagttaaagtgtggtccctaaacccrcaatgtcagctttacttgggtgcttgttgtaaatcagaatctcaggcctcacccagatgtactgattcagaatctctgctaggcaaggccctagaatctgcattttaaacaagctctccaggtgattcttacatacagtaaaagtttaaggcacaggacattagaactgagtctgcaaacattttctgtaaatattcataaatattttggactttgtggacctaaatgggctctatatgactcagccctgccactggaggagtggcagccagcgacaatgggtatggctgtgttccaacaaaactatatttacaagaacagactctgggccagatttgatgcataagccataatttgccaacccctgggttagagcctggagtgtcagt

SEQ ID NO: 537946 - DNA, 375 bp, Homo sapiens
tgcccttcatcagtcacgtgactgattctggccartggaatgtggccagaagtgatgaaggtcacttatctggcctaatcactgctttctgaagcatggttttttattcactctctctctttctccctctttctctctctctctctagaagcaaatggccccgagatggcaaagccataccatgaaaagcgactggacctctgaatcacctctttgagcagagagagccagaagatcctcttcactcacactgaacagtggcacgtgggtgaaatcacactgtgctgagtttctggaacctcaggaatctttggtacagcaaagatgatactttgattaatacgccaaactccaagcttagaaaatctggatgta

SEQ ID NO: 537947 - DNA, 404 bp, Homo sapiens
atcaaactataaattaaaattataaaataggtactgtttataataccaataaaacctataaatctgttaaaatatatgaaaaacttatatgcagaaaaattagaaaagatgacctgaaaatgtaatatataaagacatttatcataaggaatcagttcatgtgattattaaggtgggcaagtcataagatctgcagggtgaatcagctgactggggatgtaggagagccaatggtttagttccagactaaaggctagaaggtttgagacccaggaagagccagtatttaagttagtgtctgaaggcaagaaaaaagccaatgtcccrgttcaaaggcagtcagtaaggaaaaaattctgtcttattggagggaggggtcagccttttcgttctattcaggcctt

SEQ ID NO: 537948 - DNA, 630 bp, Homo sapiens
tgctacaatggcagagttaagtactgtatatatgacagagactaaagggctggcaatgcctaaaatagtaacattatagtaatagtatatgaatagtatctgctatccagacctttttaaaaaagtttgttaatttgttttgagatattatcttgcaataatttgacttaaaacataactagcttctgtttcttagaatgacagaggcaagatttattcctccagctgaaataaccaaagaaaactggacaaaatatatgaaacaatggttgagacaggaaacaaattaggtgagccctatgattgtttcatattaccgtcttgagtgaatttcgaggccatgctagatgaaggataccacaggcaaagctcagaaagctccctgagatcagaagatggmggtaagagtctgttgcttgtcccaaaatagataaaacaaaatattgacagaattggaaggagatatacataattcaacaataataatttgagacttcaacatcacacttttaaaaatggatagaacaactagacggaaggtctatataaaacagaagacttgaataacactgaaactcactagacaaaaaagatgtatataaaatattccacatataatagtagaatata

SEQ ID NO: 537949 - DNA, 653 bp, Homo sapiens
tctctaaactgaacaccatgaacagaatttaacatcttcttctgaacacygtgaacagaatttaacatcttcttcatgagtcagaatcattacgctgaacaataggtactgaattgtgttgaaattcactaatgccctctggagccattgaaagtttatggctattttctcacacattaaatagcccagagtgctgtactttttgagttcttatgcttagttttcatggttttttattctttattttgagctggcagctcaaaattttatcctaaactataggctattttaatcctaaaatatagacttaactctacaaatgtcttttctccctttcaaatcatagttacaactgcctgcatatctggaaactagatcgcaaagcatgcagggtatatgagataataaataataaagtaagggtaaataagataataaatagttaatatttactgtttaccacataccaggcactgctgcacaagtattaactcaattctatagcaactctattattatttccattttagagatgagaactttgaggaacaaactgctaaagtaacttgcccaaaaccacacagctagcaactggctgagccaggattcaaccccaagggtgtggctccaaagagtatcaatcactgcctagg

SEQ ID NO: 537950 - DNA, 653 bp, Homo sapiens
tctctaaactgaacaccatgaacagaatttaacatcttcttctgaacaccgtgaacagaatttaacatcttcttcatgagtcagaatcattacgctgaacaataggtactgaattgtgttgaaattcactaatgccctctggagccattgaaagtttatggctattttctcacacattaaatagcccagagtgctgtactttttgagttcttatgcttagttttcatggttttttattctttattttgagctggcagctcaaaattttatcctaaactataggctattttaatcctaaaatatagacttaactctacaaatgtcttttctccctttcaaatcatagttacaactgcctgcatatctggaaactagatcgcaaagcatgcagggtatatgagataataaataataaagtaagggtaaataagataataaatagttaatatttactgtttaccacataccaggcactgctgcacaagtattaactcaattctatagcaactctrttattatttccattttagagatgagaactttgaggaacaaactgctaaagtaacttgcccaaaaccacacagctagcaactggctgagccaggattcaaccccaagggtgtggctccaaagagtatcaatcactgcctagg

SEQ ID NO: 537951 - DNA, 523 bp, Homo sapiens
tcaggtgttcgagaccagcctggccaacatagtgaaagcccatctctactaaaaaaaccaaaaataagccgggtgtggtggcaggcacctgtaatcccagctactcagggggctgaggcaggagaatcgcttgaacctgggagaaggaaggaggttgcaatgagccgagatcatgccactacactccagcctgggcgacrgtgtgagactccatctcaaaaaaataaataaataaaaataaaataaaataaataaatgaatgaatctgctcatctgggagtgggtttggggagactttgtactaaaacaggtcaattatattaacattcagtagcctctttcccacaactatttgcaagtttattaaagccaaaggaaaacactcaaacaggaaatctaaaaggcctcctggtaatcatagggtacacatcactcacatattttaccaaaccaccttccaggaaaacaagaacccatgaataacaaataatgcagtatttcacaagggagaaaaagaacatct

SEQ ID NO: 537952 - DNA, 568 bp, Homo sapiens
catcaagaagcaaatgcaaattgtgtgagagtacatataatatgatttcagttttataaaacgcagaaacatgtagaactttataaagtacactttaggatatatacacatttgaaactacaaagaacaacagtgatcaacgtaaaattcaggataatgattactgtttggtgagggagacaggtataggatgagggaggagcacttgggatttctaagagacttgtgacaatctatttcttaagctggatagtgggttgtcttcttcactgcaatgttcccaaatcctagcacaagcatgacacatagtaggtgctcaataaatattagtgaaatgagggaaaaaaagaacaaaactgaactcagtttttttctatgaaacaatagtttgttagcaagctgtagcacctaccaaaacaattagaacatctggataaaatacaaaagaaaaaagaaaaaataaaaccctatggagaggcataagaaagcttatgtgaagccaaaatggagggwccaagatccaaggtaaaaaaaaaaggaggtaaataaaagtcctgtgttctgcatt

SEQ ID NO: 537953 - DNA, 595 bp, Homo sapiens
gggtgaggtgcaggttggaggaggcctccaaaccaaggtgggagaggagggcctgggaatgtcagttgtgagcacctgttcctgcctgagtcaccaattacacacagcacttacattccgcaggtgtgccaagctcctgctccctgcaaagcacattttaggtctggtaagaaaagatgaaacacatgcatgcacacacactgtatcaatgtgccaaggcgaccatcacaaagtccggcccgctgggtggcttaaatcacaagaattgactctcacgttctggaggctggaagtctgaggtccgggwgtcggcaggatcggcttcctctgagtcctctgtgcttgtctggtagatggtcagcttctccctgcatcctcacactgtcttccctctgtgtgtgtctgtgtccacagttcatcttataagaataccagtcatgttggatgagggcctatcctaatgacctcattttaatttaattaccacttgaaggaccttatctgtgaatacagtcacattctccggtactaggagttaggacttcaacatattaattttgttcagcccatcacacacacacacatgctcacacac

SEQ ID NO: 537954 - DNA, 482 bp, Homo sapiens
tccgtgggagaacggactccctgagaagacaccaagtgtatatcagcaaagtgggggactgttctcatgaagcagggttgccagacagaatacaggacaccagtaaaatttagatttcagatatacaataattgttcagcttaagcttgccggtcattacatgggccgtattyacatatgaaaaaaattacttgtttatttgaaatccaaatagcgctagctgtcctgtattttaatttgccaactcaggctcctgtctcggtgtgttcttgctcactgatgagctgcacctgacacttagccacccccccttagtaacctgtgagggttgccaagaaacaagactttgaaagagccattgaattttgtggggaaaaggttctgccgggctcctgggtctgtctttccctcttgtcggagcctggccccgagctcattggagcactctgcatccagcccttccgcttctgtttcagaccagc

SEQ ID NO: 537955 - DNA, 526 bp, Homo sapiens
cccccaaggcgtgactccaaacccctggaaagggccataggtgtgggacatttccaggagtgctctgacttccagcgtgattttaaatgtgagtggccattgtacatagcaccttgctaacaggcttgtcacactcattggtctgctcygcacacaatcccatggggagggtgcctctccgccagtgtatgcttccggttttaaatgcaaggaaatggaggctctgagagcagagtggcctgccgggatctcatgtcagtacacggtgttgtttcaggcggacaccatggttttgtaactccaaagccaggcccttcctatgatgcccccatgtgtgccgtcctcaggtgcctcaggataggtgtgtctctgggttgagtgtggtctcatgttcaggagcttgtggtccattccagatgaatgcggggggaggggggggcaacaaaatgtaccttagctgtcaagggggctggaaggagaacctgatagtatgggtgagtggaggaggaccctggctgcggaagta

SEQ ID NO: 537956 - DNA, 526 bp, Homo sapiens
cccccaaggcgtgactccaaacccctggaaagggccataggtgtgggacatttccaggagtgctctgacttccagcgtgattttaaatgtgagtggccattgtacatagcaccttgctaacaggcttgtcacactcattggtctgctctgcacacaatcccatggggagggtgcctctccgccagtgtatgcttccggttttaaatgcaaggaaatggaggctctgagagcagagtggcctgccgggatctcatgtcagtacacggtgttgtttcaggcggacaccatggttttgtaactccaaagccaggcccttcctatgatgcccccatgtgtgccgtcctcaggtgcctcaggataggtgtgtctctgggttgagtgtggtctcatgttcaggagcttgtggtccattccagatgaatgcrgggggaggggggggcaacaaaatgtaccttagctgtcaagggggctggaaggagaacctgatagtatgggtgagtggaggaggaccctggctgcggaagta

SEQ ID NO: 537957 - DNA, 372 bp, Homo sapiens
ccccaaagaagcaaatggccttgttatgaactacttacctcaggtcctagccgcatggcccccttcaaaggctaagagtgactctcaccaaccagcaaagacaaaataggatgtcatttctacagctacaaggaactggtttctgcccacaaccccaagctccagaaggaattcagcccagcaaacaccckgatttcagtctgtaagactctgagcagagaccccagccacactatgcctggattcctgactccttgtaactgtgagataataaaaggctaatgttttatgtcaataaatttcttgtattttgttatgcaatagaagaaaataaatatagcaggtcatcaatgacctaagggcagagtaggt

SEQ ID NO: 537958 - DNA, 626 bp, Homo sapiens
ctctgtgattacaccccaagtggcaggtggcagggagctcctccgcctgcagtctgcgccccacccccaggcttcccccaccaccagtcttaactcaagacagtgctatttctgtccttgaactgggtttcaccccagaaagccactccaccgctttctcataaggctacctccttttaaccctgtggttgcacggcctctggggtgtccatttctttcttttgacacgtcccttttcctgaaagtttcagcaaaccccataggcagagggrgttagaaaaaggaaaagagaagttagggcaggaggagcactgttcttataggacaggaagggtctgtcttctctcttgggtcctccacacaaaatcggagcttccaaacaccccagctcccaaacatatgcagcagattctgctgacaggaatgtgtcactgtgatcttcacattttagcctgaagtttagcctacctgaagaagcaccggagtgggagtgggagaacatgggatggtgcttctctttggcctggctgtgcttttggacacttcaggtcttcggcctgggtttcctcctccgtacgatgaggagaggatgggagggggcaatgctggcatgtgtgatctcgata

SEQ ID NO: 537959 - DNA, 526 bp, Homo sapiens
tgctcacacccattgaagatccttcagctctcaatatctcattctcactattgcctggtccagagccccagscctcctagcctcacccttttaccgcccatctcggcagcacatttacacgacatcttctagcactttgctattcctagtgtggtctgcagaccagcagcaacagcatcgcctgggagctcgttaaaaatgcagtctctcaggtttccatggaccttctgaagccagatctgcatttcaaaacaatccctgagggatctgcacgcacgttggtctgagaagcactgggctggacgctggttctcaaacttctctgctcattggaatctccaggaaagtttttaaaaatactgttgccaggatcctatcctgagagtttctaattaaatcggtctggggtgtgtcctagacatccgatttttaaagcctccctggtgattctaatgttcaatgcaagtagaattctaactggagaggaaacttactattaattaaaaatcataagcccaaggaaaca

SEQ ID NO: 537960 - DNA, 694 bp, Homo sapiens
tgctcacacccattgaagatccttcagctctcaatatctcattctcactattgcctggtccagagccccagccctcctagcctcacccttttaccgcccatctcggcagcacatttacacgacatcttctagcactttgctattcctagtgtggtctgcagaccagcagcaacagcatcgcctgggagctcgttaaaaatgcagtctctcaggtttccatggaccttctgaagccagatctgcatttcaaaacaatccctgagggatctgcacgcacgttggtctgagaagcactgggctggacgctggttctcaaacttctctgctcattggaatctccaggaaagtttttaaaaatactgttgccaggatcctatcctgagagtttctaattaaatcggtctggggtgtgtcctagacatccgatttttaaagcctccctggtgattctaatgttcaatgcaagtagaattctaactggagaggaaacttactattaattaaaaatcataagcccaaggaaacagaaatccgctcaattaaactaagrgtattaagcatctactctgcgcaaggccttctagtagatgcttcaacttgtgacaggtgaggggctcctggtctgggcaagtatttaccttaattcctgcactgcgacacttgctcacagcatcaggcactgcagctcggggag

SEQ ID NO: 537961 - DNA, 488 bp, Homo sapiens
tgatttttttcttttctgtagtgacgggggtcttcttatgttgcccaggctggtctccaactcctgcctcggcctcccaatgtgctgggattataggcgtgagctgccgtgcctggctggaaaagatttttcagtggctcctatacttgacacctagggcacagcatctctgcctccttgactgatttatagagacaagggtctcacagttctgcccaggctggtcttgaattcctgagctcaagcagtcctttctcagccttctgagtagctgtgattacaggtgcatgccacacctgtgagcatcaggttcctgctcaaagttttcactcatataggttcataatcaaagtttggagaccactgctctagagtatccttctgcagaaattttgacatttaattctacttacytttatcatctgtgcacatgtattttctagagcaattatgagtcaaaagttcaggcagtctgggctcctgtagga

SEQ ID NO: 537962 - DNA, 531 bp, Homo sapiens
gtaatcctctgcagggttactgtaggtgtcataacgaaacagagtacaaaagtcaccccacatcacccggcccactcttgggaacctttacccacaccaccyctcttcagaaaagagcttctggaatagctacacctcaagctactgagccccttctttaaaaatacgtaaatggggactctcaggggaaaatgggcctcgatagtatagaaaccacttaaggaaacaaagccctgaaaggaaacggggattttcagaagaaatccttgtggcaatcattgctcgttccagtgttcaaaaacggcaaaactggccatcatccaggaagtggcctgccaatccgctggaaatttagtttatttctatcacaactctgggtagcccctaactcgcatttgtttagagtatcacaagataagcaagcccgaagaaactacaaaaacaactttgcctcttcggtaatgcgcaggcgcctctcgctctgttttccgttggccttaagccccgccccttgtgcgtccttcgaggagg

SEQ ID NO: 537963 - DNA, 601 bp, Homo sapiens
ctggcccacctttacctgaggtctggctcttctccacagaattcttgcaaggtaatcatctaatctcggcttagtttcattgctgtatctagtgattttatgctctctgactggggagtagagatagatgggagcacttccttgtaactttgcccattgactctggttttacctatgcatctctgcttcttcttccatacaacagcccttcatatttgagctggccctttgcatattccccccaaatgaaaaaaaaaccttggattctttagccatttatcaaatggcatcttgcagtcctatcaattcttcctcctaaatatctcttgagtctggtttcttctctttacttccatagtcacttagcatggaaaataggacaaacgaccttgtggaaattagtatcaatggctctatttttaatcttcctcttctctggcctcgatgactacagcagtcttctagctggcctcctcactgccattttgccctttccacttcatttttactgtcagcagagcagtcctccccaaatgaaaataygaccatgccatattcctgtttaaaaccattcagcaaattctcagtgcccttcatagaa

SEQ ID NO: 537964 - DNA, 494 bp, Homo sapiens
acagtggagtgagaactaaatatttatggttacaagcaattagaacctgggaatgttttgtaatttccacaaaattttgtctaagttgactgatccatcgcctttccttgtattctcatagcattttataattctcatcataaaatggcacaaattccagtgaagtatcttttaacctgctctccacttgacccccttctaccacaccccaacctgtaagggtggagactgtatatgtcttggtcattcttgtaaacctagcacccagtactttgatgaatgaatagtaggttttcaacacatattcattcaatggaatgacttttaaccttttgttgatgggaaaatcaattttcctaggtgtgcttaccacacatagtggcctggaatggagcaccatttccctttgtctttaacttttaacagttkgattatgtgtctcgatgtgaatttttggggatttatcttatttggtgtcccttgtgtagaacacc

SEQ ID NO: 537965 - DNA, 514 bp, Homo sapiens
  misc_feature (1)...(514): n = A,T,C or G
cactgccacagaagaccctggatggctcctctgggaaactgtggcatgatggccatgtggctctccaggacatcatccctacatctactagtggtgccaaggctgtgggccaggttactcccgagctgaatgggaagctcattggcatggccttccatgtctccactgccaamttgttggtcatggacctgacttgccatctggagaaagctgccaaatatgatgacatcaagaaggtggtaaagcaggaattggaggccccctcatgggcatcctgtgccacacgagcaccaggttgtctcctctgactntaacagcaacttccactcttctgccttcaatgctggggctggcattgccctcaacaatcactttgtcaacctcatttcctggtatgacaatgaatttggctacagcaacagggtggtggacctcatggcccacaaagccttcaaggagtaagaccccagaccaccagccgcagtgagagcatgagaggaagagagaggccctc

SEQ ID NO: 537966 - DNA, 415 bp, Homo sapiens
  misc_feature (1)...(415): n = A,T,C or G
aaggctgtgggccaggttactcccgagctgaatgggaagctcattggcatggccttccatgtctccactgccaaaktgttggtcatggacctgacttgccatctggagaaagctgccaaatatgatgacatcaagaaggtggtaaagcaggaattggaggccccctcatgggcatcctgtgccacacgagcaccaggttgtctcctctgactntaacagcaacttccactcttctgccttcaatgctggggctggcattgccctcaacaatcactttgtcaacctcatttcctggtatgacaatgaatttggctacagcaacagggtggtggacctcatggcccacaaagccttcaaggagtaagaccccagaccaccagccgcagtgagagcatgagaggaagagagaggccct

SEQ ID NO: 537967 - DNA, 518 bp, Homo sapiens
ctagggagtccctgccacactcagttccccaccacactgagaatctcccctccccacaatttccacacagacctccctgaagaaggaggggcctgggaagcccactttgtcatgtactatcaataaagttccctgtactcaaamaattaattaactgattaatcaaaatgtattgaatactaacattatgctaaggagagtcaattcctgcttgtttttaaaaatataattcttcatcattcaacttgaaattactgcccttgaagagctaaactcaaataggagaaactggcattttcctcctcaatattttaatatgaaaaatttcaaacatacagaagagttaaaagaatttatacaccacctaaattctacaattaacatgttgccacatttactttatcacatatccaccctctatctctccatcaagccactttttttttttactttgcagaatttccaagtaagttgcaactatctgtatacctcacccctaaatgcttcagtatgaatat

SEQ ID NO: 537968 - DNA, 518 bp, Homo sapiens
ctagggagtccctgccacactcagttccccaccacactgagaatctcccctccccacaatttccacacagacctccctgaagaaggaggggcctgggaagcccactttgtcatgtactatcaataaagttccctgtactcaaaaaattaattaactrattaatcaaaatgtattgaatactaacattatgctaaggagagtcaattcctgcttgtttttaaaaatataattcttcatcattcaacttgaaattactgcccttgaagagctaaactcaaataggagaaactggcattttcctcctcaatattttaatatgaaaaatttcaaacatacagaagagttaaaagaatttatacaccacctaaattctacaattaacatgttgccacatttactttatcacatatccaccctctatctctccatcaagccactttttttttttactttgcagaatttccaagtaagttgcaactatctgtatacctcacccctaaatgcttcagtatgaatat

SEQ ID NO: 537969 - DNA, 634 bp, Homo sapiens
gctgctagggagtccctgccacactcagttccccaccacactgagaatctcccctccccacaatttccacacagacctccctgaagaaggaggggcctgggaagcccactttgtcatgtactatcaataaagttccctgtactcaaaaaattaattaactgattaatcaaaatgtattgaatactaacattatgctaaggagagtcaattcctgcttgtttttaaaaatataattcttcatcattcaacttgaaattactgcccttgaagagctaaactcaaataggagaaactggcattttcctcctcaatattttaatatgaaaaatttcaaacatacagaagagttaaaagaatttatacaccacctaaattctacaattaacatgttgccacatttactttatcacatatccacccyctatctctccatcaagccactttttttttttactttgcagaatttccaagtaagttgcaactatctgtatacctcacccctaaatgcttcagtatgaatatcattaacatgagttcaatctttgtttatggttcttttaaatttttgggttagttgtcatatagtgaaatgcacaaatattaaatgtgtcattggagggatttttgttgttgt

SEQ ID NO: 537970 - DNA, 611 bp, Homo sapiens
agaaaaaagaaattcaatttctatttattataagtagctcattaggtagtaaaataaccatagtggtggagagttgtaggttttggaagccgttacacccagtcctgctcttcactgctccataagcttgatcccattagtgactttacttacttgaactgcagactcctcatctataaaataaaaaacaataagaaccacctgcttgggattgttaggaggattaagtgagacaatacatgaaaagcatctataactaaggtgcctggcagtaaatggtagttataattaaatatgaaagtagtatattctgcatactgcatttaaggggtatcactggcaaacaggaaatctgaaagagaacaagaggattgttccatacgctgtcaaaggaactggaggagtttggcctatgacatctaggagaatgtacaagacgtatcttaatagatckgtagaattcgcatgtggaagagaaagatgaattctgtgtggctcctaagatgaactagaaccagtggataaagtggtaaagcccaaattttgattcactataagggaagcctttcaaatgactaggctgtccagttggactggaaaactagcaggag

SEQ ID NO: 537971 - DNA, 611 bp, Homo sapiens
agaaaaaagaaattcaatttctatttattataagtagctcattaggtagtaaaataaccatagtggtggagagttgtaggttttggaagccgttacacccagtcctgctcttcactgctccataagcttgatcccattagtgactttacttacttgaactgcagactcctcatctataaaataaaaaacaataagaaccacctgcttgggattgttaggaggattaagtgagacaatacatgaaaagcatctataactaaggtgcctggcagtaaatggtagttataattaaatatgaaagtagtatattctgcatactgcatttaaggggtatcactggcaaacaggaaatctgaaagagaacaagaggattgttccatacgctgtcaaaggaactggaggagtttggcctatgacatctaggagaatgtacaagacgtatcttaatagatctgtagaattcgcatgtggaagagaaagatgaattctgtgtggctcctaagmtgaactagaaccagtggataaagtggtaaagcccaaattttgattcactataagggaagcctttcaaatgactaggctgtccagttggactggaaaactagcaggag

SEQ ID NO: 537972 - DNA, 490 bp, Homo sapiens
atagggtttttgtgagggttaaacgtaagtcttagagaagtacctagattcttacaacagtttgcactatgcaagtgttagttgttattattgttgttattgttttaatgtactcccagcagtgtcatctagttgacgctgttgagttttgtcttgaatgccagtttttttcactcttgtcagggtatctctatggctataagttctttttgctgataatttcaaaattctaagtttaaggccctttgtgagctgagtcctgggtcagatggtatcttggcacccccttgtgaaatgggatgcctgcctctgcttctgagagtrgtagggattccacctcaaatcttccactcaagggagcgctccctccctgcccccagtggcatacaacctcaggagtagggctgtggctgggctttcgggatgaaaattcagtgactaaggtcagggtggtgagggtgaacctccgacaaaagctgtagacacacta

SEQ ID NO: 537973 - DNA, 490 bp, Homo sapiens
atagggtttttgtgagggttaaacgtaagtcttagagaagtacctagattcttacaacagtttgcactatgcaagtgttagttgttattattgttgttattgttttaatgtactcccagcagtgtcatctagttgacgctgttgagttttgtcttgaatgccagtttttttcactcttgtcagggtatctctatggctataagttctttttgctgataatttcaaaattctaagtttaaggccctttgtgagctgagtcctgggtcagatggtatcttggcacccccttgtgaaatgggatgcctgcctctgcttctgagagtggtagggattccacytcaaatcttccactcaagggagcgctccctccctgcccccagtggcatacaacctcaggagtagggctgtggctgggctttcgggatgaaaattcagtgactaaggtcagggtggtgagggtgaacctccgacaaaagctgtagacacacta

SEQ ID NO: 537974 - DNA, 573 bp, Homo sapiens
ttagccatgtgatcttgggcacatgatgtggtctttgtgtacctcagtttccaatctataaaataggcatagtagtatctcctcatagggtttttgtgagggttaaacgtaagtcttagagaagtacctagattcttacaacagtttgcactatgcaagtgttagttgttattattgttgttattgttttaatgtactcccagcagtgtcatctagttgacgctgttgagttttgtcttgaatgccagtttttttcactcttgtcagggtatctctatggctataagttctttttgctgataatttcaaaattctaagtttaaggccctttgtgagctgagtcctgggtcagatggtatcttggcacccccttgtgaaatgggatgcctgcctctgcttctgagagtggtagggattccacctcaaatcttccactcaagggagcgctccctccctgcccccagtggcatacaacctcaggagtagggctgtggctgggctttcgggatgaaaattcagtgactaaggtcagggtggtgagggtgarcctccgacaaaagctgtagacacact

SEQ ID NO: 537975 - DNA, 573 bp, Homo sapiens
ttagccatgtgatcttgggcacatgatgtggtctttgtgtacctcagtttccaatctataaaataggcatagtagtatctcctcatagggtttttgtgagggttaaacgtaagtcttagagaagtacctagattcttacaacagtttgcactatgcaagtgttagttgttattattgttgttattgttttaatgtactcccagcagtgtcatctagttgacgctgttgagttttgtcttgaatgccagtttttttcactcttgtcagggtatctctatggctataagttctttttgctgataatttcaaaattctaagtttaaggccctttgtgagctgagtcctgggtcagatggtatcttggcacccccttgtgaaatgggatgcctgcctctgcttctgagagtggtagggattccacctcaaatcttccactcaagggagcgctccctccctgcccccagtggcatacaacctcaggagtagggctgtggctgggctttcgggatgaaaattcagtgactaaggtcagggtggtgagggtgaacctccgacaaaagctgyagacacact

SEQ ID NO: 537976 - DNA, 379 bp, Homo sapiens
aggctgcaggatggagcctgtgtttgtttaagaaggagcctgatgacatcacgtcggcctcctgctccagaaggctcaggagctgtgaaacggcacagcctcctagcccagttgttgcagacctccggcagggatttctgtcttcaggtcaggtttcaaggtgaaccaggttggaacattcaaggagagacttgggacattatagatttttatactgcccgaattggctgattagccccatacstggtatttgattaatgtctgagagctctaattagcaatgtctaataggctccacatacaccgggatatcgattcttgcctccacaaaactaatctaattgtgctccttatcattagcaagtggttggtgtacgga

SEQ ID NO: 537977 - DNA, 571 bp, Homo sapiens
ggagaggaagggtttcttatccctgatgcaattgacctctgcttctgtgtcgttcccctattggctagggttagaccacacaggctaaactaattccgattgactaatttaaagagagtgacggggtgagtggtttggcgggaaaaacggttatgacacagcaggtaatcagaatgagtcagggtggagcaggtaatcgaaaaaggttgctttatgaggaagttaagtttaaaagtagaaggcaaagaattgaacatactgacataatgattcttgaaaagaaatttagaactttaacacgttcatggcactctgaagtcaaaagcaccatctggtaaagatggtctccttcatttctctacccatagtactagtcttaatttttctgaaaatactaaaatctaaaatttgatcacctggaaattttcytgggagaaacccaaatgggttcatgctttcagccacaggggaagaatcctccatagccctgtctgcttagtgccaccttctagtgagtattactctacgatacctttgtgccatctttcctcttagcagctatttttgtgag

SEQ ID NO: 537978 - DNA, 649 bp, Homo sapiens
tccacagatgcatgctgtcattatgatctttgctgcacaagcattatttaacgtcctcagtgtgattttttaaatttcactctcacaaaagataggtttcctcttcataataaacatgcgtctacttccctttttgaacgtaagatcccaaacaaaaaggaaattgatgtccttataaaaaggagccaatgcaagaagcatctagaagtaactttagatgcagtgtcaagaagtttattagtgacagtcatgtacatagcacagtgtagagtaatgcaaatctgtgcttayaccacccatttaaaataattttagttagcacatgaatttgttgcatataagcagcacctttgacaagttatttatttaaaagggtcagattcaggcattgtttctaaagtagaacttcaatggcaaaatctgaaaatgttattctttcaattaaaaaaagtgagtaggtgtgtgtgtgtgtgcgtttatcactggtttcatgagtattgctgattctcataatagacagattagaaaatctgaccaactctgtattaattatctattgttgcacaacagattactctaatacttagttaaaacaacagacctttgtcagtgtgtggtttttgtgggtcaggtacataaaagaggttca

SEQ ID NO: 537979 - DNA, 649 bp, Homo sapiens
tccacagatgcatgctgtcattatgatctttgctgcacaagcattatttaacgtcctcagtgtgattttttaaatttcactctcacaaaagataggtttcctcttcataataaacatgcgtctacttccctttttgaacgtaagatcccaaacaaaaaggaaattgatgtccttataaaaaggagccaatgcaagaagcatctagaagtaactttagatgcagtgtcaagaagtttattagtgacagtcatgtacatagcacagtgtagagtaatgcaaatctgtgcttataccacccatttaaaataattttagttagcacatgaatttgttgcatataarcagcacctttgacaagttatttatttaaaagggtcagattcaggcattgtttctaaagtagaacttcaatggcaaaatctgaaaatgttattctttcaattaaaaaaagtgagtaggtgtgtgtgtgtgtgcgtttatcactggtttcatgagtattgctgattctcataatagacagattagaaaatctgaccaactctgtattaattatctattgttgcacaacagattactctaatacttagttaaaacaacagacctttgtcagtgtgtggtttttgtgggtcaggtacataaaagaggttca

SEQ ID NO: 537980 - DNA, 649 bp, Homo sapiens
tccacagatgcatgctgtcattatgatctttgctgcacaagcattatttaacgtcctcagtgtgattttttaaatttcactctcacaaaagataggtttcctcttcataataaacatgcgtctacttccctttttgaacgtaagatcccaaacaaaaaggaaattgatgtccttataaaaaggagccaatgcaagaagcatctagaagtaactttagatgcagtgtcaagaagtttattagtgacagtcatgtacatagcacagtgtagagtaatgcaaatctgtgcttataccacccatttaaaataattttagttagcacatgaatttgttgcatataagcagcacctttgacaagttatttatttaaaagggtcagattcaggcattgtttctaaagtagaacttcaatggyaaaatctgaaaatgttattctttcaattaaaaaaagtgagtaggtgtgtgtgtgtgtgcgtttatcactggtttcatgagtattgctgattctcataatagacagattagaaaatctgaccaactctgtattaattatctattgttgcacaacagattactctaatacttagttaaaacaacagacctttgtcagtgtgtggtttttgtgggtcaggtacataaaagaggttca

SEQ ID NO: 537981 - DNA, 649 bp, Homo sapiens
tccacagatgcatgctgtcattatgatctttgctgcacaagcattatttaacgtcctcagtgtgattttttaaatttcactctcacaaaagataggtttcctcttcataataaacatgcgtctacttccctttttgaacgtaagatcccaaacaaaaaggaaattgatgtccttataaaaaggagccaatgcaagaagcatctagaagtaactttagatgcagtgtcaagaagtttattagtgacagtcatgtacatagcacagtgtagagtaatgcaaatctgtgcttataccacccatttaaaataattttagttagcacatgaatttgttgcatataagcagcacctttgacaagttatttatttaaaagggtcagattcaggcattgtttctaaagtagaacttcaatggcaaaatctgaaaatgttattctttcaattaaaaaaagtgagtaggkgtgtgtgtgtgtgcgtttatcactggtttcatgagtattgctgattctcataatagacagattagaaaatctgaccaactctgtattaattatctattgttgcacaacagattactctaatacttagttaaaacaacagacctttgtcagtgtgtggtttttgtgggtcaggtacataaaagaggttca

SEQ ID NO: 537982 - DNA, 649 bp, Homo sapiens
tggttcttgtttggaatctcttatgagttttcagccatgctattaacaggggttttgatcatctgaaggtttaactggggctgaagagcctgcccccaagatgagtcactcttgtttagtggttagcaggaaaccccagctccatgctggctattggcaggaggcctcggtgtttcacaatgtgtacctctccataggattgcttgagtatcttcgcaacatggcaaccggcgtctcccacagggactgatctaagaaagaataaggaagaagcctcaatgccttttatgtcttaatcatgaggtcaaataccatgccttcttytatattctgtttgctagaagcaagttactaagtacagcccatacttaaaggaagaagaattagactctactttttgaaaggaggagtatcaaataattttttaacatgttgcaaaaccaacataagttctttggtataaattgcacttttctattgttggtattcagaacaaaacatttttcacaattgcaatagctacctatattattggattctcagaatacagaacataaatctctttattggttatgaagaaaatgaattcagaggcataaggagctttcttcaggtacagagaagttcagtgtccaactctagacttaga

SEQ ID NO: 537983 - DNA, 660 bp, Homo sapiens
tggtattttaggcgccctgctaatgcactttgttttgccgcagygtggtctcaggaagcctaaagctaaagagaattgagagtggtcgctggcaaagacctctgctaatgcaaatgtcccgagaagctgactgttcatctcagagcttgggagtaggggtagaggtagagactttataggcttggtccaattaggacctgagttatcgggtccaggccttgaaggaaaagacagacacaaatgcaatgctgctcatctttgctctggagggtgcctgtgagctggcaatatctatgtgcaatatccagattttgtggaaaaaccctagaaaagcctctgagtttgtccagagccctgtagcccaaagcctattccttatcctcccacccccaaaactgggtaggtcagagcctgtttcatgccttctttgcccctacttttcccaagcctgggctttagaagcatactcttttgcattcacaaatatcctcagagattgtctttaaccagtagagcagcactgaagctaggagctgaacaagatggaaaagggtaccacattataagaacgaggatcctgagaaagaccatatccaaaatcgcctgtccacacatggacaccaatgcctggcatttccctctacaatcacacagcccttt

SEQ ID NO: 537984 - DNA, 589 bp, Homo sapiens
gtattttaggcgccctgctaatgcactttgttttgccgcagtgtggtctcaggaagcctaaagctaaagagaattgagagtggtcgctggcaaagacctctgctaatgcaaatgtcccgagaagctgactgttcatctcagagcttgggagtaggggtagaggtagagactttataggcttggtccaattaggacctgagttatcgggtccaggccttgaaggaaargacagacacaaatgcaatgctgctcatctttgctctggagggtgcctgtgagctggcaatatctatgtgcaatatccagattttgtggaaaaaccctagaaaagcctctgagtttgtccagagccctgtagcccaaagcctattccttatcctcccacccccaaaactgggtaggtcagagcctgtttcatgccttctttgcccctacttttcccaagcctgggctttagaagcatactcttttgcattcacaaatatcctcagagattgtctttaaccagtagagcagcactgaagctaggagctgaacaagatggaaaagggtaccacattataagaacgaggatcctgagaaagaccat

SEQ ID NO: 537985 - DNA, 487 bp, Homo sapiens
ggctcctgcccaaggctgaagttgcacagtgaagctctcccttgccaggtgggccgcccaaggtcctttggaacactccttctctgtggtttcttcagtgagataagaaaagtctaatgatgcagaaatacaaaggaagtaggtcggaggaggagaacgaagaatgactttgttaaacctggtagtttcatctttctaattgcggagaaaggatggatgcatatcccaaagcagagagttacctacttgggatgatctgattgctttaggggcacatttcccccatcgttacacagacaaactcaagctcaggttcaagtgttggtcttgacccccgtgtccccttgtctgctacatgcttgatgttatacgtgatcctatagagacacgtcatcctcttcatcttcatctgtcctctcactgggaaaaatagcccatgacatttcacattgtttcctgrcccgatgtttgactcagcagtgcctaa

SEQ ID NO: 537986 - DNA, 423 bp, Homo sapiens
gggaagtcctgcagaggcaaagaggctgggtgcagggttggagaaggcagacaaagagacagcctcctgatcatggataactgggagggcttggggaatgtgcattgtggattttattcctttccttcttgcctgcctttcttttttttctttcttcttttctttctttttctttcttcttttcttttttttttttttttttttttttttgagatggagtctcagtctgtcatctaggctggagttcagtggtatgatcacagctcactgcagcctcaaactcccaaactcaagcaatcttcctgcctcaacctcctgggtagctgggactacagatgagcaccaccatgctcactaatttttaattattttttaggacctgatctcactatgttgcccagacaggcctcraactcctgggct

SEQ ID NO: 537987 - DNA, 503 bp, Homo sapiens
gaaatttggaacccttttcctggggcaggcctggatggtggagaggacacagttggctcagcttagagcagcagggacatgtaggctggtcacaggccccaggctggtcctttctggctgtacacatcctccacattttcatcagtrtgtcttacggatattttcccccctgtatttgctatgtcctgaatacaagattgagaagcgttggttaggaagccacttcattttattctccctcttctttatagtctatttgatctttccttgaattcatttttgaaatgtcttctagttgcaattgttagttgttgactgaataagacacccttaaattttccttccagtggtttcttttagtctgctatagagaagagctatagtgccaatgggtgggagttctcaggaaggaaagtctggtttgatgtcataaagaagattttaatcactagggctggccaacgatgaagcaggctgccacataaagccctgagcactccatt

SEQ ID NO: 537988 - DNA, 398 bp, Homo sapiens
tgggagtgaaagttacagggattctgggccaggtgcagtggctcatggctgtaatcccagcactttgagaggccgaggygggcagatcacctgaggtcaggagtttgagaccagcctggccaacatggtgaaatcccgtctctactaaaaatacaaaaattagccgggcatggtggcacccgcctgtaaatccggctacttaggaggctaaggcaggggaattgcttgaatccaggaggtggaggttgcagtgagctgagatcatgccactgcactcctgcctgggcgacagcaagactccatctcaaaaaaaaaaaaaaaattactgggattctggaagggagaggaataaaaatgatgtgtgggacataccaaatagagtgggcggggcatcaaga

SEQ ID NO: 537989 - DNA, 615 bp, Homo sapiens
ctgggttagacaaccacaacttagcagtgctaccatgaatgcataaggatggcctgacatctgggagaaataatgagtttctaacttcccaagtttctatacgttcattttaaatgtggagaaaatgcaaaggtgcagtgtgatggtgtgaaaattcatgagttaaattcctaacccctaaggcgaagcctcgattataaaggtggaaccctgatgaatgggattagtgcctttataagagaccccacagaactagcttgctccttcccccatgtgaggacacagccagaaggcaccggcttctggtttctataaaccagaargcaggtcttcaccagacattgaatctgctgatcgcgtgctcttggactttccagcctccagaactgtgagaaacaaatttttgttatttaaagtttcccattttatggtattttgttatagtagcctgaatagtctaagacattgggttattgttacaacaacaggtagattctttgatttctaggagagtctttccagaaaaataagaccactaatacagaggctttatattctatagaggaatttacagactggtaacggaaaagataggcatattgttttagtctattc

SEQ ID NO: 537990 - DNA, 613 bp, Homo sapiens
cagctgcaaacctcagtgtggatgtgtggcctcactgcgctgggctagtggactccagttcagtttcytaacaaggtgttcaactctgctaagttgatgaattcagaagtttctgaaattactgaggcacttggggtacaggaggagacaatgtatgagatgtgctgaagagtgatgaataggagaaaacgaccaggaaaaccacagattacagccgtgagggatcaagaatggtggtgcggccaggcacagtggctcacgcctgtaatcccagcacttgggaggcggaagcgagcggatcatgatatcaggagttcaagaccatcctggccaacaaggtaaaaccctgtctctaccaaaaatacaaaaattagccaggcatggtggcacacacttgtgatctcagctactagggaggctgaggcaggagaatcgcttgaacctgggaggtggaggttgcagtgagccgagattgtgccactgcactccaacatgggtgacagagcaagactccgtctcaaaaaaaaaaaaaaaaaaaagaatggtggtgtgggtggatgcccaagagtttgaaaagaatggtgatttctatgtgatggtgaaggaatcatgg

SEQ ID NO: 537991 - DNA, 611 bp, Homo sapiens
gctgcaaacctcagtgtggatgtgtggcctcactgcgctgggctagtggactccagttcagtttcctaacaaggtgttcaactctgctaagttgatgaattcagaagtttctgaaattactgaggcacttggggtacaggaggagacaatgtatgagatgtgctgaagagtgatgaataggagaaaacgaccaggaaaaccacagattacagccgtgagggatcaagaatggtggtgcggccaggcacagtggctcacgcctgtaatcccagcacttgggaggcggaagcgagcggatcatgatatcaggagttcaagaccatcctggccaacaaggtaaaaccctgtctctaccaaaaatacaaaaattagccaggcatkgtggcacacacttgtgatctcagctactagggaggctgaggcaggagaatcgcttgaacctgggaggtggaggttgcagtgagccgagattgtgccactgcactccaacatgggtgacagagcaagactccgtctcaaaaaaaaaaaaaaaaaaaagaatggtggtgtgggtggatgcccaagagtttgaaaagaatggtgatttctatgtgatggtgaaggaatcatgg

SEQ ID NO: 537992 - DNA, 611 bp, Homo sapiens
gctgcaaacctcagtgtggatgtgtggcctcactgcgctgggctagtggactccagttcagtttcctaacaaggtgttcaactctgctaagttgatgaattcagaagtttctgaaattactgaggcacttggggtacaggaggagacaatgtatgagatgtgctgaagagtgatgaataggagaaaacgaccaggaaaaccacagattacagccgtgagggatcaagaatggtggtgcggccaggcacagtggctcacgcctgtaatcccagcacttgggaggcggaagcgagcggatcatgatatcaggagttcaagaccatcctggccaacaaggtaaaaccctgtctctaccaaaaatacaaaaattagccaggcatggtggcacacacttgtgatctcagctactagggaggctgaggcaggagaatcgcttgaacctgggaggtggaggttgcagtgagccgagattgtgccactgcactccaacatgggtgacagagcaagactccrtctcaaaaaaaaaaaaaaaaaaaagaatggtggtgtgggtggatgcccaagagtttgaaaagaatggtgatttctatgtgatggtgaaggaatcatgg

SEQ ID NO: 537993 - DNA, 360 bp, Homo sapiens
ctgcaataacaaatttccgtctttagattttacaaagatctcattcatttgatcctcacaaaaattatgtaagatagttagatattttacgtaygttgagatggacactaaacaagataaacatggtgctataaatacataaaacagatactaccttagatggagctgagtattaagtggaaaaataaagcatgcatacagctaccttctgtgtcctcacatgatggggagagagagatagagctagagacaggatagagttagggatggagagatagagagagagatggaggtggagaccgagagagagtgagaacaggctgtggtctatctacctcctcctttaagaaaagtaatgcc

SEQ ID NO: 537994 - DNA, 584 bp, Homo sapiens
ctgcctgtgtattgcaattggccgttaccttaagcactgagccaccagggtttagttcagccatttcaagaagtatatttaacgtcggtagttctgctttattaaaatgccgcagaggtactcttttgtcccttccgtttacagttctctgagagagttctatttttttgttttgttttgtgttttctttcgcattttatatcttgtatttatcctgaacatgttttgtatttcttttttttttaagaaaaggaattcttttgtgtatacatagatacttgcatgatatactgtagtcaacgktcggttcctcgaaaggtcttgctgctgtcaggtgttatgcactccatccatcataactgcatgaaacacatttcatatgtaaataaatgtgggacattcggcaaaaaaaaaaaaaaaaagaatttgttcactctacaaatatttattgattgtccactctctgggaaacattattcttgccctgggcacacaggcgtctatagtcggctgcatccttaaagagcttgcaaagttgttaaaggagaaaaagaaaaaaaacaatgtaatggtggggctatttg

SEQ ID NO: 537995 - DNA, 619 bp, Homo sapiens
tgcagaacagagttagctcctttccaaacttcacttcgtaagcctgttttcacatctgttgaacatggcaatctctcatagtgagccagtggcttcttcggttcttaactcagaaaatttctaatatgacttcatactgcaataagttattgtaaaggtaagctgttcaaatacagttactgaccatgatgtctatagcagagcacagtgtagtgtgaaaatctggacttctgtgtggaatatatcaactctattctctagcgtaaggaactttattctctagaataaagaacatgccatgaatagtgcatgcaaaacactgctttcactcacggtagagccatgaaccttatatccaagagctataactatctgtrtgaatatcaggatctatattttgattatcataaattttgctttttatatcaaggcttaagcaaccagcagttatctatcttggtagattattgaaacattgagggtaaaatcaatgattttgggaaaacctcactatacccaaagaagaaactaaattatttctacaatcaattttaaaagttaaatatggaaatataaatgttaataatatagtagatctgatggaacagagtgcttgcaa

SEQ ID NO: 537996 - DNA, 542 bp, Homo sapiens
cacaaggcagcttcctaaaaacagatggagttttttaacattgataaatctttcttttgtatccagccccaagcaagcacacattactttcattttaagagcaagttctctttctcagattgcttggtatattcaaaacaaaacagaaagcctttggagtttggcctcctcccatctgcctatatgtttgctacccccagggcagaagagacagagggactaagttcagaggttcatatacctatgtagtgcagactgatgtgaatgctgcatctgctgatcttccctctcaccatcaaagtagaagattttcttgtgcatttcaggacaagtgtgtcccagtgctcattctaaagggtttccaactctgggttcttagtgttggtgcatttgcatttgaagggtaccmaaaccagaaagtttgctattagacttcattcccaccactatcatttcagggttttgacaatgcttccacttcaggaagctggacttggcagaaatcagccaaacctaaactcaagtgttcatataaacaccag

SEQ ID NO: 537997 - DNA, 506 bp, Homo sapiens
tgggtggggcaccaacagcaatagcatctgctacagtgggtggttctatctgtgatatcctgacttayggtaggagcaggagctccaaaatgccattacaaaacttgattctaaatggtaaggcttaggaaatccaggcagaaacaatcacaaaactacaaaaaacagtgtgaacacagaggtttgtgtgtgaggtaacaggaataaaaataaaacactaaataaatcaataaaacactcgcacacaatgatattttataccaaaatccactacacataaagaaatcaaatgctaacaaagatagcaaaaaaaaccaacaatcaggacacagattcactccaaataaaattaatgttatgcagcaatctgacaaagactttcaaataagttttcttaagactctcaaataactaaaaaaaaaatccaaggaagaaaaataaataagcaacaaaaatgaaaatgaaacaggaaaaataggaggatgaaaaagaataagtttctgggt

SEQ ID NO: 537998 - DNA, 506 bp, Homo sapiens
tgggtggggcaccaacagcaatagcatctgctacagtgggtggttctatctgtgatatcctgacttatggtaggagcaggagctccaaaatgccattacaaaacttgattctaaatggtaaggcttaggaaatccaggcagaaacaatcacaaaactacaaaaaacagwgtgaacacagaggtttgtgtgtgaggtaacaggaataaaaataaaacactaaataaatcaataaaacactcgcacacaatgatattttataccaaaatccactacacataaagaaatcaaatgctaacaaagatagcaaaaaaaaccaacaatcaggacacagattcactccaaataaaattaatgttatgcagcaatctgacaaagactttcaaataagttttcttaagactctcaaataactaaaaaaaaaatccaaggaagaaaaataaataagcaacaaaaatgaaaatgaaacaggaaaaataggaggatgaaaaagaataagtttctgggt

SEQ ID NO: 537999 - DNA, 561 bp, Homo sapiens
ccatggtttccatctaagctcaggggtcttcttcaaggatagcttggttttggtttctcctttctctctcagcgaggctgggtcaagagctttctttctgggccctggtaacatgatttgcatacatttatcttcacactaaccacattatgttgcatttgtattgatgttcctgtctctcccattaggctgtagccccagtgggaaacaaggcttggctcattgtaagcatccaatgtagataactctggggacttgtggttagcttagtgatgtacaascctgtgcaaaaatttattgccatcattgaagtttcccccttgatcttgcactcaggatgacaggaaggaggatgacactcaaggtaggatgtcatcctccttcctttctgtcttcctgctgagtgcttccttgctttcattccagcagcatttcagaatcagtatagcctcacattcaacctcctccaacccctctaaaacctcttttattctttgctaaaggcttcatcactgaaactctatgtcattgttaacatttgcctttgaaaaccacccccta

SEQ ID NO: 538000 - DNA, 561 bp, Homo sapiens
ccatggtttccatctaagctcaggggtcttcttcaaggatagcttggttttggtttctcctttctctctcagcgaggctgggtcaagagctttctttctgggccctggtaacatgatttgcatacatttatcttcacactaaccacattatgttgcatttgtattgatgttcctgtctctcccattaggctgtagccccagtgggaaacaaggcttggctcattgtaagcatccaatgtagataactctggggacttgtggttagcttagtgatgtacaagcctgtgcaaaaatttattgccatcattgaagtttcccccttgatcttgcactcaggatgacaggaaggaggatgacactcaaggtaggatgtcatcctccttcctttctgtcttcctgctgagtgcttccttgctttcattccrgcagcatttcagaatcagtatagcctcacattcaacctcctccaacccctctaaaacctcttttattctttgctaaaggcttcatcactgaaactctatgtcattgttaacatttgcctttgaaaaccacccccta

SEQ ID NO: 538001 - DNA, 561 bp, Homo sapiens
ccatggtttccatctaagctcaggggtcttcttcaaggatagcttggttttggtttctcctttctctctcagcgaggctgggtcaagagctttctttctgggccctggtaacatgatttgcatacatttatcttcacactaaccacattatgttgcatttgtattgatgttcctgtctctcccattaggctgtagccccagtgggaaacaaggcttggctcattgtaagcatccaatgtagataactctggggacttgtggttagcttagtgatgtacaagcctgtgcaaaaatttattgccatcattgaagtttcccccttgatcttgcactcaggatgacaggaaggaggatgacactcaaggtaggatgtcatcctccttcctttctgtcttcctgctgagtgcttccttgctttcattccascagcatttcagaatcagtatagcctcacattcaacctcctccaacccctctaaaacctcttttattctttgctaaaggcttcatcactgaaactctatgtcattgttaacatttgcctttgaaaaccacccccta

SEQ ID NO: 538002 - DNA, 636 bp, Homo sapiens
ctctgggcttttgctctctctgtgccataatggcaaaaaactgccacacggtctgtgtggctccttagcatgarataataggcacaagaagtggtaaccacaaggcagcttcctaaaaacagatggagttttttaacattgataaatctttcttttgtatccagccccaagcaagcacacattactttcattttaagagcaagttctctttctcagattgcttggtatattcaaaacaaaacagaaagcctttggagtttggcctcctcccatctgcctatatgtttgctacccccagggcagaagagacagagggactaagttcagaggttcatatacctatgtagtgcagactgatgtgaatgctgcatctgctgatcttccctctcaccatcaaagtagaagattttcttgtgcatttcaggacaagtgtgtcccagtgctcattctaaagggtttccaactctgggttcttagtgttggtgcatttgcatttgaagggtacccaaaccagaaagtttgctattagacttcattcccaccactatcatttcagggttttgacaatgcttccacttcaggaagctggacttggcagaaatcagccaaacctaaactcaagtgttcatataaaca

SEQ ID NO: 538003 - DNA, 551 bp, Homo sapiens
tgtgctgagtcatctttcacaggaaccagcttctcaagtctctgggatcctgttttacaggctgttactaaccttcccttggcttccaggccaaggaagaagaaagaataaatattaaccaaaggtacggctgtggcagggtgcccagggcccctccctttccttctctccccgtaccccctgccctagaagctacaataaactgctgatctcccggtttcatgatcatcttggctgatcctgcrgaaaagggacagaggtgagcacctctcagagcagccctgaggctggagaggacttggtggtaacctgctgtttttctgggaggggccctagagctggctaaggagaactcacatgactgcctgggcctgacttccagggaggggctctcaccacaccagactgtttctcagggtaatttcccagttgactggcacaaaggggtgactgcataacactattccctttcttgggtttcgatttcctcctctgtaagatgatgaagttggactccaagaaccgcacctcgtcctatcattccatgagct

SEQ ID NO: 538004 - DNA, 551 bp, Homo sapiens
tgtgctgagtcatctttcacaggaaccagcttctcaagtctctgggatcctgttttacaggctgttactaaccttcccttggcttccaggccaaggaagaagaaagaataaatattaaccaaaggtacggctgtggcagggtgcccagggcccctccctttccttctctccccgtaccccctgccctagaagctacaataaactgctgatctcccggtttcatgatcatcttggctgatcctgcagaaaagggacagaggtgagcacctctcagagcagccctgaggctggagaggacttggtggtaacctgctgtttttctgggaggggccctagagctggctaaggagaactcacatgactgcctgggcctgacttccagggaggggctctcaccacaccagactgtttctcagggtaatttcccagttgactggcacaaaggggtgactgcataacactattccctttcttgggtttcgatttcctcctctgtaagatgatgaagttggactccaagaaccgcacctcrtcctatcattccatgagct

SEQ ID NO: 538005 - DNA, 577 bp, Homo sapiens
ataactaagaaataaccatctctttgctttgctttgtcttacttcatcgtcacaatctgtctgtttttatctgtgcccccacctccaagacctcagagaatctctaaatgaggggaggattggtgtaggtcaggattcagttagtgtcctaacaagataccattgtaataacatcatcatttttatttgggtgttattcaaagaaagagagaaaggtggaagtggaaaagagagggtagttcttacaattccttgaaaatktcttgaaaagataaaggaagttaagccaaacgcaccaaggctgaacttcttggtttaaatagtaggaagacagcaatgcctgattttgccccaattgtccataaacatatcaatgaagactggagggagttcacaaacaaaaacatggtaaaatagaatattaataacatagtcaccagattctgagcataattaacattaaatattatcttactctgcttgggctgctaaagcaaaataccatggcctgggtgatttaaacaacagaaatttattctcacagttctgggggctatgaagtttcagatcaagatgt

SEQ ID NO: 538006 - DNA, 630 bp, Homo sapiens
ctgttatttttaaaactcataggagcaactttcctcttgacatctagygttctcaatgtggaaaagacagtcttatactcatatgctttccattaacttacacagcactgaaaagatgcatagccagtgactgttatctgattgtatccacaagtctcactatttcctttaatcataaattaagatcgaaagatgtattattaatcaactattctcctttaaaaaataaggtgaaatagagcttgggcttaacctcctttagcagagtaacacccgttctttctgcaaacatagtgagtatcctggaattatgagccccaacatacctttgccaggctatattgaagttcatgagatcatcagcaactaaacaaaacatattttctcctataatgtgggatttcagtgatgaacaaaacaaaaggccattgtgcacttttccctcaaatatatgcagcacatattataaatgctgattcccaatttgcataccagtaggtctatccaatcataaaaatgaaatatctgctctattgtatgtgtgatagtaattacccattgtgggacattgatctaattaatgggatttttgcattagtcatcttaccctgcataataaattactacaaa

SEQ ID NO: 538007 - DNA, 630 bp, Homo sapiens
ctgttatttttaaaactcataggagcaactttcctcttgacatctagcgttctcaatgtggaaaagacagtcttatactcatatgctttccattaacttacacagcactgaaaagatgcatagccagtgactgttayctgattgtatccacaagtctcactatttcctttaatcataaattaagatcgaaagatgtattattaatcaactattctcctttaaaaaataaggtgaaatagagcttgggcttaacctcctttagcagagtaacacccgttctttctgcaaacatagtgagtatcctggaattatgagccccaacatacctttgccaggctatattgaagttcatgagatcatcagcaactaaacaaaacatattttctcctataatgtgggatttcagtgatgaacaaaacaaaaggccattgtgcacttttccctcaaatatatgcagcacatattataaatgctgattcccaatttgcataccagtaggtctatccaatcataaaaatgaaatatctgctctattgtatgtgtgatagtaattacccattgtgggacattgatctaattaatgggatttttgcattagtcatcttaccctgcataataaattactacaaa

SEQ ID NO: 538008 - DNA, 630 bp, Homo sapiens
ctgttatttttaaaactcataggagcaactttcctcttgacatctagcgttctcaatgtggaaaagacagtcttatactcatatgctttccattaacttacacagcactgaaaagatgcatagccagtgactgttatctgattgtatccacaagtctcactatttcctttaatcataaattaagatcgaaagatgtattattaatcaactattctcctttaaaaaataaggtgaaatagagcttgggcttaacctcctttagcagagtaacacccrttctttctgcaaacatagtgagtatcctggaattatgagccccaacatacctttgccaggctatattgaagttcatgagatcatcagcaactaaacaaaacatattttctcctataatgtgggatttcagtgatgaacaaaacaaaaggccattgtgcacttttccctcaaatatatgcagcacatattataaatgctgattcccaatttgcataccagtaggtctatccaatcataaaaatgaaatatctgctctattgtatgtgtgatagtaattacccattgtgggacattgatctaattaatgggatttttgcattagtcatcttaccctgcataataaattactacaaa

SEQ ID NO: 538009 - DNA, 660 bp, Homo sapiens
agctgttatttttaaaactcataggagcaactttcctcttgacatctagcgttctcaatgtggaaaagacagtcttatactcatatgctttccattaacttacacagcactgaaaagatgcatagccagtgactgttatctgattgtatccacaagtctcactatttcctttaatcataaattaagatcgaaagatgtattattaatcaactattctcctttaaaaaataaggtgaaatagagcttgggcttaacctcctttagcagagtaacacccgttctttctgcaaacatagtgagtatcctggaattatgagccccaacatacctttgccaggctatattgaagttcatgagatcatcagcaactaaacaaaacatattttctcctataatgtgggatttcagtgatgaacaaaacaaaaggccattgtgcacttttccctcaaatatatgcagcacatattataaatgctgattcccaatttgcataccagtaggtctatccaatcataaaaatgaaatatctgctctattgtatgtgtgatagtaattacccattgtgggacaytgatctaattaatgggatttttgcattagtcatcttaccctgcataataaattactacaaaactcagtggtttaaaacaagaatttatt

SEQ ID NO: 538010 - DNA, 694 bp, Homo sapiens
tgaaagatagaattttagaagttaaagttctgactaacttatattaagaaatctcatgatatttagatgataaagcagtataaggcawgacccatcctccaagttcaaattcagattcttaaaactaaagttgctttagcttttgtctaggacatgcaaggagagtgtgaggtcttttccttagaccactggtcctctaacttgaatgcaattagtatattaagcattgcttattgaaaccttaaattcctgggactcaccccgaagttcctggttcagcgtgtgttggatgaacctgaaaataggcatttaaaataaacacttgaggggattttttgaatgtggtcatgagcccatactttgctgtgcacttcattggacctttctgctaagaagtagaactgtctgagagagataagaggtgacatgtcttattattgtggtatctagatatttctcttaccacctcttctgcttcattaggcaaaatatttgacataggagtgacctaagacaactgtatctttaaaaataacatattacaagcaaagaaacaataaaaagaaaagaatgatttcaaaaacacaatttgagtaagaaatcaagactgagacaaatgagaacaaatttgtatactataaaacctcaattctttgtaataatttaactacagtctttgttcaaagtctccagg

SEQ ID NO: 538011 - DNA, 694 bp, Homo sapiens
tgaaagatagaattttagaagttaaagttctgactaacttatattaagaaatctcatgatatttagatgataaagcagtataaggcaagacccatcctccaagttcaaattcagattcttaaaactaaagttgctttagcttttgtctaggacatgcaaggagagtgtgargtcttttccttagaccactggtcctctaacttgaatgcaattagtatattaagcattgcttattgaaaccttaaattcctgggactcaccccgaagttcctggttcagcgtgtgttggatgaacctgaaaataggcatttaaaataaacacttgaggggattttttgaatgtggtcatgagcccatactttgctgtgcacttcattggacctttctgctaagaagtagaactgtctgagagagataagaggtgacatgtcttattattgtggtatctagatatttctcttaccacctcttctgcttcattaggcaaaatatttgacataggagtgacctaagacaactgtatctttaaaaataacatattacaagcaaagaaacaataaaaagaaaagaatgatttcaaaaacacaatttgagtaagaaatcaagactgagacaaatgagaacaaatttgtatactataaaacctcaattctttgtaataatttaactacagtctttgttcaaagtctccagg

SEQ ID NO: 538012 - DNA, 518 bp, Homo sapiens
aacagtaggaacgtacagtcagttctctggccagttattattggcaaaatgaatgaaaagtacccatgccttcaaggaaacaragcttttcctgccattgctttggcatagtaaggcactgagtaatggggcgtaccatgtcttcaagggcattcttcattgccacaaagcgatgttctaactcagcactctgctgttgactccctactcatgaggatgtggtgtaccttagtgtcagtctggatactggagatagccatctggcccctaagagctcagatcttcttcttagaagctgaagatcaacatccaaggtattttcctctgacatacatatctttcttcactgtccccatcactgggaacagttacctataaaagcctactctcctgccctgggattatgttctttcagctatgagagtcctgcacatgtcctaccttctccagaatgccctctacccagattatggttgtttcctggattaccctaactccatcaaggggggatatagtat

SEQ ID NO: 538013 - DNA, 558 bp, Homo sapiens
tggccagttattattggcaaaatgaatgaaaagtacccatgccttcaaggaaacaaagcttttcctgccattgctttggcatagtaaggcactgagtaatggggcgtaccatgtcttcaagggcattcttcattgccacaaagcgatgttctaactcagcactctgctgttgactccctactcatgaggatgtggtgtaccttagtgtcagtctggatactggagatagccatctggcccctaagagctcagatcttcttcttagaagctgaagatcaacatccaaggtattttcctctgacatacatatctttcttcactgtccccatcactgggaacagttacctataaaagcctactctcctgccctgggattatgttctttcagctatgagagtcctgcacatgtcctaccttctccagaatgccctctacccagattatggttgtttcctggattaccctaactccatcaaggggggatatagtatggaatctttgcagttgacatatgggccagaatcatgtcacttygcccatcaatcttagattacatgc

SEQ ID NO: 538014 - DNA, 644 bp, Homo sapiens
cgaagagaacatctctgctgccagaatataaacttcttgaggccagggcctgtatattgtatcctagtacttagctcagtgcctggtacagttggaattgttttatatattttctgaaaagaggtaggcatgtaataataccagtctgcattcctgaaaaaggatatagacaacatagtccatctgtttactcaaaaaggtagaatagtatcttaccaacttcatttcattgctgagacaaattttcccatgagccatatcttgtcctggcatcccggtccccccatcagagtgcagaggtagcctatgagccctggctgcccatcgttctcagctcagtgagccttgccrttttatcaattactgccccgattggagattttgaaggctcattttctacattggtcctttcaagtataatgtttagatttctcatttcaaaagagtaacatttgcaagtccagaattggactttttctgcagatgcgatgagccacttggatgaatagtatacgagaattcagccaagtgtctgaagcatattactccctgaagaatcaagctaaattaaagttccatccatccttcatatatatgagccacatatggctttttcttgcctctatttacttttaaagtcttta

SEQ ID NO: 538015 - DNA, 644 bp, Homo sapiens
cgaagagaacatctctgctgccagaatataaacttcttgaggccagggcctgtatattgtatcctagtacttagctcagtgcctggtacagttggaattgttttatatattttctgaaaagaggtaggcatgtaataataccagtctgcattcctgaaaaaggatatagacaacatagtccatctgtttactcaaaaaggtagaatagtatcttaccaacttcatttcattgctgagacaaattttcccatgagccatatcttgtcctggcatcccggtccccccatcagagtgcagaggtagcctatgagccctggctgcccatcgttctcagctcagtgagccttgccattttatcaattactgccccgattggagattttgaaggctcattttctacattggtcctttcaagtataatgtttagatttctcatttcaaaagagtaacatttgcaagtccagaattggactttttctgcagatgckatgagccacttggatgaatagtatacgagaattcagccaagtgtctgaagcatattactccctgaagaatcaagctaaattaaagttccatccatccttcatatatatgagccacatatggctttttcttgcctctatttacttttaaagtcttta

SEQ ID NO: 538016 - DNA, 614 bp, Homo sapiens
  misc_feature (1)...(614): n = A,T,C or G
gacatttgtttttataattaaagttttattggaacacagaataattagtcctttaasaactgtctatggctgctttcatgctacaatggcagcatttagcaattgtaacagataccatatggacctcaaagcctaaaatagttaccttctggctctttgcaggaaaactttgccaactcctgttctagagaaagaagcaccggaagatttagaaactgagtttgtncactccaggtaagaaagtatgtataaagacagcaaagcaagaaatgcaaaaggaatatacttgtttctggaaactgtatgactcaagggtgttaggtcattttaaaaagataataatgatgatcatttttaaaatgtttgctatatgccaggttctattatgctaactatctcacattttcgttgacgcttcaccacaaccctgtgaaataaagctataatctttgcttgatgaatgagcaaacaaaaaacgtatatgcataaagaattaaagtgaagtcataaagctaataaatgacggagggggcgatctgaacccagacagtgtgactcctatgctctataccacttgtaaggcaaatataaaatagttctcattgtcagtcttc

SEQ ID NO: 538017 - DNA, 614 bp, Homo sapiens
  misc_feature (1)...(614): n = A,T,C or G
gacatttgtttttataattaaagttttattggaacacagaataattagtcctttaagaactgtctatggctgctttcatgctacaatggcagcatttagcaattgtaacagataccatatggacctcaaagcctaaaatagttaccttctggctctttgcaggaaaactttgccaactcctgttctagagaaagaagcaccggaagatttagaaactgagtttgtncactccaggtaagaaagtatgtataaagacagcaaagcaagaaatgcaaaaggaatatacttgtttctggaaactgtatgactcaagggtgttaggtcattttaaaaagataataatgatgatcatttttaaaatgtttgctatatgccaggttctattatgctaactatctcacattttcgttgaygcttcaccacaaccctgtgaaataaagctataatctttgcttgatgaatgagcaaacaaaaaacgtatatgcataaagaattaaagtgaagtcataaagctaataaatgacggagggggcgatctgaacccagacagtgtgactcctatgctctataccacttgtaaggcaaatataaaatagttctcattgtcagtcttc

SEQ ID NO: 538018 - DNA, 524 bp, Homo sapiens
tgaactcaaagacaggaaaaggatctgcaaccagaactcagagtttaagggtacacgtttagagcagtgatcaggcttaatatggggaattcaggggccagtatcagcgctgcaaagaagctctgatccacactgaaggaaaaacttatgttgaggacattcattaaacatggcctacttattaagttggatggggaatgtggcttaaattcaccaaattggctattttctcctagatggttttatgtttcctatctagctcagaatcggaaaaatcaataacttgacttttgttccaagatggccgaataggaacagctccagtctacagctcccagcatgagcgacacagaagacaggtaatttctacatttccaactgaggtaccrggttcatctcattaggactggttggacagtgggtgcagcccatgaagtgtgagctgaagcacagtggggcatcatctcacccgggaagtacaaggggttggggaattcccttacctagccaagggaagccatgac

SEQ ID NO: 538019 - DNA, 240 bp, Homo sapiens
tgtgccttgggaatgatttgagtgacttgtgcagtgacaggccacgggctgttgaggcaggagccctatcttctagttcacctccaaacctgcaccgcccactcctgtgcctggcaaacatagtagtcactcagttaacgtcaggctcacayagctagccaacgaggtggccaggaccagagcccatactccagaatgggagctgcctctgtgctcggtaccaggaaggggagagaggga

SEQ ID NO: 538020 - DNA, 484 bp, Homo sapiens
cctcctagctgtttgggaggctgaaggaggagggtccgttgagcccaaaagtttgaggttgcagtgagctatgatcacaccattacactccagcctgggcaacaaagccagaccctgtctcaaaaaaaaaaaaagaaaagaaaaagaaaaaggtgttgaattttttttctttttaagtttaagaaactgaaaaagaagggctcaagcttcagtcctggcttgatcctgccccactcttgacctgtgtgtgacctggggcaggtgacggttcccctcagagtctcggtttcctcatctgtgaggtgagagccaaccttacaccctcctttcagacccctgagtgggcctggacaaatgagctgagattgttaacaccacaggacgtcctgagcactggccatgccccaagccctgatctacgacctccrcaaacaccagagccagtggccagggacagcccaacccccgttacctcgtcccacca

SEQ ID NO: 538021 - DNA, 645 bp, Homo sapiens
tggccgtgttgatgcgaggacagmattcctccggcttccacccactacttttgctatcatattgctaggatatttggttattataaaagtaataaaacccattgtagagtcaggcgcagtggctcatgcccataatcccagcactttgggaggccgaggtgggcatttcctgaggtcaggagtttgagaccagcctggccaacgtgaaacccccgtctctactaaaaatacaaaaattagccaggcgtggtggtgggtgcctgtaatcccagctactcgggaggctgaggcaggagaatcgtttgaacccaggaggcagagttgcagtgagccaagattgtaccactgcactccagcctgggcaaccaagcgagactgtctcaaaaaaaaaaatagttgcagaaaagttggaaaataggacacataatccaccagaggacacccgccccccacccccacctcacacacccacgaccagcctcagcctgcatccatcccatctttcttctctgcctacattttttccatcatggactggtgcccgatgacggtgtgtaccctgctgtctccactcaggataatgccctcatcactttccaggtgattacagagctcacagtcacctttacaggcctgggatctgcc

SEQ ID NO: 538022 - DNA, 592 bp, Homo sapiens
cttctctgcctacattttttccatcatggactggtgcccgatgacggtgtgtaccctgctgtctccactcaggataatgccctcatcactttccaggtgattacagagctcacagtcacctttasaggcctgggatctgccatttcttaagcagccctcattgtggttcctgatcttccacgacggtgaattgggctcaagtgagcaggaactaagataaaagaacaagggatggggaagcgggggatactgggctggctgcagacccggaagctggctgtggacaccaatgccggctctacctctcaaagcctccagcttcctccctctgccaaatacagacaacggcaccagcagctcagagctgggaggcaccaaggagctggcaccgtgggatgcccagtgcggagcctggtgcagggtgagcatgcccagttggcctggcccgggcctcctattgccgtgccctggcctgtgctctcctggggacttgggacctgaccggcactggagcccgagttctagtccaggctctgcttctactgactttgcggcccaggacaaatcacagaatcacttaagaccctgtatg

SEQ ID NO: 538023 - DNA, 601 bp, Homo sapiens
ggggtgaaggtgtgactatcgagacagaacaagccatgccgagactggaggccacagtctccttagcaaaaggaacagcaggggcagaggctctgaggtgggatgagctcggcacaggtgagggacagcaagtgtggccagtgcacggtgacccaggggaaaagttgaggtcagagacctcagggagccctgtgggcsaggcaaggtgctagggctttattctaagtgcagcgggaagtcacagaggggctgtcccattttccaaagctctagcagaggctgtatggggccaagaacagcagagccagcataggcaggcagcagcccagtgaggccgaggctgtggcaccactgcagaccaggggctcggacccgtgtggccaggggctgggatcagattcaggatctgctgtctgggggaggcaggctggctgggctgaggagctggacatgaggcaagggaacaagagggctagtaacatgtgtgcagagacaaggggagccccacacatgtgatgaacaaagagagacaggaggctgtcgaagccacttcctcggctgaagctgacctggcgcttctcaggtgggagaggaaaaccat

SEQ ID NO: 538024 - DNA, 529 bp, Homo sapiens
ggtgtgcccccacatgggtcattaagtcctggtgccaggcatgttccctcctctgcccaggggcccatcctggcctgggagtctggagtcatgggccaggctgaaacagaagaaactcaaaagaagcagggagaaggcaggtttaagggccaggacgggggtggctgtgtcccttcctcctgctgtgggaagggacttgagatccgtgtgctttgcttccttcttgcttggccaatccaagcaggggctcagaacagacctcagggctgagcagaggccagtagaccctgagagtcctgccaggctgcagggattctgggtgggcctgcggacatcacatgcacgggagggacggatgctggggtcgcacactggccggcagggcagaggacaggagaggcagggcgggctccgagtctcacgcrttgctgtggatgaatctcctgatctctctgtgcctcagtgcctcatctgtgaaatgggatggttgggccgacctgccgagggaaccaccctctcagcacagtgc

SEQ ID NO: 538025 - DNA, 452 bp, Homo sapiens
gccacactggagggcccttgcccacaaatggatacattctgagtgcagcctctgaggacccaaatgctgtcttgttgtgtgcattagcttgggcacccccasggcagccctgtgagctgggtgggctcagtttccttatctatgaagtggggacacatctctgaaaagctgtaagcatcagtgagctagcacatggcaggagcttggcccaggactgccccatggaaagtgtccaaatggtgactcggatgattgtgattatgacagtgattgtgattatggaagagcaaaagtccatgtctgccctgcccactgctgtgtctacagtgcctagcaccatgactggtacatagtagatactcaaaatgaatgctgagtagatggatgtgtgggtggacaggtgggtggacgaatgggtggatagatggataaatagatggatagataggtga

SEQ ID NO: 538026 - DNA, 452 bp, Homo sapiens
gccacactggagggcccttgcccacaaatggatacattctgagtgcagcctctgaggacccaaatgctgtcttgttgtgtgcattagcttgggcacccccacggcagccctgtgagctgggtgggctcagtttccttatctatgaagtggggacacatctctgaaaagctgtaagcatcagtgagctagcacatggcaggagcttggcccaggactgccccatggaaagtgtccaaatggtgactcggatgattgtgattatgacagtgattgtgattatggaagagcaaaagtccatgtctgccctgcccactgctgtgtctacagtgcctagcaccatgactggtacatagtagatactcaaaatgaatgctgagtagatggatgkgtgggtggacaggtgggtggacgaatgggtggatagatggataaatagatggatagataggtga

SEQ ID NO: 538027 - DNA, 178 bp, Homo sapiens
cctttctccaacctcaagtgccctctgagctcctctgtgggctccctctgcttgtcccttgggtctaagggtggcaatagccctacaaggtacaataaaccccttgttggttttcatcgaccttcacatagttttgamgtagccccttcattaaaactctcctcagtgatgccccttg

SEQ ID NO: 538028 - DNA, 609 bp, Homo sapiens
ttcttttgtagcagcttgaacagactaagatacccttggatgaggagcaactgaggtaaagtgggraaaaaaaaaaacggctccaatgccaagggcatactggacagctctttaacttatgcttggtggttgcttctcatcattttcagttaatcgtaaagcattctacttttgtggatttcaagtccctaggaaaggatgctgaaggaaacgacagttttgtgagaccatcagtaattgtaatgttgacacctctgcattcaaatgggttacaggattaaacaagtgtcatccaaaggaccatcaggatggctagataacagaaaagagagtttcacctgccatactggtttacaaacctggaagagagagtctccggtgtgaactgaaaatgctctctctgaagaacaaagagaaggttagaggttttataaaaaggagaaatgttgcatattgctctttgagaagtttcattggcaccagtaaggttttgaggagctggcaggcttcaactgataagtgagggtggtgcgtaaacccagtctgagagttgcagcaggtcgtctcagtagtcgttagacaaaactggtttcaggttactgcaggcag

SEQ ID NO: 538029 - DNA, 587 bp, Homo sapiens
aaatttatatttagaagcaaaaaaaaaaagcatagagatgtgttttataaataggtttatgtgtactggtttgcatgtacccacccaaaatgattatttttgtagaatctaagttaaacttactatttataatgcataggtaaccattaactatgtacatataaagtataaatatgtttatatcctgtacatatggtttaggtcaccagatcctagtgtagttctgaaactaagactatagatattttgtttcttttgatttctctttatactaaagaatccagagttgctacaataaaataaggggaataataaacttgagagtgaataaccatagtattctgctgcaataaatgtttctaccctcttgcgatagaatggtgtcagatgtctaacatgtttataaacatttttttgaattgaacaggttatgaaaaggatttattaaaagrttaagatactttgttttgaaagtacattgtgatttgcagccacctagcactaaagcatagaacttaaacacgaatccctaaatgaacagattatgttacattaatctgagaattttaaatttagaagctaaaata

SEQ ID NO: 538030 - DNA, 622 bp, Homo sapiens
ggctttctaaagtcacaaagctaatgaggtgcaatttcctcactagaagagaaaagggacaaaagctgggagacaaatctgactggctctattcctaagtatttatcctggagctcaagtactttaaccggcaagtgtctgagcggctttatatcttcttgtggtagagaaatggaaatgaaagattcaaaagtttgaaatatactctgctttagggaacaaaaatgtgggaagaataagtctccacattgccgttgaagctgcaatagcctggtagcaatttgcaatgcttataagctttcctcccccagatcatcaacatatggttgcatgagttagattggcatccttggatgcattctatgccctttgagattctctgagtctatgtaatacgtgaatttgacttattccatagatgttggggataataaagttgccagattagaggaaacttataacgtgtgcaaggtggacaaaayacctcttctttccagattgttgtttgcaagttagtgattatctacagttgtgcccgtaccatccacttttatcagtttattttatgctttgaattgatcaatctaccttaaaaaaaaggatatattgcaacagcatccca

SEQ ID NO: 538031 - DNA, 626 bp, Homo sapiens
tgggacaagcgccttaacaccccctgtgcttaactttcctcatttgtacaaatgggataatcatagtccttacttcacaggtttgttctggcatataacaagtgctccataaatgtggtcctcccccaamaaactctagtcccatgcaaggaacacactatttggcatattggttagacccttctttcatcttttgcagtgttcgagtttctatcttcccagtccctaactccttgatgcctttggctttccctaatttatgcccttatgcaaactgtgacttcgagcaccttgggctcttggcatcacctagcagctcccagcctcctcctgataccttgtgactctgattttggaccacagccttggacctggctgctgattttttatttttagtatcgacttcgtgtgccctcaggtttcacttttgttctaggctgctcagcaaggtacttgtctctttgttctaaggaagaggtacttctgtctgacttttgttgaaaactccttccctctgctcctgattcacatcctccaagttttcctggttccttctccctgtgccgctgcttggagtcttcggttcctccctgtgtcatcttctcttctcagccattaagttgacc

SEQ ID NO: 538032 - DNA, 516 bp, Homo sapiens
gctgggacaagcgccttaacaccccctgtgcttaactttcctcatttgtacaaatgggataatcatagtccttacttcacaggtttgttctggcatataacaagtgctccataaatgtggtcctcccccaaaaaactctagtcccatgcaaggaacacactatttggcatattggttagacccttctttcatcttttgcagtgttcgagtttctatcttcccagtccctaactccttgatgcctttggctttccctaatttatgyccttatgcaaactgtgacttcgagcaccttgggctcttggcatcacctagcagctcccagcctcctcctgataccttgtgactctgattttggaccacagccttggacctggctgctgattttttatttttagtatcgacttcgtgtgccctcaggtttcacttttgttctaggctgctcagcaaggtacttgtctctttgttctaaggaagaggtacttctgtctgacttttgttgaaaactccttccct

SEQ ID NO: 538033 - DNA, 639 bp, Homo sapiens
gattttcacactgtgttccaaaacatttcctaatatagacggtgaactccatgtgttaagtttgaatgagaagattttccagtttacacagaaagttgctgttatggtacttccagttcctcctagtccccaaagactttttttttttaatgaattcctctttttatctttttgcctatcattaagttaaatctatggttcatttgcctcattctttattttatgaggctttaaaaattaaaacatttttagaaaagtcatattaccccactgacaactgcattacatctaaaaacaacttaattaataaagcatacayacccaaacaaagtactggagcaagatggaatactagtctttcataatcagaccaagatgagaaattatcttgggtactttcacaatacccatgatttggtactaaatcattaaatcatgtactaaacgttttctggatgccatcagtttctgaaagaatgatctgtgtcaattaatcttaaaaggattcttaaagtaaaaagattttcaaataaaaagcaaatgtatgcaaatataaatcccacaagtctacaaaaagggttcagagccagctaatcactcatgcccctccacacacatacacacacccttaaccctcac

SEQ ID NO: 538034 - DNA, 639 bp, Homo sapiens
gattttcacactgtgttccaaaacatttcctaatatagacggtgaactccatgtgttaagtttgaatgagaagattttccagtttacacagaaagttgctgttatggtacttccagttcctcctagtccccaaagactttttttttttaatgaattcctctttttatctttttgcctatcattaagttaaatctatggttcatttgcctcattctttattttatgaggctttaaaaattaaaacatttttagaaaagtcatattaccccactgacaactgcattacatctaaaaacaacttaattaataaagcatacacacccaaacaaagtactggagcaagatggaatactagtctttcataatcagaccaagatgagaaattatcttgggtactttcacaatacccatgatttggtactaaatcattaaatcatgtactaaacgttttctggatgccatcagtttctgaaagaatgatctgtgtcaattaatctwaaaaggattcttaaagtaaaaagattttcaaataaaaagcaaatgtatgcaaatataaatcccacaagtctacaaaaagggttcagagccagctaatcactcatgcccctccacacacatacacacacccttaaccctcac

SEQ ID NO: 538035 - DNA, 644 bp, Homo sapiens
tcaatatatacattaacattctcattttctaatgctgtgctcctttctcccaacaccccacccccaaaggagcttttaactccccagtccctgtcctgaaccactgaagggaaactcaaaaatactttgttcctctacaaggagctaagaatcgaagctttaacttgcttcaggacagtacaaaatgctaccataaaaatatgaaagcctaatatctcctatacacatgtgatgtcatgtttactgcgtgagacagtctgttattctctgattgtctcatacatgttaggtccatttcctccgtaagtaacatgaggatcagggccatactccaaattgcctttgtttatataatagcaatgtaggcattcaataaaacagtagcttctggttgattgtcataactcctatgacatacagtaactcttgtctttaataataataactattattattattatgctaactaacacatatgctccaggyattgatttaagcgtattatacttacccattaagtccttttaaggactgtaaggtggttacccttgtaaaaataagtaatgcaaaatctaagctgttggaactcaaaagtattttgagccttcaaggaatgtgaattacagggcctgagctacgtgaca

SEQ ID NO: 538036 - DNA, 497 bp, Homo sapiens
  misc_feature (1)...(497): n = A,T,C or G
nnnnnnnnnnnnnnnnnnnnnnnnnnnatatgttgtaacattaagttatgcattcacttattttcagtctctctcactagataaggctttacataatccaccactgtgttcttcagcccctatcacagtatttggaacagtacctggcacatagtggtagctccataaatatttactgagtgaatgaatgaatgaatgaaacaaacacaagaatgaaggaaaatttcaactcttggtgttagtagttacaggctttgaacaaattctataacttcattgagcttcagttttcttatttataaatgaggctaatgatgaaaacctgtggtacctaccacagcgttgtaggaattaaaggagatgatgcatatgagaacagatttaaatgtcaatggatcttattctttcacactttcaatctggcattcatatttttcctgttcttatcctgcctcctgccatctargtaactccattttgtcaattaattaaacatc

SEQ ID NO: 538037 - DNA, 511 bp, Homo sapiens
ctctacctggtcttcgcctgcattattcctgcctgggcctctgcagagtctcccaacaggtcccctgccttgattctaatccacctcccactcatcattgtgtagcccaaacgatccttataaactgccaatcagacccaaagtcgctgttcagagaacagaccccagatctcattgtctggctcctgcctacttttccatcctcttctgggccytctaccctccagccacaccaagccccttactttgcctgcgcagatcacactctctcaggcctcagtgtttttaggcactgttccttctgcctggaccatcctctgtataccttgttcctggttaagttctcatcctttaagagaggtggagtgtcacctcctctttgaggtcctccgtgactctgctctgtgtccctacagtctttgtacatggctctactttgctgcttatctcactgcatacaaatttatctgttgacatggctccttcctctgctgggctgtgagcaacttgt

SEQ ID NO: 538038 - DNA, 624 bp, Homo sapiens
tgaggacagactgtaactgggcagaaatggagcctcccaagagaaacagggctgggctggggcttttagtacaaactcaagtgggtgattcccccggcctgaaccagttccacctgcgtctccacttcagccattgccagtgacctcaatccaggtaactgaatcagccgtttccccaagggagtgagggagagtgagttggcctatagctgggccagaggaggtctgccaggagtctgggaatggggagggtgacacccgcagccccagcctcctggggtgtgggtatggatcaccttgtgtagcgcctacttagggacaaggtttcatacccaccatcgcatttccagggagatgagagtggaaagaccctgggcgctggtrggactacaccctggtaggtcccctcaggaaagttcagaaatttagggcctccttttggcattctctggaccaagtggaggaaggaacatccgggagggaaaggacaaagaacctggggtgatggtaacttcaggtattttttgtaaggagggaacagggcatggagtaagggctctgatgctccccacccctccataacgtagatgctcatctaccatgccttaacaaacccagagagac

SEQ ID NO: 538039 - DNA, 624 bp, Homo sapiens
tgaggacagactgtaactgggcagaaatggagcctcccaagagaaacagggctgggctggggcttttagtacaaactcaagtgggtgattcccccggcctgaaccagttccacctgcgtctccacttcagccattgccagtgacctcaatccaggtaactgaatcagccgtttccccaagggagtgagggagagtgagttggcctatagctgggccagaggaggtctgccaggagtctgggaatggggagggtgacacccgcagccccagcctcctggggtgtgggtatggatcaccttgtgtagcgcctacttagggacaaggtttcatacccaccatcgcatttccagggagatgagagtggaaagaccctgggcgctggtaggactacaccctggtaggtcccctcaggaaagttcagaaatttagggcctccttttggcattctctggaccaagtggaggaaggaacatccgggagggaaaggacaaagaacctggggtgatggtaacttcaggtattttttgtaakgagggaacagggcatggagtaagggctctgatgctccccacccctccataacgtagatgctcatctaccatgccttaacaaacccagagagac

SEQ ID NO: 538040 - DNA, 654 bp, Homo sapiens
ctgactaaattgctaaaagtcagacatcgtgtggaaatggattttggtaccaacctacatgaagaaagatcacttagcgttctcctagtgcaccgaggttttcctttgaagtctgttcaagggaaaggttttgctttccgacaacataaaaattattctcctggactgtgctttgagtttatcaatttgtggaggtcatatccccagcaaaactacaaagaattgcattcagcaagcatcgaagacctttgtcatgtagaaacactatatgctgagatgatctagggtagaggggaaagggtatttttaaaaaaagggagaatcaagggcatgataaactttattgccctaaatgcatacttttcttttattcttcaatttatacatcaaagtattaaattataaaaatatttataatcctctcgtttgcaagtctttatattgctgttgatggtgctgatgaccatgatgattgtattttccctaaacactatgcatccctagagttctttgaacattttcatacttcataccgcataatrttaggggttaaaattatgccaaattagtgatagctcttattatttcaacacttattttcactagcccttgctgagcctccaagctttgtgcaatacctgcatttatctttgt

SEQ ID NO: 538041 - DNA, 640 bp, Homo sapiens
agctgactagaatgtgctgataagagaaatgacagatgtgtcacaagaaattatgaagaatataaaattgaagaatattaaaatgtgtggtaagaagacaaggaaagtatgcttgtaattggagttccagagtraaagaagtggggccaaaatcatttgaaaaattagttgcccaaattgtgcaaatttgccgaaagctaaaacccacagatcagaaaatctcaataaagcccaagaagaataaatataaagaaaaccacaccaagtcacaaaaactattgcttaaactatgtgataaagaaaaatatctgaggcagaaaaaaagactaattacttatagaaaagtgaagataacaattataatctgacttattaccagaaacagtgcaacccagaaaaaataaaaaatagaatatttgaagttccagaaaaaagtaaaggttgtcaaactagaattttatacctagaatgaataatttttaaacatgaaggtgaaataaaggtgagagactcctttgccagcagatctgtactacaagaaatgttaaggaaagttctttaggcagtgagaaaatgataccagatacaatttagatccatgcaaaaggatgaatagtgtcagaaatagtaaactgtggca

SEQ ID NO: 538042 - DNA, 640 bp, Homo sapiens
agctgactagaatgtgctgataagagaaatgacagatgtgtcacaagaaattatgaagaatataaaattgaagaatattaaaatgtgtggtaagaagacaaggaaagtatgcttgtaattggagttccagagtaaaagaagtggggccaaaatcatttgaaaaattagttgccmaaattgtgcaaatttgccgaaagctaaaacccacagatcagaaaatctcaataaagcccaagaagaataaatataaagaaaaccacaccaagtcacaaaaactattgcttaaactatgtgataaagaaaaatatctgaggcagaaaaaaagactaattacttatagaaaagtgaagataacaattataatctgacttattaccagaaacagtgcaacccagaaaaaataaaaaatagaatatttgaagttccagaaaaaagtaaaggttgtcaaactagaattttatacctagaatgaataatttttaaacatgaaggtgaaataaaggtgagagactcctttgccagcagatctgtactacaagaaatgttaaggaaagttctttaggcagtgagaaaatgataccagatacaatttagatccatgcaaaaggatgaatagtgtcagaaatagtaaactgtggca

SEQ ID NO: 538043 - DNA, 514 bp, Homo sapiens
ggttacacccatttggactaatccttcctggatgtctagaaacagtcctctccgctctgaaaatagaccctgattgcctttatatttagacttcaaagcctaatatattgaaaagagagttaattttcccgtagcattctggaagtcttacacataagcaaagaaatgaccggttatactcttctrtaaaggaatcctggaggtgtatgttgatttaatacctattggctaaaattccccttggtatccaaaccctgtcagagcggctgatttttattatttgtgagacttgcttcattccattttgtttgaaggtttcattggaagccagcagtgatttctgtagtttaagactctaaaaataatcaaatctgttttttcttgttaggccctagcggattataaataagaagaaaaggaataaaaacctcaaagtatattgatcagagtgctgaatagtactttcattcttcaaggtgggtattagctctgtttttccagatagggaaggttg

SEQ ID NO: 538044 - DNA, 514 bp, Homo sapiens
ggttacacccatttggactaatccttcctggatgtctagaaacagtcctctccgctctgaaaatagaccctgattgcctttatatttagacttcaaagcctaatatattgaaaagagagttaattttcccgtagcattctggaagtcttacacataagcaaagaaatgaccggttatactcttctataaaggaatcctggaggtgtatgttgatttaatacctattggctaaaattccccttggtatccaaaccctgtcagagcggctgatttttattatttgtgagacttgcttcattccattttgtttgaaggtttcattggaagccagcagtgatttctgtagtttaagactctaaaaataatcaaatctgttttttcttgttaggccctagcggattataaataagaagaaaaggaataaaaacctcaaagtatattgatcagagtgctgaatartactttcattcttcaaggtgggtattagctctgtttttccagatagggaaggttg

SEQ ID NO: 538045 - DNA, 582 bp, Homo sapiens
attaatgagcattgtttgggctcctggcacattagcattgctggcatcaaggggacaaagatgggtatggcacagtccttgcttttaagagtttgccatcaggtagaaggcaaacatgtctcgatttgtcacaatatagtatartaagtgctgtaacaggttttagggagtgactttttctttcctgtagtgtaagacagggcactatggttagttggattgattcaggttttcaaatgtgttgtttaattttttattaagaccttcatgattcatattggctccttatcctgcctgacttgaatgcccgactattgacctctctgcttcattctggctatagaggctgagcttcatgtgtagactgtactttaaatatacagcagcaaataaaaggaaaaggtagaaatcgaaaggggatgagaaaaataaatcattaatacagtttcacatatgacataatttgtgccaaagacacagcttttgttttaactaagaattgggaaaatcattgaaatgaacattttatatataatgactgttcaagcaagaaggactattcctcttctcactctatggtat

SEQ ID NO: 538046 - DNA, 625 bp, Homo sapiens
gtattttcgtgtacccttaattatccatttaaaaagctaattattgctgttgtggtggtggtggttgcatgtatataygtgtttcaaaaccatctgacacagcctattcaatgctttcctctagttcatacctctgtactggtttactgtgtctgccacagaaattgccaccaaggtagcttaaagtaatggaaatctgctctctcattttttcgaggctacaaatctgcaatcaaggtgtcaacaggccatgctccctctgaaggctctgcggaagaatcctttcttgcttcttcctagttttgatggttgctgccaatccttggcattccctggcttgtggctgcaacactccaatctctgcctcaatcatcacatgaccttccttgtgtatctcctttgtgtctctgtgttcaaatatttcttccctttctcctgtagatataccagtcattggatttagggttctcttgatccagtatgatcttatctcaactggattatatcttcaaagaccttatttgaacgccttatttccataacggtcacatttccaagtaccaagggttaggacttaaacataccttcttgggggccacaatttaacctattatatcccactaca

SEQ ID NO: 538047 - DNA, 615 bp, Homo sapiens
tgaagatttctggctggacttggccatttgtgtgtggatatggcaggtctgattatgcaattcttcctagtcccatccttcctttcagcttagtctctaaccctgaactctaccacgaggacatcagatgtgggagactgaccacagctaagttcctgtcttttggccacagtgattgaattctgtttatctgtagcttaggttcattattaatgtagcagtctaaatagaggaaaaaggataaagagaaagaggagaaattgtttttgaggcaagttggttcttttcccagttttctaagttagtccaagctggtagtccagccccacgccaaacacataggtaaccaagcgacttctgaataaatgagtcatagtatctagaagaaaaaaaaattgcaaagcttatttttaaaacttgataaaactgagatagagagaattctagtgatttgctcaagatcrtaccaatagctagatgcaaagctgagaccaggacctagatatctgcactcagaatccactttttattatgacttttgttatttaatatatagctttattttttgtaaaattgatactattacagtagaaataagctcacatgtcatacaaa

SEQ ID NO: 538048 - DNA, 610 bp, Homo sapiens
gggtgggctaagaaaatctgaagtccactggggagacagccaggaaggaaagatagtgaaaaggctagagttccatggcatgagctgaagctttttgaccacaggcagcagccagtcagtaaaggagattgggaaaaaaaaaaggggagcaattttacaccagtcactattagagactctcgggtcagggaaagtctaagccttcttttaaaagtccttccaacagattaagccctgcccatttaaaataatctctcttttgattaaagttaccccatggaattttaattatattcataaaatcatttcacatcagcatttagattagcgttagaataaccgggagaatatgtgctcctgatgcaaaatggtggctgtctctctgccatcttccataagacactatcccgtgtagctcatcctatctggaaacacataagaaacacataagacttctgtctsggaaaggtagtttggcctaactatacggacatgtcagaaggccatcatatcctcctagtactttgataaaattaagcagaaaattccatatgtatttgaaagtagtaattaaatgaactctttgcttcctaatttttggatcaaataa

SEQ ID NO: 538049 - DNA, 533 bp, Homo sapiens
tcacccttgctgttctcatgatagtgagtgagttatcatgagatttggttgtttgaaagtgggtggcacttccctcttcacrtgctctctctctctctgtgccaccatgtgaagcaggtccttgcttcccctttgccttctaccatgattgtaagtttcctgaagcctcccatcatgcttcctgctaaacctgtggaacattgagtcaattaaacctctttacttcataaattacccagtctcaggtgattctttatagcagtgtgaaaatggactaacacagcatataaacaactgattcttagggcactaaggggaagataaagaatttatctgacagactcatttcatattagttcttctcaagagcattattctccattttcatgtggctaatttgcagagggcctgcatgatcctgctgtttctcacatattagcactagcaggtaagcctgcaggtaggagacaaaagtttgagctgtggcacgaaggtgatcactggctcaccatggggcagagcactatggcagc

SEQ ID NO: 538050 - DNA, 440 bp, Homo sapiens
ttatgaagtttgtgacatctttctgaggccaccctgatggtagctcttgaattggtcctcgtcagagcaattctacacaattctagaaagcattctacacgagcagaatgctcttcaacttagtgcactactaatttggaaacagtttgctatttcctttctatctgtggtcttattcccttttttatctttcttagatagctttcctgtttttctataaatgccttaggaccaatgattctmtaatctcactgtatgttgttattattgagagaatattttaaaaatgtcaatgccggtgtgccactttaaggcattctaatttaattggtgttctaggaattggtattttttaaaaagtccccccacccctgggaattgttatgtgtagccagagttgagaaccactgtattacaaatgtcagcttccctggttcaca

SEQ ID NO: 538051 - DNA, 655 bp, Homo sapiens
ctgttttccccagactaaggtgtctattgttttacaaactagatctatcaggagctatgtacctggctgaaaagaaccagatagtcaatgaatgcctcatctcttaaccagcaagtcagtttatggatgattcagtagtccctcaattccttggattgaaaacctgggcatttttttctcagttgatatatgtgtctgctttcagaatcagaatttgcctaaagctcttaagcagaaagataagtacagatactttatcagtcagacaagcatgttggaaactttcagaccattggttctatgatgattagcaactttcttaagttttctgttttagattagtcttctaaaaaataacgagagagaatttgtataaattacatgacagcattcatttatctttaaaattctaytgtatgactaaaggatctcattccagaaaaaaacagtcacgggaattattcatgttgatcagaaattggccagagatatattgctctcaaattgggacgcttcatgaatagactcagcactaaaattgagattaaactagaaggtatgtgcttccccttttttggttaaaatcagcagtaaaatcaaaagttgtctgaaaagaagtgttccaaaatccaaagacatctatgacttgtagttg

SEQ ID NO: 538052 - DNA, 513 bp, Homo sapiens
gggggccacgtggcagtgtaccaragggtaccttctgcccgcctttcctcacacacatccacaagcctgggcaggaaggtatgatccggccggcctgcggctcaccttcactccgacagcctcactgctgcgggaatttgccagaatactttagctgtttaccttgtcttccagttgacgtccctgagaaacatcttttggtggttggaggtgggagaagtaaaagccgaaaatgatggaggcagggctaggtggaggcagcatcgcctggtctggctgtgttctggctggctggcaggccacgtgcccaggagagtggcgctctgccccggccactggcctaccaccagccgcctacactggggcacgagtgggcacagggcatagcctgatgtgcccacggaagggacccctgcgaggtgccagcaagccaaagctggcggccttctccagatgggccgtgggaaacaggaagacaagggtgcgcccggggccacacacagggaagggcag

SEQ ID NO: 538053 - DNA, 540 bp, Homo sapiens
cttcctctgcttcattaacattttaacatccatcttcctaaagtttgttgatatctgtattgtgctaatagatccgtttcttttttttacttcttaaaaaaagatacataatatttatacatatggatggggtacatgtgatgttttgttatatacgtagatcacataaatggtaagtcagagtatttagggtattcatcactttgagtgttaattgtttccatgtgttgggaacatttcaagtcctccattctagctattttgaaatacatgttattgttaactatagtcatcctattctgctatcaaatattagaacttatttcttctaattatatgtttgcaccctaaccaacctctcttcctcaacttctccctcccasgcccttttcagcctctcatatctatcgttctactttctactttcatgagatcaagttttttagctcctactcatgagaacatgcgatatttgtctttctgtgcatggcttatttaacttaacagaatgaccattagttctgtccatgttgctgcaga

SEQ ID NO: 538054 - DNA, 634 bp, Homo sapiens
acctaactaggaatatagtaaatattatatgacaatagtatttaaactgttttctaataaatttgacatcagatataatagataatttatgtaaaattttacctcaagaagcaattaaaaatataaataagcctataatgattaaagtattttaaagaaaagtccaaaatctacccacataaaaagcacctgctccaccatcatggatttaagttttaccaaaccatcaagttacagataatgtatttgttaaaccaaatgttctccacactatagagaaggggaaggtgccaaaattaatctgaggctaatgttgccctgattttataaccaaatgagataatacagttagactgaaagaataagacctagtttttggtagcagaatagggtgactatagttaatgataatttgatatatatttcaaaatcactgaaagaattaaactggaatgttcctaacacaaagaaatgacaaatgcatgcagtgataaatatcccaatyaccttgattttatcattccacatttcattattatacaatatcacatgtaccccataaatatgtacaactataaaagtttacgtatccataaaaattcaaaattaaaaaaatgagacaatgcaaagcaaa

SEQ ID NO: 538055 - DNA, 502 bp, Homo sapiens
aaccaaaagaaacgtataaagaataagaaacaagaaaatggttacctgtaggggatgaggggaaaaagggtggaagagtaaaaaagtgggaaaaaccytatctaagtatatccttgtatatacttttgaattttgaaaatatattttacaaactctaaaaactaagtcaaaatgattttttatcctttgtttttaaaaaaataggtaaagaaaaataagtgtatctgttatcaaactgataaccacataacatagtagtctgactgtacaccttaactgaaatgtatttgaaggataaaaataactcagagtccatagatattaattagtagttcactgtaagtaatggtattggtatagtattgtgaagctattttattagcattgtagaattaagcaaatgagtaaatgtattgatgtgattagcactgtagaattaagcaaatgagtaaatgtattgatgtgattgggatttcaggtattcaccaaggaacaagaaagt

SEQ ID NO: 538056 - DNA, 554 bp, Homo sapiens
cacctttgaaaggactggttaatcagggtataggcaatctgttaatgcaaaaagttcagctacattttgccctgccctgtggtttcagtggttctctgaaggcraatgatccacatgtctgaaactcataaaaagggcagagccattttatttttatttttgtgacttaaaagaagaaatttactgtttcagttttggcagctagaagtctgagatcaaggttttggtgggattggttccttcccgggcagtgaggaagaagctgatccatgcttctcccgtggttgctggtggtttgctggccatctctggtacaaccaatattttaatcatccaatgaatcattcctcctattatgacttcttgaatcctatgacctttccttcacacctagcttaagattataaactaacctcccaaactttaatcttcatagagatataagtctttagacatcaaaaatcttttctttgtctttaggtttcagaagtttaattattatgtgtcttagcaaggatttccttagattcatcctgtttgtcatttgccctgct

SEQ ID NO: 538057 - DNA, 596 bp, Homo sapiens
ttttaatcttcaggtcatatcctattttaaaatgtgaaagtaaaaatggtactttaaaattgttaagaaatatgcttgtttagattcgatgtatcttttggggtatgaaaaggagactttaaaacatttctgagaaaaggtggcagtcaaggcttatgaagccatccatagaaagaactagcttaccaatcagacttgaagtctgaacaaaggctttgctatttttaggatcctttactccatttagtggcaggaatggaagctggggggaacactatgggtggatcatgagctgctccacacagagattagctcccagaaggctgcattgaytggaacaattttgttataaatgtaaggagatgtttgagagcatgctagagagcaattgattcccatttgggcctcatatcttaaatcttgaaaaatgagttcctcttgctggcatctgttatgaatgatttacaaatgttagccatgacataatgttgccaataaagtagggcatctttttaggctgtggttcacatttctgtgtccttaagatactgtttcaacaaagagatgcagggtgttattttatcctgccaaaaata

SEQ ID NO: 538058 - DNA, 655 bp, Homo sapiens
aaactcataaaggatcaaagaaacagaagtacgtaagcccctgttaccccttycagactcttaagtttcttgtctgtcccctttgggctatacaccagaactttcaaatcagaggagtttagggttagtaattatagcaacctgtttcttcttttaatccatgtaaatgtcaggtagggtccctagtttgaaaacaatttctacatcaaaatagtgtgatctttgtccaaagaaggcttcatgagagaagttaatctgttaaattgaccacagggatggtgtggagaatcattagaatcatttgggaattccttttgcagttttagatgtacctttttcatcacacattttcatggggaagttgtattttagaaatggcccaaagtcattgtcaagtaataacactgtttagtcaaagaaacagggtggaactagatagtacatgattgttgatcttaagtgccttttaaactagttttacagacagttccaagagaggtgttccaggtactccttaaacaaaggtggcattgttgaactttgtgtggcaacattcatgcctatgtcctgatgtttctgtttacgtttttgaatgttccatgactttttaatcatgtgtcacgaaaagtagcacagttgaagccccataccttct

SEQ ID NO: 538059 - DNA, 457 bp, Homo sapiens
atctgtattgtcagttggacagctaggaaacaggttgtgtgtggatggctatgcgtggccaccatcccttttctagggttgctgctgctggaagctgctttgaggctactagaggacctttgaacttatctctagggaattgtagttggctgggcccgggttaggtgctggagtgggactgctgtagggaaaagattaaaggccctctcccttgctcctatctgccacctgagagagtattgccagcctgattcrtttagtgtgaacaagcagccatgatcagaagaagctgacacctgctgagctgagctccaacagcctaagaccctagcttttgtgggggggtggtttagactctgaagtcatggggctgataaggtaatgactgctggttttcaaaatgctttctccttcattgtttgattggatccctccttctgtctcatgagattgtcag

SEQ ID NO: 538060 - DNA, 457 bp, Homo sapiens
atctgtattgtcagttggacagctaggaaacaggttgtgtgtggatggctatgcgtggccaccatcccttttctagggttgctgctgctggaagctgctttgaggctactagaggacctttgaacttatctctagggaattgtagttggctgggcccgggttaggtgctggagtgggactgctgtagggaaaagattaaaggccctctcccttgctcctatctgccacctgagagagtattgccagcctgattcgtttagtgtgaacaagcagccatgrtcagaagaagctgacacctgctgagctgagctccaacagcctaagaccctagcttttgtgggggggtggtttagactctgaagtcatggggctgataaggtaatgactgctggttttcaaaatgctttctccttcattgtttgattggatccctccttctgtctcatgagattgtcag

SEQ ID NO: 538061 - DNA, 502 bp, Homo sapiens
ctgcctcagttttcttatcactaaaacagcagtaagtaacagtgacccctttacagggttattgtggagactaaatgagataaaataaaaatcacttagccactgttaaaaagtaatatcatcatttataggttttttttttagagtgtgcgccgagagagatgaggcgtgtatcacaccgttatttttcttctgtttcagatgrccctgacttttttcgtttgtggaagtactgttgtagtctgttctgtaattctagacagtctgacgtgtgtattatgatttagaagcttgttaaatagccaaaaccggctcctgccatgaacaacttgtggagcaaatcgggctcagtttgttctttgccgggagatgtattttgtgagccaatgttcatacgttaatgataagttttactgcagccatttgggcttaattgcattttgtaagagagttgtgttgaggtttctgtaagaagtgatttgattaaaaacctctatatcca

SEQ ID NO: 538062 - DNA, 632 bp, Homo sapiens
tatattatgcaagatactctatatagcttcagtaggaatggctgagctcttggattattggcatacaggctgtagcccacacacaacagcgaggcaggcacactgggccaggccagcctccaattcagaagtgctccttaatttgatagaaacaatgtgctaaaaagctcagatggcccaacctctaagccaggtggccctcctgtagccctcatgcagcatgtgaagtgtcagggttctattatactccactgggtcctgcccctggggtcaaactgggaggtaaaggcctggggactcacccatgttcacaagagggtgctggggtgtcctagccctggtcggyctccacctggatgatgcacctcttgtttcccttagtctgttttcttcttccctctgatgctcagagttgggaaatcgagaaaagaaagaagctagagagaaaggccagggttaaggtttggatgggcttccttgagggcaaaatcctggcactcagcattgaacctggcatataataagtgctcaataaatatttgttgaataaaggaacttggggtagggagggtgagcttgggggctggagtgtgactcaagtggtccctaaagccctacttgttcctaaagag

SEQ ID NO: 538063 - DNA, 510 bp, Homo sapiens
gctgtatattatgcaagatactctatatagcttcagtaggaatggctgagctcttggattattggcatacaggctgtagcccacacacaacagcgaggcaggcacactgggccaggccagcctccaattcagaagtgctccttaatttgatagaaacaatgtgctaaaaagctcagatggcccaacctctaagccaggtggccctcctgtagccctcatgcagcatgtgaagtgtcagggttctattatactccactgggtcctgcccctggggtcaaactgggaggtaaaggcctggggactcacccatgttcacaagagggtgctggggtgtcctagccctggtcggtctccacctggatgatgcacctcttgtttcccttagtctgttttcttcttccctctgatgctcagagttgggaaatcgagaaaagaaagaagctagagagaaaggccagggttaaggtttggatgggcttcyttgagggcaaaatcctggcactcagcatt

SEQ ID NO: 538064 - DNA, 615 bp, Homo sapiens
tcctcccaaggggaggaactagcccacgtcctcatatggtagaaagggtggaagggcaagggggygctcttttcaacctgaagcccttgtatgaggtgctaatccagagcctggatcttgtgcacactctctctctcttgctgtaagtaaacactgtgccactagagcctgatgtacatgttgtctgttctcacgaccttgactcatgcactggtctcttctgtggggggtacttatacaacttttaaccttggtcatacagcctgagtactcaatgaatggtaaaacaataagaccagttcacacagcagttgctgggagtcaacctttgtgtttggataaatgagaataatgcaagcttgaaggtctggcaaggcccaggtaaagagactttaccttggatgttcacaaactttttggccccattgtcagggcaactctgtgacaccttcctgaaggctgttcaggatgagagcaacagtctggggaaaagcagattggagaccatacctctggtcactccccatcgcagagctacggctcttgcctgggtagttcccacctgctgttccctctttgctgagtagtcttctcacagggtgctggacaacaata

SEQ ID NO: 538065 - DNA, 509 bp, Homo sapiens
tggatttatctatttccactccatgtccattaccaccagcatctgatgccccaarcccttttgtagcatccccagcaattgttctcacagcctctgtttgcacacctccagccacagagacacacttctcctgaagaaggaaaagcttgaaccctatcctatatcatttgggtatttctttcccctgaactgtgccgtcaaagttcaggtgccatctcaggggagtggcattgtttcaggggaatggtctgcctgtcagtggctccaactgaatcagggagggggatataaacgtgtgaaggtgtaacctcccattggattctccttgcctgctgtctagacagagccaatttatcaagatgggggaattgcaatagagaaggagattaattcatgcagagccagctgtatgggacatggaagttttattattactcaaatcagttacctcaaaaattcagggatcagtgtttttaaggataatttggtggatatggggtcagaaagtg

SEQ ID NO: 538066 - DNA, 666 bp, Homo sapiens
ttggtgatcagataagataatttatgtgaaagcactacacaaactgttaaatgtttctgtctgtctgtctctctctctctctctctctctctctctctctctctctctctctctmtatatatatatatatatatatatatatatatatttgttattagagaaaccaggtcatttatcatatgtacttatttcaagtgcccaggttgtgtgaggctttttggagaaaaagagaagtacacagaagaagttagtgagcagaggtggctagttagaacagattccagacatgcaaataaataccaacccacatatccaggatctgaaagaaatcagatcgtgcataggcatttgcttttctctacttgatttcttcttcgctttctgtctcagcattttatggttatggctgccacagcctagggccaggctagagctctgggattatctgctagaggaaatataaaattataaattatgtacaaaatatgaatagaggtatgtggataagaacagagagatgaatatctagctcaaggatgtgccatcagtcttggatagcttccattctgagccctatatccaaggtcaaccccatttctccagagcaggatgtactattcctttataaattgctttgaaacgtctttataaaggtttgtgcatatt

SEQ ID NO: 538067 - DNA, 550 bp, Homo sapiens
cacattcccccgacactagcgctgggtcttaggctaccractgggcaacctcacctccattattgcatctaagccttacagcagccccatgggaaaaaagctgtcgtgaaacgaagctcagttgagtgtcacaaagggtcacaaagctaggtattcgacccaccgaattggagtccagggctatgggactccaaagtccacgttctctccactgtaatatttaaaaataaaaattaaacaactaaatcaaaaaccaccgctgcttttcaagtgctgccaagacctcaagctgaccaggtccctggaaaaaccctgggaggactctggaggaggcggggttagggtgtagcaagactcctgaccccagaaggtagatacggcctagacgacgtcactagaaattgcccggggcgtcttctctccagcaaccttctgcaccgccttccacctgggtagtctccctccccgtcccggcccttccaggctccagctccccaccccctccctacaggaaggaaatgtgacagcacaagccgttcgccatcaccca

SEQ ID NO: 538068 - DNA, 662 bp, Homo sapiens
tttttttttctttttagagatgaggtcttgctatgttgctctggctgttttggaactcctggcctcaagcagtcctcctgcctctgcctcccaaagtcctagaattataggcatgagctaccatgccttgccaagagaaattaaatcaaaagaaaaataaaataccaatatcttacatatgtacacaaaacaaaaagcttctctggtacataaaaaaagttataactaaagtaatagaccaactggaatgattcaatagaaagttcataggaggcagtcgtgtgctataaaatggtttaacaatcaactcttgtaaggaaggtggaaatccctgatttgtagagtctgccaatttcttcagtgtaaatacccccaatatggctgatcccaagttaccaacatgataccrctgaatgtggagctgggaaaagaaatgttaagttggactttattaaaatatgaaactcctgctttgtgaacaatacaaaagtcacagactaagagaaatgcttccaaaacacatatctgataaaggacttgtgtccaaaatatacagtgaactcctaaaactcaaaaataagaaaatgaataactcaattaaaaaatgagcaaaagatctgaacagacacttcaccaaagaagacatacagatgacagttaag

SEQ ID NO: 538069 - DNA, 560 bp, Homo sapiens
aatgcccaagtcctagagatgatgttagggctgtcccaaagccctgcttgggtaagcaattgacccagatggatgcaggcttctcaagtgccctcagccattcattccctcatctcatcctgcactgttcccccttccgccctgccccatctcagggagggccggtaacagctttggagtgctgctwcctgccagggctgctgcttcccagatgttcaatgatgaaaccctgtcagcaggagcacctgcctggggtggcagcaaatgagaatcatcatatcttggactcatccccttccccttccccaagtttatcttgagacacccagactacacccactagaaagatgaaatgtacttgtcaacacataccatctaaaacagaattgccagagtggatgagcaagaaactaaaatatgcgtgttaaacatacttatgtagataagggaagatgttagcaatatcaggcaagaacaaatcattatttaaaaaaatcccaagtataaaagttacttaggaagagtataatcattgaaatggaatagctagctgaagaatg

SEQ ID NO: 538070 - DNA, 518 bp, Homo sapiens
aatgcccaagtcctagagatgatgttagggctgtcccaaagccctgcttgggtaagcaattgacccagatggatgcaggcttctcaagtgccctcagccattcattccctcatctcatcctgcactgttcccccttccgccctgccccatctcagggagggccggtaacagctttggagtgctgcttcctgccagggctgctgcttcccagatgttcaatgatgaaaccctgtcagcaggagcacctgcctggggtggcagcaaatgagaatcatcatatcttggactcatccccttcyccttccccaagtttatcttgagacacccagactacacccactagaaagatgaaatgtacttgtcaacacataccatctaaaacagaattgccagagtggatgagcaagaaactaaaatatgcgtgttaaacatacttatgtagataagggaagatgttagcaatatcaggcaagaacaaatcattatttaaaaaaatcccaagtataaaagttacttag

SEQ ID NO: 538071 - DNA, 623 bp, Homo sapiens
atgttagggctgtcccaaagccctgcttgggtaagcaattgacccagatggatgcaggcttctcaagtgccctcagccattcattccctcatctcatcctgcactgttcccccttccgccctgccccatctcagggagggccggtaacagctttggagtgctgcttcctgccagggctgctgcttcccagatgttcaatgatgaaaccctgtcagcaggagcacctgcctggggtggcagcaaatgagaatcatcatatcttggactcatccccttccccttccccaagtttatcttgagacacccagactacacccactagaaagatgaaatgtacttgtcaacacataccatctaaaacagaattgccagagtggatgagcaagaaactaaaatatgcgtgttaaacatacttatgtagataagggaagatgttagcaatatcaggcaagaacaaatcattatttaaaaaaatcccaagtataaaagttacttaggaagagtataatcattgaaatggaatagctagctgaagaatgtcacagatagagttagaagcttagattgagatgtcttcttagrgaaaaagaataaaaagaaaatagagaaaatagcaaggaaaa

SEQ ID NO: 538072 - DNA, 620 bp, Homo sapiens
gagctttgccctaaaccctggctgcatttgccagagctacaggaagctgcacagaatgtagggatggactgactaattaatgcccatgtgattccagaaaggatttaagaagactcacaaaaatagaacacaagatagaaggaaatgaaaaagctacaagagaaaaaatagggacacaaggaaaatgcaggtaaaaagagatcacctgaaaygcaggaggagttaagctaggtgtgcggccaggtccaccacacagaggaggtagacctcagatttggctctgagcttcctagtggccaattcaacaaggaaaagagaatcagaaagggatttatttggtgtctataagataaaagccacaagttgctaaggagcagcacatcttttctctatagtgagttttgagagaaatgggtactgggggtccccttggaaagaaacaacaaggacaaatgacctccctagggtcttggcaacttggtggcagtggaggagccaccttgggcctgggctcgggtgggaaagcaaggagcaaatcagcaggctccgctccaggcccccccactcctccctcaccttgagcaactgctgggggtggcgggagtgcacctgtctgtggc

SEQ ID NO: 538073 - DNA, 620 bp, Homo sapiens
gagctttgccctaaaccctggctgcatttgccagagctacaggaagctgcacagaatgtagggatggactgactaattaatgcccatgtgattccagaaaggatttaagaagactcacaaaaatagaacacaagatagaaggaaatgaaaaagctacaagagaaaaaatagggacacaaggaaaatgcaggtaaaaagagatcacctgaaacgcaggaggagttaagctaggtgtgcggccaggtccaccacacagaggaggtagacctcagatttggstctgagcttcctagtggccaattcaacaaggaaaagagaatcagaaagggatttatttggtgtctataagataaaagccacaagttgctaaggagcagcacatcttttctctatagtgagttttgagagaaatgggtactgggggtccccttggaaagaaacaacaaggacaaatgacctccctagggtcttggcaacttggtggcagtggaggagccaccttgggcctgggctcgggtgggaaagcaaggagcaaatcagcaggctccgctccaggcccccccactcctccctcaccttgagcaactgctgggggtggcgggagtgcacctgtctgtggc

SEQ ID NO: 538074 - DNA, 620 bp, Homo sapiens
gagctttgccctaaaccctggctgcatttgccagagctacaggaagctgcacagaatgtagggatggactgactaattaatgcccatgtgattccagaaaggatttaagaagactcacaaaaatagaacacaagatagaaggaaatgaaaaagctacaagagaaaaaatagggacacaaggaaaatgcaggtaaaaagagatcacctgaaacgcaggaggagttaagctaggtgtgcggccaggtccaccacacagaggaggtagacctcagatttggctctgagcttcctagtggccaattcaacaaggaaaagagaatcagaaagggatttatttggtgtctataagataaaagccacaagttgctaaggagcagcacatcttttctctatagtgagttttgagagaaatgggtactgggggtccccttggaaagaaacaacaaggacaaatgacctccctagrgtcttggcaacttggtggcagtggaggagccaccttgggcctgggctcgggtgggaaagcaaggagcaaatcagcaggctccgctccaggcccccccactcctccctcaccttgagcaactgctgggggtggcgggagtgcacctgtctgtggc

SEQ ID NO: 538075 - DNA, 624 bp, Homo sapiens
ctgcggttcccagagatgttgagggagggcttggggcaacacttctggacttttaaggagccaccaggcaggacttaagagatctgggttgagtcccagctcctgtctggagcttgctgtcctcttcatctttattgcaaataggtacacatgcagtcttccatcttcactgtactgcagatcacctgtggagcttatatgaacatacaggccctactctggagattcagcttcagttggtctggaatgtggcatgggcatctgtatttcctgcacgctcccaagggaattctaatgtacacagcttgggttgaaacctaccagactaggtggcctcctgcagtccccacctcagctccagaatctaatcgccctgtgcaatggagatcatctgcccctccttggtaaggagggaccaatttcacttctaatcattcccagtctcttggtggactattgtattgaccactgaactttagagtagggctcggaacacagattcactaaggagggacaaagaaaagctttcaggctaaaagggaactttgggaccatctggtactacttctttacctcrtatagtcatttcagaagacctcctggttaggtggccagaggctctgc

SEQ ID NO: 538076 - DNA, 608 bp, Homo sapiens
cacatcacaggactctttgcagacactcctaagtaccagcccagaggctggtagctcttctgggtggctagatctagragagaaataccaatcactgcaatttggctctcaggaagtcctattccaagggtgtgggggagagcaccacatcaagggagaaccctgtgggactaaaggaatctaaacagcagcccttgagtcccagatcttccctctgacatagcccacacaaatgagaaggaactagaaaaccaattctggtaatacaacaaaacaatgttctttaacaccctcaaaaaatcacgctaacttaccagcaatggatccaaaccaaaatgaaatccctgaactgccagaaaaagaattcagaaggtcaattgttaagctaatcaaggaggcaccagagaaaggtgaagtcctacttaaagaaattttaaaaaatgatataggatatgtgataaacatcataaaaaatgatataggatatatcatataagatataggatatatgacaggttttccttcatacgttacctgatacttttgcctcataactcttaagattctttccttcatcttgactagataatgtgatgaatatgtgccaa

SEQ ID NO: 538077 - DNA, 627 bp, Homo sapiens
caaggaactcaaacaaatcagcaggaaaaaacaaacaaacaaacaaacaccccagaattgggcaaaggacatgaatagacaattctcaaaagaagatatacaaatggccaaaaaacatatgaaaaatgctcaatatcactattatcagggaagtgtgaataaaaaccacaatgcaataccgccttactcctgcaataatggccataatcaaaaaatcaaaaaatagatgttggcgtgaatgtggtgaaaagggaacacttttacactgttggtgggaatgtaaactagtacaaccactatggaaaacagtgtggagattccttaaagaactgaaagtagatctaccgtttgatccagcaatcccattcctgggtatccatccagaggaaaataagtcattatatgaaaaagatacttgcacacgcatgtttttttttgttktttttttttttgtcttttaacagccaacagtttattgtacactagtcttgagcagcttcaatctgaattcatctccccaggacaggaagaagtcaggagatctcggggagacagagcttatatcctttcttattcagaactgccacaacccctatccctcaccagtcaggccccacatcacaccag

SEQ ID NO: 538078 - DNA, 522 bp, Homo sapiens
tggttcccgcccggatggggaaacctggactgcgtgggctcgggmgcctggcaggcatgcggggcctctaaggcttggccactgtcacgggtcctgtggttgttgcttctcccctcgccacgcccttctcctgggacggagattcattccctggcgggtgtcggggacctgggcgcagattcattcccctggtgggtgtcggggacctggcgctcttgcagggacgccccccggagtctgatacgtggactttaagatcagacgcttcggggccgggctgggaaaaactggcggaaaatattacaactctactctcaatgccaggctgttgtagaagctcctgggacaagccgtgaagtctccgcaggaggcttcagagatatactaggcggctgctcagttcgccaaggacttttccattgactcacaagcgccgcctggaggaggaggccgcgctggacgcgccggcggcgcctttgcctgggggagcgcagcccggagctgtggcgtggccgcgctggg

SEQ ID NO: 538079 - DNA, 509 bp, Homo sapiens
tgcaccaactggctccaggtcacactatgcattaggagcaggatgaagacctaccgataccaaatctttgcattttactagtcctcagtaccrttcctttacccactctgcaggagaaagcaagcacaaaaacacaacttacgcaccttctttcttttcttccacaatatgaaatgagtgtttactgccattacaggccctgtgctaaactttaggacgggaccaacaaactatgctttcagaccgcaggcccactgcctgtctttgtatggctcacaggctaaaatggctcttgcaattttaaatggttggggaaaaaggatcacaagaataccattcttcaacacatgaaaatgatgggaaattcaaatttcatgcatccataaataaagtattattggaacacagctcacacccatctgtttacatatcatcaaggcagctttcacgctacaaaggcagttgaatagcaacagagatggcacagcccaaaaggcctgaaatatttc

SEQ ID NO: 538080 - DNA, 509 bp, Homo sapiens
tgcaccaactggctccaggtcacactatgcattaggagcaggatgaagacctaccgataccaaatctttgcattttactagtcctcagtaccgttcctttacccactctgcaggagaaagcaagcacaaaaacacaacttacrcaccttctttcttttcttccacaatatgaaatgagtgtttactgccattacaggccctgtgctaaactttaggacgggaccaacaaactatgctttcagaccgcaggcccactgcctgtctttgtatggctcacaggctaaaatggctcttgcaattttaaatggttggggaaaaaggatcacaagaataccattcttcaacacatgaaaatgatgggaaattcaaatttcatgcatccataaataaagtattattggaacacagctcacacccatctgtttacatatcatcaaggcagctttcacgctacaaaggcagttgaatagcaacagagatggcacagcccaaaaggcctgaaatatttc

SEQ ID NO: 538081 - DNA, 509 bp, Homo sapiens
tgcaccaactggctccaggtcacactatgcattaggagcaggatgaagacctaccgataccaaatctttgcattttactagtcctcagtaccgttcctttacccactctgcaggagaaagcaagcacaaaaacacaacttacgcaccttctttcttttcttccacaatatgaaatgagtgtttactgccattacaggccctgtgctaaactttaggacgggaccaacaaactatgctttcagaccgcaggcccactgcctgtctttgtatggctcacaggctaaaatggctcttgcaattttaaatggttggggaaaaaggatcacaagaatacyattcttcaacacatgaaaatgatgggaaattcaaatttcatgcatccataaataaagtattattggaacacagctcacacccatctgtttacatatcatcaaggcagctttcacgctacaaaggcagttgaatagcaacagagatggcacagcccaaaaggcctgaaatatttc

SEQ ID NO: 538082 - DNA, 414 bp, Homo sapiens
tgggagcagggaggccagcacttccatagtctgggaatccacgttggggaagcttcattctgttatgtgtggcctaccactccattaccgcctctatataaaattacattcctgattaaaattttagtgccgaacattttatatgattacagacagaaagtcaaaatttgcatttaaattgacatattaaaaccactaaagagggtagaacagcaaagcaatcttgaggagtcttttaagagagggtgaggcgcttggaggatttttccatttctgtcarcacagaccctgacccttcccaaattccactgaagtgcatgttgttcttgattctacgcaggcaggcagactcagttctccaggcttttacttgccagggcccagatctttatgattcattcatgtcttcaataa

SEQ ID NO: 538083 - DNA, 419 bp, Homo sapiens
tcaaggaatcttcagtctactggtgtctgagagacctgaacaatctaaccacgatgtattgccaaagctgatgagacagaagcaggggaaaaatgaaacaggatcccttggaagggagaygtcactcctgctctgcagtcgtgggaaaggctgcagagagaaggcatttcctctacacccaaccttgaccttcagcaagtcccttagcctcccgttgagtggcaggcaacatgtaaacagcagctatctcttagagggcaggagttctatgaatgcacttattaatcactgtgaagctgatgaaaacgatcaccataaaactatgacacactccttttcttttccaagaccagtagtgctgaaaggccttcttgtcccaggcttatggtatagacaggtacctcatatcaccatgaata

SEQ ID NO: 538084 - DNA, 556 bp, Homo sapiens
cacggttggattgtgtgacaattcaccatcatcaagaatgtggaaatctctcattttgtctgtgacccctctcaacttctcaactctgggaggctgagtcgctgggatcacttgagtccaggagttcgagacccgcttggccaacatggtgaaaccccgtctctacggaaaaaacaaactattagtcaggcttggtgacgcctgcctgtagtctcagctattcgcagggccgaggcccaagaagcgcttgaactcrggaggcggagcttgcagtgagcccggattgtgcctgtgtactccaacctgggcaacagaaagagactccatcatacacctacatacaaaaggaatctgagtaaggtggaaagtataaaggaggttagcagacgctacgaagaaaagggatgggatggggaatgaagacaagtggataattgggtcctgaaatacagaaagatggaataagtgagttctagtgtttgatagtacagtatgaaaattttacttcacaagaatttcttgcacaattccagatggtttggtaagaaacttccta

SEQ ID NO: 538085 - DNA, 601 bp, Homo sapiens
ctgcacggttggattgtgtgacaattcaccatcatcaagaatgtggaaatctctcattttgtctgtgacccctctcaacttctcaactctgggaggctgagtcgctgggatcacttgagtccaggagttcgagacccgcttggccaacatggtgaaaccccgtctctacggaaaaaacaaactattagtcaggcttggtgacgcctgcctgtagtctcagctattcgcagggccgaggcccaagaagcgcttgaactcaggaggcggagcttgcagtgagcccggattgtgcctgtgtactccaacctgggcaacagaaagagactccatcatacacctacatacaaaaggaatctgagtaaggtggaaagtataaaggaggttagcagacgctacgaagaaaagggrtgggatggggaatgaagacaagtggataattgggtcctgaaatacagaaagatggaataagtgagttctagtgtttgatagtacagtatgaaaattttacttcacaagaatttcttgcacaattccagatggtttggtaagaaacttcctaactttctcattatgctggtttttaaggtcttctctttctgct

SEQ ID NO: 538086 - DNA, 480 bp, Homo sapiens
ctgcataacacaatgatcaagaggcttcctgtgagcccaacattctcatgctttaatagaaaacttattgtaaaatttgcactctactctataacatagaaatgtctatcatttctataaatactatgcagtctcttctgatatatctgttatcctatcatacaagagcagatggctgggattttatcacagttagagggtgttttgagatgggctgcaaatcctctggagaatttgatttggagactcaattagtcatgacaagttaggttatgctgcagtaacaagttggctcctgaatctcaatagcttcataaaacaaagctttcatatgtccagtgttgggcattgggaagtgcaccaaatagtgcctcagggactcaggctatggaggcttcaccatcccaccaccgtatcatctgracacacaacttcctttgtcagcatgatgggaaagaaaacatggagaattgtacacca

SEQ ID NO: 538087 - DNA, 509 bp, Homo sapiens
cttcatatcatcaaatatctggtcagtgtttgggttttcctgattgtttccctttttttwaaaaaaaataaacagcattgttcaaagcaagggctatataaagtccatctattccaattggttcatatgtcacttataaaactttttaaatccctaggttctctctccatctcatcattttccttataatttgtttaggaaactgatcctctgtcctgtagcatttgccacattctggatattgctgattgcatccttgtggggttttatgtttctctgttccttgtgtttcctgtacatttgtaattcaatttatgtggtcctaaccaccagctgcatatatattgttaggttcatttgtttcatttatctttcaatttttagtttttaaaaatttaccttttattttataattatataaaatctcttccaaaactaaatctgtaaagctaactatatttggataagtctaatttgtttgtctcttttactgtcttatctccctctta

SEQ ID NO: 538088 - DNA, 566 bp, Homo sapiens
gcatatatattgttaggttcatttgtttcatttatctttcaatttttagtttttaaaaatttaccttttattttataattatataaaatctcttccaaaactaaatctgtaaagctaactatatttggataagtctaatttgtttgtctcttttactgtcttatctccctcttaataaaatagcacyttttttttttttttttcttgaggcagagtctagctctgtcacccaggctagagtgcagaggagtgatcacagctcactgcagcctcaacctctgaggctgaagcaatcctttcacctcagcctcctgaatagctgggactctgggactacaggtgtgtgctaccacacctggctaattttttttaatttttgtagagacaagggtctcactatattacccaggctggtcttgaactcctggctcaactgatctgcctgccttccaaagtgttaggattataggaatgagccactgtggcagacctaggaaaatttttttttaattttttttttgagttggagtctcactgtgttgcccaggctgcagtgcagtggcacc

SEQ ID NO: 538089 - DNA, 566 bp, Homo sapiens
gcatatatattgttaggttcatttgtttcatttatctttcaatttttagtttttaaaaatttaccttttattttataattatataaaatctcttccaaaactaaatctgtaaagctaactatatttggataagtctaatttgtttgtctcttttactgtcttatctccctcttaataaaatagcactttttttttttttttttcttgaggcagagtctagctctgtcacccaggctagagtgcagaggagtgatcacagctcactgcagcctcaacctctgaggctgaagcaatcctttcacctcagcctcctgartagctgggactctgggactacaggtgtgtgctaccacacctggctaattttttttaatttttgtagagacaagggtctcactatattacccaggctggtcttgaactcctggctcaactgatctgcctgccttccaaagtgttaggattataggaatgagccactgtggcagacctaggaaaatttttttttaattttttttttgagttggagtctcactgtgttgcccaggctgcagtgcagtggcacc

SEQ ID NO: 538090 - DNA, 620 bp, Homo sapiens
tcagcactgaattagttttctgagaagggagcatacatgaaatggagataaaattatttttaaaaagtacaagaatatttccagagctatggtagatatgcttaaactaaaagagcttgacaaatattgaacaaaatgagtaatactttaaaaaattgagccaaaattgaatactttgaaatattgaacaaatattgaacaaaatgartaatacttaagaaatgctttctagaggtatcattgtaaaatcttagaaaacaggagtgttccatttatctagtgctgtgtggcagaccacttcaagatttcgagacttcattaatatgtgaaacagcttgatgtagccattccacaatgtatacatatatcaaaacatcatgtgtgcatcatgttgtgcactaatagatacaatttttgtttgtcagtgttaaaactaaattttaaaaaacatggcttcaaacaacagcaacattaattttactcacacatctgcaggtggggcaaagctcagctcatctctgttctacttcatgtcagctctggcagctcaaaggctggggttaaagtctttggaaagctcactcactcgcatgcctgggcaacgggaaaactaaaaaaca

SEQ ID NO: 538091 - DNA, 487 bp, Homo sapiens
atgcccctcctcactggcccttcacaatgtagctgtttgctttttcctaggtcagcaggaacacgtgtctctgacttcttgctctgcttctttcgtatctgaaatcaaaatctagatgtaaggggctcatgatgaagccaagtccacccagataatttccctttcttaatgtcagttgtgccatataacataatctaatcgcagaactgacagccatcaccctcattgtactggggattattcaaagtctatacaccaggacctgaggatcttgggggtcatcttagaataatatctaccacaatcatggattatacttaaagtaaatggcatacctttgaccagctattggaatgtcacaaaggagaatttatttgcatatgctttcttgagtggcagagtagaaatctcattgaagtagatattgaagtatgtatytactgaagtatgtatggggcattatgcacacaataataatgtaaaaaag

SEQ ID NO: 538092 - DNA, 579 bp, Homo sapiens
taaaatagagacggtaatctccacagcacagagcactgtccccctccttggattctctttgggaacagtctgacaacccagtccttgagctcatataacatgattgtgcccagagaaactgcctggctgaccagaccacaaagggagatgcactaggaccagcccagtggtagcaggggcaccccctacctctaaggccttgccagtcagacctccartgagccacagccagggaacaaacaaccagcactgacgaataatacctctcccatctctggacagagtagttaacaggtaggaggattacaggactccaattattgaggatctatctaggggtgtggtcataggcatgtccaaaactgaactcaagcctcctgccaaatatgttattcttcctgctccctgtctcagtgaatagcaccacccaggacccaagctggaaattaggatatcatcctcatacctccctctcactcaattcccattcaattcatcaccaagacctgtcacttttacctctcagctccatccatttctttccatcccagggccaacactgtggttcataccacgatc

SEQ ID NO: 538093 - DNA, 635 bp, Homo sapiens
tttgttttttgttgagacagtttctcactatgtcactatagtggtggcatatgcctgtagtcccagctactcaggagactgaggtgggaggattgcagtgcactcacggctcactgaagcctcgacctcctggactcaagcgatcttcccatctcagcctcccaagtagctggggctatgggtgtaagctactatgcccagctaatttttgtatgttttgtagagatgggktttcaccacactggccaggctggtctggaactcctgggctcaagtgatccacctgtctcggcctcccaaagtgctgggattacaggcatgagccacggcgcccggcctggaatgtttttgactcctcttttcctgtctacatgagactttgctaccgtatagggaatgccacattgcgctctgaataaggattctcttgcagggacacaggctcaagaactctgagaatcagacttaccaagccctggacagcttgaacaccagccggcgggtgctcatctccggaactcccatccagaatgatctgcttgagtatttcagcttggtacattttgttaattccggcatcctaggtaagaatctagccttgtttgccacatcagagaggagccctgccttgtctt

SEQ ID NO: 538094 - DNA, 446 bp, Homo sapiens
gaatacattttagatatggaaggcagtccaagggcaggtgggagcagtatagtatatgcatgctcaggcagggctagagtttracctcaccacctcaccagtcatatcagagtagctgtccagacaaggtgtgggacacaatttcttatcagaccaacaacctgcaaagcagtcctcagtcctcatttccctcctgcttgtgaccagctagcaaaacctcaactctggctaaatccagcaatccgcctaggttgctgagcactgctagagacaaatcatacaactatgcaaatcagtgttactatatgatcactaacctcgtatgaaccttcactgtgcttgcaacatcagctcccattcctaccacttccaaactctccttttcccttctcagggatgacctcacctacttcacagagaaaatagaagccatcacacatgagttt

SEQ ID NO: 538095 - DNA, 596 bp, Homo sapiens
gtagggagttacatttgcctgaattctcccacaatgggggatcacatatattgttatccaaaccaggacacattcctggtttgcctttagggaatagggacttgagtctgtgattttattactaattgcatgtgaagtgttgtaagccctgtggagcacacaaaattctaagggtaaaagagggagttattgataatgatgccaagaaaaccagaataaactggaatcatcccccaggtaagctgggaagtatggtctcctatccataaayccagaacacaagatttgcacatatagccacatttacgggaataaccggactgtacagtgttccctggatcgctctagaggaaacagcaatggaggcgtggactctgttttcagacagtgagtccacgagcccaggtgagctgatccaccctcccttctgctagctgcaggtgaatccagccagtaggctgtgcattactgtgctttagttctgtggctcactttccctctgtgcaaggtgtgaggacacaccccccgctccaaatctccaaaggtcagcttctaacaacaggtgaacatgctggtccttttaggggacacaacac

SEQ ID NO: 538096 - DNA, 596 bp, Homo sapiens
gtagggagttacatttgcctgaattctcccacaatgggggatcacatatattgttatccaaaccaggacacattcctggtttgcctttagggaatagggacttgagtctgtgattttattactaattgcatgtgaagtgttgtaagccctgtggagcacacaaaattctaagggtaaaagagggagttattgataatgatgccaagaaaaccagaataaactggaatcatcccccaggtaagctgggaagtatggtctcctatccataaatccagaacacaagatttgcacatatagccacatttacgggaataaccggactgtacagtgttccctggatcgctctagaggaaacagcaatggaggcgtggactctgttttcagacagtgagtccacgagcccaggtgagctgatccaccctcccttctgctagctgcaggtgaatccagccagtaggctgtgcattactgtgctttagttctgtggctcactttccctctgtgcaaggtgtgaggacacaccccccgctccaaatctccaaaggtcagcttctaacaacaggtgaacatgctgrtccttttaggggacacaacac

SEQ ID NO: 538097 - DNA, 614 bp, Homo sapiens
ttgtggggcagcttccttccaggagtggaaatgatctccgtgattgttcgaaaaaaggtttctttactgtctttgttggacctgtgcttccaatgccctgaagcctctaggcccattcctcaagagcaactccacgcctcatcaataaatgagccctcttaggaagctgcctctctgtaactactgccactgcaaaagctggctttttggtattactgcccacattcatggatttgtgggtcagatttctctaggcagctccctgctgcatcaattaagacatctcagcctcaggaaatgacttgtccagagccactgccacagcgcctctggaggcttcagctcagttcctccaaccacccagaactctgacctcaattctgctcacagtcagtgggaaagaggatccaaattctgctttctctgtcatcctaaactcttgtctacagtatgggtctctctgagtcctaaagttgtccataagccccaagatttcttccacttgcttgtcacaaaatcacaaaacgtccttatagcrtgccaccggggggtccttgcttttgaccaccattgaatccagtaggaattcctcaggttttctgacatttgaatag

SEQ ID NO: 538098 - DNA, 620 bp, Homo sapiens
ctgagggttaagtaggatcatgactcccatcatagggataagtaacctaaggttccgtggattttgtttgttttctagagcagggagctctattcttttaggctttatccacttgcaatttcttcagcatttgtcctgcttgtcatagggtttaatttcctcttcttttcctcctttctcttagacatgtgggcttaaagccatccctcactgakccctgctagcagatgaatatatcggaaggtgatgagtacgaaggagcttggctgccagccaggcggtgtcggaaaaggatgggaattatgttgttgtgaacctaaagctgctccaggaaagtctatcgaaaagttaaaaacatttaaataaacaaataaaaggatgagaatgttgaaatgctaaaagatcagtggtgtgtgggattcttcgagccctgcagtttcaacacatttgaggtggaagggccaagatcggcctgccatagccctttgtttagaggatgttcagccagtggtgactccacaggcctgcagcctaaaagcccaggggcagatgcaaaggcagtctagaccaaagcgttgtcccatgcccgcacaggtgcggacaagtccaggaactcgcca

SEQ ID NO: 538099 - DNA, 643 bp, Homo sapiens
tgtggagtcatccatcccataaactctgctccccattctcaccatcctgcagccctaacccactgctgacagcaatcccaccctgaatcacactcagtagttgcattgagggtgaatgcgaggctcacctgcactgagtcacccagatcaggstggggatggtcactgtcttgccctgctctgagaccccaaccctcctggtgcctactcctggatccccactgaaagcagagagggatggaagaacattgggtcccccttattgcgcatcctggtgatttgacttaattgacacccagggggaacggcagcagcagttgtttctgggcaggagcaggaaaaggaaggctagatagggcctgagaagtcagagggtgaaaagaaggaggccaagaactggagaggtgatgaaagacagtcacggaggagctgaggttccaagtccccatgcatgctctattgtctcaacagacctcacttacaaaacacaaactcaaagataaaatttaataataaaataaattaaattaagagcagtaaaacccaactgagggacccttctgagcccagagccctgtgcaactgtactggtggcttgcccatgacaccagccccatcacttagcaacacttgacaagagcca

SEQ ID NO: 538100 - DNA, 305 bp, Homo sapiens
gacaaaaaatctgggcttcctggctccaaaggccatgctgtcaaccgttagcctctacattttattggagactataaaaagactttgcattcttccattgagaattccaatgaaacaagccaaagctaaacaggggagaacctctgattcctctctgacaggtctctgctgtggcacagcttgggaggaggaagaagaggaggcygtggacaggcagagacaagcagagttgggatgcattgactggaatactttggaatcttggtgagattagatctgcctattaaattgtaacttgtgagtgg

SEQ ID NO: 538101 - DNA, 640 bp, Homo sapiens
acagagtgagaccctatctcaaataaataaaaccaaaataaaaaataaaggtgtatgaatgggaagttgtttgcctttttagaggaaagtgttatttaaaaaaatacttgcaaaactatttgggtctttgtatttaaagtgtatatcttgtagatatcacatagctaggccaagatttttttccattctgaaaatatcttcctaataactgaaatctatatatatttagcactattgttgataaagttgggcttatgtgtgtctttgttaattgatttctaatagaatttttattgagataatatagactcacctgcggatgcaagagtcattaaggggtaaaagtttacttatgtaagaaaaataaggtctagagatctactataaaatatagtccctatggctaacaatactttattgcatacttaaaatttgctaaagggatatatcttatttcaagtatcctttccaccaataataataaaggaggctaggatgaaactttgagaggtgatggatgtgtttatagcgattgatggttgtaatggtttcatgagtgtatacttatccccraacatagcaagttagtatatattaaatatgtatagcttttgatatatcaatcatacctcaataaagc

SEQ ID NO: 538102 - DNA, 619 bp, Homo sapiens
cactgaatccatggcctctggagaagaaggcttcagagaagagaggtcaccatgggcttagtgcttaccccaagagatggcttttgcaaggagacagggcattctggttggagaaagtagtgtgggcaaacacattgagacatgaaggctgaaaaaggtccatggtgtgattgtggcaatacagaaaatttggggttacttccgttgtgcaatctctataacattgcatgtaaatggaatatccattaatcatgtcatattttgtatgtaggaagggaacctgatatttacagtcattttagttaagctttcttgactaatttaagccaaaagggcacttattggaaacttatagggggtgggcacaaaattgcaaaggagtgagaaaaatcatgtttctaattggcaggatctggacatgtcctgcaaattgtggtgacagacacctctctgccttcctctggtcaccactgctggaatgaatagagttgagctgtgtgcagcaggatgcctccagagacgtgcaagccagacatgaggtgagggcaggattcactsgttctcaggaaacttgtcccacaattaaacagcaagagtgccaataggtgggaggattccg

SEQ ID NO: 538103 - DNA, 602 bp, Homo sapiens
catgcaagggggtgtgagggatgggaaacattctgtcttgtcttcctcttttgtacagtccttgctggttgccacactccagtgagcrtttttctcccaatggtaagatccaagatctggggtgtgctatggagggaaggaggcaactggcccactatgcttcaaggctccagggatcctatcgtcaaagcatgaggcattctctttgcacctcatctgccctcctgctgggttacagattttgcatgctcagtaactgaacattgttctctgtggacatgttgcccaccgggagtggcctggccatgagcgggactcagtgctcctgggtcctgtgccacagcccatcccatcatgattctcagataacactattcatctgggaatccaggaccagcctcctgggagtgtgaagctgcacctcctcccttaggtatatgccctggaaaaatacaactgaagacactagaggaagttctaggaccctgaaggaagcatcccagccatgtctgccagaaatctttggaaaaacttgcaagaaagaaggtagaagtgttacagatgaaggtcttttatttatgtatttgtttttttgagacaga

SEQ ID NO: 538104 - DNA, 518 bp, Homo sapiens
aatcacctgttcctgagggtaaaaggaaatctgatccaaaaaaactctaccagcrttctatttccatattttggagcaggttttctggttttaataacgtaaagtcctcattacagtaaatgtttcactgtctcctgtggctcaaggggcaagcacggagggcggctctgccttcctctattgatttccagaaagacctcttacttcccaattgtccaggtagcattgtcaactgaggtgttgtttttcctcaggtatgaagaccctctacagctttgtatttttccattacagaaattcccatttgttttctctttatgcagcacatcccacaggggtgcaaaggctggatgggtgagtgctattatgtggggcagcgagccggcaaagcctcgccaggcgtctctgctgacctggagtgatttcataagtgttcagaattgtcctcggctgattttcactgtccctagctgttaaggctgcagtgatagccccatattaattatcagctccatcct

SEQ ID NO: 538105 - DNA, 643 bp, Homo sapiens
attgttatctttgggtagcaggattatagaattttagtcttctttatacatttctgaattattttacaatgacatattgcttttaaagtcagaaaaacagtaacrctctttctaatttttaattttttttccataagaattctacagttaaagacaagaaaataagatcagcaggattgaggagggtatcacttaagcctgtttctgctcatggtttgcagacacagctacattgcttaccaggtcctggagctgggtgtttgctttgtgttttcaactagggccacaatattaattgcagatttaaatacaacaaaattaacttgacgttcccagaagaggaggaatatcatcacaagaaagtttttatgttaagatttgcactgctactacattaaaggtacatcactttcaactgatttgaacaaggtgttcccataagtgtgccaatgttttagatacccagagtaaaggctgagaaacactggtaaggccccgaagtaagccagtggagctgtgctactcaaaatgctggtctctgatgacacgtggagcttacagggcttctttcatcaacaaagtcttgctacaaagtttagctgcagagaaggaatgatgtggccacggtacctgttcagttgcc

SEQ ID NO: 538106 - DNA, 643 bp, Homo sapiens
attgttatctttgggtagcaggattatagaattttagtcttctttatacatttctgaattattttacaatgacatattgcttttaaagtcagaaaaacagtaacgctctttctaatttttaattttttttccataagaattctacagttaaagacaagaaaataagatcagcaggattgaggagggtatcacttaagcctgtttctgctcatggtttgcagacacagctacattgcttaccaggtcctggagctgggtgtttgctttgtgttytcaactagggccacaatattaattgcagatttaaatacaacaaaattaacttgacgttcccagaagaggaggaatatcatcacaagaaagtttttatgttaagatttgcactgctactacattaaaggtacatcactttcaactgatttgaacaaggtgttcccataagtgtgccaatgttttagatacccagagtaaaggctgagaaacactggtaaggccccgaagtaagccagtggagctgtgctactcaaaatgctggtctctgatgacacgtggagcttacagggcttctttcatcaacaaagtcttgctacaaagtttagctgcagagaaggaatgatgtggccacggtacctgttcagttgcc

SEQ ID NO: 538107 - DNA, 643 bp, Homo sapiens
attgttatctttgggtagcaggattatagaattttagtcttctttatacatttctgaattattttacaatgacatattgcttttaaagtcagaaaaacagtaacgctctttctaatttttaattttttttccataagaattctacagttaaagacaagaaaataagatcagcaggattgaggagggtatcacttaagcctgtttctgctcatggtttgcagacacagctacattgcttaccaggtcctggagctgggtgtttgctttgtgttttcaactagggccacaatattaattgcagatttaaatacaacaaaattaacttgacgttcccagaagaggaggaatatcatcacaagaaagtttttatgttaagatttgcactgctactacattaaaggtacatcactttcaactgatttgaacaaggtgttcccataagtgtgccaatgttttagatacccagagtaaaggctgagaaacactggtaaggccccraagtaagccagtggagctgtgctactcaaaatgctggtctctgatgacacgtggagcttacagggcttctttcatcaacaaagtcttgctacaaagtttagctgcagagaaggaatgatgtggccacggtacctgttcagttgcc

SEQ ID NO: 538108 - DNA, 643 bp, Homo sapiens
attgttatctttgggtagcaggattatagaattttagtcttctttatacatttctgaattattttacaatgacatattgcttttaaagtcagaaaaacagtaacgctctttctaatttttaattttttttccataagaattctacagttaaagacaagaaaataagatcagcaggattgaggagggtatcacttaagcctgtttctgctcatggtttgcagacacagctacattgcttaccaggtcctggagctgggtgtttgctttgtgttttcaactagggccacaatattaattgcagatttaaatacaacaaaattaacttgacgttcccagaagaggaggaatatcatcacaagaaagtttttatgttaagatttgcactgctactacattaaaggtacatcactttcaactgatttgaacaaggtgttcccataagtgtgccaatgttttagatacccagagtaaaggctgagaaacactggtaaggccccgaagtaagccagtggagctgtgctactcaaartgctggtctctgatgacacgtggagcttacagggcttctttcatcaacaaagtcttgctacaaagtttagctgcagagaaggaatgatgtggccacggtacctgttcagttgcc

SEQ ID NO: 538109 - DNA, 606 bp, Homo sapiens
tctcacctgtctttgctgtggtactgtgtagctacatggtaattccatcatcacaccccctggttttctggttctggaaacaggatggggaagagracacagtttgcagaaacataaagtgtatttttctgtttttcttgcttgttgccaaattagtttaatatccatggaaggaaatcatagtggagagaccaaaagtgtctcacttagagcggaatctttgtacatatccatgcttacttccttaggatacatttctaaacatgtcattccagggttgaaaggtgtgtattttacccctgacctcacaggctataggttttagcattccttttaatccttgctgattagattcgatgggtgaacaactgaatatttttattgcttggatttgcatttcttgaattgttaatgaggtgaacctttaaaaaaaaacatgctggttggccactgaactcctcttcaggattttatttaaacatcccagcaaggccttccctggccactctatttaaaattgaataagacaaaagcaaaaacaaaacaaacaaacgaaaaccaacaaaaaaaaaaccccacttcttagccccttccctgtcttcttag

SEQ ID NO: 538110 - DNA, 606 bp, Homo sapiens
tctcacctgtctttgctgtggtactgtgtagctacatggtaattccatcatcacaccccctggttttctggttctggaaacaggatggggaagagaacacagtttgcagaaacataaagtgtatttttctgtttttcttgcttgttgccaaattagtttaatatccatggaaggaaatcatagtggagagaccaaaagtgtctcacttagagcggaatctttgtacatatccatgcttacttccttaggatacatttctaaacatgtcattccagggttgaaaggtgtgtattttacccctgacctcacaggctataggttttagcattccttttaatccttgctgaytagattcgatgggtgaacaactgaatatttttattgcttggatttgcatttcttgaattgttaatgaggtgaacctttaaaaaaaaacatgctggttggccactgaactcctcttcaggattttatttaaacatcccagcaaggccttccctggccactctatttaaaattgaataagacaaaagcaaaaacaaaacaaacaaacgaaaaccaacaaaaaaaaaaccccacttcttagccccttccctgtcttcttag

SEQ ID NO: 538111 - DNA, 606 bp, Homo sapiens
tctcacctgtctttgctgtggtactgtgtagctacatggtaattccatcatcacaccccctggttttctggttctggaaacaggatggggaagagaacacagtttgcagaaacataaagtgtatttttctgtttttcttgcttgttgccaaattagtttaatatccatggaaggaaatcatagtggagagaccaaaagtgtctcacttagagcggaatctttgtacatatccatgcttacttccttaggatacatttctaaacatgtcattccagggttgaaaggtgtgtattttacccctgacctcacaggctataggttttagcattccttttaatccttgctgattagattcgatgggtgaacaactgaatatttttattgcttggatttgcatttcttgaattgttaatgaggtgaacctttaaaaaaaaacatgctggttggccactgaactcctcttcaggattttatttaaacatcccagcaaggccttccctggccactctatttaaaattgaataagacaaaagcaaaaacaaaacaaacaaacgaaaaccaacaaaaaaaaaamcccacttcttagccccttccctgtcttcttag

SEQ ID NO: 538112 - DNA, 330 bp, Homo sapiens
aaccactgagtgtcctcagtcaatttgaaatggagcggaagaatcacccagcagaggcatgcccaaatgcccaagcaacaaggtcctgatataataaaatgattgttatttttagccactaagttttggagcaatttgctatgctgcagtagataataagaacagaatttgatacctggaagtggagtgctgccataactatctaaaacatgtggccatggttttggaaccagacaatgagmaaacgctgcaaagatcttgaggacactgttaatgagaatagaaaaacctgaaggagacttctagtgaatacttagaggaagatagtac

SEQ ID NO: 538113 - DNA, 576 bp, Homo sapiens
agcctgaatttggctccttctgtgtacctaagtatggccgcaggttacttcccccatcaatgttgagaaaatattcctgctgcaaaatgagcacagtcttaccctctggtctctctcataggcatttagtgggatatggaaagtgacctggaaatcctaaaaaagtatcctgagctcctcggaaaaggtgaactggatatgagcagatgctcagctccaggaccaagctgaggtggcctaggtgtgggaggggtctcagtggtatgactgcaggaggtcaaggaggccccagcagctcacttaggtctctgccaccctaggycacagctcacaggatttttctgtaaggtgattgtacttcttcaagttttcctgggagcaagtacctcatcagggactttcattgtcagatgtcattgggttagcttttctctcactgctgtgtaccaggtccaccaactccaccaccaccaccaccactaccacctaatgtttatcgtgcttattgtgtgccaggcactgttgtaagcactttatttgaattaactcatttaactttcccaacaattccaccag

SEQ ID NO: 538114 - DNA, 576 bp, Homo sapiens
agcctgaatttggctccttctgtgtacctaagtatggccgcaggttacttcccccatcaatgttgagaaaatattcctgctgcaaaatgagcacagtcttaccctctggtctctctcataggcatttagtgggatatggaaagtgacctggaaatcctaaaaaagtatcctgagctcctcggaaaaggtgaactggatatgagcagatgctcagctccaggaccaagctgaggtggcctaggtgtgggaggggtctcagtggtatgactgcaggaggtcaaggaggccccagcagctcacttaggtctctgccaccctaggtcacagctcacaggatttttctgtaaggtgattgtactycttcaagttttcctgggagcaagtacctcatcagggactttcattgtcagatgtcattgggttagcttttctctcactgctgtgtaccaggtccaccaactccaccaccaccaccaccactaccacctaatgtttatcgtgcttattgtgtgccaggcactgttgtaagcactttatttgaattaactcatttaactttcccaacaattccaccag

SEQ ID NO: 538115 - DNA, 549 bp, Homo sapiens
gtaccagctctactgccgaggcatctgcacttacccatacatttgccaagacccaaagtaagtgtgtttcattttaaaagaaaaggttgacagatgtsttttcattttactccatggcactttgaacaaggtggctcttaccataacgtggagctggggcagcaccccagcccctcttgtcgtatcagcttccatgtcttgaatattgaccaagagccacagggaggacatgatactaccaggattcccagactgcaataaagagaatgatcataggtgcaaagggggaggaaaaaagtcttcctttggcaaattagtttgcttatttaactattaagcaaatttaaagcagttctatcctgtagtatagaaaccatgtgtgactctgcatgggtgaaatttttccaagctactgaacaccactgtagagctcctacactacagaaaagcacctggctgagcaactggccatattagaccaagggactcagaagctaattcatatctcccagaaccaattttccatagggattctcaggaatgttttca

SEQ ID NO: 538116 - DNA, 549 bp, Homo sapiens
gtaccagctctactgccgaggcatctgcacttacccatacatttgccaagacccaaagtaagtgtgtttcattttaaaagaaaaggttgacagatgtcttttcattttactccatggcactttgaacaaggtggctcttaccataacgtggagctggggcagcaccccagcccctcttgtcrtatcagcttccatgtcttgaatattgaccaagagccacagggaggacatgatactaccaggattcccagactgcaataaagagaatgatcataggtgcaaagggggaggaaaaaagtcttcctttggcaaattagtttgcttatttaactattaagcaaatttaaagcagttctatcctgtagtatagaaaccatgtgtgactctgcatgggtgaaatttttccaagctactgaacaccactgtagagctcctacactacagaaaagcacctggctgagcaactggccatattagaccaagggactcagaagctaattcatatctcccagaaccaattttccatagggattctcaggaatgttttca

SEQ ID NO: 538117 - DNA, 610 bp, Homo sapiens
ggtgcactgggacagaatatctgactcagctctgtcaccgctcctcattatagaagacaccactgggagtctttttttttcaagttcatttcatactgtcttctctggtggtgggaaggagctgggacaaagaagwgtcactctgtctccagatgcccggatcccgtgttgagcagggaatattgggtttatgtaaacatcacgtggcagcatcaaacttctgttcaggcagcctctcctcaccttttcccctcctgtgttcagagtggtatttcctcagcggaagatggacatgaagacaaatgaggtcatctttaagaagtatgttatgagcacggagacgtactactttgggccactactttgtggaaaatcaagagataagtaagtgttccattattttaaagcagatttcagactgctgggttgggctcatgaacagtgcaagtaggattcctgtgtacatagatgtagcttttactaatgctgcctctcttagccccaaccacaaatcaggagaactgggttcttgtgtcccaactccctgctggacacccagaggaataagggtgccatgttcccatatgggaaggcctaggagaggtttcag

SEQ ID NO: 538118 - DNA, 615 bp, Homo sapiens
tgtgtggctccaaaaccttgctgcagtacttggaattttcacccatcgacagcactgtggatgtaggacagagtgtayatgccaccctgtcttttcaaccattaaagaagtgtgtcttgacagacctggaactcataatcaaggtgagtccatttaacattgtccaaactccaaaagtactctcagcatgctgccttggcaagttaattctcctgtgtgttctttgtcttctccatgtgtccagaagctcctagagggtagctgtgttggacacagcctcacaatgtctagtacaaaggcttcaacaatggttaggtgcctggggagtaagtgtggattgaaaagcaattatattgcaatacatttacccactaaaataaataaaagtgatagatggggcagggaaagaatatgtacaatgttttctaagatgaattattgaatgaaaaaaaaaaaagaatggtgatgtcagcaggaatggcagagaaggacatccaaaatgctgcttttcaatagcaatgagaccactggaaaaaattttcgaaatcaactttttcagaactctgaaaattaataataggcttgcaacaattctcggagtatttattcaagaaa

SEQ ID NO: 538119 - DNA, 442 bp, Homo sapiens
atcctctgtagtggacactcccagaagccaagtctaatgaatcaatgaattagaaatcaatgtgtctcctgcagggctgcccacccctgccaccttttcccacaagactacactgygcagacttcaatgggtgtccagcatccaccatcccatctgcaaagatcatggaagctgcaacacagaacattaactgaaatacaagcttgttcatcagggttttattttagcgccacactgcttccagtgaagaaaggacaggaaagaagtatggtggattgtttttttaactttgtagcacaaaagattgtggtgatccttccccaagagttgaaaataaaacatgaggagggaaaccactgcccccaaagccagtgctgctgatgagcaggtgtctgacatgcatgtgattctctggcagctacagggaacatttctttcctgg

SEQ ID NO: 538120 - DNA, 598 bp, Homo sapiens
gctgtcgggttggccggcccaggcccatttgtctgcagcttcactatcgcttcctttacatgatagtcaagggctaccttcctattgtgattttctgatcatttytccatagtgtgaaactgtcccaatagctcttttccttgaacataaaactcaaattcctcatcttggcattcaaggtgaacaatgattggcctcaacctgccttcccacccctaatttatgaccagtttccctgcttttttggtctggaatatccttgtccccatctttgcctactaatattctcttgcttcttcaaacccatttccttgaaaacttcccacatcacccttgttggaacccattcatcccaaagtcgctctttcaaagaagctggtatttctgttgcaaaattattttcctctgctctgagtgaccgcatgtctgcttcccccaccagatgtcagactaccaaaggtgtgggctgtgtcttattcattgtcctggtccccacagtggcaagagcacgctggcattgggcagggcaggagacccaggaatgcttcgtgaagagaattctcctctgggctatgaagttggcagcatgctgtagggc

SEQ ID NO: 538121 - DNA, 598 bp, Homo sapiens
gctgtcgggttggccggcccaggcccatttgtctgcagcttcactatcgcttcctttacatgatagtcaagggctaccttcctattgtgattttctgatcatttctccatagtgtgaaactgtcccaatagctcttttccttgaacataaaactcaaattcctmatcttggcattcaaggtgaacaatgattggcctcaacctgccttcccacccctaatttatgaccagtttccctgcttttttggtctggaatatccttgtccccatctttgcctactaatattctcttgcttcttcaaacccatttccttgaaaacttcccacatcacccttgttggaacccattcatcccaaagtcgctctttcaaagaagctggtatttctgttgcaaaattattttcctctgctctgagtgaccgcatgtctgcttcccccaccagatgtcagactaccaaaggtgtgggctgtgtcttattcattgtcctggtccccacagtggcaagagcacgctggcattgggcagggcaggagacccaggaatgcttcgtgaagagaattctcctctgggctatgaagttggcagcatgctgtagggc

SEQ ID NO: 538122 - DNA, 598 bp, Homo sapiens
gctgtcgggttggccggcccaggcccatttgtctgcagcttcactatcgcttcctttacatgatagtcaagggctaccttcctattgtgattttctgatcatttctccatagtgtgaaactgtcccaatagctcttttccttgaacataaaactcaaattcctcatcttggcattcaaggtgaacaatgattggcctcaacctgccttcccacccctaatttatgaccagtttccctgcttttttggtctggaatrtccttgtccccatctttgcctactaatattctcttgcttcttcaaacccatttccttgaaaacttcccacatcacccttgttggaacccattcatcccaaagtcgctctttcaaagaagctggtatttctgttgcaaaattattttcctctgctctgagtgaccgcatgtctgcttcccccaccagatgtcagactaccaaaggtgtgggctgtgtcttattcattgtcctggtccccacagtggcaagagcacgctggcattgggcagggcaggagacccaggaatgcttcgtgaagagaattctcctctgggctatgaagttggcagcatgctgtagggc

SEQ ID NO: 538123 - DNA, 493 bp, Homo sapiens
acaaaaaggagttgtgccttgagtgtggtaaatatgtatgaaataaaagtacacatgaggaaccatttagaaaataggattgccaaataaaatacagtggactcagttacatataaatttcagataaacaatgatttttttagtgtaattatgtgttaaattttgcataggacataattatactgatgcagggcatttttttgaccccttcatgggamttatgataggggtgcccagtatactcagcctgccctgttcaacccctcatgagagggagcacgcaagcaaacgagcctgggaacttgagtgagtgagtacaggaaccggtcggccactttggtgctggcaggagcaaactccgtgccggcctcacagcagcatcccaacggggtgcctgcaaccccatgaccccagagggtgtgttacaatgctctcttagttccaccatccacagacagcatgtgttatcagctcagtgggccctttgcctcct

SEQ ID NO: 538124 - DNA, 493 bp, Homo sapiens
acaaaaaggagttgtgccttgagtgtggtaaatatgtatgaaataaaagtacacatgaggaaccatttagaaaataggattgccaaataaaatacagtggactcagttacatataaatttcagataaacaatgatttttttagtgtaattatgtgttaaattttgcataggacataattatactgatgcagggcatttttttgaccccttcatgggaattatgataggggtgcccagtatactcagcctgccctgttcaacccctcatgagagggagcacgcaagcaaacgagcctgggaacttgagtgagtgagtacaggaaccggtcggccactttggtgctggcaggagcaaactccgtgccggcctcacagcagcatcccaasggggtgcctgcaaccccatgaccccagagggtgtgttacaatgctctcttagttccaccatccacagacagcatgtgttatcagctcagtgggccctttgcctcct

SEQ ID NO: 538125 - DNA, 665 bp, Homo sapiens
  misc_feature (1)...(665): n = A,T,C or G
nnnnnnnnnnnnnnnnnnnnnnnnnnnnnnnnnnnnnnnnnnnnnnagtgtttcttactaaatataatactgtcttaccccaaataatgattaaacactctaatattaaatctatttgcactatttgtaggttatcaaattgccctgaaagctgtgctagctttcatttgaaatacttttgcatataaatttagcattggttcacactggggtatttaaacttttatatagcatatatagaatatagtggaagatattagagctcattaccttcctctgaaacaatttaaaaaagaccttctctccagacttccatttcagttcattgtgatttcagtactataatccaaaaattggcaactcctgtttcaaggcttcatcttcctcaracaatgtctccaaactatgttggcttccagnagaatgatattctagatagttcattataccctcatactttagaacaagtacttcctccatccagtacattctttagggtatcagtggatttcccaaaagtgagcaaaactcctatccctacccacttcaaaagaaaaaaaaagaaacaaaacaaaacaaaatcacactaatctgaatcatagaagagattggagaccagatagcaatgaacactggacaaaacagaagactagcactgtcaaaat

SEQ ID NO: 538126 - DNA, 653 bp, Homo sapiens
agtgcatgcactacatgctatgtcatttgtctaccaaagatgtactcagaaaatatgttattaactgccacttgcatggratctcaacagaactttattatgggatactctagagaactcagactgtcaagggaaatccgtggaacagcttacctgtgctgatatagagtagcataggggaggctacttcaaggttggaatggggaggttggcaagccaccggatataaatggatgtggcctgggtctgaagttcagggacttaaaagccattaaggagcactacttctgcagctggaaaggtcacagaagatagagggtaatggctctaatattggagaatgttctttctttcatggcttctcaggtgattcctgtgttttcacagcaatttcccatttaaaaaaagcaaggatttgtgttcaggagaggtgtctatttgtcatcaccattaactggagtagtgggtgctgaataataaatatatcctcctctgccttatcccacttccctgaaagatttgtttagaagatcgaatgactttcattgtttgaaaaattgtgtgccctagaatattgagtgaaagaggtctaaatgttttctcacagagctatcagaacacacgccacaattaatggttctgttaaccgattt

SEQ ID NO: 538127 - DNA, 477 bp, Homo sapiens
tgatttccataagtccaaaaattcacccagttygttcctgcctctggtcactcattttcccgaaagaggagagcatgtaatcaagggtaatgttacaggtgtgactctcagaagtattctctgtccttcttaatgtacttattgatgatgtggcatatggatgtgaagcttggaactgctgcagctaatttgcctcaaagacagagtctgacattaggacaaagctaaaactgtatgtggcatagcaaagtttcccttaatagaaactgggtctactagaagaaccaatgctgaattccacctgaaccctggacttccaattacatgggtcaataatctcctttaatatttgactcatttaatcagaatctctgttacttgaaaattaaatcattccgattgatggcacatttattattcagtaagttgtgtcaggacaactatttcctaccttgttccttatacgaaaataaattc

SEQ ID NO: 538128 - DNA, 477 bp, Homo sapiens
tgatttccataagtccaaaaattcacccagtttgttcctgcctctggtcactcattttcccgaaagaggagagcatgtaatcaagggtaatgttacaggtgtgactctcagaagtattctctgtccttcttaatgtmcttattgatgatgtggcatatggatgtgaagcttggaactgctgcagctaatttgcctcaaagacagagtctgacattaggacaaagctaaaactgtatgtggcatagcaaagtttcccttaatagaaactgggtctactagaagaaccaatgctgaattccacctgaaccctggacttccaattacatgggtcaataatctcctttaatatttgactcatttaatcagaatctctgttacttgaaaattaaatcattccgattgatggcacatttattattcagtaagttgtgtcaggacaactatttcctaccttgttccttatacgaaaataaattc

SEQ ID NO: 538129 - DNA, 614 bp, Homo sapiens
tcctaaagcatatcttgttttagtataattttagtattaattatatctttagacagaaagtgtcattgagttttgtactgtactatggcaccttgtgctttgtttttgtcctaaacattcaagtcatactagtttttatttttattaactttttttttcttggtagagacgggattttgccatgttgcccagtctggtcttgaattcctgggctcaagygatccactcgcctccaagtcatactagttattaatgaactggaatgttttatagtttgaaatcctcatagagaaactcactatcatacccagaatactgtccataatttgaccaggacccttattatctggacttgccaaataaggatgttcctaatactggaaagttcaaatctgtaatgttttgaaatgttcccagagtgatgattacctagcgaagggctgtctgatttgaagctacacataataaagctatttcctcttgattttgctcctgattaaagagccagagaaaatgacacccatctgagaatcattgtgccattagccagaaaaagcatgtaccattttcagaatgttggccagtaagagcctttcattgatgccagaagcttg

SEQ ID NO: 538130 - DNA, 614 bp, Homo sapiens
aaaatttgagttgtttaaggaaatcaagttcaaaataggttccttgtcaatagtaacacaactgtaaaaggcattgaacccagagtagatgtccttgttgaccacacctgcctactacctaaagtaggacatggcagtggatagatgaagacctgacactaggtcatcctcactggatgacagcctgattggcagccgagctgcagtcacacaarcactcatcttatcattcagaaaaatcgccatccttctccaaatttctaatagtattttctcatatttcctttgacatttgctacagtaaaaaccacgatatttatgtgtttatctctcttatcgggctgtaagcatgttgaagaaagaagccacatcataaatatatttgtatattctttaagttctcaaggtagtctgttgcacaccaaaagtgttcaataaatgtttattgaataataccttaaagtgtgcttcaaaggaaaagttgtcattattagtttgttctttgagttatataaatccatcttctgtactgaaaataaattatctaaaatctgtgttttgaacttaatattaagcatataatccagtgaatgacaagcttctctgggaaacat

SEQ ID NO: 538131 - DNA, 664 bp, Homo sapiens
cttctcccattatgaattcatatcattgtgcttctgttttgttcaaacttactgttctattcaaaaacccaaaccaacagtttcaaaatttcatttctgtagactcacagcctagggaacttactattttcatagagaaaagtgacagtttactgcacattcacaaatgttatttgtttagttattatttattttagaatatgtatttatttaaattgtcaaataaaaattgtgtagattcatcatgtacaacatcacattttaaaatatgtatatattgtggagtgaataacttagctaattaacatatgcgtcacctcattttttgtggtgaggtaatgcatatgttaattagctaaatttacacttaaaagataatcatttaaaatttactctcttaccaattttagagaatgtaatacattgttattaactatagtcatcatagttcttatttcttgacttgctaaattgtaccagaggtttcctttgcatttgtatttgtgccaatttrtagttgtttcctaatagttttagtcaaagaggtatatttcctattctagaatattaatttgtaacacttgcactaaggttctattctctttcacacacgtacacatatacaaacccttctgacatctctagtcctgttaaacttcactca

SEQ ID NO: 538132 - DNA, 658 bp, Homo sapiens
gacagggtcttgttctgtagcccaggttagagtgctcattgcagctyaacctcccaggctcaaacaatactcctaccttagcttctcgagtagctgagattacaagtgtgtactaccatgcctggctaatttttaatttttttctagagacagggtcttgctatgctgcccaggctggtctcaaactcctgagctcaagtgagcctcccgccttggcctcccaaagtgctgggattacaagcatgaactactgtactcagccagatgtccaggcatttaaggaagcccttcaaatctacatactcaaaatcatcaaataagtgactatttgccccccttttatttatttatgtattacatcttcccttatattctaggtgcatgtgtgtgtatgtgtgtgattgagtaagtcagagacagagagaagttgagcgaatgagagacagagattgtctcttctgggttgtgaatattttgaaggtggcttcatcaaaataccataggtttagtgccaccattttgaatactgcttctgccacatataggcaatgtgactttggaataattacttaacttttctcatcttcagtttttgtacttagaaaataaacataatacctgcgttgaagagtttagtgaggcttaaaaataatttttg

SEQ ID NO: 538133 - DNA, 626 bp, Homo sapiens
gctgattattaaagttacagaaattttatgtgccaattgttaaatgttattattaaaaccaaattatatcaaattatattgaaaacaggcaataaatgctaacaacrtgtcacttcctaattattttactgtcttactattatctattcttttatggttatttaggtgtatcacacttttatatggtggaaatacttttgtaactatatgctgttgcttatgtcttccaactccaatcagtcatatcccactgatagcttaaaatcacacatggtcggtgtgtttatacaatggaaataagcaaacattacgtatcagtgctttttcccctctgcattgatttctggttgtcaaacgtttactagcaaaccactgcctacagttctctgttgtatatatttgtatcatctttgacccatcctggctggtgaatgcagtctgtgtggtaaacatgaaaatgttagctgtcttaaggggatcatccatgagatttttgagggtatcctttgagacaccctcaacatcacagctcctaataggagaagctcctgctctacctcctcatctttacctggagaagaaaacctctcagcctcttgctactaggtccctttgccagtggctag

SEQ ID NO: 538134 - DNA, 623 bp, Homo sapiens
atttattaagcacgtatttggtgcagactctgggaatacaaatggtgaatattcattgcccagccctctggattgtcttttattaaatagttgccttatttctctatatgacactgyacttgagactactattcctgccctcctcctttctgctgcctgctgaagaaacgggcgtttctctgccagaacacctcctttcctcggtatgtatctatgatttacttatgatttcatggcccagtcgatttcagcctccttttccagtgagtgttccaaacacaggaatatcttcctttctgaacatatactgtttttgtcactagaacaaagcctaaccccaagtacttgctcactaaatatttgtcgttgaatggctagcacgtgttaatgcactatagaatgtgatctagaaaaatcaagccaaccatagtgtgtcttttcattcattcaaaactcatctattgagaaactattttgtgccagatattgtctttgccgtgtgggttcttttaaagtaaggtgtcttctgcctcttgttcttgacaaacatctctttcaaaagccaaaattcatttttagtgagaagtaaaattgacattattcctccaactaacataattaag

SEQ ID NO: 538135 - DNA, 623 bp, Homo sapiens
atttattaagcacgtatttggtgcagactctgggaatacaaatggtgaatattcattgcccagccctctggattgtcttttattaaatagttgccttatttctctatatgacactgtacttgagactactattcctgccctcctcctttctgctgcctgctgaagaaacgggcgtttctctgccagaacacctcctttcctcggtatgtatctatgatttacttatgatttcatggcccagtcgatttcagcctccttttccagtgagtgttccaaacacaggaatatcttcctttctgaacatatactgtttttgtcactagaacaaagcctaaccccaagtacttgctcactaamtatttgtcgttgaatggctagcacgtgttaatgcactatagaatgtgatctagaaaaatcaagccaaccatagtgtgtcttttcattcattcaaaactcatctattgagaaactattttgtgccagatattgtctttgccgtgtgggttcttttaaagtaaggtgtcttctgcctcttgttcttgacaaacatctctttcaaaagccaaaattcatttttagtgagaagtaaaattgacattattcctccaactaacataattaag

SEQ ID NO: 538136 - DNA, 534 bp, Homo sapiens
ttttatcgccttttccagcttctagaaattgcactttccttggattatggtccctttccatgttctacctctctctatcatatttaaggaggttgtgattatgttggccccaccaggataatccagaatgayttccccatcttaagatcagagaattagcaatcttaatttcattgcagccttaactcctctttgccatataacctaaaactttcacgagtttcaagcataagaaaatgggcatctttgacagccattattcttcctatggcatgcccttaagaaagtgatgcatcagatgttatcaccacagaagtgtccaggcttctaaaggtttgacactatgctgcttatccatcaaccttgatgcctctgcattcagaggtagaggtgcaggttaaaagatcccaacagccagctttcactcagaatcatcgtggactgagagtaatttagacatttgcaagccttgtacagagacatctacagcactatcataaatatgatattttgtctagatggaagaacttaata

SEQ ID NO: 538137 - DNA, 641 bp, Homo sapiens
ccaaacatcttggtgtttataagtgtctagataattgatttttagcgtgtattcatacattttgagttatgccagtggtccactgcctcctttcaggaggaaaggaggccactttactgacatgctcatgcagaaacattacaatacatactggagttagtatatattgcaaatagcataatattataaatatgatattccaacttttggtcaaggtggtatgaattttcacacagcctttttgtgccaaactgttatcaaaaggagatacaatacgaaatgagaaaattaaataaatatagtcaggctttaaaaacaatagtatcttcacagacttcacagtgaaatggaaatgcaaccctatgaggatttgaagggaggggcctgctggagtctgggtccacaggtaggcaatggccctggagtgttcagctcctatggaggctgaaagtgctcaaagacaagggaccatcccacatctggaagccaggtctgaataagggctctggatcccaaagggcaccgtatcgaccaccccacattgatataaaaggctggaataaagtgctgccaagctgygggtctgtggctgtagataatatagctggcctagatgacccagaactaagagaggtcaacag

SEQ ID NO: 538138 - DNA, 151 bp, Homo sapiens
aattttgcccaaatgtttatgaaaatttgatgtctaaagtttagaaaaagtgactaagagttgataatcagtgaggaggaataaatagaaaaattgtttgaatcaactcacaagagaaytaatgttttaatatagggtatcttgaaaaatg

SEQ ID NO: 538139 - DNA, 496 bp, Homo sapiens
tctgcattattattattatttaataataatcaggtgagcaccatatctcgtaaggcagtcattctttggaaatccattagtgaaacccagtaaccttataataagtagccacacatcaaaatactttgtacattttaagatttatggaacttttctctggactagagaaatgttatgtctgcattcttctctctgtatcccatggctaaacttagccctgaagttcatctgaagcatttagtaacattctcaagacctcataagctattaaatacctcacagcttctctggtgctgacaaggaggcagaaaaggctacctcatagcttagcaaacctcccatcaggccttggtgtgtgcaagcaacagcttcatgaccrtagaattttcactgaatgagaaactttgaacccagaaggcacctctttctctgacttcatctgatatagccccatcaaaactaatttttttaggagcaaaccagtactctacaggca

SEQ ID NO: 538140 - DNA, 630 bp, Homo sapiens
caaccttattaataacccagaaccccagttccttaatgctgagatgtggcatacatttatttttgaataaattgttcactggcaacattgagtttaagaagaagggtgaaaaattacttggagaagaagacttccagtcctctaattatatctcaattacagtatttgtctgtcctcaagcttaccaatcagaccgtgcaattcttatgaaaagkggacaatattcaatggaacatttaacctttttatactataaataatcatgaaacacaatcactactacttacttagcacccagcaagttttcagcataaatactcctgagtctcataaagtaagtattatcaattccattgtaaagatgagacaaccaagaatcagacagcttctgtaactagcctaaggccacacagtaaagagctaaccatttgtgaaagactattcagggatttgcatgtcagttttcaccatacagattttgggtcgatgattataggctcctggagaggtccttcctctccaactatgactagaccaaaggctacctgtataaataatggaaatacttcatcatatgaaggaggtttttttcttcagcaaaagaatgcttattcatctcttcaatataat

SEQ ID NO: 538141 - DNA, 630 bp, Homo sapiens
caaccttattaataacccagaaccccagttccttaatgctgagatgtggcatacatttatttttgaataaattgttcactggcaacattgagtttaagaagaagggtgaaaaattacttggagaagaagacttccagtcctctaattatatctcaattacagtatttgtctgtcctcaagcttaccaatcagaccgtgcaattcttatgaaaagtggacaatattcaatggaacatttaacctttttatactataaataatcatgaaacacaatcactactacttayttagcacccagcaagttttcagcataaatactcctgagtctcataaagtaagtattatcaattccattgtaaagatgagacaaccaagaatcagacagcttctgtaactagcctaaggccacacagtaaagagctaaccatttgtgaaagactattcagggatttgcatgtcagttttcaccatacagattttgggtcgatgattataggctcctggagaggtccttcctctccaactatgactagaccaaaggctacctgtataaataatggaaatacttcatcatatgaaggaggtttttttcttcagcaaaagaatgcttattcatctcttcaatataat

SEQ ID NO: 538142 - DNA, 573 bp, Homo sapiens
aacaaaaaggtaattagaaaagagagttttatgttttgaaggggtaaaacatatgtaattttgaggttaatcttttgtaaaaaagaacacccatttatgaatataaattaaataggaatgcttccactttgggttaagatttcagccagacctaggatctcattgaaaacaacttttaaagccaagaatatggtcagaaaaaagatctgcttaaagattttggtgaactgttgtggcaaccaagacttgggggaawaaacaatctctgagaaaggggaacaatgtagtgtgaagaatcagggcatttgctgactgtagcttagaatccaaagccttgtgtagagaacctctaccaagagacagaacaatgaggagagaattttggtaatctgtggaaacagagggataaaattataatcctgtggagataagaccctaattaagacagaaatcagtagccaaagataattttaaaaaaagtaactttttgtatgttaagctgttggtcaaataagaaattaaaaagaaataaaaacatttaaaactagttgatgataaaaaaagacatatcga

SEQ ID NO: 538143 - DNA, 142 bp, Homo sapiens
agaagacagtgcttttggtttgggccgtattccaagaccataagaagactctcatattcaaatagaattgtcaaaaaatcaaatgtgagtgtaaaaattaccattcmattcagtgcattttttcaccaatgtggataactga

SEQ ID NO: 538144 - DNA, 486 bp, Homo sapiens
tttcttgggactgccaaaggtcagcatccaagcagctttctccrtagtggtccagtttctttcagtaagaaacttccagtcacacacctgtgaatatactcctgttgccagcattctcagagctggtgtgtgtgtgtgtgtgtgtgtgtgtgtgtgtgtgtgtgtgtgtgtgtgcgtgcgtgctgggaaagaggtagacctagttatatgaaagttggaggagcaggaggagggaggaggaggagctaatattgagtatttattttgtaccagacaccatcctaagtgctatagctcactcagtcctcacatcagctctgcagctttgcacctgttattgtcatcttttttttttagatgaggaaagtgaggtacagagacgttaagcagcttgcccaaagtaaggcatctctgctaattgacagagctgaaattgaactcaggaaccttctagattctatgtatttggcttttcacaacatcatt

SEQ ID NO: 538145 - DNA, 477 bp, Homo sapiens
gtgctttcctgttcacattcagagactgtctccaaacaccacaccactagtccaacaaaaagaaagctttgcttggattttccttgatatttatttaataattattggtttcaattgctattttacaatattatcctatagatgcaggaaaaaarggggggaataataaattaaaatttctcaaatacagttaattaagataggcaaaggaatcagttcattattcaaacttgtcccatcatacttgaacttgctttcctctagccataaccacagtaggagttacttttcagtctagaattttaatccgtccaaatcaccaaacccactgaaaaataaagtgcaacaaacactgtgtgagccgctgcaatgtttgaaatcacacttctttctcagtcaccttctcacttagttccttctttaaactggagaatatttttgtggtttaatctgcgcaaatttttttttcttcttttt

SEQ ID NO: 538146 - DNA, 477 bp, Homo sapiens
gtgctttcctgttcacattcagagactgtctccaaacaccacaccactagtccaacaaaaagaaagctttgcttggattttccttgatatttatttaataattattggtttcaattgctattttacaatattatcctatagatgcaggaaaaaagggggggaataataaattaaaatttctcaaatacagttaattaagataggcaaaggaatcagttcattattcaaacttgtcccatcatacttgaacttgctttcctctagccataaccacagtaggagttacttttcagtctagaattttaatccrtccaaatcaccaaacccactgaaaaataaagtgcaacaaacactgtgtgagccgctgcaatgtttgaaatcacacttctttctcagtcaccttctcacttagttccttctttaaactggagaatatttttgtggtttaatctgcgcaaatttttttttcttcttttt

SEQ ID NO: 538147 - DNA, 416 bp, Homo sapiens
tcaagtgtgcacaagaatgagcctgtcttcccgtgtgaatgtgtaagtacagaaagaaggttttaaatgcacatagacacacactcttcaactgccatacgaagcgtctgcttccccagtcatttcaggaaccatcagattattcacggctgggaggccctggagtcttacaaatctgtttaaaaaaaaaaaaagatataaaatttaaaaactttaaaacactggaaaataaargttttaagaataattgctgaaactgaaatgagagacccatctttacacttacatcaaatggagctactgactgcactgaatggtaaaatccaatagtgaaaggatacacctcaccagactcaagacaacacacaacaaatgagagttctgcctgccactgatcgttgtattcaatttgtcag

SEQ ID NO: 538148 - DNA, 611 bp, Homo sapiens
gcatttttggtttgttttgttttctaaaccgtttgaattaacgttagagactggagataaattagggaagatattttccacttacacaattttaacagaaacatattcattacaagttgtaagaatgcaaccactctggaaaatagtttggtattactagtattactgaagacgtgaataccctgcaaatagcattcccactcctgagtgtgtgcaccasaacacattgtctgtgagtgctcaaggggaggtagatataaggtattcacatacaaagtattcacagcagcagggtttacatcagctccaaactgaaaacaacagagacccttaccagtagttctgcttttgccctttgccttgtgatctttgttggacccttatcagtagttctgcttttgccctttgtcgtgttccctgagaagcatgtgatctttattagacccttattagtagttacgctttttaccctttgaagcatgtgatctttgtacctactccctgttcttacaacccctccccttttgaaatccttaataaaaacttgctggtttgaggctcaggcgggcatcacggtcctaccgacatgtgatgtcatgcccagaggccca

SEQ ID NO: 538149 - DNA, 552 bp, Homo sapiens
tgaaggcaggaatctatcctgtcgtgttcactgctgtactgtcagcacttagaacactgtccatctaatacaaagaaggtgctcagtaaaggctttccaataaatgaattgttgaatggaagacaacacactaggattagaacaatggaggaaacagctcactgtatggtgctgaaatatgtggacaaagttgatatagattttgtagaaagcagggagggtgccagcagtttctgagggctccatgagctgcatgtaacaggtgaaggccaaagrcttccagtcaagggcagtggctaatgtgcaagtgcctggccctaggcaggtatggagggtggagcttcctgcccccttctgataggaacattcatgggaatgttcacctttattcactcatggaaacatccaagaggcctttggggcaagttgcgtttgcaggcctaagaccactcatgggtcctatttcctcttccagtataccatgtgtattggaaggatacacaggcaggattactgcagagtaatcctccctgtgcaccagcctgatccctg

SEQ ID NO: 538150 - DNA, 631 bp, Homo sapiens
tgtatgatgagacgtgggctctgctcactcaccgtgacctcgaaacccttgagacccctgtggagcagagcacgtcctcacccccagcagcccagcctcctcctgggacccccttctgtcccatcaagggacatctctgatacctgggagacctgggcaccggagccccttgctcaccmgcccctgcccagtgaagaatgaatgacttcaggatccactgcttaacaaagaaacacatgaaggggcctgattttcccggctgctaagaggggaaaggaagctgggctctgtgaatcacacaatgccatccaaacaattcaaggaaatgtccaagggaagggaccaaaatagcccagcacatccctgcatgctgggagagtcaagaaaatgaaagccggggtctgtccagcacaaggagatgggacatttaaaaaaagaaaagacagtttccccacagcagaggaagctgccatttataaatatttactgagacaaagttgtgcattcacttccaagcccaggaaggaaatattccagggcagaggtagaggtctgggtgctggaggccggctctcccctgccggggagccagccaccgtgcccatcaatctgatcctcagctctgggttac

SEQ ID NO: 538151 - DNA, 605 bp, Homo sapiens
ttgtttctggagaatggacgtcaattgatggacatcactgaattctcttcctttaagtttctcataaaagtttctatacatttacagcaagtaaagcctatatttttctgtgtattctaaagtgcactgtctttcatgatctgactaccaggagagcaactcctcattgggttacttattactatttttattatatttaaaagactttgcaattttcttttaagtgatttgttttgccttgtaattagatgctgtgaataaaacaaaaagagtggggggtttttttggtttttttttttttagagatggggtcttgctatattgcccaggctggtgtcaaactcctggcctcaagcaatcctcctgcctcagcctcccagaatgttgggattacggtcttagccaccttgccagacctagaagagtcgtaaagtgatcttgggattgtctttagcaatcccactgaaagataaaaggataaaaaaggcagcaagataaaaatgcaggatggsgctgggcatagtggctcacacctgtaatcccagcactttgggaggccaaggcaggtggatcacctgaggttaggagttcaagaccagcctggc

SEQ ID NO: 538152 - DNA, 527 bp, Homo sapiens
acattggttatgtcgcttaacctcttctgcttccactttatcttcttatatttttcccttaagtatagtaaatttcagttttcaaaatttcacctgtggcctttgtgggaatacagattttcctcacttttaaactttttctttggtcattgagttcttaatgttatctcctctactaagacaattattttcaattctaattttccagaaggtggctcatttcatcaaaatttacaaatttatttgtaaaactcctttacatcttgaaagcagtttctcttttatatgtatagctatgacattttatcattcttaaattttttgtgtgtgttttyggtgagaatttccaaatatctgttcatttttttttgtatttctaaaaaactgttttatgtatttatttttctaatttttctgtcataatttttgtatttttgtatcaatttatttcagaatattttcttgttttcttgtctcttaagataaatttgcaattaatatatttttatgtgacttgttttcaataa

SEQ ID NO: 538153 - DNA, 414 bp, Homo sapiens
tggggtttggatgtatgattcaagggacgaccaggrgcctctacaaatattccagtttgtgggtttgtgagtcttaaagaattctaagaatagcaagagtctatcatatatcataaacagaagggaacaaaaaagtcacataaatccagaaacatagtgaattcctgatagaagtgtttaaactctatgcagcagtagtaaactaccttgaacttagctaagagtgaaataatgaaggacgtaactatgcaagatagactgcagtggagacactaagccctgcttcatagagctcacattccagtgaagggcaccaacagaaaacaaagagggaaaatgtatacattatgttaggtggtggtcttaaggagaaaaaatgaagcagttaaagaggttaggaagtggtttttggga

SEQ ID NO: 538154 - DNA, 414 bp, Homo sapiens
tggggtttggatgtatgattcaagggacgaccaggagcctctacaaatattccagtttgtgggtttgtgagtcttaaagaattctaagaatagcaagagtctatcatatatcataaacagaagggaacaaaaaagtcacataaatccagaaacatagtgaattcctgatagaagtgtttaaactstatgcagcagtagtaaactaccttgaacttagctaagagtgaaataatgaaggacgtaactatgcaagatagactgcagtggagacactaagccctgcttcatagagctcacattccagtgaagggcaccaacagaaaacaaagagggaaaatgtatacattatgttaggtggtggtcttaaggagaaaaaatgaagcagttaaagaggttaggaagtggtttttggga

SEQ ID NO: 538155 - DNA, 414 bp, Homo sapiens
tggggtttggatgtatgattcaagggacgaccaggagcctctacaaatattccagtttgtgggtttgtgagtcttaaagaattctaagaatagcaagagtctatcatatatcataaacagaagggaacaaaaaagtcacataaatccagaaacatagtgaattcctgatagaagtgtttaaactctatgcagcagtagtaaactaccttgaacttagctaagagtgaaataatgaaggaygtaactatgcaagatagactgcagtggagacactaagccctgcttcatagagctcacattccagtgaagggcaccaacagaaaacaaagagggaaaatgtatacattatgttaggtggtggtcttaaggagaaaaaatgaagcagttaaagaggttaggaagtggtttttggga

SEQ ID NO: 538156 - DNA, 620 bp, Homo sapiens
taaataaatgtccagtggaatccacagcagacccaccctcaccttcagttttattgttttgctccaaacataactctgctgcttccactgctctggggctggtaaaaatgagtcccccgtaatcttcaggatgagaaagctgcacaccaaaaagcaataaagacattttatacgatggctatgttcaacatcttccaaggagctaagactcagaattccaaatgcttcacaatagtagtaggcaaactaattccttccacccatccccccaacacttactgagtgcttactatgtgcctggaactatttattctaggacttttagggtacacaggtgaattccttattcccagtatttccctcaggaagctcasagtctagggcagagacagtgaaacacagggtgataagtgcactgcagcacagaggggaagcctgacgcaagctgggattagagtggggtgcaggtagtgggggaagacttgacccgaatctgtaataaaaatgggaatattcagggggtgatatcaatgctgaagtcctgattttcaaagaggataatggtgatatcatctaccgaacatttactctgagccaggcactaggctgctgtacatatc

SEQ ID NO: 538157 - DNA, 701 bp, Homo sapiens
tcagcagttcatctgaccctggcctcccagctcagcagacactcaagcaattttagaaaggggtcagaaaactctagcctggggtcaaagccaagcccattgtttgtttatttcctatggctgctctcatgcttctgttgcagagattagtagttctgacagaccatttgcckgcaaagcccaaaatatccttaacagatgaagtttgccagctcatgatctctaggaaagcctggatttcctcctcttcagcaatctaagataagatagttctacttcatgctctcatgggggtgtatgatcttacacctacagcagaggagtcaaatgacaagggtgtaagagcttgcggttgtactggacattcagggaacagagaggaagggagatgcaccttagaggtggggctgccctacaagtagacggtcagccttcccatccctcttgctccaagaatttttgcctatgtatcttctgaagcctacaattccataattagtttaagactaagtccccatttaaatgctaacacccctagaacaagtgccactttaaatccaagtccacaggcagcccaatcatgagtcagttctttacctgggagcaagctgggagagggaattcagagacagaagtagctcctgagaagggaaaggacagtcctcagtaaggggagagtacccactcacacctcctgcctc

SEQ ID NO: 538158 - DNA, 428 bp, Homo sapiens
ctcacctgtgcatgttacatttgttaaagggtaacttttcaaaaacagggaaaactatcattcatatagatataaatgttattttattaatgaagtgagcagtgagatgttacaaccagttcaaaagggaacccaaagggacggacacatctattactcagaatattgaaataaactggaaattgatgcataagtggctttgccacatggagaaggattggctttccaaggcaggttgatttgcatgtttataaacaagaatcatttgcrttatctgttcttttcaacttcacataccataaaacaggtgaaaggctagactagaaaaccttaaaggggctgggtgcggtggctcacgcctgttatcccagcactttgggaggttgaggtagacatcacttgaccccaggagttcaagaccagcctga

SEQ ID NO: 538159 - DNA, 428 bp, Homo sapiens
ctcacctgtgcatgttacatttgttaaagggtaacttttcaaaaacagggaaaactatcattcatatagatataaatgttattttattaatgaagtgagcagtgagatgttacaaccagttcaaaagggaacccaaagggacggacacatctattactcagaatattgaaataaactggaaattgatgcataagtggctttgccacatggagaaggattggctttccaaggcaggttgatttgcatgtttataaacaagaatcatttgcgttatcwgttcttttcaacttcacataccataaaacaggtgaaaggctagactagaaaaccttaaaggggctgggtgcggtggctcacgcctgttatcccagcactttgggaggttgaggtagacatcacttgaccccaggagttcaagaccagcctga

SEQ ID NO: 538160 - DNA, 508 bp, Homo sapiens
gctgcttccttagcatcaggcttttgtgtgaagacagagtaaatctgcataccccgccatcttaaaacacccatacacactccccccaaatggtcaacctgaggtgttgaagcatatggttttgttttttttktttgtttgttttttttttttgagacagagtctcactctgtcacccaggctggagtgcagtggcgtgatctcggctcaccgcaagctctgcctcccgggttcacaccattctcctgcctcagcctcccaagtagctgggactaccggtgcccaccattgtgcctggctaattttttgtatttttagtaaagacagcgtttcatcgtgttagccaggatggtctgatctcctgacctcgtgatccgcccgccttggcctcccaaagtgctgggattacaggcatgagccaccgcacccggcctatgttttttaaaaattatgtttactatttacttcctggaaaagaagggcacagctaaatttgtagcgctttagt

SEQ ID NO: 538161 - DNA, 508 bp, Homo sapiens
gctgcttccttagcatcaggcttttgtgtgaagacagagtaaatctgcataccccgccatcttaaaacacccatacacactccccccaaatggtcaacctgaggtgttgaagcatatggttttgttttttttgtttgtttgttttttttttttgagacagagtctcactctgtcacccaggctggagtgcagtggcgtgatctcggctcaccgcaagctctgcctcccgggttcacaccattctcctgcctcagcctcccaagtagctgggactaccggtgcccaccattgtgcctggctaattttttgtatttttagtaaagacagcgtttcatcgtgttrgccaggatggtctgatctcctgacctcgtgatccgcccgccttggcctcccaaagtgctgggattacaggcatgagccaccgcacccggcctatgttttttaaaaattatgtttactatttacttcctggaaaagaagggcacagctaaatttgtagcgctttagt

SEQ ID NO: 538162 - DNA, 218 bp, Homo sapiens
gggaaattcttaaatgtgatttactcacgacatccagctaatttttaaaatactatttttttttgtttttttcttgagacagggtctcatgctatcacccaggctggagggcagtggcacaatctcagttcrctgcagcctctgcctcctaggttcaagtgattctccttgaacatctaaggtgcatctaagaaactacattacccttttcttcaaaa

SEQ ID NO: 538163 - DNA, 514 bp, Homo sapiens
agccatgacaaaataatcagtaatgatgaattcatccagccataaactattacaaaactgaacaaaatgtttgaagcaactgtttcagatgttggaaaacattcagagcagaattatggttcctaggagaaaggaataccatgataagagccctccagttgccccagctctctgtctaggcacagggaggaggagccaaagcagaacccagggatcttgctgacctgaggaggaacacactttgagtttgaggctagaattttgaaccagccacccagagagaagagaactagaaactgcatagagaagaaagaccagaaatctgcataaaggttcttttaagacttggacaaataytaacctcctcgttcatgtccagggaaaaactacaaggtacaacaatgtagctctattggggagctgtgagtgaaatgaagatgccagggccacaaagagctgggagtcacaagagttctggccaaccaaaggagagcgggctcaccgacaccttggg

SEQ ID NO: 538164 - DNA, 603 bp, Homo sapiens
agctgtgtagtgaaagggcagcaggaaacttcatgaagtatgccttcagctcagagtcagaacccgcattcagaactttgctggggatgagagaaaggtcaaacctgtgggttaaaagagaaagagagagagatgagaaatttacagatttttatgaagaaagctacaataatttgtgctctggacacagacggacttgggttagggtcctggctgtaccacttaacctacataggcttagtttctatattaataaagcagggctgatggtgaatataaagattttaaaggctctagaatatagcaggcactcaaaaaatgttacagttattattccaaagaacatttggtgacataaaaacatgaggataaatatcatccaggaaaaatggaagattctgygtaggtgatagtccaaacaccattcagaaagccagtgcatgggcaaattgctttggagccacaaaaagctaggaattaatgacgtcttgggcttcaaggaaatagtggggagctgatctcccacaggtgtgggagcctatccaaactctctgttttcctccgtgtcctctgactgatgcccaaatccaacctggatgactt

SEQ ID NO: 538165 - DNA, 605 bp, Homo sapiens
attttagtcacctcatggaattttttaagtgtagttgaaaagaaaagtgggtacttttagaaaaaaaactgacaggttttcagggctcatgtagacctgaagaaaaatgagagggagcaaaattaaggcattttttktgtgtgtatctttttggggggggattgggtagagtggctttaccatattttttgaaaaagtccctttttttcatttgaggagctaattcaattggtttgggcaaaagcagcattatcagaaatacacagttggattctgtatcatgcctctgtttagtaagaccacggggagataatggaataggaattagaaacctcaggcttgagtgcccgtagcagtattaaactaagaatttaaaaacaggcagaacaaaaagaaatcagtgaacacctgaaaagggagacacaaaaatggagtagcaaggagataaagagaagacatccatgctgaggggagcagtagattgctatcagaaattgtcccaaataactgtgtttccctacctctgaagtagaaattagcttttagcatgctagaaagagactagatatagataggccaaaaggaatttaaaatttacaaagcca

SEQ ID NO: 538166 - DNA, 632 bp, Homo sapiens
aaacaaatgcagctaagcagggacctaattcatcaaatcttcattattttatttcacaaatatttgaacaccaagagtaaatggactaagtaagaggagatgctgtattacaaaataaaaataaaacaaatggtaaataacatgtttaagaaatctttatccacattatcaatccatgagacataatttaaattgtcacgtmagtttaagccagtcaagatgcaaccaagcacagcaactcattggcattatagaaatgcttacagaaggtttctgaatgtatgctcatgtcataaaggaagatgaatttttctacgtaacctcaactttatctatatgcaattaaaaatgtggctcattgacaaattccttaaaaattcagtcatcgaaaagtaaagtaccaaaatccgagcagtttactaagactctaaagatagaccgtgtcctttgttacacagactttgtctaatttccttcccttgagtatgggaaggacctgtgatgatgatggggtatcactcccatgattaagttaccaatcaactgattttgagctaaatatagagaggtgatctcttttgtggtaggcctgacctaacgaattcatgcctttaatataaggtgaaatatta

SEQ ID NO: 538167 - DNA, 516 bp, Homo sapiens
gctcactaggaaccagacacctcttaggaaaatctttctatctttcaaactcatggataaatccctgtcattcaacttcatttcttatatgcacataacacaatttctcattatgaatttcatttattttagttgcttgtaaattctttctcattagcctgtaagtctctcaagggcaggattatatctgtccccttcccacagacaatatgtgacccagggcctacctactccagtgcttaacacaaaagaggtacccaataaayacctgaagaattaatcagtcaattcactatagactaagtattgttctacaaccatattttccttcttaaaaatatatattggagattttctcatgatggtatttaaagaactacaacatttcacttaccgtcttattaaaccagaaacatactgcatgaatattccaacatttgtttatctattttcctattggacatttggagttttttcaattatttaataaaatcatgttcacacagttttgcacct

SEQ ID NO: 538168 - DNA, 688 bp, Homo sapiens
cctttagcctttcttcagcagcaagcatttccttaactgactgttattaacataattttgataggaataaactctctttaccaatatttaggaagcaaaggagaaaatataaaaactgaaaaaggagcagcaattagacagaaactgtagggtaaaaccatgaggcagaaggaacagaatgagtatggtataggcagagtggttttcatttagtgagtgctgaatagatggaaatgaaagcatattacatatatatatattatatataattgtatataatagatataataaataaataaatatatatatataaaataaattcagaaagatgtagaaatttgcccttttagacacacaacrtaagggacagggttaggattctaatcctaccaacctaacacaacattttggttagctcagtcacttcttctgttaccttggacaagccacttaacttttctatgcctcagtttccttataattaaagaggtaataaggataggcaatatttaaaatgtgttcagaataatgtatggaagttagcaagtgctatataaaagtttggttaagaattaaaataaattacaaaaaaggaagccataccaagctgaatagcctttgcttttaactgctgtagactacaataccatgctcctcctactatggttactgattcctatcaatgtct

SEQ ID NO: 538169 - DNA, 522 bp, Homo sapiens
cccggcgaggcttctgggaaacacataatgcaaaccctgaccttgggctcctgacctcggttctgcaagagggaaggaggagacaggcagagggccagagagacagagacagagagaccaacagacacagagagagacacasacagagtcagagagagagagagaggcagacacagagagagacacagacagagacagagagagagagatcagcagacacagagagagacacagacatagagggacagagacagagacagtggggaaacagagaccaagagacagagacagtggggagacagagagagagacagacacagagagacaaagagagagagacacggacagagatagagagacacagtggggagacagagaccgagagacaaagacacagagacaaagagacaaacaaagagacagagacagtggggagacagagagtagggagatagagacagagacacagagacagtggggagacagagaggcagagacagagagacacatacagagagaaag

SEQ ID NO: 538170 - DNA, 522 bp, Homo sapiens
cccggcgaggcttctgggaaacacataatgcaaaccctgaccttgggctcctgacctcggttctgcaagagggaaggaggagacaggcagagggccagagagacagagacagagagaccaacagacacagagagagacacagacagagtcagagagagagagagaggcagacacagagagagacacagacagagacagagagagagagatcagcagacacagagagrgacacagacatagagggacagagacagagacagtggggaaacagagaccaagagacagagacagtggggagacagagagagagacagacacagagagacaaagagagagagacacggacagagatagagagacacagtggggagacagagaccgagagacaaagacacagagacaaagagacaaacaaagagacagagacagtggggagacagagagtagggagatagagacagagacacagagacagtggggagacagagaggcagagacagagagacacatacagagagaaag

SEQ ID NO: 538171 - DNA, 531 bp, Homo sapiens
gcagcgcacacctgaytctctctgcacacctggttctcagtgcacacccggctctgcagcgcacacctgactctgcacacttggttctcagtgcacacctggctctctctgcagacctgattctccgtgcacacctggctctctctgcacacctgggtctcagcgcacacctgctctcagtgcacacgcggctctgcagtgtacacctggctctccgtgcacacctggttctcagcgcatacccagctctgtggtgtaaaccaggcttgacaggctctgtggacccatgcctggctctgcaggtgcacacctggctctttcaccaggggtctccagttttcctgcgtgcaggaagcccccttgccatacctgcctcccccagctccagccatcagggacccttaagggatgctggatgggagcccggactccacacagacgttcactccaggcctgctgggcagtgcacggccacatccggaagaatccctctcaccccaggcacctgcctaggggcacagaggccacagg

SEQ ID NO: 538172 - DNA, 531 bp, Homo sapiens
gcagcgcacacctgactctctstgcacacctggttctcagtgcacacccggctctgcagcgcacacctgactctgcacacttggttctcagtgcacacctggctctctctgcagacctgattctccgtgcacacctggctctctctgcacacctgggtctcagcgcacacctgctctcagtgcacacgcggctctgcagtgtacacctggctctccgtgcacacctggttctcagcgcatacccagctctgtggtgtaaaccaggcttgacaggctctgtggacccatgcctggctctgcaggtgcacacctggctctttcaccaggggtctccagttttcctgcgtgcaggaagcccccttgccatacctgcctcccccagctccagccatcagggacccttaagggatgctggatgggagcccggactccacacagacgttcactccaggcctgctgggcagtgcacggccacatccggaagaatccctctcaccccaggcacctgcctaggggcacagaggccacagg

SEQ ID NO: 538173 - DNA, 531 bp, Homo sapiens
gcagcgcacacctgactctctctgcacacctggttctcagtgcacaccyggctctgcagcgcacacctgactctgcacacttggttctcagtgcacacctggctctctctgcagacctgattctccgtgcacacctggctctctctgcacacctgggtctcagcgcacacctgctctcagtgcacacgcggctctgcagtgtacacctggctctccgtgcacacctggttctcagcgcatacccagctctgtggtgtaaaccaggcttgacaggctctgtggacccatgcctggctctgcaggtgcacacctggctctttcaccaggggtctccagttttcctgcgtgcaggaagcccccttgccatacctgcctcccccagctccagccatcagggacccttaagggatgctggatgggagcccggactccacacagacgttcactccaggcctgctgggcagtgcacggccacatccggaagaatccctctcaccccaggcacctgcctaggggcacagaggccacagg

SEQ ID NO: 538174 - DNA, 519 bp, Homo sapiens
ggacccttaagggatgctggatgggagcccggactccacacagacgttcactccaggcctgctgggcagtgcacggccacatccggaagaatccctctcaccccaggcacctgcctaggggcacagaggccacaggagaggcctgctgacygcctcctaaaccttcctatactggaagcacagactcagccagtctccagcagcaaacaacgtgacccactgtggaaaagctgagctgcctcaaaggacgtttcccaggtgaagcccaggaatgacggccacatatgggcagagctgggtggcaaggggcaggcctgtgctcagtagactcagccggaccagggcccccatgtggacccaacgccactcgccggtcatcccaacagtgtctctcgctcagagacaaactccaaaggccagggggtctctgctgactcttccagggcatccatctgaccccatgctgtgcaacaactaagccagggccctccgtggagtcgccttaaactgcagcttgag

SEQ ID NO: 538175 - DNA, 569 bp, Homo sapiens
caatcacacttcccttccttgacctcatggtgcaagttactcaacagcaaagtgcaaaggcggcacgctggccacatcagaggcacagcaaggcccctgccgaygctgagctaccagggatttattcctaaaaagacaggaccagcttgggccagaacaggctcctcccgcgctgaggaagttccacccaatcccacagaacacagctctcctcttcagcaggtgccggggggtctgggagcctgaaccccacagccctggaggcttccctcccctcctcctgtcaccacctgcaaaccccacttctcaaggcccagggcttcccagaccccaggacacaagatcaggggtttctgggcctcggggccaggcaggaaagctagcaggctcctctgctcaccggtccggcatttgcacaacactgagactgacagcttgggttgctgataaatgtgtttactcacaggccagacctgcacagcctgcagacaaggaggaagcggtttgtggctggagagttggacacccccacccccactcggcggtgctctcagtgaggcagccccggg

SEQ ID NO: 538176 - DNA, 579 bp, Homo sapiens
gtgctcaggtggaaagtgcacaggtctcaggtgagggcgggtagacccaggcccaggacatggcctttctgccctcctgacgttctgtgcagctcccactctgggtgcccatcctgtcctcctggcccagcaggcccaatgctgcagcgcaggtccaggctgctggagtcactcacacaccgcatgtgtcctgggcacatgcaaatgtgggcggggttcctgcgtggcagtctcatccctatggtgagagagaagcacctggtgccaagcccggggctgagccacacacatttgccagctccagcagctaagacagaacggagcaagggagagaggccacccgtccctcatcctgccgtgttcagccctcgtgtggccactcagggggctgagggtttgcccaggtgtggaagagctccttgcaccgccagcaaatccycgctctcccaggacaccaacggctgagagtaactgcccaagggtgccccacggtgtcccacaatgtaagagctgttaccctggcttatggatgagctggagaggccagtgacctttgaggttctgtcctaaaagggccag

SEQ ID NO: 538177 - DNA, 553 bp, Homo sapiens
ctgcccgcgaggctgtcgggtgctgaccaggccagggggccgacccggacccggccgcctccccaggggccagaggacgcgcggctgcccgcgatgcccggaccaggcccccggccacccaacccctgccccgggaccccaggccccaggagaagaaaaagcgccgaaccctcgggggcagcccagacgcgagggctctcgggccgtctggggagggactccgggagaagctcgggccggctccgcccagagccccacgaggtctcagttccctaaagaatgcgggggagggggcttcctgcccggaagccagggaggcccgagcaacgcccacaccccaggacgcggcccttcccggcccgggggtccccgygcaagcctcgccctcctgcctgtcccggggtgctccccgaggccccggcccgctgcgctcaccgatctcgtccccgtgccccatccgcgccagcgcgtagagcagctcgggggacagcagtgcggggacacccttcagcgccaccatggcccggcagacggggcgggcggggcctagggg

SEQ ID NO: 538178 - DNA, 527 bp, Homo sapiens
ggccgcactacagctcccagagatttcctggcttgcagcctggctccaccccccacccagcctccggccccagcaacgcgtgacgtcagaagaggctggagctgccgattggctgaacgacgcagctaggtcaagtccagtcggaggaaagaagtttgtctccatgtggaaaccatgtgtctctagctgggagggggaggaggagaaggcggagaaaccgagatcaagtgattataggggaactcgctgaaatgaaggcggggaggttgtgcacctgagtcggccarcgatgcccttttgcagtagtgaccgaaaaaaaaaaaaaaaaagacgtacacaacaaactacccaaccccacccccaataataactactaaaaagctagggtccctgcttccttccagaaaccagggacccggtagatgctggaatcctatcggaacgcccagatccctctccctcccccaacgactgaatgatgtaagcgtttcggaaagcagagctctggagcaaaacaagccccgcgc

SEQ ID NO: 538179 - DNA, 625 bp, Homo sapiens
ctgggctaagcttatctctccccaactttcctctctcattattccctcattcctgcagcttcagccttgcttcccttctagccccttttcctagcctttgaccttatgtttctatttgctgccacttctcagcccattgtagtcttccactgtatcactgaaatgactgtcatacacaaagtcatcaaagccctcctaactctcagagagccactctgccattcacttgatctttgcaatatttgacaccttccttatgaaaactcctcttgtgaggccaggcgcggtggctcacgcctgtaatcaatcccagtactttgggaagctgaggcgggcggatcgcgaggtcaggagatcgagaccatcctggctaacacggtgagaccctgtctctactaaaaaaaaaaatacaaaaaattagccgggcgtggtggycggcgcctgtagtcctagctactcccgaggctgaggcaagagaatggcgtgaacctgggaggcggagcttgcagtgagccgagatcacgccactgcacttcagcctgggagacagagcgagactccgtctcaacaaaaaaaaaaaaaaagaaaaaagccgggggtcggaaagaaaactcctcttgtggct

SEQ ID NO: 538180 - DNA, 473 bp, Homo sapiens
ccaaggcttaccacagagtagaacactgtcttttaaccggaatggaaaaaaatacctgatgtctctgggtgcacctgcataaaaacaaactacttttttcacagaaaaataatgcctcagaaagtgtccagcacaatgcctggcacatagttaggtccccatacatggtggctgctatgacttaaaaataaataaataaaagctccccaatccaaatgggaagaagggaaccagtgtgtaaccagaagatccccccacccccaacacaaacactcctactcacagacacacatacatacgtaatcacgcacacacttgcgaggcacctgtgtgtgccttcacacagtcaaatgaaatcccargccgtccaaatccgagttacagatttactcatgcctttctcccttcaaatgcaaagttattttccagaagtgggaggagatgtcagcatccctctccacactcctctgccc

SEQ ID NO: 538181 - DNA, 485 bp, Homo sapiens
tctgtgaattcatatattggctctatatccgaattgcttcagaagccattgtttcccagcaccactgaacactcatccaacctacaactagaagataataacaaggcacactatccaaaagagcatgctgaactcagtcaaaataaagtaaaatgatggccaacacagtggctcacacctataatcccagcactttgggaagccaaggcaggaggattgcttgagcccaggagtttgagaccacttgggcaacaaggcccatctctattttaataaaatttaaaaatatgtttaaaaaaattttttaaaaacccaaaaaaacaaagtaaaatgagaaactgctttagccaagtgtaccacagatgttaactaaaagcccccataacactacaaaaaggaggttgccagctcaggataaggatggtacttggtaaggtaccrctaaagtaaggtacactgggaacactaaaaaaaaatgagagcta

SEQ ID NO: 538182 - DNA, 583 bp, Homo sapiens
tgaggacagtacaaggtttaggagtatattacagagagagatgcctaattatacgtacacagagaaagtaatccaaacagtacaggcgataaacaagtaattaaatgtatcacacactagcacattcagaaacaacccctttgcttctctgaggtatgtgtccaaccaagcccttccaataatgttccattgaaatattcaattatgataaattccctgtgtaaggctgagatgttctgaataacccatctagttagcccacttttcttctcccaataaaatgcacctctgagagcaaacactaatgaattgtgtcttcctttcaaacacccttaccctgaacrcttaacaacttccaatgacaaagacatttctatcattttatcattgaatcacaggtaatctttttcgcaaacagcatccctttaagagaggcatcctaatgtattccctatttgaatgggagtcattatctatgaaatgtgactaccttaaccagatatgtgacttttcattgactacaacatagctccaatacataaacttgtgattatttagggtgtagtttggtggcagtcaaaga

SEQ ID NO: 538183 - DNA, 593 bp, Homo sapiens
tcacataccaagctagagttcaattagaaagttgcagatcagtaactccagaacactggccagagggtcagaagagctgactcatggacattctcattgtagataaaggattcacagggtttaatagtagttcttaagtcttttatttataaaacttagcagttccagcagtctcatgatttaggtaaatttgctgttgattggggtagaatagtagaagtatattaataaaaacacctttttaaaattacaaagtattctgtgcactgctgaagtgattcatsaatgagaaaatctgaattgctacacattaatattttttctagctctcacacctatatgagtctcagaaaggacagagtgaacagagatgagaatgcaaccctcttttagcaaatgatcaggcgattgtgtattgtgcaatgattaattgatattttaaaatgttttcaggaagactcaaacactttttgtgaattatgttcttaattttatagtcacagctactaaagcgagagggcttcttagtaacaaattatttttatagtcatcaaaggttaaaataagagagtaagatacctaaggccacatgg

SEQ ID NO: 538184 - DNA, 593 bp, Homo sapiens
tcacataccaagctagagttcaattagaaagttgcagatcagtaactccagaacactggccagagggtcagaagagctgactcatggacattctcattgtagataaaggattcacagggtttaatagtagttcttaagtcttttatttataaaacttagcagttccagcagtctcatgatttaggtaaatttgctgttgattggggtagaatagtagaagtatattaataaaaacacctttttaaaattacaaagtattctgtgcactgctgaagtgattcatcaatgagaaaatctgaattgctacacattaatattttttctagctctcacacctatatgagtctcagaaaggacagagtgaacagagatgagaatgcaaccctctyttagcaaatgatcaggcgattgtgtattgtgcaatgattaattgatattttaaaatgttttcaggaagactcaaacactttttgtgaattatgttcttaattttatagtcacagctactaaagcgagagggcttcttagtaacaaattatttttatagtcatcaaaggttaaaataagagagtaagatacctaaggccacatgg

SEQ ID NO: 538185 - DNA, 593 bp, Homo sapiens
tcacataccaagctagagttcaattagaaagttgcagatcagtaactccagaacactggccagagggtcagaagagctgactcatggacattctcattgtagataaaggattcacagggtttaatagtagttcttaagtcttttatttataaaacttagcagttccagcagtctcatgatttaggtaaatttgctgttgattggggtagaatagtagaagtatattaataaaaacacctttttaaaattacaaagtattctgtgcactgctgaagtgattcatcaatgagaaaatctgaattgctacacattaatattttttctagctctcacacctatatgagtctcagaaaggacagagtgaacagagatgagaatgcaaccctcttttagcaaatgatcaggcgattgtgtattgtgcaatgattaattgatattttaaaatgttttcaggaagactcaaacacttttygtgaattatgttcttaattttatagtcacagctactaaagcgagagggcttcttagtaacaaattatttttatagtcatcaaaggttaaaataagagagtaagatacctaaggccacatgg

SEQ ID NO: 538186 - DNA, 593 bp, Homo sapiens
tcacataccaagctagagttcaattagaaagttgcagatcagtaactccagaacactggccagagggtcagaagagctgactcatggacattctcattgtagataaaggattcacagggtttaatagtagttcttaagtcttttatttataaaacttagcagttccagcagtctcatgatttaggtaaatttgctgttgattggggtagaatagtagaagtatattaataaaaacacctttttaaaattacaaagtattctgtgcactgctgaagtgattcatcaatgagaaaatctgaattgctacacattaatattttttctagctctcacacctatatgagtctcagaaaggacagagtgaacagagatgagaatgcaaccctcttttagcaaatgatcaggcgattgtgtattgtgcaatgattaattgatattttaaaatgttttcaggaagactcaaacactttttgtgaattatgttcttaattytatagtcacagctactaaagcgagagggcttcttagtaacaaattatttttatagtcatcaaaggttaaaataagagagtaagatacctaaggccacatgg

SEQ ID NO: 538187 - DNA, 481 bp, Homo sapiens
ccaccacgcccagccatcccttttccttttttagcaagaggaattagaagctgtttaagggtcaggaaaagcaaaaaatagtgaagcacgttctcctggatcacttgattcccttgtggacacaagtgaatccttgtactcttagttttctgggtggaaaataaatcacctttagatgtctgcttgaattaagtgagaarttacaaggaaccaatatttcagcaaaaacatgtgacaaatgctttttagcttaagagttttaaaatttcagtcatatacagaataaattgaatgccataacaaactatcctggagccattatccagattaaaaaatgataatattagactattttttcaactattcctccaccaatttggaagtgaccttccatatgattattatatttatggatatttgaggttagatttacctacattgaaatcaatgaaatataccaacgttaactatacagctttga

SEQ ID NO: 538188 - DNA, 481 bp, Homo sapiens
ccaccacgcccagccatcccttttccttttttagcaagaggaattagaagctgtttaagggtcaggaaaagcaaaaaatagtgaagcacgttctcctggatcacttgattcccttgtggacacaagtgaatccttgtactcttagttttctgggtggaaaataaatcacctttagatgtctgcttgaattaagtgagaaattacaaggaaccaatatttcagcaaaarcatgtgacaaatgctttttagcttaagagttttaaaatttcagtcatatacagaataaattgaatgccataacaaactatcctggagccattatccagattaaaaaatgataatattagactattttttcaactattcctccaccaatttggaagtgaccttccatatgattattatatttatggatatttgaggttagatttacctacattgaaatcaatgaaatataccaacgttaactatacagctttga

SEQ ID NO: 538189 - DNA, 616 bp, Homo sapiens
tgctgaaaattctatgttattgtcattgtttgtgtgtctcctctaatctaatttcctaaagtaaaaagtggaggactaagtaaggctatgcaatttttgtccacccaagagggactgggatttgagcaggcaacattaactttgctcctaagagaaagtcccaacactctaatcattttttctgtttcatactgttaaaacatgtccctggctgacagacaaaatggactccctatgactaactgaagtaagttaaaacaaaaccaacaaaaccaggtggccatgcctgggtgacaaagtggtcgcatactctgtgttctcagaaagatgtcaaagcatcacaggatcttcctttctacaattgatatggtttgggtgtgtcctcatgcaaatttcatcttgaaktgtagcttccataattcccacgtgttgtgggagggagctggtgtgagataattgaatcatggcatttccccatactgtttttgtggtagtgaataagtctcatgagatctgatgcttttataaagggaaatcactttcacttgattaaattctctcttagtctgcttccatgtaagacatgccttttgcctcccaccaagattgtgaggcc

SEQ ID NO: 538190 - DNA, 638 bp, Homo sapiens
ccagtgatctgacaggaggcagagcttaggagtaatgctcactcatccacctctcccatcctgctgtgtggcccagttcctaacaggccacggaacggtaccagtttgtggcctgggggttgggacccctgttttacactataacatttgcacacgtctctcatggcctgtctttcagatctgctgtttgtctcractcaagtctagctacctgaaaattagattttttttttaaattgaatttgaatatcttaaagttgaatacacagtctccacttttacacggcccctactgtcttacatcatacctctctagccctggaagatagcaactttacattcacttttcctgttttagggctattattttatcttcagttatcaaaatctatctacttttaaatactttaacttgaaaatacatagtaagcaattatggattatttaaaatagttttcccatgagtataaaaaaaaaaagaatagcaaaagcaatatttgttgagtatttaaaagtgccaggcactgtgcaacatgctttgcttaagtaaatgtttgacaaaatagaaggtcttttaaaagttccatgttttaacgttaataaccatatcaagataaggttagatattctatcaaatt

SEQ ID NO: 538191 - DNA, 493 bp, Homo sapiens
agctcaaaaactaactccagtttttatacctagtgttctagaatggattcaaaataacaatatacataacaatgtacataaaaacctgatgccagtactaaggatgattttattttctaaagattgccacaataacattttcttttccatatgctcttcttataatgtgacttggacacccctcatatagggaggtggagtatgtttctaccccttgaaactggcagagatttgactacaacagaactgacccttyaaattccatagctaatttatgaaaatttctgcctaattctcttgggaagcttgttgtgacaacccactgtcttgctgtgaggaagccccaacagcctataagaggcttcagtggggtgaaaatgaagcctcagtcttcaaccctggatgagcaccagccaacagccaaaatcaacttggtagccatctaagttaatcattatgaaagtggcacccagccctcagttaaagtgccaca

SEQ ID NO: 538192 - DNA, 493 bp, Homo sapiens
agctcaaaaactaactccagtttttatacctagtgttctagaatggattcaaaataacaatatacataacaatgtacataaaaacctgatgccagtactaaggatgattttattttctaaagattgccacaataacattttcttttccatatgctcttcttataatgtgacttggacacccctcatatagggaggtggagtatgtttctaccccttgaaactggcagagatttgactacaacagaactgaccctttaaattccatagctaatttatgaaaatttctgcctaattctcttgggaagcttgttgtgacaacccactgtcttgctgtgaggaagccccaacagcctataagaggcttcagtggggtgaaaatgaagcctcagtcttcaaycctggatgagcaccagccaacagccaaaatcaacttggtagccatctaagttaatcattatgaaagtggcacccagccctcagttaaagtgccaca

SEQ ID NO: 538193 - DNA, 627 bp, Homo sapiens
gtcctaaatatgtgaggatctgtagcactggatatgcaacacataacctttagggcaaaggtttttgtcatggatgtcacatgagactcatctgtggtgcttctaaatatcttgatgtctaagtgacacttccttcttccctgtgagattcatgtcatttgtccatatcaagttttctccatcctggtcactggcaccgctgtattagtgtgctattgctacataacagatcaccacaaagtgagtggcttaaagcaacaatcacttrttagctcacagatttgtaggtcacagtccaggtaggcttgattagcttccctgctcagggtctcacaaggccagaatgaaagtgtggctgggctgggctttttcctggaggattgatgatgggggttggggaggataaccttccaatctgattttgtaattagcagaatttaattctctgcttgtaggactgagatccccatcttcttgctggctgttgaaagtgagttgacctcatcttctacagtctgtactcaggtccttcccatgtgcctgcctccttctttgagctagcattggagagcttctcatgtaccaaaacctccctgtgcttctactctctgacttcctctttgcaac

SEQ ID NO: 538194 - DNA, 544 bp, Homo sapiens
tgtcacaagtgctaaaagtaaatktaaaatgttcaaaatattttaaaaggagaacaacagatttgaaaaattagccaatctgtcatgtaatagttttggttaaagatgtttattatattcaaaaatgagttttgttcacggaattaaagtgttactaattttaaattccccatgaaatgtaatcaacattaaatgccaaataaatgtttgttcaaacatccagttttaacaaaatttagtaattgaagtatgaaactaaaaagtaggatgatatgtacatgaatgtcaagtataagtacatgaatgtcaagataagtttgtgctctttctgttgtgtattgcagaaggtacttgaaatacatttattgaggtatacccctgaagtctaagtaacctgttccagttaatttctacattttgaaaatatgtatataataatggtatccaaattatgccaaatctattcattatgttttaaaattatttagcataatttagtgaaactatatttgacatcacataaacaaccactcgcttatgcagc

SEQ ID NO: 538195 - DNA, 591 bp, Homo sapiens
gtaaatctaaaggaggcagaaaaacatgaaaacgtgagactgactagcctcctagcctacatctttctcccttgctgaaygcttcctgccctcaaacatcagactccaatttcttcagttttgagactcggactacactccgtgctcctcaagtttgcagacaacctattgtgggaccttgtgatcatgtaagttaatgcttaatttatctatctatctatctatctatctatctatctatctatctatccccctaggaaaccctgactaatacactgtctcaacaacaacaagaacaaagcttaagctctggtggctcctggtctctgagtttgggaccctggtctaaacctatattatttaagcaagtgacttcatcacaacccaggaagactgaagacactaatgtccatctattcattccgttactttatacagatttactctacacatagcacctgttatgttccaggtgtctgaggagctagagaaaccacaaggaacaggacaggcacagttcctatcctctccaagcttacatactggtgagagaaacagagaccaaaggggcaaacaaagagacagacaagg

SEQ ID NO: 538196 - DNA, 591 bp, Homo sapiens
gtaaatctaaaggaggcagaaaaacatgaaaacgtgagactgactagcctcctagcctacatctttctcccttgctgaacgcttcctgccctcaaacatcagactccaatttcttcagttttgagactcggactacactccgtgctcctcaagtttgcagacaacctattgtgggaccttgtgatcatgtaagttaatgcttaatttatctatctatctatctatctatctatctatctatctatctrtccccctaggaaaccctgactaatacactgtctcaacaacaacaagaacaaagcttaagctctggtggctcctggtctctgagtttgggaccctggtctaaacctatattatttaagcaagtgacttcatcacaacccaggaagactgaagacactaatgtccatctattcattccgttactttatacagatttactctacacatagcacctgttatgttccaggtgtctgaggagctagagaaaccacaaggaacaggacaggcacagttcctatcctctccaagcttacatactggtgagagaaacagagaccaaaggggcaaacaaagagacagacaagg

SEQ ID NO: 538197 - DNA, 616 bp, Homo sapiens
gtagtgggaaaataactttaatgtgtactgattttcaccataagatatctaatattctaactttaattttgtttctgattttaataatgatgctctaatatattttatgttattaatacaatgttttttatcaaataaaaactcaaactcattacagtgagtttgatggaagaaaaaactataaaagacaaagatgccttttcataatttaacagcttttctctggctttaaaattcattttgtgctattattaccaaaactcacctggtctaataattttttatctgatttaagttggtagagtgaaatttatgcaaattgttggatattaaaaatatttgtacttttaagcactgtagaaactatttttgaaatttaagaaggatcatagctttggatccacaaaatccaaaggtatgtgccataacacwtccaaaggatgtgtttttggtatacccaaagtgtgccacagtatataaaggaaagaagtatactgaaaacaactttaagttatatcagcgttattactcatgataatgatgcttgatcaggtacaaatttatagaaattgttctccatacgtacataacataataaatatccatttcagtaact

SEQ ID NO: 538198 - DNA, 542 bp, Homo sapiens
ttagctgagatcacgccactgtactctagcctgggtgacaaagcaagagtctatctcaaaaaaaaaaaaaaggcaggagggaaagatgaaggaatcctggtgtagtagacaatattggtgctctgyccaaattcccttggatttctttatattggattatttgatactatttccatatgtgccacacacccataccaccactatcttccatgttctttcaaaatccagcatttgtagctcttgtaaggattgcctttgtggtattgatgctgctttgccccctcgcatggagagatgaaaatgtctatgagtttgcattactcccaccagcctcacaaggcttttgaaagcccagctccccagttcttgggtggaatacctctgtcttaaatttcactcaaaaattctcccatggggctcatgctgaatctgccctgttctgcactttagcatgagatcacattcttagattcctgcttgtccctgccctgtcttgccctgccctgacctgactgccttatcagtatttcttgggaatactt

SEQ ID NO: 538199 - DNA, 542 bp, Homo sapiens
ttagctgagatcacgccactgtactctagcctgggtgacaaagcaagagtctatctcaaaaaaaaaaaaaaggcaggagggaaagatgaaggaatcctggtgtagtagacaatattggtgctctgtccaaattcccttggatttctttatattggattatttgatactatttccatatgtgccacacacccataccaccactatcttccatgttctttcaaaatccagcatttgtagctcttgtaaggattgcctttgtggtattgatgctgctttgccccctcgcatggagagatgaaaatgtctatgagtttgcattactcccaccagcctcacaaggcttttgaaagcccagctccccagttcttgggtggaatacctctgtcttaaatttcactcaaaaattctcccatggggctcatgctgaatctgccctgttctgcactttarcatgagatcacattcttagattcctgcttgtccctgccctgtcttgccctgccctgacctgactgccttatcagtatttcttgggaatactt

SEQ ID NO: 538200 - DNA, 562 bp, Homo sapiens
aactttcctgagcctgaatttttttctcttgtgtaaaatgtgaaacaaacaagcaacaaaatcccactcaagacaggtgttgtgatgggtaaaacaagttagaagcagtcatcaaaggtaatttattaatcactgaccatttactaaaagtgagacatttatcttccacattatccctcacagcacctctgtgaggtaaatattatctccatttatgaaattgagacagtgggatttgmaaagattttaatactaacccaaaatcataaagtcagtaaatttcagatcagagattaaagtccagggtcaggtcccattaagaaaaaagaactaaagaacaattccaaactacttcatttagtgcatctctaatcctctttgtgaagctattttcttattcaaagtttccatcattttcaaatatgaaaatattgatgaagtgacattaaaaccttctgtctatttccttcagggctacattcaccttttgcctagggaaagagttcctgccagccattgttctcttctgtaacttttttttgccattcccattgctatttcc

SEQ ID NO: 538201 - DNA, 578 bp, Homo sapiens
gtccctgatttcttccttcctcctccttcccacaaacaagggctctttgaatagtggatgactgaagacagactgatcttggatcactttaagaaagtggaaacgtgtgcaagagttgagcatgtgggcaagctgcctgtaggcactagctcattcaaatcaaacaatgaaaacttggacagtaaaaattctttgcttggaatctagagtggtccaaaggctgacttaattttacttgcagcacttcatccacgcgtttacattattctgattgcttgatcagatcatcgaacagactgtaagaatataagaaattgttcattgatggccttttaaatgtgacaagccatgagattatctgactttttaaaatgctttatrtagaataactttcaggtttaaggcaggcacattgctacagcagttgtaaactgcaggttcacttttggttttggttacctttgaatagtctatgggagctcagagtgaaaaatgtacagagccagccagctagttttgcagggatgcgtgccatgtgtctccatcagattaattttggatacatcattctttttgag

SEQ ID NO: 538202 - DNA, 399 bp, Homo sapiens
gggtgtagagggttaggaagaaaggatatctggaagggtagtactgagtggtttcataaatttttaaatttctccccaaacccagtacctcccaaacctgagcagagtgttcagttgtcatagccctgctcagtgctttagacactcagtctccctggggcaagggtggcaccttgatcaagatggtttctcttgagccaccatcttgcattctaggatccccactgggagctgttagtgtgccttgaggccaggttgtgctggacacatctgtgatgatgttttcttccctccctctccatttaggaagctgacatggctccaggcaatgtaacttctctgggcatcattttcaagtggagcttttggacagttctawcgtttgtcaggtgcttggga

SEQ ID NO: 538203 - DNA, 590 bp, Homo sapiens
tgtaccatccttgcaaccctgagcaagttgtttcgccaccccaaatctggttcttttcttgctagatagaagccctgatattgcccatttcacacagtggtcctgagactccaatgagagataatgtggaagcatcttgtagactaaaatgttaataaaaatgttaactaaaatgttaaatcaaaaagaaatgcgggaaataaatgttgtatttgtctaaaagaaacctgtggttttcaaagcacaccattgcatgggttggaggattgggcaaaaatcttaaactatgctctgaagactagatgttgccactgttcttaccattttacttcaaaaaagcatcagttcaatttaacatggatacagagatacagggattgcataacagagatatagggattccatgtttgcaattatacacctccaatttggtgygcattgccctttaaatgagcacttttacaatatgttatgagggaatataaactttctaattacaagtaagctgcccaaggagagaggggcaaaagagccagagatataatgatagggatagaaagtggggaaagcataggggtaaatagatgcta

SEQ ID NO: 538204 - DNA, 602 bp, Homo sapiens
tggtattgcattttaaatttaaattccacttgtttatactggttcctattatattttattttttaatctttacatcattactgtgactagatcttgttactagaataccaaaatatcttgattatgctaacacactgattttgctaaaataaaggtaaataattaattttttagaataactacataattttcaaatatatgtctttgatttactttattattcacccaaacatcacatccctatcaaaggaatactaaaacatgtgaaatattaaataattgaattatgttgggygggtatagtggctcccaccttaaatccgagcactctgggaggacaaggcaaaaggatcccttgagcccctggaattcgagactggcctaggcaacatagtgagacccttacctctattaaaaacaatttaaaaattagctggatttggtggcacatgtctgtagtcccaaccacttgggaggctgaggcgggaggatcactggagcccgggaagttgaggttgcagtgaaccatgattgcatcactgcactccagccttggtgacacagaaagaccctctctcaaataaaataaaataaaataatta

SEQ ID NO: 538205 - DNA, 438 bp, Homo sapiens
ggatgagtctactgttacaaaaccagcaaacaaagggaaaaactggttcagagaagctgcttcaggaatatacagcttgcacaagttctctccacaagccaccagttagttggaaatatgatgggtacccatcctaataacatagcaagttcccctccaatgatgtggctggcaggctcatgccggccggayggcgggcagcctgctatccatactcaaaaaggtgattctctctagtagactttaagaaagggtcagactactgttttctcagattagaatcatgagctgccaactggtagtctaatcaaatccagctcactgacatgatcatttggccaggccaaaccttgaaagctttagacaaggcatctgctctgagtttgccaaagtttccaccactcccaattgtctcacattgagctacacacacttaca

SEQ ID NO: 538206 - DNA, 617 bp, Homo sapiens
tctatcagttcctaaaacgtttgatttattttctcctcacgcagagtctttaacatcagcctatcctgtcaattcctgttgtctagtcctatcacctaatgtctcaattagtgcaacgtagcttttttgctatgcttatttgtagctagctatagaaatctgtaggccactagagaagacaggaagaggtagggttctagcagcaagcttacctaygaggggaacctgacctagctggtgaggctgacaggggaggtttgggatgtcacaggctgtcaggaagccgagtgaccaagataatgactttacaagtatcaagcctggcaaatagagcaatgagtacttcactacaaaatggcacaagttccaacaggtagggtaaatctcagagcatccaggtgagcagtattagaaaattcaggcagtcctcagtaaccagggtattcttttctcaggtaggagtatttaggtggggcagatggtgtctgttatgggaatcagaaagacttgaacagggccttggtcacccaggctggtgtgcagtggtgctatcacagctcactgcagcctcaatctcctggcttcaagaaatcctcccgcctcagcctcccaagcag

SEQ ID NO: 538207 - DNA, 558 bp, Homo sapiens
cagcctatcctgtcaattcctgttgtctagtcctatcacctaatgtctcaattagtgcaacgtagcttttttgctatgcttatttgtagctagctatagaaatctgtaggccactagagaagacaggaagaggtagggttctagcagcaagcttacctacgaggggaacctgacctagctggtgaggctgacaggggaggtttgggatgtcacaggctgtcaggaagccgagtgaccaagataatgactttacaagtatcaagcctggcaaatagagcaatgagtacttcactacaaaatggcacaagttccaacaggtagggtaaatctcagagcatccaggtgagcagtattagaaaattcaggcagtcctcagtaaccagggtattcttttctcaggtaggagtatttaggtggggcagatggtgtctgttatgggaatcagaaagacttgaacagggccttggtcacccaggctggtgtgcagtggtgctatcacagctcactgcagcctcaatctccyggcttcaagaaatcctcccgcctcagcctcccaag

SEQ ID NO: 538208 - DNA, 646 bp, Homo sapiens
atttgaccattgcatttaaaattgttagacgagtaccttcaaccaggtcaagggctgggtataacagagtcmggggtgggagaagagcctatgtttatgaaataaggacagtgtatttcagttaagagaagctctcctcattcacaggtaaaatagagtcctggaaagtcctaccctctgcaattcaaaatgccactgaaaaatatattcaatctacatagacggaatcatcttaagtataatggccagggtgaaatagctgtgaggaactctcagtgaaactaaactaaaattgcccccaaactaccgtcctgcacaccaaatcttcaacaattaggtgaattgtctaagtattttgtagaagttgatttatgcatatggttttagaatacacatattttaaacatgcgtattttaaataagacaaatcctatttatcgtttctggctttcagctgtgctggaggactgtcctctgattctcttctcttatcccttttattttttgtctttaaaccctctgtgctttttcagttctagatgcatcagaattagaaatgttgttccccttggctaggctgtaatagtaattgcagtctatcctcagtcctcagattgttcaaatttcacatttgaagtgcaacaga

SEQ ID NO: 538209 - DNA, 646 bp, Homo sapiens
atttgaccattgcatttaaaattgttagacgagtaccttcaaccaggtcaagggctgggtataacagagtccggggtgggagaagagcctatgtttatgaaataaggacagtgtatttcagttaagagaagctctcctcattcacaggtaaaatagagtyctggaaagtcctaccctctgcaattcaaaatgccactgaaaaatatattcaatctacatagacggaatcatcttaagtataatggccagggtgaaatagctgtgaggaactctcagtgaaactaaactaaaattgcccccaaactaccgtcctgcacaccaaatcttcaacaattaggtgaattgtctaagtattttgtagaagttgatttatgcatatggttttagaatacacatattttaaacatgcgtattttaaataagacaaatcctatttatcgtttctggctttcagctgtgctggaggactgtcctctgattctcttctcttatcccttttattttttgtctttaaaccctctgtgctttttcagttctagatgcatcagaattagaaatgttgttccccttggctaggctgtaatagtaattgcagtctatcctcagtcctcagattgttcaaatttcacatttgaagtgcaacaga

SEQ ID NO: 538210 - DNA, 646 bp, Homo sapiens
atttgaccattgcatttaaaattgttagacgagtaccttcaaccaggtcaagggctgggtataacagagtccggggtgggagaagagcctatgtttatgaaataaggacagtgtatttcagttaagagaagctctcctcattcacaggtaaaatagagtcctggaaagtcctaccctctgcaattcaaaatgccactgaaaaatatattcaatctacatagacggaatcatcttaagtataatggccagggtgaaatagctgtgaggaactctcagtgaaactaaactaaaatygcccccaaactaccgtcctgcacaccaaatcttcaacaattaggtgaattgtctaagtattttgtagaagttgatttatgcatatggttttagaatacacatattttaaacatgcgtattttaaataagacaaatcctatttatcgtttctggctttcagctgtgctggaggactgtcctctgattctcttctcttatcccttttattttttgtctttaaaccctctgtgctttttcagttctagatgcatcagaattagaaatgttgttccccttggctaggctgtaatagtaattgcagtctatcctcagtcctcagattgttcaaatttcacatttgaagtgcaacaga

SEQ ID NO: 538211 - DNA, 566 bp, Homo sapiens
ctgtgaacccaacccagcatcgttaatgccattgatgttctttgcatatctccccactgccacatttctcacctccccattgcaggcagccayccccctgaattttatgttaattattctttttttttttgagacagagtctcactgtcatccaggctggagtgcagtgacatgatctcgactcactgcaacctccgcctcctgagttcaagcgattctcctgcctccgcctcctgagaggctgggattacaggtgtgtgccaccatgcccggctaatatttgtatttttagtagaaatggggtttcaacatgttggccaggctgatcttgaactcctgacctcaggtgattcatctgcctcggcctcccaaagtgctgggattacaggcaggagccactgtgctcagccaatgttaattattcttctgttatttttagagacatccagtactgcaggcctttcaccaccaccacctcctgcaggcaggacacagaatagtgggaaagtgttacccttgaaaatcagacctgcaaagtgacagcaaatgccatttttcttaataca

SEQ ID NO: 538212 - DNA, 582 bp, Homo sapiens
aaaacaaacaaaacttatcaactggaatctcttggataagaaatagatcttgcgactggaaggggtgagaagaatcactaagtgggttttaaaagtgttgtagaatgcaaatttttgaagaaaaatacattgatactatgcatggagaatagtctgaaagaaaatacccagagatgctaatataggtcatctctgggggtagaatttttaargctttttaaaaatcttttttccctttgcacttatctgttctgtctgattttgaatatggactaattttgttgtatatataaaaggttattattcatggaaaaaattgtgctttagtctcttgtattgagggaggtaaggtgctttatgctcacttcaaaaatgaaacaaaaaggctgtcaatgttagtggttgtgataggaatggaaattggactcacgcttcttgtgtcttggtactgtttttggttgctttagaggaccagcagagagggagcaaatctggagaagcagcttcagtgacagctttcacacccagtaaatactaaagggcagagttgcaaatggtttctagatacttctaagcttacac

SEQ ID NO: 538213 - DNA, 542 bp, Homo sapiens
tacctaagctcttatctctggaaatgagtttacctaagactaaattctagatccctgaattctaatccagcaatcttaataatctttacagtcttccctggtcctgctcaatcaagccttctcacctataaggtcttagtyatctgaggttacttttactattccagttcatgttaatatccccctatcgggacttgcaacctatgcagtaagtttttgcgttgccttctgggttttctaattgttgatttatgggatggtaaagaaagtgatcagaggtgctagctctggatctagcagcaactgtctgtgagttttcaggcttacacttcctcctctgaaaaatgggagattagactagatgatcctttaagatctcactgaatacaggccattcaatcctgaagtaaggactctctccccagtggaaggggtggttcatccactgcacatcaaatagcacacagcttatggcaggttctgttattcttgtagaagccattagtacagtaggttgaatagtatttccccaaaattcatgt

SEQ ID NO: 538214 - DNA, 650 bp, Homo sapiens
ccagaaacctatttatatgttattttgtaacaacaaactgaaagtttggtatattgaaatacacatgcaaaaatttactataataggcttcaactgccttctatagtttactatgatatattaaattacatgagatacagtacttttctcctcaaagataagcatagacattttaaacctatcatctccaccatagcactgatttgcgccaggcttaaagaatgggtcttgatacagttaaagatttagccataaagcatcattgattttcctaaactttggtattaaaaatgccacttttatgggctacggacacraatagaaaattctcaaaagaagatatacaaatggccaacaaacatatgagaaaatgctcaacatcaataatgatcagggaaatgcaactcaaaaccacaaagtgataccaccttacccctgtaagaatgaccataatcaaagaatcaaaaaacagatgttggcatggatgcagtgatcagggaacacttctgcactgctggtgggaatgtaaactagtacagccactatggaaaacagtgtggagattccttaaaggactaaaagtagaactaccatttgatgtagcaatgccactactgggtatctacccagaggaaaagaagtcatgattc

SEQ ID NO: 538215 - DNA, 658 bp, Homo sapiens
tttttatgtgctgccttcacatttagttacaaaacagagaaaaccaatgggtaaatgatggttgctattaatctttctacccatttttacattttactcatcttcatagacrtgaaaagaaagaaatgcctactctctgctaagggaacatgttctcatggggcagccaggggccaaataccagctcagttgggagatgtgtaggtaggtttatgtggtctataccagagatactctctgatttgcaggcttgcatcaagtttaagtagataataaggcctgacaagtatgtgttgagtgagtgaaagactgcataaattaatcagtgcggaagcatacatgaggcttctctcctctgaggtgtatggaataggctggaagaaaacaatatacaatacatgttcagggaggcaggtgcttagtggagaggtgtctctccaaggaggacctgtttgtacgttgaagaaaaagtttggaggcttaggatttaaactaggacaacttctggaaataaaggatgcttgacagagttggaaatccaatttcaaacccagagtaagggtgtcctttgcatttccctaaagcagaaaagtgtctctggagaaagaacgcatgggctggaattgcagacttactccgagtggaaggagagccccca

SEQ ID NO: 538216 - DNA, 539 bp, Homo sapiens
agttgatttaacattgatttttttgggatctgggaaaaggcaggaggaactagaaatcaggcttaaagttttcagaaaacagggattctcagctctaagcagcagtaacaaaaaaggccagagaagattgttatgagggcttgggatcagatatctaatctaattattaatagaaatttgatttcacatgaccttttgtagagctcagaaagttacatttggatgattaatccttatgacatcatgataggcaaaaagcgtcaatatttgggtttcccccttccatgatatggccatcctccaagttatgaaaacatattcttagaattcaagacagatcatgctagattggaattgttctaccgctccagcccttggaattcacttcccctccaatgccctccgacacacacacaactgtggaaggactgctcatgcctgtgtgctcatcactgcagcaggtgtaarcatcttggtcatcactgtcaccaggtgaatacaaggtacagcagcaggctcatgccactggaggaagtgag

SEQ ID NO: 538217 - DNA, 568 bp, Homo sapiens
tctaatacaatcctccaaccttttatggacaggaaaagaacagaaatgcttacatgatatttctgcttccagatatcagatgtgatttattactgagtaaggcaactggcacaatggctttaactggcttagaagagcctaactgtactttctycttaatcatgttagtggcaatcttagtatttaattacatttccagagcatctcaataggagtagtgtttttcgtacattaaaaataatctagaaaaaactgttttcttgtttcccagacaaatgagatgagctagtttctcagaccagaaacattctaagataataatttaatatatatgcttatattttaaaattcttctcttatgtgcatataaacgtatatcttttgcaaaactttaatgacagtcagcaagtatgttgataattacgagttgagaaaaggctgtataaaccattacactcagtgatatataaactctggaatgtatttttgattaaagctcctcactttacttagatataagtaaagatttatatctttacttgtattttatttatatttatatttctaa

SEQ ID NO: 538218 - DNA, 522 bp, Homo sapiens
agtttgagataactaaggcagcattccagtgtatccacttaaggaagggttgttaatacagctatacttctgtggataagaaattaacttactgtataattgcattctcggaagatctttcaagactyttctgtgtgtgtgtgtgtgtgtgtgtgtgtgtgtgttgataaaaactctcacttctagtaaacttaggataataggctatgtcttgctaatctatctcactggttattgaaaaactgtcgctctgtagtcaggggtggcaggaatttaagttgaaagcatgatatgactacaaaatgtgcatttctagatacgcagcccttccccaaacagacttggcagaataagttagtttaaatggttggttccatctgtgtggtaaaattgtgtctgacatctgtttaaaatgagcacaagatgcttgaaaaagaagggcaagcctcactgttgaacgtgatggaatctgggggccatggccctcgtgtgtatgtacaagctcacagctcacacggttca

SEQ ID NO: 538219 - DNA, 584 bp, Homo sapiens
atcaccaagatctgatttttcaccaaaaaaaacttgtaatctccagcataaatgggataatcaaagcaattgtggcagttttgaggggacaaaactctagagtttaatcttccagcttggctaacttggaagcgttcctatgaatataaaagatcttgttgggggcggtggagaagcagagacgggctccgcggctgtacttccagctcatggcccggtcacagtcctgctgcaggttctgctgcaggttctgctgcaggctgtcggccgccttcttgctgagggctatgttggaccttgcaatcgtgctgcggggcttggagggggtggcggctgaacgaaggggacaggtttttgaagccaccagtaagtttgagaaacttcagtttctgttcctcgttgtcaaaaccagcagtatcccactggccaaactaggttcccgtccacttcctggtttcacaagcttccgttttgcctgactctcgatcgatctctccttgcaaggcctttygcctcacctggtctatgtgcgcctcgtccatgttgcctttcttttccaacaccacctctaagtccgtctctgt

SEQ ID NO: 538220 - DNA, 519 bp, Homo sapiens
tttgccatataaggcaacatatttataggttccagggattagaatgtgattctatttgggagacctccccaacccccacttaattgtaaatttgaaactacgtgtaatacttttcacatattgcattgaaaataaacatgttaatatttttattaagacaagaaagttgttttttaagatcacaacaagcagttacttggaattttcatgaaagaatatttaccacatagtcttaatacatcttggtggctagataccaaattgtggtttgctgacttctttacaytgattatatgtatcattaaaaatggatgagacctaaaactgccagactccatccaatacaaaaatacaagtatttgtaggaaactcttagaattttcacatgtaagaatatgtcacatttctgaaaaaaattctacccagtgacaccatttcttactatgcctatgtgttttttcagcgttagtatttgaacataaacacttttccctataaaagcctataagccaatagcag

SEQ ID NO: 538221 - DNA, 627 bp, Homo sapiens
caaatcctgcactataggtaagcactaattcttattgggtgtttttctcttatcagagactaagtcttgaccagaaagtggctcttgacattgtttctttctttttaatttttaaaaattattatgggcacatataatatgtgtatatatttgtggggtacaggtgatgttttgatacaggcatacaatgtgtaataatcaaatcagggtaattgggtatccattatctcaagcatttatcatttctttgtgttaggaacattacagtcccactcttttataatagttatctttaagtttacagtaaattattgttctgttgtgctgtgaaatactagaccttattcattctatctctatatttttgtacccattaaccatccccactttatccccagtccctcaaccttgtttcttgtacttgaatccctattttcattaccttccttwggaagtgggggctgcctcaccttccgcagatctcctcagaacaccatctcgttatgggagctcagctaccatgtagactgccatccatttagctctgttcatagagcttactggttgctctctttcccatgattgtgctctacctgactgtcacctttgcctggttcttgatgccag

SEQ ID NO: 538222 - DNA, 570 bp, Homo sapiens
ttttagtaagcatcaatatgtaaatcttcctgtgtgaatcattgatgacaggcaaaatggaagaagaatgtgaagacaaattgcagtgtacttttggatgctggactaaatatcttccaagaagattcctccatgctctggaatcctaataatcaatgagaagacttacatattggaactgaattttaagattccattatgcatggaactggtgcagagatacatactttttgttgttctctgtggttagatagctttcataaatcagcaccatctgttcttttgcctttggttgtatggagtcatgttgtatatgtatcaagacgggaggcatttcatttctctgggaaatggaaatttcatggactgtgttaaatactacatttgatcagtactagcttgagataagaatagtaggaatctggttgaggggatggcgctyatatacagtgattacatcacaggcgctgaataattcttcatagaatcctaaataatttgatgttgagctttgttcagtagagcatagtttatattataaggaactggactttgtctaaaactgtaaca

SEQ ID NO: 538223 - DNA, 571 bp, Homo sapiens
ttttagtaagcatcaatatgtaaatcttcctgtgtgaatcattgatgacaggcaaaatggaagaagaatgtgaagacaaattgcagtgtacttttggatgctggactaaatatcttccaagaagattcctccatgctctggaatcctaataatcaatgagaagacttacatattggaactgaattttaagattccattatgcatggaactggtgcagagatacatactttttgttgttctctgtggttagatagctttcataaatcagcaccatctgttcttttgcctttggttgtatggagtcatgttgtatatgtatcaagacgggaggcatttcatttctctgggaaatggaaatttcatggactgtgttaaatactacatttgatcagtactagcttgagataagaatagtaggaatctggttgaggggatggcgcttatatacagtgattacatcacaggcgctgaataattcttcatagaatcctaaataatttgatgttgagctttgttcagtagagcatagtttatattataaggaactggacyttgtctaaaactgtaacag

SEQ ID NO: 538224 - DNA, 597 bp, Homo sapiens
  misc_feature (1)...(597): n = A,T,C or G
nnnnnnnnnnnnnnnnnnnaatgatcgacaccagagtcctgtcaataacgtcccccttgcacgtgtttcctctaaaccaatcaatgcacaacctcccctgagggagcatgcctgagggccctagtaaagccccagttccagaagctctccctctttggcttcgactccctgcttgagatacctgctgcctccagacctcccgtcgacagcaccctggcctccctggaatctgtaagtaagacattttttctgttttatgcattttggcttcacttcctcgttgtgtctcgcctgacacaccaaaactacccaggcctcttctagagagtgcctatcttggcttacagtccttcttgagagaaatcaagacccaaattggaaaggaactgtaacagcagaaataacggcagataaggagcatgttattatcagagaccacgacaacatagtccattttcttaaaattgaatagtggttatagaatcaaatttatgtgaattacrtattttcaaaaacatggataattaaacccggcacttttggattcctaaatatattgcccaccttacatgtaaacaaacatgttttgtatcttca

SEQ ID NO: 538225 - DNA, 639 bp, Homo sapiens
aagttgcctcttgatctgaagcactgcttttatgaaggtttatggcattggtgctcctatgcaagtctggatttttctctgatcatccgactaccctaacttgagaggaccatgctgactgatgtgtcatgtcccatagctgggggtgggttgctaaggagtaaaatatataattgtacacagttcttcaacagtggccaaagacacagaagagagttactcttgataacatgattgtgcttaatctactttttaaaataaactattatttacctcttatccctacctcaagccatttaaatggatttcaccatttctgcacaacttgyagaacctcttaaattcaaggacacactgctttaatgcatttcacttttaaaaatcagactttcaaaagataaatgattaaaaatgtaatttaaataaatatgagttcactttttaaattggtaaaaatttagctgtcaaatatttgttctgtcatttgaggtctcatcaaaaaaccaaaccaattaaaaatggaaaggtctgagatgcacagagtgaaactccatctttgtcttgtattataacctttaccaggattatttctctactactgttcagcaatgaatgcctttgctcacttcctactaacag

SEQ ID NO: 538226 - DNA, 639 bp, Homo sapiens
aagttgcctcttgatctgaagcactgcttttatgaaggtttatggcattggtgctcctatgcaagtctggatttttctctgatcatccgactaccctaacttgagaggaccatgctgactgatgtgtcatgtcccatagctgggggtgggttgctaaggagtaaaatatataattgtacacagttcttcaacagtggccaaagacacagaagagagttactcttgataacatgattgtgcttaatctactttttaaaataaactattatttacctcttatccctacctcaagccatttaaatggatttcaccatttctgcacaacttgtagaacctcttaaattcaaggacrcactgctttaatgcatttcacttttaaaaatcagactttcaaaagataaatgattaaaaatgtaatttaaataaatatgagttcactttttaaattggtaaaaatttagctgtcaaatatttgttctgtcatttgaggtctcatcaaaaaaccaaaccaattaaaaatggaaaggtctgagatgcacagagtgaaactccatctttgtcttgtattataacctttaccaggattatttctctactactgttcagcaatgaatgcctttgctcacttcctactaacag

SEQ ID NO: 538227 - DNA, 548 bp, Homo sapiens
aacttttaacaaatagccgagtgtgatgttgtgcgcctgtagtcccagctacctgggaggctaaggcaggaggtagcttgagcccaggagtttgaggcttcagtgagctatgatcgtgccactgcactgcagcctgggtgacagagtgagaccctatctctttaaaaaaaaaaaaaaaaaaagcggttttgatctttcagaagccaccttcatgagcaaatggttcactgtaacagggttgtcataaaattggtctttttttgggtgcctgtgtccattagcatgcttttttgcattagcaaatccatatagatggattctatgttagaatttaggagatctgtccccaccccatccggggccccacccacttgcagcagcagaggaagttagaatatttgctctgccaaaagcagagctaagtgtttccttaaacacttggcagtattactgggtgaggccagtctgaccamcaatgggcatggaacagaaggaacatttgagtgtttggtgagggttttcttcttaagggcgctttgagtgattac

SEQ ID NO: 538228 - DNA, 496 bp, Homo sapiens
tagggattaaatgtttatttgaaaaatcttacaatttcttcctcattctaagatttaaaaaactattatatataatccttttcatctgaattacatctattctctcaagaagccacactcacaattgcaatcaaggtgaacagagttgtacaataagggggagagcaaaggcaaaattcactgaggtagaccccaattccccgagaccactcaacacgggcattctataacacagggacctactttggtggtgatcctataggtgatgtaagtctccattgtacacacatgcttcttgggatcatcractataacgaagagatctctagtctcaccatcaatatcatcatcaagctgaagtctgttgagaagggaagatgaagaagctggacttgaagtacctgctggagtaccaccgttgggcaaaatgagatcctaaaagaagaaaagagcaccttaaaattaaatgaaaacatactggagagtatcagcaaaa

SEQ ID NO: 538229 - DNA, 537 bp, Homo sapiens
atcaatactggaaatgaggaaagggtgccatccaaatgccaaaggtctcaaaggctgtctactggttctacctgggccacaactgaaaaaagaacccagaggaatctaacccatgtcaccgaagttacttcaggttattgaggttacttaataagtagaaaatgtccttgaaccccctttacacgcacgctaatttgaaagtgtgattgtcagtggggagtagaggacatggaaggtttggcagtggggcaatccaggaccaccaaggagttggctgctgtgactgtgaccaaggggatgccaagcacaggcaaatacaccaagtgtgggccaccagcagagggcaccccrcccacatggccttctccccccgcatgatgggtagagatggaagcagcagctcataggaacatgaaggcatctgggttggctgccctggggtgtgtccaacaagcccaaagcaggccagactgcaaatgctggggggactgagctctactgagatggggggagcagctaaaacacagagaaagccag

SEQ ID NO: 538230 - DNA, 468 bp, Homo sapiens
cttaagcaatccttctaccctcagctactgagtagcttggactgtgggcatgtgtcactgtgcctggctaatcttttcattccaatcaagtgttttaagcgggggaggaacagggccgtgtttggggttagagtcactgatcaagaactagctgggattgggtgggtggagcctggctgcaaggagtccaataagaaggctgttgcagtgggaggttgggggaggcagtttcagtagggctttggctcactggattcagagagtgtactggttagtggtttgcttgcaaataatagatatctagcttgcattaacttagcaaaaaggtgagcctatagacaggcttgctttaacgtaggagtaagctggaaccaggggtctgaatgctactgagggtcggctttattctctcagactaacatcatcgacgyagggggagttgtggcagcgcgcctccctcacattgca

SEQ ID NO: 538231 - DNA, 572 bp, Homo sapiens
ccactgtagttgagtcttttcaagtctgttaaacaaaccatacccacacacacaaaaaaaggtgttaatgtttggcttctcttattctctgttgctcctaragagattcaaacctatttagtagcagttctggcacaaaactaaatggaatcagtatcattcctcacaatccacagactggggttaaagattaaaataatgtaaattttatagagatttatttttactatttcatgcttactttctaatgtctcatttcgtaaagcccaccagcatcctaaaggtaagcaccacagttcttgaaaaacaaggattatttattttgcacccatcgcctgaccccaagagatgagtgcttagagagtaatccatctttgtacgtttagatctctcaaacccatttctcatctggatcctctctggatggtcctcaagcttttacttgcagatcaaactcacatcagtggcaaaaaaagagaaaaataggagtcctaataggattatagtttacaatgaggcaatgggacccagcggattaaaatttggaatttgcattcacaattttaaagtaa

SEQ ID NO: 538232 - DNA, 469 bp, Homo sapiens
tttttgttcctttttgtgtgtgtgcatatacttaaagtaacatagggctagcaggtcaacatgcctctttacataatccctgcagggaaagaatttgtgatgtaaastgcatcataaaatgcaaaaaaaaggcatcagtcagaagagttgcagttataattctatgtaatttggaaaattctactagtataacacatattaggggaatgaaattaagatctagagatggctccaaacttaaaccaaaatgtggaaatacacaaaagtaaatatcttccggaattgtgtctctttggagagcagaaaaatatcctaaaaacatgcttactaactataacttatagaacatcacataccatcatcaatccagctagctttcaagcttctccttactttttgggaaggtatattagtgtattggaagagaatttgagggaatgaatgtttttaccaaagggactaatttgac

SEQ ID NO: 538233 - DNA, 678 bp, Homo sapiens
aaccttgacattctaaacaaatatgttgttctttaaaacagcaacatacatctggctggagaaagtaattggaatgcagggaacaatgccctgttctgctccatcacttaatgatcaattacctttcatcaagtaattcataagacatattagataattccacgagccacacaactgctaacctttgcatggccttgctgacatggttacttagtctgaacaatgcatggaccatttgctaaaaatacatgtgtttcagtttgggagaggaggaacaaatccaagactgtccaaatccaagactgtacattaagttctgacttcattttatraaaaggaaccaagcagtagttctaccaagcaatgaagcacagagattggaaaatgacccatcaagcactatggacacaaatgttgccatctacctattacattgacatttacctgaatgaggttggcagctgggttccttcttttctcaaagtgtttctggcggtgttgttcttgtacttttaatgcaaaacctgagccaagaatgccctggaacaaaatacaaaaatggcactcaaaaatttcaaaagcactgttaaataatacaaatattaaaaagtcactaaaatgagtctgagagaagacaaacggtatgtaacctgtccataaacatgttacttattaaaa

SEQ ID NO: 538234 - DNA, 527 bp, Homo sapiens
ggccgcagccacttgcacaccataaaggcctcatctctggctatgcccacagcaaaaaaaaaaaaaaagtaaaaaktaaataatgactactcccactaggatatcccttcatgtagaccaagggccctttttaagctcctcactcatcctgcccaggcagcatttggtactgttgactacaggcttctggaagagctcttttgcctgtgttctgatgaggtattctccagctcctctcactgagctgtttttgtgggtgctctcctctgcccttccatgaagtgctggtgtgcatgggggcttgtatctaaaccctcttctcctggacaacctcaccatccacataccagcaactcccacccctgggtgttcttcccagacctgtcttctgcatcccagacgcagaccactgctcgctgcttctctgtggacaggactttaacctaaccagctcagcatgtgcgacgctaagccgagggcccacctcccaggtatgccttctttccagctccctgcccattacccag

SEQ ID NO: 538235 - DNA, 527 bp, Homo sapiens
ggccgcagccacttgcacaccataaaggcctcatctctggctatgcccacagcaaaaaaaaaaaaaaagtaaaaagtaaataatgactactcccactaggatatcccttcatgtagaccaagggccctttttaagctcctcactcatcctgcccaggcagcatttggtactgttgactacaggcttctggaagagctcttttgcctgtgttctgatgaggtattctccagctcctctcactgagctgtttttgtgggtgctctcctctgcccttccatgaagtgctggtgtgcatgggggcttgtatctaaaccctcttctcctggacaacctcaccatccacataccagcaactcccacccctgggtgttcttcccagacctgtcttctgcatcccagacgcagaccactgctcgctgcttctctgtggacaggactttaacctaaccagctcagcatgtrcgacgctaagccgagggcccacctcccaggtatgccttctttccagctccctgcccattacccag

SEQ ID NO: 538236 - DNA, 421 bp, Homo sapiens
ggaggctgaggggtggccgagagccaggtgcctagccaccctggaaagtggacccccctatgggcccatgtatcccacaggggagctgccctggccacacacggctccaggcacagttctagctggctcctgctccagggaacctgcagccctccacagcccacattgcattgaaacctcttccaggccattctgcaatgtgagcaccagccttcacctaggrgccccagagtgcccaggagctgacatgatggggttggtaagaggacaccatgccaaaggactccccagaagcatcaatctggggtcagtcgaggcctcacatgagacccacagtcttcaacgcccacgtccgctcagaacacgtaggagcccagtcttagtcacagctagaactttgctgttcaatacagaagctttt

SEQ ID NO: 538237 - DNA, 566 bp, Homo sapiens
tctgataagcagttacctgtgtctatgtggtccaagccacttcgccatttacagatccatgtttctaacttgggaaaggggatgaaaggctagcaacttaaggaggaagggacagaaatttttgcatgtaggagtggaaaacattaccagaccttttagctttgaggaacatgttaatttttttttaaggcttccattaagaatgttgatattcataggggacacctaggtttcagtgaaatcaagaaagtcaaggaaacattgagagaataggctgaggagatagaygacatttctgatctcagataagtagttccagaaggcatgcacagtgaaatcatttgagacctgggatggaggatgggggagattcgtaatcttctttgtgctcagaaagagaatctgaatatttttgttaacagtttcagtgccagtccacttatgctattatgttatttctcttgggttattgtgacttatttatagattggctttgtagtttcttttaacagtatttcagatgtgcataggactggtaaaaaatgttgagcttttctgtattttgg

SEQ ID NO: 538238 - DNA, 566 bp, Homo sapiens
tctgataagcagttacctgtgtctatgtggtccaagccacttcgccatttacagatccatgtttctaacttgggaaaggggatgaaaggctagcaacttaaggaggaagggacagaaatttttgcatgtaggagtggaaaacattaccagaccttttagctttgaggaacatgttaatttttttttaaggcttccattaagaatgttgatattcataggggacacctaggtttcagtgaaatcaagaaagtcaaggaaacattgagagaataggctgaggagatagacgacatttctgatctcagakaagtagttccagaaggcatgcacagtgaaatcatttgagacctgggatggaggatgggggagattcgtaatcttctttgtgctcagaaagagaatctgaatatttttgttaacagtttcagtgccagtccacttatgctattatgttatttctcttgggttattgtgacttatttatagattggctttgtagtttcttttaacagtatttcagatgtgcataggactggtaaaaaatgttgagcttttctgtattttgg

SEQ ID NO: 538239 - DNA, 552 bp, Homo sapiens
  misc_feature (1)...(552): n = A,T,C or G
ctgaggctttggggctcttgtaaggggctggtgttatngcaggtgaggttctagatgagctgcagtttgctcatttagagactggcatccacaccatctcttttgagccccacaaaaatttgttaagtaagcaagtcagtaaaatgattttcactccattttactagggaaggaacaatggttcaaaaagacaatggaacaacctcaaagatcatttgatcgcaaggaaattggaccagagaaggaattggaaccatcttctgattcctgctcctctcctccttaacacagtttttttcaggaacatgaagagaattctcaagttcttttggggaaacttgagaaagaggaggagagataatttagaaccacatattttgctcccaaagkataggtttcaagattatccagtttaccctgtcaaagaacaagaatccgccctcccccatttctctccctgacccgagcagtgcacatgaggcaatccctattgacttgaaattattgaatggagatcagtaatgtcaagttggtattgcttaatcagacaga

SEQ ID NO: 538240 - DNA, 574 bp, Homo sapiens
ttaggggatgaagggaagggaaggcagtgtgattgctaatgggtacaggtttcttttgagggtgatgagaagattctggaactagacagaggtggtggttgcacaacgttgtgaatgcacctagggccaccaagctgttcattttgaaatggttaattttatacacaaagctcacctaacaaaaagaaatgcagtcacacaaaatgattatgcacacattgcaagaatgtattccagtaaaagtgcaccttaaaaatatgtaaatgattacctcaggtagagagggaaaggagaatgaatgtggcaaaagatagccataaagaaatgcacagatgctggaaaaaataaaaaaagaaatgcacagataagtaccygaaaagaggtgtggcctgcccagatcggcaagaccagagggaaaaaggaaaaaaaagaatgccgatgtccctgtccctctgctggtcaagtggcatggcttgtgaggctcctgtgctggtgagacctgggccaggctggggtggggagacaccagacccaggacgggagttggggaaggcatgggtggggtccgtcagca

SEQ ID NO: 538241 - DNA, 579 bp, Homo sapiens
taaatcccactaaagatgtagatgcatatttttaagttcatattttgtacatmttagtaaaactttggaaaaccaaaaatagatagaaaaatcttaaatgctgaaaataaacagaaggagattcaaagtgaaatcaagctaataaggaacatactgaataccaaaagaaagtagggtcatatcttcaaagacaaagggaaaataattgtgagcctaagtttctacacccagtcaagccaacacacctgagtgagaatgaaatgaaagtgttttgtcagatataaaaggacttagaatggacactacaaaaactgaaggccactgaaagtcactacagaatgtacacagtgaggagaaaactgagctcacacatacgttctctgattacagtgaagttgactagaaattaataacagaaggatatctaggaaatctctgtgcgtttaaaaatggagaaatgcacttccaaataacctatgagtcaaagaggattttagaaaatagttcgaacctgaatttttttacccaaactaaattttttaaaaggacatcaaacaaattaaaatagggaacatcaaa

SEQ ID NO: 538242 - DNA, 501 bp, Homo sapiens
gtgtgctggccctccagcccatgaagggctaggaggaggggctgagctcttgtgcccaggaggttgtttgcacccawgagtgtgtaggagagtgggggcctgaaagggcctacatcttctgttgagggctgtgtgaggtgccctataaaaatggaggtcatgatgtgtttctgtcatagtgacaagctcgaggcccagagggatgtgagggagaccctggagggagcatgagcgaggctgtggagcaggccaggggcaggcaaaaggctggacacagcccacactgcacttcgctgggacaactggggtggccatctgcaagcagccaggcctctgtgcttgggatcccatagtccagcaggagctggtgacggccgggcagaaggaacggcctgagagggagagcagggctgggtaaggggtggagcttgctgtgctccactaggcagcgacggtggctatggccaggcctggcagcaactccaggtggctgggaggttg

SEQ ID NO: 538243 - DNA, 654 bp, Homo sapiens
ggatcttgtacaaccttggtcagtcagggctgagactraattcctgccagtcatcagctgggcaggtagtaaagatttggaatggagtatcttttaaatctgagttgctgggctgagattcacacccaccacacacacatagtacttgatcttcttaggatgggtcatatggttactgtgatcctgaacctccccttccatgctccagcctactaagcttatgatcaaggaattccctgtggattacacggatatcccttgactgaaaacggctcatgctggcagggatgagagatcaagttgtgaaactgttctggaagcaagaaatggtggtctctaaccagtgatatatatatttttaacataatctaagcttgtctgcctgcacaaagaagcatttgctaagataaaaaggaaagaacatacaaaattaaaatttgccatttatccagaaatgaaccaactcgcccaccatgtaacaaacagaaaactgcactcatattaccaaggaatgctacactgagaaagagaataagaatttattaaaacacacacacacacacacacacacacacacacacacacacacacacacacaccccacttacgcaaacaaactctttgtaggtacaggtgctaaaaacagaaaaccca

SEQ ID NO: 538244 - DNA, 654 bp, Homo sapiens
ggatcttgtacaaccttggtcagtcagggctgagactgaattcctgccagtcatcagctgggcaggtagtaaagatttggaatggagtatcttttaaatctgagttgctgggctgagattcacacccaccacacacacatagtacttgatcttcttaggatgggtcatatggttactgtgatcctgaacctccccttccatgctccagcctactaagcttatgatcaaggrattccctgtggattacacggatatcccttgactgaaaacggctcatgctggcagggatgagagatcaagttgtgaaactgttctggaagcaagaaatggtggtctctaaccagtgatatatatatttttaacataatctaagcttgtctgcctgcacaaagaagcatttgctaagataaaaaggaaagaacatacaaaattaaaatttgccatttatccagaaatgaaccaactcgcccaccatgtaacaaacagaaaactgcactcatattaccaaggaatgctacactgagaaagagaataagaatttattaaaacacacacacacacacacacacacacacacacacacacacacacacacacaccccacttacgcaaacaaactctttgtaggtacaggtgctaaaaacagaaaaccca

SEQ ID NO: 538245 - DNA, 654 bp, Homo sapiens
ggatcttgtacaaccttggtcagtcagggctgagactgaattcctgccagtcatcagctgggcaggtagtaaagatttggaatggagtatcttttaaatctgagttgctgggctgagattcacacccaccacacacacatagtacttgatcttcttaggatgggtcatatggttactgtgatcctgaacctccccttccatgctccagcctactaagcttatgatcaaggaattccctgtggattacayggatatcccttgactgaaaacggctcatgctggcagggatgagagatcaagttgtgaaactgttctggaagcaagaaatggtggtctctaaccagtgatatatatatttttaacataatctaagcttgtctgcctgcacaaagaagcatttgctaagataaaaaggaaagaacatacaaaattaaaatttgccatttatccagaaatgaaccaactcgcccaccatgtaacaaacagaaaactgcactcatattaccaaggaatgctacactgagaaagagaataagaatttattaaaacacacacacacacacacacacacacacacacacacacacacacacacacaccccacttacgcaaacaaactctttgtaggtacaggtgctaaaaacagaaaaccca

SEQ ID NO: 538246 - DNA, 487 bp, Homo sapiens
agccattttgctcaatcatgtgaaactgtaaaattgctagatttttttttaggtcaaaagtatcatatagggccaggctcagtggctcacacctgtaatccyagcactttgggaggctgaggtgggcagatcacctgaggtcaggagtttgagcccagcttgaccaacatggagaaaccctgtctctactaaaaatacaaaaattagcaaggtgtggtagtgggtgcctctaatcccagctacttgggaggctgaggcaggagaattgcttgaaccttataggcagaggttgcagtgaggcgagattgtgccattgcactccagcctgggcaataagagtgaaactccatctcaaaaaaaaaaaaaaagtatcaaatattggcagtttcatatggtgcaacgtaacagttcctcgtgactggagaaaaaggtgtctgggatgaaatagcagagagtgagctgaaagtgatgggcaggaccagatgtg

SEQ ID NO: 538247 - DNA, 487 bp, Homo sapiens
agccattttgctcaatcatgtgaaactgtaaaattgctagatttttttttaggtcaaaagtatcatatagggccaggctcagtggctcacacctgtaatcccagcactttgggaggctgaggtgggcagatcacctgaggtcaggagtttgagcccagcttgaccaacatggagaaaccctgtctctactaaaaatacaaaaattagcaaggtgtggtagtgggtgcctctaatcccagctacttgggaggctgaggcaggagaattgcttgaacctyataggcagaggttgcagtgaggcgagattgtgccattgcactccagcctgggcaataagagtgaaactccatctcaaaaaaaaaaaaaaagtatcaaatattggcagtttcatatggtgcaacgtaacagttcctcgtgactggagaaaaaggtgtctgggatgaaatagcagagagtgagctgaaagtgatgggcaggaccagatgtg

SEQ ID NO: 538248 - DNA, 505 bp, Homo sapiens
agaaatatagaaaggaaaactttaatagtgaaaaatrtatgtcttccaagcaagtacatcttttttgcatgagtttggaaacaattcaaaatattgagaactgtaatgggtggaggttggggaaataggcattgggttaaaaatgcaaactggcagagcttgcttacatggcaatttggcagtttttatcagaattttaaatgtacatattttgactcagaaattctacttccaatatttaattttacagaagtgtttacatatgtgcataaagatataacaacaaggatggtcactgcagcattatttgtgaaaaaaatgggaaaaataatcaatagaggattcctacaatacagtgattctatggaatattgtgaagccactaaaatgtgcgtatgcttataaataaacaaagattcaatggaatcacataaaactattgacagtggtcatctatcaggaagagagaggttttgtgaggtcagaggagttgtcatgtaaaaga

SEQ ID NO: 538249 - DNA, 505 bp, Homo sapiens
agaaatatagaaaggaaaactttaatagtgaaaaatatatgtcttccaagcaagtacatcttttttgcatgagtttggaaacaattcaaaatattgagaactgtaatgggtggaggttggggaaataggcattgggttaaaaatgcaaactggcagagcttgcttacatggcaatttggcagtttttatcagaattttaaatgtacatattttgactcagaaattctacttccaatatttaattttacagaagtgtttacatatgtgcataaagatataacaacaaggatggtcactgcagcattatttgtgaaaaaaatgggaaaaataatcaatagaggattcctacaatacagtgattctatggaatattgtgaagccactaaaatgtgcgtatgyttataaataaacaaagattcaatggaatcacataaaactattgacagtggtcatctatcaggaagagagaggttttgtgaggtcagaggagttgtcatgtaaaaga

SEQ ID NO: 538250 - DNA, 636 bp, Homo sapiens
acatctaacttctctgacacttcccaggaagcctacttcactcccacctcacaggaaacaggaaacaggaggatatggcacagccagatcacctggggtcacaacgaaacaaagcaaggagggtaaaacccacggagaccagtgggtagatcttgatgaaagctcagtgtacctgccagcagtaccgtgatcagagatatcaggtaatagcataggtcacctgcaaagtcaagctggtcactcccagaagaggtgggaaggactactaggcttgaatccctcgatagccagcctccatgtctagcttttgaccctacccctgggagctcctcagggamtgagaaaaccctttccctacccactggtggtgaatttccacaacaagtagacactagatctgccataaactgaagcttaatgtttcacacagccccaaagcctatcccctagaccctacatagtgagaaagacaatcactgcagcaaattttgacaataagcaggtattagttttgccacaatcaggaatataatatactgagtatagcgtttggtccattcatcacaatccaattaactttagggtcccttctgcaactttgtccaactgatgagtccagatagcagtatattccag

SEQ ID NO: 538251 - DNA, 636 bp, Homo sapiens
acatctaacttctctgacacttcccaggaagcctacttcactcccacctcacaggaaacaggaaacaggaggatatggcacagccagatcacctggggtcacaacgaaacaaagcaaggagggtaaaacccacggagaccagtgggtagatcttgatgaaagctcagtgtacctgccagcagtaccgtgatcagagatatcaggtaatagcataggtcacctgcaaagtcaagctggtcactcccagaagaggtgggaaggactactaggcttgaatccctcgatagccagcctccatgtctagcttttgaccctacccctgggagctcctcagggaatgagaaaaccctttccctacccactggyggtgaatttccacaacaagtagacactagatctgccataaactgaagcttaatgtttcacacagccccaaagcctatcccctagaccctacatagtgagaaagacaatcactgcagcaaattttgacaataagcaggtattagttttgccacaatcaggaatataatatactgagtatagcgtttggtccattcatcacaatccaattaactttagggtcccttctgcaactttgtccaactgatgagtccagatagcagtatattccag

SEQ ID NO: 538252 - DNA, 636 bp, Homo sapiens
acatctaacttctctgacacttcccaggaagcctacttcactcccacctcacaggaaacaggaaacaggaggatatggcacagccagatcacctggggtcacaacgaaacaaagcaaggagggtaaaacccacggagaccagtgggtagatcttgatgaaagctcagtgtacctgccagcagtaccgtgatcagagatatcaggtaatagcataggtcacctgcaaagtcaagctggtcactcccagaagaggtgggaaggactactaggcttgaatccctcgatagccagcctccatgtctagcttttgaccctacccctgggagctcctcagggaatgagaaaaccctttccctacccactggtggtgaatttccacaacaagtagacactagatctgccataaactgaagcttaatgtttcacacagccccaaagcctatcccctagaccctacatagygagaaagacaatcactgcagcaaattttgacaataagcaggtattagttttgccacaatcaggaatataatatactgagtatagcgtttggtccattcatcacaatccaattaactttagggtcccttctgcaactttgtccaactgatgagtccagatagcagtatattccag

SEQ ID NO: 538253 - DNA, 581 bp, Homo sapiens
tcttcctcatctcctattgaggtcttcagggactccacaccgccaatccagtcattatttctctcttcttttctttcctggcctctgagcagcatttggcacagttgatcgccccctcctttttcatcctcaatactcttgatgtcggtgacaccatccatgcccasttttcccccacttcagttgctattcattctcagtctccttcgcagcttttcctcctctgatcaaacatttaatgttgagattcccagtgcttggccctacagtatcttcctaaaagatcacatctagtcttatggctttaaacaccatcgctttgctagtgactgccagatatccctagctctgacatctccaatgagcatcaaactgatatatccaaccacttacatgatgtcttcacttaaaagatctcatttaggccaggcgcagtggctcacgcctgtaatcccagcactttgggaggccgaggcgggcggatcatgaggtcaggagattgagaccacggtgaaaccccgtctctactaaaaatacaaaaaaattagccggcgctgtggtgggcgcctgtagtcccagct

SEQ ID NO: 538254 - DNA, 581 bp, Homo sapiens
tcttcctcatctcctattgaggtcttcagggactccacaccgccaatccagtcattatttctctcttcttttctttcctggcctctgagcagcatttggcacagttgatcgccccctcctttttcatcctcaatactcttgatgtcggtgacaccatccatgcccacttttcccccacttcagttgctattcattctcagtctccttcgcagcttttcctcctctgatcaaacatttaatgttgagattcccagtgcttggccctacagtatcttcctaaaagatcacatctagtcttatggctttaaacaccatcgctttgctagtgactgccagatatccctagctctgacatctccaatgagcatcaaactgatatatccaaccacttacatgatgtcttcacttaaaagatctcatttaggccrggcgcagtggctcacgcctgtaatcccagcactttgggaggccgaggcgggcggatcatgaggtcaggagattgagaccacggtgaaaccccgtctctactaaaaatacaaaaaaattagccggcgctgtggtgggcgcctgtagtcccagct

SEQ ID NO: 538255 - DNA, 501 bp, Homo sapiens
tgcttccttgcctcatggggtgatcctgcctatttctgtttcagttatcttttgctgtgtaacaaacccaccccaaacgttagtggctttaaggcaacattattttttttatttctcatgattctggagtcaggcatttagatggtatttagctcttgtccagagctgctgaaggacagaagtayactcggtttggacccacaggcccagtcttggcttctggaaaaaactacaccaacaatacatttggccccttcaccacaaggtttgtttcctccgtggatctggcactaagaaattatatctattcgtaactcttgcctgatgagtaacttggatcctaaattctccctgcccttaatggctgtgtggtgtttgagaaattgctttaactttggggtcttggattcctcatctattaagtgggagcattgaagttctactagatgactttaagacatattttttactcctgaaatctgttatttaagaggggcattt

SEQ ID NO: 538256 - DNA, 644 bp, Homo sapiens
cagacttatgttcacatgaagactccactctttatcctctagggaaatactctgagaaacttgatcttccctctaagtgctttataaaaataagttgtcaaacagtagcagkattagggccattataagtgaaatgtccattacagtgcctgacacatagtaggcccatgataaagaaaagttctttataagaggctagatgacgctcttgcatttttaactccccttggaaaatgatcatgctcttccctctaaattcagctccaatttggtatatgaaaattgtggtagtaatgggagcccaatctttgcggcagaggaaggagcatgactgggtttatacagtgagttgattggtggtccggccaggtaggtgtaggcttacctcctgctccatgctcttcctgctggtccttcttcctcccactaaactgcattagattttgtaaatgtgttctgtcatcttttgctttcgcaggaagtaggacaatgtctaatggagccattgcaaaaaataagagccactatcctctcctgatcatcttaaaggttttttaatttcatttacacagaccatctccatggcagtgacttttgattttgccagcttaggaaatgttgggcgaccttttctcaccatattt

SEQ ID NO: 538257 - DNA, 616 bp, Homo sapiens
agccactgtaaatggggcacactggataagtcgttatgaagtgtgttggcattttctgcctctgtggctcaaatttccctgtaaaatgggagtttccagactggttggtatttgagaactctcccacctcctatattttataattccatgacttgtgcaaatcacttataagaggcaaaagtaaacttaagtatacttcaactacaactccaatgctcattcatcaaaaattcaagcaccattttgtaagctccctgactggccagctctcccagctcaaaaatgctacaattatcccttgcaatgactgtataactaagtgaaaacctacctggctgagggcatgcactaggctatacctctgatttaggaaaagaaaaacccatcaacctttttgggtgtctaaactatacaataaaacaaaattctatagggttcactttaaccttatgtctatgggaagagaatgactttttaaataactacacagaaagaaggatatatmtaattgtcctgatatctgttaatgaaaacaaaccaccccaaaactgagtggcctaaaacaaaaagcatttttctatatttcacaattttgtgggataggaatttggacgag

SEQ ID NO: 538258 - DNA, 178 bp, Homo sapiens
tgggaagctaggaagggatggataatcaggacagaaacatgggacaattcgtataaggtatacaattatttaaagataaaatatttaaggataaaatgcctagaattatcttggaggtgtgtgggttcaagaaaggtcttrcttccattttaccagtttttgaaaaacatttaatcca

SEQ ID NO: 538259 - DNA, 469 bp, Homo sapiens
tgagcttcagaccacgcatctcagtttgtaattatatgtttttattattacaataatttgattaatgaatatgtatttagtaaagtgcctataacaaagtaggtatttaagtaaatgtataaattagcacttttaaataacgtgagtgcttagagccaaaaccagagtaatctgaaactgaaaaatcatagcaaaattacagcaaaacttcaaccaataaaatttccctttgtcccccacccctaaccacaatggggtagggacaaagggaaacaaatttcagaaggaagacgtcttaaaaagacagttttacattaaggatttagtggaaaaggcaaattccaggattacattctaagcctggcctgagtaagtcaaatctcttgtgctgtctaaaatacaagtatattgaagcattacaagamattcaatcatgaatcactcatacttctcagtattattttcctag

SEQ ID NO: 538260 - DNA, 511 bp, Homo sapiens
aaagaatgtgtactatacagaacatgagtaacatgttctgtagatgtctattaagttctgtagatgtctsttaagtccatttggtctatggtgcagtttaaataggatgtttgctgtttttctttctagataatctgcttagagttggatgttgaagtctcccaactattattgtattgaggtgtatctctcccttttgacctaataatatttgctttatatatctgggtgctccagtgttgggtccactgaagatggagccccaaatctggtccttttgatctctatgttggtgactgtttcaataaacacacagttgctcaggctgaaaccctaggttatctgttattccttctcctcttgtgcctttcccttcccatcactctcttccaataactcaaactgttcccactttttccatccccaatgcacagccacaattcagtcttattgtttctcaaccagattactacaactccctgaatggccatcttacctccatttcagttta

SEQ ID NO: 538261 - DNA, 511 bp, Homo sapiens
aaagaatgtgtactatacagaacatgagtaacatgttctgtagatgtctattaagttctgtagatgtctcttaagtccatttggtctatggtgcagtttaaataggatgtttgctgtttttctttctagataatctgcttagagttggatgttgaagtctcccaactattattgtattgaggtgtatctctcccttttgacctaataatatttgctttatatatctgggtgctccagtgttgggtccactgaagatggagccccaaatctggtccttttgatctctatgttggtgactgtttcaataaacacacagttgctcaggctgaaaccctaggttatctgttattccttctcctcttgtgcctttcccttcccatcactctcttccaataactcaaactgttcccacttttyccatccccaatgcacagccacaattcagtcttattgtttctcaaccagattactacaactccctgaatggccatcttacctccatttcagttta

SEQ ID NO: 538262 - DNA, 563 bp, Homo sapiens
aggcaaaaaaaaaacaaaacaaaactgaggctcataaaggagatgaaatgtgattataagcaggctgatctcttgcatctggattcaaatttggattaccacacatcaggggtcagcaaactatggcctgaggaccaaatatggcctgccacttgtttctgtgtataaagttgcaacagtagagttgaagagctgccatagagataatatggcctgcaaagcctaaaatatttattatatggcctttccatggattatcaaaatatatttctagatgacttaattttttgtaaaacataattgcccatgaagtgttgatggttccatgaatatataattcagtcttaatttacttgctcaaaatatatttctcctcagagatgaagataaactgaaaatgtggaagcccaagtttctgacaccaaaggaaaaaaaagagaaaaacggtgctgaagaatcagaaaggtgggaacacagaggcacttctattatagcttatctgctgcaakttatacctcttactagctgtgtggcctcagataagtaatgaaatttgattctca

SEQ ID NO: 538263 - DNA, 533 bp, Homo sapiens
gactcagtgtcctcatctataaaatgggacagtactatctgctccttaaaattgtcataaatgaaatcatgtataaagtacttagaataaacactgagtgtgtgttgctagttttacagtggttgctgtaatggctttccaggacgtctttctgtttccaccttttcccatgaaatttattatttatacagcatccagaatgatctttacaaaagaagtgtcagctcatgtcacttcctggcttaaaactctccaatgtcttcccaatgcatttagagcaaaatccaaattacttccacagctcacaagatactccacctccatttcctgagctcactgcactttagccaagattccaacccctttctcctttaaaatgtcctaagcgtggttctccctttagtctttgtgccagttattttctttcctgggatgttcatctcctagatcttcctttaactggrctgggtccttattcagttctcaactcaatgctactatctcagagaggtctttctttgatcgatttatag

SEQ ID NO: 538264 - DNA, 642 bp, Homo sapiens
cacctgtgtgaccttagacaagttaccaaacctctatgtgccttygtttccacaactgtaaaatgtgggtaataatagcacccaggcccactggaccatcacaaagactaaatgaaataatccaaggcgaacactgagaacatagtaagcactcaacaaatgttagccccgcatggttacggctctgctgttaaaccagcccaggtggggtagtctccctttccagtcatggatgtccagagatggagaccctactgtctctgctggcaagatattctagaaagccacatctcttatagtcaggaaatccttccttaaactcctcctgcgatgactcacttgactgtattaatcatttcagcccgtgccttcatgtcagctttgggagacactaaggctgactgctcagcagcccacacataacatcctctgctgtgatttcaacccaatccttcattcctcgaggctggaaagacctccgagaccatcccgtctaactccaacatagtgataaggacactgaggcccagttaagggaggggatgacttttcccaggtcgcagagacagtcagtggcagaagcagtcttggtcctgggtctgctgggacacagccaggctgcaggttccgtcctcgaagcag

SEQ ID NO: 538265 - DNA, 628 bp, Homo sapiens
ctggggcagtttttcattataatccttttgttgctattttttttttttaatctccagtgatctatgatcatgcctcattgaacctgaccgatcagcagcctttgatccagctaattattacctgcttttgaagcactgtcttcacagtacactcaatggttttcctcctacctctgtatctaccctttcccactctcttttcttggtcccccttcatctgctctacctcttaatgttgaaatgatccagggctccgtccttgctaatctcatggctttatatggtgacaaattgcaaattgtgcaatcaggaagtcattagaaatcgtgacaagaacaagtttggttgagtggtagaggtaaaatcttggttggagggagtctgagagagaagttcatagatttataaaatataggtataatcctttcaaggattcagattatttttacactataaatcccaagtaaaaccttatattattgaccaaacacaaatctaaatgtaaagactttacattcatgaattctgtcccttatagatatttctccagacatgttttatgtaccatgacttattcgtcraactagtggttttgccttttgtggtagaaataatttcttttgaccta

SEQ ID NO: 538266 - DNA, 636 bp, Homo sapiens
tctgagatattttagcaaaaatgtggatttcaaagcctggccaggaactgtgtggggtttggtcttctcacttgcagatgttgtccacttagggaagctatttccaatccttcatgtgagaaatggraaaaatcacatctccatgctaggtcctggttgggaagtggccagcacccaggtcctcattgcctgctagtcctgccagtcagcctggtactttagaggtgggtgtgcactgccctctccacacctggagtcccctttcttcctccctgctcctagtcaaatcccgctgatatatgaagggatagtggaaagtggctgttttaaattcagggatttagaaagtaactgtgaatcaagctggtagtgttggttttgaatgattttttcaataatacacaagtcctttgcagagtttttgaaggaaagctacaggaagtctctatcactcctattccatacccctctggcaagcgagtctcctagtaaccacaaattaggcatctcattgtcagttgtctcctatgtcttgtactactctgttttcccctggaaatgtctgttttatttttatttatctatacttctccactgtcaccattgatggttataacaaattactcatgtatttct

SEQ ID NO: 538267 - DNA, 611 bp, Homo sapiens
gcacagagtctagcacaggctctggcatatacacrtgctcaagaaatgttagctttaccaactccactttcactggctttgtttcttgtggcaggttgctatgtcaacatagaacatgttttatgcttacttcttccaaaacagttgcccccacatccttctccaaggtcttcagaaagaagggcaaccataattcattttctttcagtcactgtcttctttctttgccccctcacgataattctttctgctagtcagtattatttccggcatcttctaaatttatttttccctttaaccaatgtgccagcttctttcccctggaaatcttccataattaatggactgtttatgcataaccataatattataaatgccttaagaaaaactattatcagtgatcatatagttgggcattttttgtgcatttctttccaaaatggtggcaagatctttcagttattgggtttcgtatatatagaatgcattcaaagtcatttgcttagattttcctaatgcttcctaatcattcttaattaatttcagatataaatagaatgtgacatttttctgtttaaaaaaattttatttagcacaaaagtacggcatgc

SEQ ID NO: 538268 - DNA, 525 bp, Homo sapiens
ctttactcatactattttggtcgttacaaaaacctacaagacagttattttagctctactttactgaggatcagagaagtagcctgttttaagttaacagcttcaagtggcagagtcctaatccatcaatagttagagctatctacctatttgctcctcagatatttttggattgcctcttatgtgttgttcactgtactaggtgctgaggggataaaggtcagtgacaccgaccccatcctggacctcacagagctgctagcctgtgaggctagcaaggctgagtggaaggctgagaagcacgtaggcaattgcaactccatgtcacaatgtagagggtgtggggtgacacagtcatcccaggcagaaagaacagcctctgcaaaggcccaggggtasaaaagagcaaggcactttgggggaagcgcaaggagtttgctatagtgctaagtgttatgtgataaataagggcacaggcagaatactgtggtctctcagcgcagaaacccactatgtctgtctggg

SEQ ID NO: 538269 - DNA, 653 bp, Homo sapiens
caacctgtgggccaaattctgcttgctgtctgttttttaaaaataaattttaggctgggcatggtggctcacacctgtaatcccagcactttgggaggccaaagtgggcggatcatgaggtcaggagatcaagaccattctggctgacacggtgaaaccctgtctctactaaaaataacaaaaaattagccaggtgtggtggtgggcacctctagtcccaggaggctgaggcaggagaatggtgtgaacccgggaggtggagcttgcagtgagctgagctggtgtcactgcattccagcctgggtgacagagygagactccatctcaaacaaaaaaaataaataaaataaattttaatttgaacacaaccatgtccatttacttagatattatctgggactgcttttatgctgtaacagcagagttagtttgttgatctctggtctaaggataggggattttctagctagggtgagttaattggtggtagaagcagagcctcttgattgacagctctgttatatgtgaggaaaggagagctgtccccaaaaagacttaacatttctcaaaaggaaagaatgccaaacaaatatgtacctcctgaagaaagaagacttttctattatgcccatttttttcctgtcatatagatg

SEQ ID NO: 538270 - DNA, 667 bp, Homo sapiens
ctttgaatgcaaggcttttgtcttgtttatctgcataccccagatcctagctcagtgcctggagcatggtagatgcccagtcaatattaaatgaatgctgtctgtgttatccatttcctatttgatcatgagaagtactaggacagaaagaacttgactgcagaggaggaagaggtttcgggacccagggacccactggcatggacatgagctgccagcacagcaatcggacaagggtgggaacaattgctcrgaagctgatttgttagcatattgagttctcccactggcccagctcattagtttactgggtacacagagctgaacagagctcaggggaaagataattcactcaacaacattgactcttttttgctctcttgtttatcttagttgctggtgctcatgtcatgtctttcagtttctttcactgaatgcctttttggtttaaatcttagttattttttcgttgctgtcctggagatatatgaaccagagccaataatataagagctttctttttccttcacagctctgaaagctttacataagtgtttcttcacttctattttatggccaggaccagatgcagaagtgctaaaatattttgataagagctgtcctggcagtagttcttgcttttacagctatccagagggaaagaatt

SEQ ID NO: 538271 - DNA, 590 bp, Homo sapiens
ctgtgcttacatcaaagggaagctgaacccctttctttgactgtggactttatcatcacataygagtttccgtctgtaagagaaaggcactatcatcctatattctctaacttttaaagaaaagcaaacaaacaaaaaatctgaagtagcaaaggtaattgccttggagaaaggaccatagacttattagacactaacctggaatcccacaattataatatgcaccacagtgatgacttcagtataagaggccatcttgatcccactcaaccaataagtgcctgaaaaattaaaatacccttagtgagacatgatcctagaatgaagacctggaaaagcctgcaactgttttattctttactttttcttgtgattaatattatttgtactttataaaatatatacacattatacagtattttcttacttattttggcacgtgaaaatcattcaattttaataggttattttgtatgactcatttagtaccatgacagtagatatgttttatcttctgccatcataattatatgttctcttgttattgcttgttttttaatgattacttgttattttgtttgttcttgatc

SEQ ID NO: 538272 - DNA, 598 bp, Homo sapiens
cctggctccccttccccagggcggggccatcccaggcaccacttgaagcacctgccctgtgtcatcactgccctaaccccaccattggccacagcttattgcacctgacgggaccaccggaaccaagcaaggtctgcagagaaagccacatagcacacacaaagatgcagacgtgggaccctggagacctggacattctgggccctgaggtcctcccaggtcttgttctatccccagaaggatgttctgcccttcttgttctggggatccagagcaagaagaacttgcctgacccaggcagtgaatgccccctgcctcactgaagcaagccccccgtgggcttctcagagttgaggctggatacagactggtcactgcccccaggcagaggtagggaggggggtacttacagcccgagcccgaccccgagtagaggtcatccagttcatcatcrggaaaggagtcatcatccccagagccctccaggtccacgggtctctcgaagttctcactgcgccagcgctgggcctagggaaggtagaggtggacacagggctcggcacccgagactggcagcctgggtgagcccagaagggcg

SEQ ID NO: 538273 - DNA, 514 bp, Homo sapiens
taccaaattgtctctaaatatgacttgaaacattatgatcttgattggaatcctttttaatattctgaagggcaaaggtccaaggcaaattcagataacaaagcactctgtagggtttattctttgtgtttacatttaataagtgtatcatagagagttttggggggattagaaaagactcttcaaacaaaataaggagagaaggaaataggttattttgagtggttttagagccggtaatccagcaccttgagaatactggaaaatatggtcagataatcaatcaccttggaaaccacagaaaaggcataaactttttgctctccatccyacctaagtggaacccaagctgtctacaacttgttcccaacagcgcaacaattcccttaatttgttcatattaaaatctcagcacacatttgttaaatggaattaagttgtgcctctagttctgtaatggattcttcagtgtgactgaaagagttctgctgggtactatgatgtgacatgtaat

SEQ ID NO: 538274 - DNA, 664 bp, Homo sapiens
ttcttcatatgttccatgtttatttttagacttataataatgcttaatgataaattttgttagacctgtttgacagataatgaaagtgaggctcaaagatgaagacaatagacaaagtggtattgaattgaatgtaagcctggtatttttccaccatgttactctgcctcttaagattttgtttgtttgctcattcattcgttcatttatttacgtatagatagcttatgacacacagattttggcgtggcttattgaaataaaatgaatgcaaactttaaaaatttggggaacaagttttaaacattagaatataaaataaggatcaagagaaaacttagggcagagatacgcagccataaggtcttaaatagcttttatagttgaagcctcattttgggttaaagcttctggtagttaaagggaacaaaaagatagtgctgcagaaagttctggactgggaacctggagatcagatttattactgaccagttttgtgccttttggcaaagcactttatttctatgagccttggtttcctcatctgtgtaagcratgggttattaaaaggattcaatggtatatgtgctcaaacattatagaactcccagaatttgaagtatcttttatcctcattattagcacatgttaagtgtttttttgc

SEQ ID NO: 538275 - DNA, 567 bp, Homo sapiens
ctgcctgagtggagggctcccaacatccctcttcccttcatatgtcaatggtactagggatcattttgaactattcaaaaccatttagataggcaaagtaaacacacctctcttcattgggtgtgttggtcttttcaatatatgaaagtggaattctcaagaacacactctgggayatcccttggattatctcatctcctcatgggcagctttgtattttgtttctaagctattacttcctccagaagaccctcatgagtgggcaatagatttgccatgactcagagagaaacaaacgtgcccatgtacagatagtgacttttctgcctatgagccataacatacatcttttgcagcctcactcaacactaccttacaaacaaaattaggagacacggaaacaagtttcaccatccatgtataatggatttcaaacaacaatttctagacccaatttctccccaggcccctagacatagtggactgcttaatctccatttgaatgcctaatacacatatcaaatatgaaatgcccccaaaccggttgtaagtgtctcacctttttgt

SEQ ID NO: 538276 - DNA, 671 bp, Homo sapiens
ctggcaggtaactgctgcgggtgtagctgcccgtcttactctcctaaagaaagggaagatccatgcatcaattttgagatgcaaaatttaagcaaatgagaaagctgtgcacattttccttccagtaaaacatggtttggaagaaatgaggaatgaacatttattgtactcctactttatgtagaaatgccaacagaaatgagagagtgtatggtgctagagggtttatataaattatccctttaatactatatcagtcccccatgcatcaaattattataattttagagagaagaatattaaagagggctaacaatttttgaagagccaaagtagcagaaagctcagtggttaagaatgtggagtctggggtaagaggattgggtttgaatcttaaccacttgctgactttgaaaacttgagtaaattacttaatatctctgaactacagctttcccatctataaaacyacattaaaaaacattacctaaaagggttattgaaagtgtattgaaatgcttatgaaaggtttactacaagatgattttcattattacatgctgggacattatgtggattatctcatttaatctctataacaatccttggagataaatattattagatctattttatgtacagtgtaagaaagctgggattcctaaaagcta

SEQ ID NO: 538277 - DNA, 629 bp, Homo sapiens
catgaagtctagacagaggcatacatgctaatgctatcacgcaggccagagtacagaaagtacaccaggaccattcattaaagtcattacagggctccaaccttttagccaataccaatgtgaccaacattttattattccaataaatttttcaatgtrgttcattttttgatgattataaaagtaatacagtctcattacagagaacataagaaagatcataaatgaaaagaattgccccaaattttactgtcattaatatttagttatattttcttctgtttattttcataacatattgaggtcatactgagtattacattttatatcctgattcttccacttaataatagagcagaaacataaactatttatggtaatacacattgttccactccccttatattaaacaattagattattgagtccccagtttttctgtattcaagttatttattgaagatatatcctccagagtgggatgactgcattgaagggattttagagcttatggcacatattgccaaatggctttccaaaagaactgtataaattttttaattacttaaggagccattcataattccatggcctaataaatcttggaaaatatttttaaggcatctctc

SEQ ID NO: 538278 - DNA, 628 bp, Homo sapiens
tgtcaagtagccacagaaacagctcaccttgagaccagactagactgggaagcaatccagcatcccactacctctgtacttccttagggacctcaactgatttgcatctctctcttttccactctggagtttaagtcacattggcttttctgagtagaatcttgctgctgaggaaasaagtcctctgcagggtctccctcatctcccattatactcctagctttgtctggctaatccctacttgttctacttgtctctggctccttcttctgacccccacagatgccttccctgaccctgctgccctgtgtcagagtcctcctcgcacactacaataattatctgtttccttgtccatttccccacacttgactctcagctcatagaggtcaagcactctcctgagtcatctttatttctcaactagctctaacacagtaaaacgtcattaggtacttatcaaagttgtctcaaatgttcttaaagtattctgctgtgttcttaaagtctcaggatcatggcattagaggtcaccttaaaagatcgctggtcttttctacccttcaaaccctcctgtaccctcacaggcaaacagccagcctcagcttggtctcctgcaatggtgaga

SEQ ID NO: 538279 - DNA, 628 bp, Homo sapiens
tgtcaagtagccacagaaacagctcaccttgagaccagactagactgggaagcaatccagcatcccactacctctgtacttccttagggacctcaactgatttgcatctctctcttttccactctggagtttaagtcacattggcttttctgagtagaatcttgctgctgaggaaagaagtcctctgcagggtctccctcatctcccattatactcctagctttgtctggctaatccctacttgttctacttgtctctggctccttcttctgacccccacagatgccttccctgaccctgctgccctgtgtcagagtcctcctcgcacactacaataattatctgtttccttgtccatttccccacacttgactctcagctcatagaggtcaagcactctcctgagtcatctttatttctcaactagctctaacacagtaaaacgtcattaggtacttatcaaagttgtctcaaatgttcttaaagtattcygctgtgttcttaaagtctcaggatcatggcattagaggtcaccttaaaagatcgctggtcttttctacccttcaaaccctcctgtaccctcacaggcaaacagccagcctcagcttggtctcctgcaatggtgaga

SEQ ID NO: 538280 - DNA, 505 bp, Homo sapiens
gctgctcaagagtctattcggttcaaacaaaagactttgacttcttccctcccctctagactttcctgtgggtttgatgaataaaacataatgatcctaaccacttgtcacccaaactagaggagttttacaatgttaaactaaaaagatgtttgttagaccaggactgtcatacacgtcagcaatggtaggtccttgcctgtggggacttctgcacagggcccatagcacgtcttaacaccatgctcttcttgctaawgtctgtacagtcattatgggccagtacctactcactggagataccaacttgcagtcaacgtggagggttgagggactggtgctctgcatgacagactctgcagtacccagccctggtgatttcttatctgccatgccaaatacacagttactgccagaacaagaaggctgccattcaaaacctctcctttgcacttactcaacagtggcacttagggtacagttgctggcaaacatgaaaaggata

SEQ ID NO: 538281 - DNA, 630 bp, Homo sapiens
ctgtgaagttgccatcagctacatccattttcccagatcactgagacactttctctttattcaacatgtgtttattgaatacctcctatgtgccaggattcagaatctggttctaccagttgccatgagcaaattagcaaacttcactttccttacctgtcaaattaggataacctctacctcaaagatgttttatgaggattagagatattgtctgtaaagtttctaacagtgtttgacacatgaaaggcgctcaataacgtgccctctgatgaaacacagaaagaagaaagcaaaccatagcccagtagttctcagcttgatcatgcatcagaataacctgtagcaggttgttcaaacacagagtctgtgattcagtagatctggggtagggtcagaaaatttcatttctaacaaattcccagatgctactgctgctgcttgtccaaggaccatcctttgagaaccactgccttacctatcagtgtggacgagctccttcctgaagtcagatgtgtgagaggaaagatcaatacgtacagagagagaattcaaatattcaactgattccactggaaataggaagaggaatcctaagatttgacttsaatataagcagattcctgaggt

SEQ ID NO: 538282 - DNA, 591 bp, Homo sapiens
ctctcaaaaatacaaacccccaaaccgtaggcaagtactgcaactgggtcatgactgttaggtggaacggcctcccaccaaaggatagccaactaacagaactcatggatggtaggagtaacaggagatggtgctaacgggaccagagggtcagagcagatgctggagcagactggagaggcctggcttattctagagggcttggaaagtagcctgcatggaaaggacaagccagccccagagacgtgtagttcttgcagaactcactcacaggctgtcctactcccagcctctgaggacacaagtcataagatttggagggtgtaagagtcctcagccacttattttgcaagcatctgaacataagccagcttggttkccaggttctttgggtccttgtgccccatttctagtagctggcctctgggcatcatctactttccagaccttaagggaatccaggtgactgtggcttggatgtgtgggcacttaggcttgccctgcctcagcaagtctgcctggatctgaagtgcctgggggctccttcccacagggactgctaccttattgcacaggtgagaaccagagatt

SEQ ID NO: 538283 - DNA, 591 bp, Homo sapiens
ctctcaaaaatacaaacccccaaaccgtaggcaagtactgcaactgggtcatgactgttaggtggaacggcctcccaccaaaggatagccaactaacagaactcatggatggtaggagtaacaggagatggtgctaacgggaccagagggtcagagcagatgctggagcagactggagaggcctggcttattctagagggcttggaaagtagcctgcatggaaaggacaagccagccccagagacgtgtagttcttgcagaactcactcacaggctgtcctactcccagcctctgaggacacaagtcataagatttggagggtgtaagagtcctcagccacttattttgcaagcatctgaacataagccagcttggtttccaggttctttgggtccttgtgccccatttctagtagctggcctctgggcatcatctactttccagaccttaagggaatccaggtgactstggcttggatgtgtgggcacttaggcttgccctgcctcagcaagtctgcctggatctgaagtgcctgggggctccttcccacagggactgctaccttattgcacaggtgagaaccagagatt

SEQ ID NO: 538284 - DNA, 591 bp, Homo sapiens
ctctcaaaaatacaaacccccaaaccgtaggcaagtactgcaactgggtcatgactgttaggtggaacggcctcccaccaaaggatagccaactaacagaactcatggatggtaggagtaacaggagatggtgctaacgggaccagagggtcagagcagatgctggagcagactggagaggcctggcttattctagagggcttggaaagtagcctgcatggaaaggacaagccagccccagagacgtgtagttcttgcagaactcactcacaggctgtcctactcccagcctctgaggacacaagtcataagatttggagggtgtaagagtcctcagccacttattttgcaagcatctgaacataagccagcttggtttccaggttctttgggtccttgtgccccatttctagtagctggcctctgggcatcatctactttccagaccttaagggaatccaggtgactgtggcttggatgtgtgggcacttaggcttgccctgcctcagcaagtctgcctggatctgaagtgcctgggggctccttcccacagggaytgctaccttattgcacaggtgagaaccagagatt

SEQ ID NO: 538285 - DNA, 456 bp, Homo sapiens
aaaggctggcaggtagcctaattggaacaggcaaaagccccaaaccaacctgaagtccacaaagccacagaaacatccaatttgctcaaacatattagcaacacttggcttttgccaagccctgtaacaattcagagcccccctctttaaacgtkttcatttagcctctccacaatccaccaattcaggaagctctccattttaactttcagagctatccacactcaagcccaaaagtgttacatggatacacacaaggcccaagcagcaccacagttagaatgccgggtcgtgtggctatgagacacaggcctgccacagaagccatgcctggcttcttgaacattctaggcgcacctttgtcaaccacataaaatgacagcatgagagcatgaacaccaagctataaaaacgtggcaggtctgcctgcacagaagtgacggttgtggtcacact

SEQ ID NO: 538286 - DNA, 456 bp, Homo sapiens
aaaggctggcaggtagcctaattggaacaggcaaaagccccaaaccaacctgaagtccacaaagccacagaaacatccaatttgctcaaacatattagcaacacttggcttttgccaagccctgtaacaattcagagcccccctctttaaacgtgttcatttagcctctccacaatccaccaattcaggaagctctccattttaamtttcagagctatccacactcaagcccaaaagtgttacatggatacacacaaggcccaagcagcaccacagttagaatgccgggtcgtgtggctatgagacacaggcctgccacagaagccatgcctggcttcttgaacattctaggcgcacctttgtcaaccacataaaatgacagcatgagagcatgaacaccaagctataaaaacgtggcaggtctgcctgcacagaagtgacggttgtggtcacact

SEQ ID NO: 538287 - DNA, 597 bp, Homo sapiens
gtgggtagctaagtaaatctaaaaggtagaattgcaaaacataaattcttttaagaatgaccataatctttattaacagagccttgaagatttgtcatcaactaaatgaaacatgaggatcttgtttggagcctgactcaaaccaactggctgttttcaaaaaaaaaaaaaaaaaagaaagaaagaaagaaattgagacatcgaaggaaagttaaacaccatttggatatttggatgacaggagatatttagggatgactgtgctttttcaaggtgtaataataccactagggttawgtttttaaaaggtattatcatttagagatatattaaaaagtatttatagataaaataatacaggatctaggtcttgctgtaaaataatccaagaagggagtaagaaaaaggtgggtgaaggtataaaagaaatgagaaaagccatgtgttgattacaagtcgaaaaactgggggatgggaacattgaggtgtattacgctaactctatctttgtgtacctgtgaaaatttccattgacaaatttgaaaaaaaaaaaaaagactaaccataatgtcaaaccatagttaatttcctcgcatt

SEQ ID NO: 538288 - DNA, 610 bp, Homo sapiens
gcttttcttaaccaaaaaagttgaacaaagtgtttattcctccacaaatgagtgaagcacctctgtgaggaatcctgctccccccagaatgaagaaatatggcaatcattttttacattacatttttttcttcctgttatacatatggtaatactatgaggtggatattagcccttgcccccttttttttcagatgaggaaaccaaggatggaaaaggttaaaaaagtaatctgctcaaagtgacatagctaacatgtcagagctggaccccaaatgcaggcatgtctgactccaaagccagagggggtgaccacgacaccatgtggccgctcggtgcagctcaagcaggtctgaagtgggttgcatccccagggtgaatcttactcaggaaacctttcacgggggacactgtatgggtcagaggaaggtgaattgattgactgaaggccaaatacattaaaayagagttagagctaggaatagctacctatgtatagcttcatgtctgagacccaagaagagatgttgctattaatcactgctgaatgattaccctgattgcttcatttgttgatgctgcagttgctgaattttactgtgctctattca

SEQ ID NO: 538289 - DNA, 599 bp, Homo sapiens
agagtcccatcttttctttatccctgccatcatgttcatctgagactcacttgtgtcattttttctttcatcctaggcctgaagaggtctccatgtttcctctcacaatggctcctactctccttccactcttcccttctctgccgctggttagttcttcacaattctggtggccctctgctatacccaatgatcctgactacctctaacccacctttgtagccaggttatattccttccttctcatggccctaatgccaatggattctgtcatgcccayacagctttaacccttctcttttccttaaaggcagtcacttaaaggcactcatcgtcatacatccaagtatgtccatcttcccccaaatttgtcacacttgctgcgttaagcacctctcttcctccacttacccactcagattcctcctgcacatttccaggacagatcaaacaaggatgggtcagccaataaatatctgaggcctattgtgtgccaagctctccactcagcactggggtgacagcaaaggacaagacagatacagacatgctctcttgaagcatgtgatccagtgcagatggaattaaaattggttcag

SEQ ID NO: 538290 - DNA, 539 bp, Homo sapiens
cattttttctttcatcctaggcctgaagaggtctccatgtttcctctcacaatggctcctactctccttccactcttcccttctctgccgctggttagttcttcacaattctggtggccctctgctatacccaatgatcctgactacctctaacccacctttgtagccaggttatattccttccttctcatggccctaatgccaatggattctgtcatgcccatacagctttaacccttctcttttccttaaaggcagtcacttaaaggcactcatcgtcatacatccaagtatgtccatcttcccccaaatttgtcacacttgctgcgttaagcacctctcttcctccacttacccactcagattcctcctgcacatttccaggacagatcaaacaaggatgggtcarccaataaatatctgaggcctattgtgtgccaagctctccactcagcactggggtgacagcaaaggacaagacagatacagacatgctctcttgaagcatgtgatccagtgcagatggaattaaaattggt

SEQ ID NO: 538291 - DNA, 646 bp, Homo sapiens
tttcctccaagactcacttactttttctatattatggtgtgttactgctattgtttgaatctggtttgtctctaccaaaactcatattgaaatttaattgccagtgtaacagcattgagaggtggtggggcctttaagaaatgaytaggtcattaagaggtataatgcctttctagagggtcttcattaattcttcagggaatgagttctcattcttgtaggcttggattcattaccataagagcacgttgttataaagcgagaaccccctcccttgtgctttgtcttttttgcacatgctaaatttccctttcactttccagcatgttatgatgcagcacaaaagcccttgccagacactactgccatccccttgaactctccagcctccagaaatatgagccaaatacatttcttttctttataaatgcctagcctcaagtattctgttatagcagaatacttacatttactctataaatgcacatttatcttaaatgtctagtatctccaatatatacaacttcaaaaccctacagaacaaaggctattaccgagggctcagtacctgctcttgagatgcttcacactgtagcagtctcaaaaataaggtttttcaactgagagattttgatcaacatgatgg

SEQ ID NO: 538292 - DNA, 647 bp, Homo sapiens
acctctctgctctggcctctggtrgctcctacacatcccactggagctgtttccctaagaatgcagactctggagcaggaccggtgcaatttctgtctctgcttattactagctgagtgatctcaggaaagatattatagctctctgtgactcagtttcctcatctgtcaaatataacagttatctcagagttactgtgaggtttaaatgagtgaatacatagaaaacagaacagcacctaggacacactaaacacttaataaagttagcatcatcactacattattgcttatacataaggctccctgaaaccttgtctcttagatgctaagaccagactaagctgaatgctaaggtaacctattgtggaacataggtaaatagtggtgtcagagatctgacaggcacaagcccagagactcaaagcttccttcagggtcccggattcccttttagcactcagagctgtaggctggtagggtgacacctcacgcttcctagctctggcagggacaccccattattcagaagcacgtagggtctctggcctctccaaccccatgctctctgccttcgttctggcactggtgggtggcatccgactggttccctgtatagaatactcatgctccacgtgcttgcatcct

SEQ ID NO: 538293 - DNA, 568 bp, Homo sapiens
tgccactgctaaaaatgaagtcacttttcacagccccagtcaggaagcttttgggccctggaaagcatgcactttggtttcctttctctcaggggttgcctttttggtgtactgcactcttatttctcctaggagtagcattccctgaaggttaggttactggggaccctgcagctcctttgggtccagccagcactctgccactgcagccctttgagcaggactggagaatgtgagcaggagctcctgggttttggatacacaaggactgtggttcccagaagaggatacagttcccttacggatgcaccttcaacagtagcacagcatagcacctgcttgggtctggggaaatggtaaataataacccagtgtgaatccacagtccagtgcactgccctcaggggtctccamattgcggtccatgctattttcaggatttgggaggacagaggagctttcccactgtaaggatcttggcagttcacagcaagaatgaggactatcaaaatacttcaacttaccctttccctgaacactgagttcctctggactcctaaccaatgtc

SEQ ID NO: 538294 - DNA, 501 bp, Homo sapiens
cctggggaggagggagggaagaggccttccagctcctgctgctactcgttaccctcactcccactgcgcagataaagcaccacaaagggttagcractctttcatttaaaaggtgattcaggtgaggtttatttttcattccattaaataaacgttgcaaaaatgttggagtcaagagagtaaaatcagaagctgaaacaaaatgacttaattgctttgccatatagaggcatatttagaaatgagaggtgcaacagggaagattgcatcactgagattttaaatccttggttactgcaagcaaacacagccacaaacctggatcccaactctgtccaagttgaaataaaagcaagattggctttattacaaatgagtagaggtatgggtttattgggatgggcagcttttgaattctttttgcctgatgtcgttttacagagatggatagctgggcattccaagcccaaggatagggactcggattaaaccaagtgtgtg

SEQ ID NO: 538295 - DNA, 375 bp, Homo sapiens
cctggggaggagggagggaagaggccttccagctcctgctgctactcgttaccctcactcccactgcgcagataaagcaccacaaagggttagcaactctttcatttaaaaggtgattcaggtgaggtttatttttcattccattaaataaacgttgcaaaaatgttggagtcaagagagtaaaatcagaagctgaaacaaaatgacttaattgctttgccatatagaggcatatttagaaatgagaggtgcaacagggaagattgcatcactgagattttaaatccttggttactgcaagcaaacacagccacaaacctggatcccaactctgtccaagttgaaataaargcaagattggctttattacaaatg

SEQ ID NO: 538296 - DNA, 537 bp, Homo sapiens
ttggagtcccgggattttattttcctttcacgaggctgaagacattttggcattatgaggttaaggtgcaacagatgacccagcagagaaggcagggtgatcagagagcaggaggaaaaccaagagaaggtggcatccagaagttgaggggagaaggagcatgaaagaggaggggccatcagcgtgccttagctgctgaagtctggcacgatgaggatggaggaatggccattggatctagcagtgcagaggtcattagtgaccattaaggaaaatgctgggccttgcttttcctctgggaggccaccccttccacgtgtgggtgtcctgccctcatccccagggatgcagactccagaccacctcatccctgatgaccgagaccctcaccttctgaagcagctctgcccactctacattctcctttgagcctggtctctgctccttgagggagggtacagcccgccagagtgctgagccacactccctgctgacgtgagcgtgggagcaaagtgctkcacttgctcattttaccag

SEQ ID NO: 538297 - DNA, 256 bp, Homo sapiens
ccagcctgggaaacagagtgacagtctttctcaaaaaataaaaaaataataataaaaaaagaaggcacgctggctgactcaggatatccactaggtggtgctagaaaacaatggccaatcatgaagcattcattttcaaagacctggcattttaatcttttatttgagtgtatcaggaaacagtttctttctttaaaaattgttttttatttcaatagtttttggggtgtyttttgtaacatgaattatatagtgg

SEQ ID NO: 538298 - DNA, 557 bp, Homo sapiens
tgctttgacgagcacctactaggtgccaggctagtattccgatgtattccagtgctcagcactttgaaccatcccaggcaagtcaatactcacagtaactgtatgtgttaggaggcatcattatccctactgtacagataatgaaactaagtgggagagaagccaggtcacttgtccaaggccacacgagtgataagcagctagcacaccaggactgcttgacttcagaactctgcggtctggcctcctggtatcaccagaccttggcctcggggtcagggttgaatgcatgattttgggttgttccatggcccattggatgcagctccccacccacggcttgattgtcaggaacagtggggatggactcaatcttggctcagacctaaggttctcccagtgagaaccagccccagaaccagtcagaccagaacccacacaatgcacaagagcccattctgggcctcactgggaagctagagggcctgtccactgtcctgccccatcccctmtaaatgctaactgctccccagagagtgagcccctcaccattttgg

SEQ ID NO: 538299 - DNA, 539 bp, Homo sapiens
ttaatcctgccaacaactttctggctctgtgacycggggagtctacctgtctgagcctcgactttctcattggtgaaacggtgatgataacagctcgtatctcagaactgggtgtgaggatcaaattaggaaaatcggttaataatggcaaatacttctttggcactttctgcatatcaggccctgactcggtgacttacaagtaagataagggccagagaggatctggatgtgtctgctggccccttcctgccatgccccttttcaggctccagaaatgaccacagacccttttcccaaccccctgccctgaggaatgcacagaacgccagagtgggagccagaagtcctggcatgagttcaagccgagtgctccctgggcctcagtttcctcccctggcccgccctgccccctttggaggtggaaggtgatgacggaaatgtagcagtgttttgcctggtgatgtttatattcccctcccgtaccttccccaaatgacaggcttgtccagatgaatcaccagggggcaggaatgccc

SEQ ID NO: 538300 - DNA, 539 bp, Homo sapiens
ttaatcctgccaacaactttctggctctgtgactcggggagtctacctgtctgagcctcgactttctcattggtgaaacggtgatgataacagctcrtatctcagaactgggtgtgaggatcaaattaggaaaatcggttaataatggcaaatacttctttggcactttctgcatatcaggccctgactcggtgacttacaagtaagataagggccagagaggatctggatgtgtctgctggccccttcctgccatgccccttttcaggctccagaaatgaccacagacccttttcccaaccccctgccctgaggaatgcacagaacgccagagtgggagccagaagtcctggcatgagttcaagccgagtgctccctgggcctcagtttcctcccctggcccgccctgccccctttggaggtggaaggtgatgacggaaatgtagcagtgttttgcctggtgatgtttatattcccctcccgtaccttccccaaatgacaggcttgtccagatgaatcaccagggggcaggaatgccc

SEQ ID NO: 538301 - DNA, 557 bp, Homo sapiens
gatgggaataggccaagctgaaagacctggaaatgatcctaaggtaatgggaagccatggaagagttaagatcagggaggacatgattggattcgagatcaagaaaggtaaaccgactacagaataacatgggccaygcaggagataggactacgaagactagggatgagaggtgggaggggtaagctaatgcattcaccccaacaggagaaatagatgatgaaggaaggaagtgacagtggggttggagaaccggagccaatgctagcagatactcaggagacttgctgatagattgggcaaatagagtggagtagagggaaattagtgcctaaattccagcttgggtgactgatgcctggcccacatcctgggcatgggagaggctgctgaattctattgactaaaattcaaaacgtggttccccctttgacccagcacttatgcaacatactaaacagcagtaaaaagaatgagaaaaaaaggaggcaagtccatacgtgctaacgtgggaagacctccatgtcacgttgtacaggaaaagagcaagtttcaag

SEQ ID NO: 538302 - DNA, 557 bp, Homo sapiens
gatgggaataggccaagctgaaagacctggaaatgatcctaaggtaatgggaagccatggaagagttaagatcagggaggacatgattggattcgagatcaagaaaggtaaaccgactacagaataacatgggccacgcaggagataggactacgaagactagggatgagaggtgggaggggtaagctaatgcattcaccccaacaggagaaatagatgatgaaggaaggaagtgacagtggggttggagaaccggagccaatgctagcagatactcaggagacttgctgatagattgggcaaatagagtggagtagagggaaattagtgcctaaattccagcttgggtgactgatgcctggcccacatcctgggcatgggagaggctgctgaattctattgactaaaattcaaaaygtggttccccctttgacccagcacttatgcaacatactaaacagcagtaaaaagaatgagaaaaaaaggaggcaagtccatacgtgctaacgtgggaagacctccatgtcacgttgtacaggaaaagagcaagtttcaag

SEQ ID NO: 538303 - DNA, 557 bp, Homo sapiens
gatgggaataggccaagctgaaagacctggaaatgatcctaaggtaatgggaagccatggaagagttaagatcagggaggacatgattggattcgagatcaagaaaggtaaaccgactacagaataacatgggccacgcaggagataggactacgaagactagggatgagaggtgggaggggtaagctaatgcattcaccccaacaggagaaatagatgatgaaggaaggaagtgacagtggggttggagaaccggagccaatgctagcagatactcaggagacttgctgatagattgggcaaatagagtggagtagagggaaattagtgcctaaattccagcttgggtgactgatgcctggcccacatcctgggcatgggagaggctgctgaattctattgactaaaattcaaaacgtggttccccctttgacccagcacttatgcaacatactaarcagcagtaaaaagaatgagaaaaaaaggaggcaagtccatacgtgctaacgtgggaagacctccatgtcacgttgtacaggaaaagagcaagtttcaag

SEQ ID NO: 538304 - DNA, 397 bp, Homo sapiens
ttttagattgttttttccttagcagtgaagcaagcctgtggaaggaaacatattccttctaaagcaagcctgcagtttctctggacaggcaagagtgaggccgcccgcctaarcaaagagaggtctgacgtctgctagggtgttctgggactcagtgggtccacccctgtcttcagtctcggacctggctgctcccagaccatttcaagcctaagacaatgacatatctcgctgggttttgaaagctgctagaggggcttcctaacctccttggctgtcctcatcatagctgcctccactccctagccctgcgctcagtgttttttgccgggaagttcttccttaagtccaaactgtggctccaaagatttgcttacccagggagagagggagttgc

SEQ ID NO: 538305 - DNA, 397 bp, Homo sapiens
ttttagattgttttttccttagcagtgaagcaagcctgtggaaggaaacatattccttctaaagcaagcctgcagtttctctggacaggcaagagtgaggccgcccgcctaaacaaagagaggtctgacgtctgctagggtgttctgggactcartgggtccacccctgtcttcagtctcggacctggctgctcccagaccatttcaagcctaagacaatgacatatctcgctgggttttgaaagctgctagaggggcttcctaacctccttggctgtcctcatcatagctgcctccactccctagccctgcgctcagtgttttttgccgggaagttcttccttaagtccaaactgtggctccaaagatttgcttacccagggagagagggagttgc

SEQ ID NO: 538306 - DNA, 589 bp, Homo sapiens
cattaaacacttaataaaactagttacatgttttaaattgaaatatattttgagataatttaaaaaaatatttaaaaatcattggcagtatattcaagatgcaacagacacatgtaattaatcgatattgtttacaaatcttggcagtgcaaattcattgcagttctacaaggaagagacacttgtcaaatgagacactaagataactctaggtccaaccctgtggtatctcacttaaaaaagaactctatataaaactatatactctcacgcctgtaatcccaggactttgggaggccgaggygggcagatcacgaagtcaggagattgagaccatcctggctaacacggtgaaaccccatctctactaaaaatacaaaaaatgagccgggcgtggtggcaggggcctgcagtcccagctactcgggaggctgaggcaggagaatggcgtgaacccaggaggcagagcttgcagtgagccaagatcgcgccactgcactccggcctgggcaaaagagcaagactccatctcaaaaaaaaaaaaaaaaaaaacctatatactcaaaatgatcttcaaaaggatatttca

SEQ ID NO: 538307 - DNA, 589 bp, Homo sapiens
cattaaacacttaataaaactagttacatgttttaaattgaaatatattttgagataatttaaaaaaatatttaaaaatcattggcagtatattcaagatgcaacagacacatgtaattaatcgatattgtttacaaatcttggcagtgcaaattcattgcagttctacaaggaagagacacttgtcaaatgagacactaagataactctaggtccaaccctgtggtatctcacttaaaaaagaactctatataaaactatatactctcacgcctgtaatcccaggactttgggaggccgaggcgggcagatcacgaagtcaggagatkgagaccatcctggctaacacggtgaaaccccatctctactaaaaatacaaaaaatgagccgggcgtggtggcaggggcctgcagtcccagctactcgggaggctgaggcaggagaatggcgtgaacccaggaggcagagcttgcagtgagccaagatcgcgccactgcactccggcctgggcaaaagagcaagactccatctcaaaaaaaaaaaaaaaaaaaacctatatactcaaaatgatcttcaaaaggatatttca

SEQ ID NO: 538308 - DNA, 589 bp, Homo sapiens
cattaaacacttaataaaactagttacatgttttaaattgaaatatattttgagataatttaaaaaaatatttaaaaatcattggcagtatattcaagatgcaacagacacatgtaattaatcgatattgtttacaaatcttggcagtgcaaattcattgcagttctacaaggaagagacacttgtcaaatgagacactaagataactctaggtccaaccctgtggtatctcacttaaaaaagaactctatataaaactatatactctcacgcctgtaatcccaggactttgggaggccgaggcgggcagatcacgaagtcaggagattgagaccatcctggctaacacggtgaaaccccatctctactaaaaatacaaaaaatgagccgggcgyggtggcaggggcctgcagtcccagctactcgggaggctgaggcaggagaatggcgtgaacccaggaggcagagcttgcagtgagccaagatcgcgccactgcactccggcctgggcaaaagagcaagactccatctcaaaaaaaaaaaaaaaaaaaacctatatactcaaaatgatcttcaaaaggatatttca

SEQ ID NO: 538309 - DNA, 650 bp, Homo sapiens
cccattcctggcacgtttgggatggaccttggttctgttcgggattgagtcatgtccctcctggctgaacactctggactttactgattggacctacatgcacattagtgtaaataggctattttggaaarggtcctaggacaaataaaaagaaaacatataaacttgccattggatttgttccccataaataatcccaacagagaaaattgacctggtggcctgggatccacgcatctgctacattgatatcattgtttttatataccattattctagtttctaaatcattcattcatcaacaggtagtaagttttgactaagtgtcaggttatgtgatactctttgtggttaaaaaagacagcttggctgtccttactttcacttcccttgatatcaatctctaccacaataaagtagagacaagccttagagtattcagaaagttctttttctagattatatatatattaatgaagttgtaggcatggtaagagctccacagagtgagtcagatcctcaactgacacaaacacccatcataatgaggcagattatctgcttcacaaaacactcatcataggacacaagcagacttggaacctacgagaaggaaggttttgattttacatctctgccctgtgaattta

SEQ ID NO: 538310 - DNA, 650 bp, Homo sapiens
cccattcctggcacgtttgggatggaccttggttctgttcgggattgagtcatgtccctcctggctgaacactctggactttactgattggacctacatgcacattagtgtaaataggctattttggaaagggtcctaggacaaataaaaagaaaacatataaacttgccattggatttgttccccataaataatcccaacagagaaaattgacctggtggcctgggatccacrcatctgctacattgatatcattgtttttatataccattattctagtttctaaatcattcattcatcaacaggtagtaagttttgactaagtgtcaggttatgtgatactctttgtggttaaaaaagacagcttggctgtccttactttcacttcccttgatatcaatctctaccacaataaagtagagacaagccttagagtattcagaaagttctttttctagattatatatatattaatgaagttgtaggcatggtaagagctccacagagtgagtcagatcctcaactgacacaaacacccatcataatgaggcagattatctgcttcacaaaacactcatcataggacacaagcagacttggaacctacgagaaggaaggttttgattttacatctctgccctgtgaattta

SEQ ID NO: 538311 - DNA, 650 bp, Homo sapiens
cccattcctggcacgtttgggatggaccttggttctgttcgggattgagtcatgtccctcctggctgaacactctggactttactgattggacctacatgcacattagtgtaaataggctattttggaaagggtcctaggacaaataaaaagaaaacatataaacttgccattggatttgttccccataaataatcccaacagagaaaattgacctggtggcctgggatccacgcatctgctacattgatatcattgtttttatataccattattctagtttctaaatcattcattcatcaacaggtagtaagttttgactaagtgtcaggttatgtgatactctttgtggttaaaaaagacagcttggctgtccttactttcacttcccttgatatcaatctctaccacaataaagtagagacaagccttagagtattcagaaagttckttttctagattatatatatattaatgaagttgtaggcatggtaagagctccacagagtgagtcagatcctcaactgacacaaacacccatcataatgaggcagattatctgcttcacaaaacactcatcataggacacaagcagacttggaacctacgagaaggaaggttttgattttacatctctgccctgtgaattta

SEQ ID NO: 538312 - DNA, 559 bp, Homo sapiens
ctggcacgtttgggatggaccttggttctgttcgggattgagtcatgtccctcctggctgaacactctggactttactgattggacctacatgcacattagtgtaaataggctattttggaaagggtcctaggacaaataaaaagaaaacatataaacttgccattggatttgttccccataaataatcccaacagagaaaattgacctggtggcctgggatccacgcatctgctacattgatatcattgtttttatataccattattctagtttctaaatcattcattcatcaacaggtagtaagttttgactaagtgtcaggttatgtgatactctttgtggttaaaaaagacagcttggctgtccttactttcacttcccttgatatcaatctctaccacaataaagtagagacaagccttagagtattcagaaagttctttttctagattatatatatattaatgaagttgtaggcatggtaagagctccayagagtgagtcagatcctcaactgacacaaacacccatcataatgaggcagattatctgcttca

SEQ ID NO: 538313 - DNA, 537 bp, Homo sapiens
tctcttgtctacacccagattcttttggaaaaagcctgccagattcattgctaattttggtttagtttcccaaaaaggataaagtgtccaagccagaactctcagtttctctcccctcctacctattcttttcttggttttctgcctttcagtgagtgcctccaaccatccatcaagagactcaagccatcaccaaggaggcatcaytaagccctcttttccccttacttcccacacttgattcatcagcgcatcatgcaaactttacctccaaatacaccccgaacctactggcttccctccaccctcactgttaccaccctgctccaagctgccatgatctcccatctggactatcacaacagccttcttatttgttctaattcctctcttgctttgtcctccctttccccaagttattctccacacagtagccagagtcacctttttaaactacagcgacatcacatcggtctcctcgtcaaacctccaaagggctctcgtcatgctcaggataaaaggcaaacaccttgccat

SEQ ID NO: 538314 - DNA, 537 bp, Homo sapiens
tctcttgtctacacccagattcttttggaaaaagcctgccagattcattgctaattttggtttagtttcccaaaaaggataaagtgtccaagccagaactctcagtttctctcccctcctacctattcttttcttggttttctgcctttcagtgagtgcctccaaccatccatcaagagactcaagccatcaccaaggaggcatcactaagccctcttttccccttacttcccacacttgattcatcagcgcatcatgcaaactttacctccaaatacaccccgaacctactggcttccctccaccctcactgttaccaccctgctccaagctgccatgatctcccatctggactatcacaacagccttcttatttgttctaattcctctcttgctttgtcctccctttccccaagttattctccacacagtagccagagtcacctttttaaactacagcracatcacatcggtctcctcgtcaaacctccaaagggctctcgtcatgctcaggataaaaggcaaacaccttgccat

SEQ ID NO: 538315 - DNA, 601 bp, Homo sapiens
atctcatccactcccatagtttctagtctgtattccaataactctgtgaaattgatattgccaaccagatcactattcatattctagatcaatatgttcttgtttgtttttaattccacaaatattcaacaagttactgtgtcatagtaaacagtgagaatacaaagagtctctgctgttaaaaaacaggtaatataaacagagtgcagtggtaatactcaagaatattttgaaagcactaaataagaaaactcagatcaaaccaggaaatttagaggaagaacttagaaagaaaggatgtcatcagtgattctaaaatgctagttaacagctttgttacgagagtagaaggagtaataccagcagagaacacataaataagragcaaatttctccacatgaatgatctgcagatactcagaaatagcatgtttgtcacaggttaggtttcccagaaagcaggctctggacaagatttgcatgcaggaagaggggatgctcttggctggatacctatgggagaatgaaagaaactggattgggctgaagggagcttgaactgccattcaatcacaacaaagtctctgatgatcccagtgag

SEQ ID NO: 538316 - DNA, 684 bp, Homo sapiens
ttttgagtaagaaaaattattatataaaaagcaatgacaggccgggcgtggtgatgcatacctgtaatgccagcactttgggaggccgaggcgggtggatcatctgaagtcgggagtttgagaccagccagaccaacatggtgacaccctgtttctactaaaaatacaaaaattaactgggcatggtggcaggcacctataatcccagctacttgggaggctgaggcaggagaattgcttgaaccccgcaggtggaggttgcagtgagcagagatcacgccactgcactccagcctgggggatagggtgagactctgtctccaaaaaaagaaatatacgagcctccagaaaatctaattaagaacagagaagagatacacaaaatattagaaacattaacacacaaataatacacaaacatgctaaaaatgttcccatcccaaagaaaaaaaacttgttttttcttactataggtcttactcttttctcctgaaagaccacttctaaaccagacaattttttggaaatattatgttttctgattataaaagtactacaaaaatatttctgtttagtatagtagactagatactacaggactgaaccacctggtaaaatcaactaaaattactggattttaaaaagtcttaaatrcattcaaaagctgacaagaaagtaaagatt

SEQ ID NO: 538317 - DNA, 307 bp, Homo sapiens
acccaccctcatgcaccctggtgacaaggaagggctcttacctacagaagtaacccagcagggatatatctaattattttctagaaggatatgatttaaggattgccatgtactccttggctctcaaaataaaakaagatttttttcagggagaactatatgttaaagagaactgattcaggtgcagtaacaaaggccaatgtcacagtggattatacaagatagctgtttatttgtctctcaggtaattgtccaaaaataagcactacagggctttctggaggctccatggtatcaggaacctaga

SEQ ID NO: 538318 - DNA, 220 bp, Homo sapiens
attgtgcaggtaatcagagagaggctgactctcttcgcggtcccagtttgaaaattgtgggcaaggaattattggcctggcctgggtcaggcctccccttgaaataattacctgtggtggtggtattagagtggtggtcatgtttgcacayggcagagtagaaattaagcattctgtgtcatgatattggcctggctgctgtgatggagatccaaaataa

SEQ ID NO: 538319 - DNA, 614 bp, Homo sapiens
gtgtcccagccagcaaaaatgatatgggagaggcaccatcagcatttactgcaaggaagatgaaaaattgcaccctgattcttgcatgtttctgccccgaagtgatgcacatctcttgcactcacatttcattggtcaaaacaaatcacctggtcatgcctgagatcaaaggttctgggcacagaaagaagaaaactataaatactgatgagtagcactaatgttagrtgagcattattaatggaaaggggctttcttagaaggctagaagccctttgtttatactgaaattgcagttcatcaaataatgagtgttactatattaataatatgatgtatcttatgtatacattatatataagcatatgatatatacatactatataaaatggcaataataattgttgctggttgtgtttttagcaattttaacaaataatcttctacctcaaatatatatcagctccactacttgctaattgtatgattttctagcttgaccaaccatcccaggttccctggggctaagggattgcccacgatgtgggacttttggtcctgggcaaacaatgacaattggtcaccctaccttggcaagcctcctaacctctcta

SEQ ID NO: 538320 - DNA, 675 bp, Homo sapiens
ttttggtagttccttacttgatctgtggttttctaacaatggcagggtgcaagctagttacaattatatttaaacaarcaaaactgtatattttatctaattcctgattgtcagtagattctggaaagagcactgttgcaaccaagaacttcactgacatattgtcctatgtgtttcatttgctaaggatcttccaccataaaaaaaaaaaaagttagtttttgtagatatcataccaaagtgtattagttccactgttttttgttttgtttctttcctccaaaactcttacacttcctccaacagcaagaagtataagaacttaggaggaaagaaatatcttccttatgcttatgaaaagaaaggtccagagtcattcttactcttgtatgcctttttacctaggtagcttgtaaaagcctgtctttgcaatgaagattaaacacttcataagtttaaatatctaagcttgtcatttcagggcttcccatggatgatactctgggaatctcctaaaaacccatcttgagaaatgttaactaaataaaaaaatatgatatagaaaccacaatcaaagaaatgaagacatgtacaaatgtatctttcccattgttatatgcagcttggatttcctggtgccttttcaatattctttcatttttttagacttttttt

SEQ ID NO: 538321 - DNA, 504 bp, Homo sapiens
gtagggcaggggatacagagcacagacaggagaaagacagggtatgatgagaatagcagaagggatgcaggcagtaaacgagggctccaggctgggagagcaggggtattccaaaagtggaggggaaggaatttggatgagagggattccaccagcatttggtggcagcttcagaatctttttcagtgggcaagtttaagggaccagatcaaacccaaatgcctttcctttgagattctcttccttcctctgctgaaaaagcattactggttccatctctggctttgggatgggaggacagtgtggactrttatttatagagggtctactatgagccaggctctgtactagatgcttgacatatgccatctcgtgcaagctgccccaaaatttatgaggcaggcatgctcatcctgttgtatagatagggaaactgaggctcagagagcctcatctcccttccctctctgttccagatgtgatgtcacctgcttatcctagcag

SEQ ID NO: 538322 - DNA, 631 bp, Homo sapiens
ctgtaagccataagcagcaccctcagctacagaaagtctcggggagaagggcacagatctatcttagcactttgccccagccacccatgaccacaccaastcccagttcaggctgcttgactccacttcctgagcttctccagctctcctgagctaccttgatggtgccatgtaaagggaagagaattatggcatctcctgagcttttggcttaggaggaggaaatttggcaaggaagagccagtttcatctaaacaaatattcattaacctgtggcaaggtagccaggtctacaaatttcctcaaagtgatattaaaatgtatttatatatagagctaggtggtatttctatatacatgaatatgtaaatttctgggtttgtaagtatcagtagttgagaatgagaatgaggcagtgagtacagagccatgaattcataaaatgtttaaaaggagctctctccaaccttttggtgtgttatcttagtaaggtatagtagacttgctaagtgtgctgtaaatttaaaagtttaatgcatcatttgctgaagtttttcactgagtttgttctaggaaagggcaatgaggagaaagggatgtcatctcagcctttctccttgagaacagtggc

SEQ ID NO: 538323 - DNA, 571 bp, Homo sapiens
accccatctctacaaaaaaaaaaaaaagaaaaagaaaaaaatagccatgaacagtgctgcgcccctgtagtcccagttactcaggaggctgaggtgggaggatcaattgagccaaagagctcaagtatgtagtgagccaagatcactccactgcactccagcctgggcgacagagcaagaccctgtctcaaaacaaaaacagagtgctgtgtctctctgccattgcaccctgtcatctgcttgctgaagctacaaaagacataggactgaggtcctcccccgccagtctcccagcagggcctcttggagaagacctcccaacccaaacatttgtcatcccacagcccatctaggaagatcccakcagctaccctctcccaaacctcatccccaccatgcctgccctggacttgctccccaaccagtgggtgccaggggaagggggtgcaccctgggaggcaggcaataggggatgtattctctgcagagaatcttaacacagtaataaaatggagtctcttggatttttaactcatagataacattgaatgtttttatcatgtacaccatg

SEQ ID NO: 538324 - DNA, 607 bp, Homo sapiens
agaagctcctgcaggttttaaggtgtataatgaatcaatgagtgtgcgttttagaatgcacacgctgggtgccagatgggagatagagagggcaagattcccatgtgcctccatccagctctgctcttcacctctaactccaagtgacagcccctaggtgggctgtctctgcttggtcaaggagacagacacacttgggagaagagttagccagccggaggaagtcaggttcagagtggtggactggtgaagctctccaggcactaaacttttattcatcaccaaggtctctcagctagtagtctatttccatgaaagtcatcacaagattttttttttttttaaagcaggccaattaaatcaagcatattcctcagtatcatggagagactggagrttagagacaccaaaaccatccctggcttaatgactttgggatccctgggcccctccatgcagcagaacggcaattaaccaaggtgggtgactttctttctgcttgtgttgacaattggaaacagaagcagcttttgggtctggggtaggaaccagaactgagttaatactttagtttgccctgagaataaaaaaagaatgatagggctga

SEQ ID NO: 538325 - DNA, 637 bp, Homo sapiens
taatcccagcattttgggaggctgaggcaggtgtatgacatgtgctcaggagttcaagaccagcctgggcaacatagtaaaaccccatctctacaaaagcatacaaaaaatggtggygcatgcctgtggtcccagctactggggaggctgagactggagaatcacttgaacccagaaggcagagtttacaatgagccaagattgtgccactgcactccagcctaggtgacacagaccctgtctcaaataaataaataaatatttacattttttaaaaaaataaaatatgtaagtcatatttggagagagagacaggtaaagagagggaaggttttggggtatgatccataaggagacagatcacagtatgttggagctgggcagggcctcaaattattctaactacctcattttacatatagggaaactgaggtcctaagaaaagtggcttgcccatggtcacacagtgaattactgccaagtcagaccagatctctggtctgataataacctggcctacctcctttgactacatttccctgctgttcctgcaaataatttccatcttattctagtgttgacttgtgttgaagtccccagtgccttctagaacttgaggtcaaaattgtgtctgtcc

SEQ ID NO: 538326 - DNA, 637 bp, Homo sapiens
taatcccagcattttgggaggctgaggcaggtgtatgacatgtgctcaggagttcaagaccagcctgggcaacatagtaaaaccccatctctacaaaagcatacaaaaaatggtggtrcatgcctgtggtcccagctactggggaggctgagactggagaatcacttgaacccagaaggcagagtttacaatgagccaagattgtgccactgcactccagcctaggtgacacagaccctgtctcaaataaataaataaatatttacattttttaaaaaaataaaatatgtaagtcatatttggagagagagacaggtaaagagagggaaggttttggggtatgatccataaggagacagatcacagtatgttggagctgggcagggcctcaaattattctaactacctcattttacatatagggaaactgaggtcctaagaaaagtggcttgcccatggtcacacagtgaattactgccaagtcagaccagatctctggtctgataataacctggcctacctcctttgactacatttccctgctgttcctgcaaataatttccatcttattctagtgttgacttgtgttgaagtccccagtgccttctagaacttgaggtcaaaattgtgtctgtcc

SEQ ID NO: 538327 - DNA, 484 bp, Homo sapiens
tatcctatattatggacctatatgacctatctgacttgggttggtaaagatttcttaaacacaagaatcactgagtttaaacaaaaagattaattcattgattgcattaatatcaagaaattatgtttgtgtcattggcagcatcattaaaacacattattagtggaataaaaagcaaattacagcataagagaagatatttccaattcttatatttaaaaatcattacayattttagaaactcctataaatcagtaaaaataaaaacaaacaattcagtaaatataaaaacagtaaaaataaaaataatacacccctcacagaaaacattatccaaaagtaataaatgcatatgaaagtgctagtgttcattagtcatcagaaaaatataaatcaaaatactggtactaatcaggtaccagtacccaagcttcacatgctaaagtgaaaatatttggtagtaccaagagctgacaaaacatga

SEQ ID NO: 538328 - DNA, 443 bp, Homo sapiens
ggggaaagggtaggaaggggatgagagataaaatacaaaacatagggtacagtgtaccctgcttgggtgatrggtgcaccaaaatcttagaaagtactactaaagaacttattcatgtaaccaaccaccacctgttccccaaaaacctatgcaataaaaaataaatattaaaataaaaagcaaattacaaacagtataaatttctattcctaactatttttgtgtgcttctctaaaaaataagattgtcattttacatggccaaaataacagcattacattgaataaaattaatgtcttttataagtactcatactcattccatattcatatttttccaatttttctttcttaatttctctcgaagctgatttgttaaaatccagatcaatccagtgttgcactttgtatctcgttttcacgtatcttacatttctttcaatg

SEQ ID NO: 538329 - DNA, 615 bp, Homo sapiens
taactttataagtcttttcttctacttttgagttttaatttagtcatctttttcagctcatttaggagtacacttaattgatttgtttttcagattttatgttagatttagggggtatatgtgcaggtttgttactgtggtatattgcatgatgctgaggtttggggtatgaatgatcccatcacccaggtactgagaatagtacccccaaagttagtttttcaaactttgccccctccctccttcctttctctaggagtccccagtttctattgttgccatctttatttccatatgtacccaatgcttaactcccacttgtaagtgagaacatgtggtacttggttttctgtttctgtgttaattcacttaggataatggcctccagttgcatccatgttgctgcaaaygacatgatttcattctttttatatactgcatagtattccatgctgtatatgtattacattttctttatccaatcaaccattgatgggcacctaggttgattccatgtctttttgctattgtgaataatactgtgatgaatatgtgagtgtatctgtgtttttggtggaagtacttgttttattttggatatatacccaataatgg

SEQ ID NO: 538330 - DNA, 492 bp, Homo sapiens
atgctattgagggatactttacttattgatagtgctgctgtgagaactcacaccttggcagaccactcaaaatcagctttagctttggtccgaggytgtcctgagtgtagtgcagatatttattgaagagatggctttttgtttcctgagttttttgaagattatgttgcagccttgccaaaggagaaggtgtacttgccctgcatgtggaacatttattttatccatgtagcttattagtggctaaagcagcatcttcactgtgcaaatattgtgcagtgtttaataaaaacagccttgggctctggtctgggccttgttgccttgtaaccttggacgagtcaatcaacaaatcttagcatttctgtcttcatttctccaactctgtggagcctgcagaactatttaaaatccttagcagattcagcccccttgcagactgttggtctttcctgtttgtctttgtttccattgggtgctaggactgaaatc

SEQ ID NO: 538331 - DNA, 536 bp, Homo sapiens
tcatgctattgagggatactttacttattgatagtgctgctgtgagaactcacaccttggcagaccactcaaaatcagctttagctttggtccgaggctgtcctgagtgtagtgcagatatttattgaagagatggctttttgtttcctgagttttttraagattatgttgcagccttgccaaaggagaaggtgtacttgccctgcatgtggaacatttattttatccatgtagcttattagtggctaaagcagcatcttcactgtgcaaatattgtgcagtgtttaataaaaacagccttgggctctggtctgggccttgttgccttgtaaccttggacgagtcaatcaacaaatcttagcatttctgtcttcatttctccaactctgtggagcctgcagaactatttaaaatccttagcagattcagcccccttgcagactgttggtctttcctgtttgtctttgtttccattgggtgctaggactgaaatcttcaaagaaagtgatctgtgtgaaagtactttgagatttata

SEQ ID NO: 538332 - DNA, 526 bp, Homo sapiens
gtgggtatgctaggtgccaggagcatccrtattctcttttaagcctcacccagccttgtgagctaaacataacatccctattccacagacccagaaacaggcccagagagggaaagtgacctccccaaggtcacacagccggaaagtactgaagtcaggttttgaattcaggtctaactataaattggtgtcccagggagttcaatccaggaggcctttctgtgggtgtttaacataatttagaggatctgagggaatgggaggagcatgttccggtagcggccagggaattgaggcacagagaccattctatgcagcagaagacaagtgagaggtggctgcgtggcatgagaagtcagggctgtctgggagaggaagcatcctggtggggtcaccacggggccaggatgctgaggggccagggccagtgctctgcctccgtccgggcctcagcccacctctggtgctggggtggtccgtcctgagcaagccttgggaagggaatctggctgctccccacacagca

SEQ ID NO: 538333 - DNA, 471 bp, Homo sapiens
ccaaggctttatagatatcctgtcacatcctctcaaccccaggaagcaggtactatgcccrcctaatctcagagaagggaaccaaggctcagagaagttaagtaatttgtcctcggttggtcagtagatggaagaggcaggatttaaacttgtgtctaaatgattccaaaggccctgttcataaccaacattctactgtttccctataaaagcagccaccaggaatggggcaggctgggtacctgcagagccaagccctgacatgctagagggaccctggggacagacagcctgctgatggtccataggttcagggatctccattcactgggattcagagactggaggaggaggcggtggcagtcactcatgcacacttccaaatttccctgaaccatctgtaggctccacctgcatctccaggaggaagaggctctgaggctctggggacacatctttcaaaaagcaggt

SEQ ID NO: 538334 - DNA, 635 bp, Homo sapiens
ctgtgccccacgagcacaagcgtcagcactcggtaaagacaccagaatggatgcgctctccacgcagtgtgtccccacctccctccatcctcctgaagagggagaagacatgctctttagagatacagtttaaactggccttagcttgggcagaactaaagcatcagagagcctttggaatgcccagaaagggtgaccctggtgacaccaggcatgagaattctctgtgagcttagcttggaggattgagaaggaaattcggggcagaaacgtttgttgatcctgaattgctaaaaggtttcttagtttggagaccaagttctcagaaaaacactgtcggttccaaagaaatgagctcccatggggtctcattttgccctatctgtgccctcagtttctctgcagcagaggaggtggcattggggtgcaggcgtctcctgtggaaartccccagctcaggtccctgatgcaggggctctgtcaacacctcctctcagtcagagtgatgtgagctgtaaatgtgcccaggccccaccccatgtcatcccagggtgagcctggagccagtgccagccaactggggccacctctacagcctgagagggctgcagaactccagacaggaggctgagcca

SEQ ID NO: 538335 - DNA, 624 bp, Homo sapiens
actcagtctcactgagccctgacttcatcatctgcagaatgaaaataatagtaatggtgagacttcaataataactgctgataaaataagtctgcagtttagcagaaagaagggctgcactgtgagcgctctgggatctcgggcagaggagaagccaaccttcctttaacacagggactgaggaactttgccccttgcaggaagaggtaatgtccccagggagctctgcaccctcagacccaggctgactgaggcctcccgcccagcactgctgtccaggcctcagaccctcaggaggagagagctgagtaggacgaagcgggggtagaggccccttcctatcctccctgatcaggcagagaaactcactcggtcctccyggatggaggtcggggtgcctggccttgggcctggggtgcctggtggaagtttgggcactaagccagacttgggtttgaaactcgcctgcacatcttagcagcactgatgactgtgggccagtggccgcgacactgaatcacaatgtcctcattagtagggaggggatgaaggatgaccctgatcttgcaggtttgttggattaaatgacaatacgtttgcagtgactggcacataaaaggtctt

SEQ ID NO: 538336 - DNA, 547 bp, Homo sapiens
tggagctggtttctgaatgataaacagtgagtttttctttgattcaaggaagccaaatcctcaaaacttaaactttgagatgtgttctgaacatctacaagacccccmaactgagttgggaatctcctgcggagaggtttccttgggtcattttcttaactcctctctcctgcattggttcgacgatgtaagaaaaatagcctttgtctgatattttcttctctgatcctagcacaatgctggaagggcaaaggtcttgcaacatagtttttttgaaaatagaagacaaaccaactggtaagatgttccaatttaaggcaacatcaataagttcaagttatttagtttttaatacacattatatagtgcaataagcacctaatacactgtcttgtttaacattaagtcaaccatgggtgggtgggatgaccataatctacaggttatagatgaggacactgaggtccagggaggaacagtgactttacctacatctaccaagtgctgagcagggatttaaacctaatcatggaaagtttcaaaagtc

SEQ ID NO: 538337 - DNA, 547 bp, Homo sapiens
tggagctggtttctgaatgataaacagtgagtttttctttgattcaaggaagccaaatcctcaaaacttaaactttgagatgtgttctgaacatctacaagaccccccaactgagttgggaatctcctgcggagaggtttccttgggtcattttcttaactcctctctcctgcattggttcgacgatgtaagaaaaatagcctttgtctgatattttcttctctgatcctagcacaatgctggaagggcaaaggtcttgcaacatagtttttttgaaaatagaagacaaaccaactggtaagatgttccaatttaaggcaacatcaataagttcaagttatttagtttttaatacacattatatagtgcrataagcacctaatacactgtcttgtttaacattaagtcaaccatgggtgggtgggatgaccataatctacaggttatagatgaggacactgaggtccagggaggaacagtgactttacctacatctaccaagtgctgagcagggatttaaacctaatcatggaaagtttcaaaagtc

SEQ ID NO: 538338 - DNA, 643 bp, Homo sapiens
ggagtccaaagtccaagtctcttaatattagagcccagatgcctactcaccaaaactctctgcctcttgacccatttcggtggaatgtgtgttcacattgagtcatggaactacaatgttttgtagagcaggagaatgagcagaaagagagagagagagggaaaaagatctcctattgcctgcaacagaaaactaaacaacatcacaactcacaacatgaaatgatgttaattcattaggacattttttcattgctaagagctgtcagatttcagaaagtcatttaaaaaattaacttggaaacttttgtgacattcttcattttgtgcatgtgacttacctaacacatgtgtgcacttggcatctaatattcagtctcacatggccacttggatgtaggaactagcagcagttgtagagagggaaggtcatgaggatacttctgtgcggtaacatgataatttttggaccactctttcctcttctgtttcccctgcttccctcacatcttgtrgctttgccagacccttggtttcaggagttccctgactgtacagtttgcaaacttgcaatttcacaccacatttatcaccatagcaacaacaacaaaaaaaaccctacaaagtggaaaatttgttgaatc

SEQ ID NO: 538339 - DNA, 548 bp, Homo sapiens
gttttatagacaaagtaggattttaacagatgtttgaaggatgcatggatttttttcatctgagtaaagagggaaggctggatctgccttcagcttatatgaagcccttggcacccccgaaggaacagaagcaggcataagtactggggaaatctagtttgaagacctgagcagacagtataggtaagtcagggaaatagagttgaggtacttttcttcacctggattatacacagaacgattgagccctttctgcaccaagtacctaggttacaaagttcttcagaagaggcaagaacyaagtgtgagggtcaagacttgtcattgaagaagctgacagtggcataacctaccccagccttcctcaagccaattcactgaaatgttcttgggatagatcaaagagatgctgcaatcccaacgatatgtataaagtagtgtaagccgttttacatggatattaaataaaatgtttctatagaatctttaagatttagagatattcagaaaatacatatgagttacagttcacacaatttctagttgca

SEQ ID NO: 538340 - DNA, 548 bp, Homo sapiens
gttttatagacaaagtaggattttaacagatgtttgaaggatgcatggatttttttcatctgagtaaagagggaaggctggatctgccttcagcttatatgaagcccttggcacccccgaaggaacagaagcaggcataagtactggggaaatctagtttgaagacctgagcagacagtataggtaagtcagggaaatagagttgaggtacttttcttcacctggattatacacagaacgattgagccctttctgcaccaagtacctaggttacaaagttcttcagaagaggcaagaactaagtgtgagggtcaagacttgtcattgaagaagctgacagtggcataacctaccccagccttcctcawgccaattcactgaaatgttcttgggatagatcaaagagatgctgcaatcccaacgatatgtataaagtagtgtaagccgttttacatggatattaaataaaatgtttctatagaatctttaagatttagagatattcagaaaatacatatgagttacagttcacacaatttctagttgca

SEQ ID NO: 538341 - DNA, 547 bp, Homo sapiens
gttctgtagacaaagttctgatcacagggggcttcacagaccatggtaagagggtcatgtaacgtgcaaaatacacagagatagcccagaaaaacaggctgcatgatgattccaggacttgtgaataccacccagaggagacagcatcatgccaagccatgaggtaaaaaataacacagaaagggaatggttataatagcacatccactgtcagtggctcaagaaccttttggctgcaagtacacacttagagggttgtactgcataagtrtttctcttaagacaaagaaatctgatttgctttgactagagcattctgtgtgaaccttgaacaaatgacctgcccacaattaacattttgccagggtcaattctgtagatcaatctggagagttttggatgggtgacagttttctcttaacaacacgtagagttttccctccaaatcaagctgttttccaaatgagtttacagagaaataaaattgatttgctttaggaccaccaatggggagctgatatcctttgttcaagttccccaaaggggc

SEQ ID NO: 538342 - DNA, 570 bp, Homo sapiens
cagccgcaggagaaacctaagtgctccaaccwaggaggaggctgaattaagaatcccaaaccacatgacgggatccaggatccaattggattgagctgtggcaccaccccatggcaggatccagtcagatcatgccttccagcatcacctcattgcaagatcatgccttattaccttatgcttataaagcctgatccagcctccagctctgggaggttctgctttgggagcaatctctggtgttctccttgtttactgtaagtaataaaatcctcttttaaactgtccttggttgtggtctttgggctgttagctgccaaagaactgaacccaccccttgtgtgagaaaaaaaatgcatgtggcatgtctaacacatttcctagcacatataagatccttaagaaataatagatctttgatcctgtggctataagagtcaaaatttcaggcttcctatatatgtgtaagctcagctccagagaactttatgttggctgctttgcatgaacttgtggaagtgaaggaagaggcggagaaactgagttcttagtaacagcgagtattaattc

SEQ ID NO: 538343 - DNA, 594 bp, Homo sapiens
tggtgagacaggaaagtaatagtttagttttgttcaggtgtgttttatattcctttggttttcatgaaagcctcttaaactttcctccatgtcatccagtgaattcatgaacatagaaccaaagttggatacctaattgtataagtgaatttaacagtgaatgaatgatggaatgaatgtgattgagtcacgtggaaataacagcaggatgacacttaattttggcrcatagtccaaatacagggtaatataagcatctctgactcctgccagactccgaagtcaatggaagcttctgaccaactgacagcctgaacatagttagaagggcctatgaaatagaataggggagagaacatttcaccttcccttgcttttgtggatctctcttccaagattctgctccaggtctgattctcttgagtgtttttaatgtcctggtgtaacactgaacatgagagcaattaagtgtgatgtatgttacccggctttcctggactgcccaggccactctgggatcttccttttgttggattttatttctattttattagaattttcctcctcccatcaaacagaaacacttctgatcca

SEQ ID NO: 538344 - DNA, 587 bp, Homo sapiens
catcatgataatttcctgttattaggtytgaagtgttttgaatgtgaaatgccttttcacttagaaagaattgatgcctataacttgtaatgtgttagcagtttggtagagtgcttgacagcccaaactgcattacaggtagctaatccccatggctgagctccattaaagaatagatggtatctgttaatacagccatagagtgtgggtcattgtgctgaaaggcagtctagctgctaacagaaagattataatgtgacttcattctattttaaacttgcaaaatgtatggtagatatactagtcatgattgattaaagatatgagagaggattttatgactcccctggtatgtgccaggtttataattcccaccaggaagaaaaatgtctccagtggcttaaacaagaccaatagcaaatttcaagctgtggacagctacgtatctcctgtatatccttcatagtgactttccaggtatttcatgcagttctttggaagagataagagtctgacaccttgattcttaatgcttattaaaagtgaccccttaagaaaaaaggacttctggtccaatattgtgtctg

SEQ ID NO: 538345 - DNA, 437 bp, Homo sapiens
agtataacactcttcccagctttcgaacttctgcctggtttgaacctttcatgtttatcttcaaatagatttttctgtgtcttctcttaatttaataatatccatggccattggtctaggtctattctacatctgaataggattcttacactgmtgtatgctgtttgccccggtaatgctgtttacctcctgttttactgacttaggacccatcaaggtgaagaaagctagccctctttccctgatacctagcttcttatgttcctgcctttcaaaagttgagaaacaagagcaagaaaattatgtagtacccttcatggtgacttttttttcctaagagttatctgccatttctctggttccatattacttatcaatccaggactgcagccttcataatctcaagcaaaaatcagggtctgttataaggggaacat

SEQ ID NO: 538346 - DNA, 655 bp, Homo sapiens
tgtgcaaagaaactagctttcctgaaagtgaaatctatgatttatagtttgtgagccttgtattgtaactaaaccaagtgtctctcactgaacatattcctacacctttaaaatttcccagagtgtgaaaaaggtctgtgcttccatcttatggctctactgtattatggctccaaggatgtcctggtgtcaaggggctggaagacagtgtcaagagaaagcatggaggatcaaccatgtaaccaccagacttagtccatttgtgttgttacaaaggaatacttgagactggataatttatttaaaaaaaaaagaggtttatttggctcattgttctgcaggctgtacaagaagcatggytctgatatctgtatctggtgagggcttcagtctgctttcgatcatggcagaaggggaggcagaaccaacatgtgcggagatcacatggcaagagaggagggaagaggtggggaggtgccaacctctttataacaaccaactctctgggggaactaataaaatgagaactcactgagtacgttgaggacagcaccaagcccttcatgagggatccacctccatcacccaaacaccttccattaattaggccccacctccaacatttgggatcaaatttcaacatgagatttggagg

SEQ ID NO: 538347 - DNA, 546 bp, Homo sapiens
ctgcatctctccatgtgcagttgctgtgctcctctcaggctcttccagccaccataagccgtggctccttcctcaagcaggcagcaccctgtggggcttcyatgtctctcttcatgttgtcgtctctgtaccatgtgcatatttcttccttctctagccagaagattcttgcttctctgccatatacagcttacatttgccaaaatagagagactgcctctcttttgttaacagagtactttacaacatatactaatttctaattttgtttttaagacagagcctcaccgtgatgcccaggctggagtgcaatggtgcagtctcagctcactgcaacctccacctccctggtacaagcgattctcctgccccagcctcctgggtagttgggactacagacagacaccaccatgcctggctaatttgtgtattttgaatagagacagggttacaccatattggccaggctggtctcgaactcctgacctcaagtgatcctcccacctcagcctccctaagtgctgggattacaggtgtgagccactg

SEQ ID NO: 538348 - DNA, 546 bp, Homo sapiens
ctgcatctctccatgtgcagttgctgtgctcctctcaggctcttccagccaccataagccgtggctccttcctcaagcaggcagcaccctgtggggcttccrtgtctctcttcatgttgtcgtctctgtaccatgtgcatatttcttccttctctagccagaagattcttgcttctctgccatatacagcttacatttgccaaaatagagagactgcctctcttttgttaacagagtactttacaacatatactaatttctaattttgtttttaagacagagcctcaccgtgatgcccaggctggagtgcaatggtgcagtctcagctcactgcaacctccacctccctggtacaagcgattctcctgccccagcctcctgggtagttgggactacagacagacaccaccatgcctggctaatttgtgtattttgaatagagacagggttacaccatattggccaggctggtctcgaactcctgacctcaagtgatcctcccacctcagcctccctaagtgctgggattacaggtgtgagccactg

SEQ ID NO: 538349 - DNA, 546 bp, Homo sapiens
ctgcatctctccatgtgcagttgctgtgctcctctcaggctcttccagccaccataagccgtggctccttcctcaagcaggcagcaccctgtggggcttccatgtctctcttcatgttgtcgtctctgtaccatgtgcatatttcttccttctctagccagaagattcttgcttctctgccatatacagcttacatttgccaaaatagagagactgcctctcttttgttaacagagtactttacaacatatactaatttctaattttgtttttaagacagagcctcaccgtgatgcccaggctggagtgcaatggtgcagtctcagctcactgcaacctccacctccctggtacaagcgattctcctgccccagcctcctgggtagttgggactacagacasacaccaccatgcctggctaatttgtgtattttgaatagagacagggttacaccatattggccaggctggtctcgaactcctgacctcaagtgatcctcccacctcagcctccctaagtgctgggattacaggtgtgagccactg

SEQ ID NO: 538350 - DNA, 638 bp, Homo sapiens
gtacacagccaaaccatatcacattgccatgatataaaatgcaaagggcacactggaagcagaagagtgtgggtaggggaatggagaagaagtgggtttgagtgggtggcagactcaaagaaaagagggggaatggagagagtgagcacacaaaaaatactttcaagaagtttgtgcaaagacagagaaaattagagtgggctgtagagggagatgtggggtgcaaacattttctttccaaagaagagtcttaattttcaaaagtgaggtagaaggttccagttgacagtctaagaaccatattacagacttaatgggacccctccagtcctcatcttacctgacccaaggcatatggcactgttcatgctccttctggaaatatcttccttggcttccaggatcctacattcctttttatctcctttcatcctcgggtttccttagctttggcaggctcatcctcatgccccaacccacctgatggaatttctcaacatgatgtcccaggtcttgtcttttgtcattatcactgtctcaagcaagataatctccacccatagctactacytaaatgctgatgactctcaaacaatctttcactcaaagactcttctctgaacttcagacctatatac

SEQ ID NO: 538351 - DNA, 424 bp, Homo sapiens
ggactgctatgttggattcaaggctaagacatgtgctaacaagagctgggattgtcaacaagccttgctgccaaggctttccctttggctttgacccgtctgacrttgatattggctggtccataccagattagctctggacccctcctgtcaacagatcattgtttgtttccaccagttaacactatttgtttctggaccaaagttgtctccctcctctctttgcagaccttatgactagggaggccagccatcccattctgcccaggacatgggactttgagtgttaaaaccaggatggtccagggcaaaccgggtggctgggttaccctgcttaggactgagactacatccttttgttctgcaacaggtcagacgtttgacaaccgagcatcttttccctcatgtcctacaccccaccatt

SEQ ID NO: 538352 - DNA, 460 bp, Homo sapiens
cccagaatggcccagcctccactcacaagtcatccttcctgagcattgtggggtcaaaacctggatgtcctggggcrcccccaaaggtgtgtcctgccctggcagggtgaggaaaggtgggtgcgctcatggtggaggggagagcggggtgagccatcacgtccctgctgcacgtggtgctgtggctcagaagaccgggccccagcactggcagttgcagggccccgcagcccacaagtgctgtagtgtgaagatgtactagtgctgtagtgtgaggacgcacaactgttccatgttttctatttcactcgagtttggttttctgcttcaccccacaccccaacctgctcctggctggtcagacctgccctcctccaggagcggggagccaagtcctctggctgtttgtcctgctctttcagagcccacccttgccctgtggccctgggtgcagacagca

SEQ ID NO: 538353 - DNA, 638 bp, Homo sapiens
gagatactgatctgggggcctgtatgggaatgaggtggccctggtcacagcacagaataccagagcatgacactgtctaccaccccaggggggcttcccaagcagagctgagtgaatggcacctggtgccacttgctctcatgtgtcacttgtcacctttgggctcacgcctcagcataccccccagaatggcccagcctccactcacaagtcatccttcctgagcattgtggggtcaaaacctggatgtcctggggcgcccccaaaggtgtgtcctgccctggcagggtgaggaaaggtgggtgcgctcatggtggaggggagagcggggtgagccatcacgtccctgctgcacgtggtgctgtggctcagaagaccgggccccagcacyggcagttgcagggccccgcagcccacaagtgctgtagtgtgaagatgtactagtgctgtagtgtgaggacgcacaactgttccatgttttctatttcactcgagtttggttttctgcttcaccccacaccccaacctgctcctggctggtcagacctgccctcctccaggagcggggagccaagtcctctggctgtttgtcctgctctttcagagcccacccttgccctgtggccctgggtgcagac

SEQ ID NO: 538354 - DNA, 638 bp, Homo sapiens
taaagacaaaaaaaattgaaaacagccagaagaaatgacatcttaacctacaagtgtcatttgaataagagtggatttcttatttgaaaccatggatgataaatatcttataaaacataaagtagaacatattttacatagactatagtctcttataaaaataaaatataaaagaaaaatctctttgcactcccatgttcaagggtggaagaagagggatgtcccaggggagggaaggaggaagagaatttgcccttctcccacctttttgttctatcaggtcctcaacagatgggaagatgcccatccacattggtgagggtagatctttactcagtccaccacttcaaatgcyaatctcttctagaagaactctcacagacacactcagaaataatgtgttaccagccatcagggcatgttttaggccagtcaagttgacacataaaattagccatcactgtgtacttttcctgccctggtctttgatttggcctagtggtgatagggaatttagaaccccagatccagtctctagctgtgctcattgctcctggagcaccatgcttctggctctttcagaacagaagtagaaaatatatgagtttttcatttgtttgctttttaaatctatcctg

SEQ ID NO: 538355 - DNA, 492 bp, Homo sapiens
gtgggaagatagcttgaacccaggagttcgagacctgcctgggcaatatagcgagaccccattctccacaaaaagaaagaaaaaaaaagaatctccttcctgctaaaggttcagtaacagtctactgtatgcataaccacatttcgcttgtccatccactcacccatagaccctcagaatgcttctaccttttgactcttgtgaatcatgctgctttgaacatgggtgtgcaaatatctgtgagagtccctgctctcaaaaaaatccacattcttggcacaatgaagaatcacctctcacagacaccagggaaaagcaggtctgtctgagagcaragggtgaggagtggaaagccgggctgtggaccacagtgggcggaggaaagcccacccgcgtgttcccatgtgtgggaggagagaggagagatgccctctagtgaaggaactcttgtagcagccagctccattcctgcttggcctgcagagggccaac

SEQ ID NO: 538356 - DNA, 585 bp, Homo sapiens
ctggagggaccgccccgcccgacggagagacctcgataccggccgcctcctccagcccctcccgccccggcccccagcctgtgactcggctcccctagggggcagcgtcctcctcttcccactccccaccttccgcttccctccggctgggctgactgcctcccgacccaaagaaaaagggcctcttccttacccgcccccgttgggccctataaggcggtcaggtgtgtctagtgcttgaaaagtggaagacctggcgaaatacctggcggcgttttgtcgtgtaaccgccaactttatcggtagcacgaaggcacaaagatytgggttgaagaagaggcgaaagctaattttaaaaaagcacctccctgcccccgggtattaaactgtaccatttgcctttcacacactgcaacttcaaccgttgattcactgttttgagtattgagctctttatgtgagaaaccaaaggtgggtgtcttccttccaccacctcttttgttcccgtcttgtgcgctgtactgaaatcctgtatttgctttgactttaattcactggttttctagtgccgcgggtgcgcatgag

SEQ ID NO: 538357 - DNA, 585 bp, Homo sapiens
ctggagggaccgccccgcccgacggagagacctcgataccggccgcctcctccagcccctcccgccccggcccccagcctgtgactcggctcccctagggggcagcgtcctcctcttcccactccccaccttccgcttccctccggctgggctgactgcctcccgacccaaagaaaaagggcctcttccttacccgcccccgttgggccctataaggcggtcaggtgtgtctagtgcttgaaaagtggaagacctggcgaaatacctggcggcgttttgtcgtgtaaccgccaactttatcggtagcacgaaggcacaaagatttgggttgaagaagaggcgaaagctaattttaaaaaagcacctccctgcccccgggtattaaactgtaccatttgcctttcacacactgcaacttcaaccgttgattcactrttttgagtattgagctctttatgtgagaaaccaaaggtgggtgtcttccttccaccacctcttttgttcccgtcttgtgcgctgtactgaaatcctgtatttgctttgactttaattcactggttttctagtgccgcgggtgcgcatgag

SEQ ID NO: 538358 - DNA, 426 bp, Homo sapiens
ctgcatacagtcgcatattccatagactaactgtctagggtaattcagacttataacctaagtttatgttacaacttttctaacttatgttcctttgatggagtttatcctcattgccccaccccacaaatggyttactaatatagtctaaaacagaaacattattctttttatattctttaatctccattgaaataaacacaatttgtagaattaactaatagaaattaattgaaaagaagcatctttcttttatatgaacaatgacacagttcaaatttatcttgaaaacagttttaagcacaagtaattaccctgaatatgtaaataacccatttataagtaggtcaataggaaaacatttcaacaaatttcaaacgtgatatcatttctagatcttatgaaataatggaacatgttttggaa

SEQ ID NO: 538359 - DNA, 621 bp, Homo sapiens
agaggataagttacttgaaagtgagaacaaagagaaagtggccaaaagccaatgttacaagaaaaggagtttaaaaactccaaatttttttttagaagatcatgaattctactactattactactattaataataacaatgaaaataataatagtaaaaaataataaacrtattaaaggcttattataatcaggtactaacctaaatattttagcagaagtattatttaatatttttagctataaatgagcaagacattgttacaattattttatagaagagaaaactgagtttcagaaaaagccaataagttgcccagtcatataagtagaaaggactagagccaggatttgaatttatgccttccaacaataaagcccactcaatttccacaaaatctgcttccctttatgaagtagtcctcaaagaaatacaagaggaagcccagaagccacggaagaaaaaagagataatagtcaatagtatcaagtgtcaaagaaaaatccagaaagatcctagaaaataatgttggatttagcttgtccagaagtgcacagtttcaagttggatggggagaatccaaatttcataggattaagaactgaacatacaaaaaggaaa

SEQ ID NO: 538360 - DNA, 560 bp, Homo sapiens
ttatggaaaatacctaatatttaattatatatttacatcaaaatattatctataaacatattatttatcttttactttctcctgtatccagaggtttgttcrtaagtcaataggtgatctgaggctagcattatgtttgctacactggcattagcttagtccttgaagttcctctttttttcccacttttgacttgtagctagctgcctaatgcgacagtctttttttctttcctattttttttcctatttttctttcatttgttttaggttttcagccccctgaagctgaagttttcttagtctctggttgataagagcaacagagggaggcgggaagcgggcactctctagtatggctgctccgccccaagataatcagtccctttttttccttttaagtaaaatctttagaataaattgtaattctaggtaactaaagaaaaaaacttttgttccctttcctctctttggacgttttacctgacaagcccctgctggaccaagtagtgccctgtggctttgtcctttcagattgttacctaaaaaaactggggaggg

SEQ ID NO: 538361 - DNA, 642 bp, Homo sapiens
gtggaaacaccccaagtgtccattgaaaactgaatggataaatatgctatacgcaggcaatggaatatttagccataaaaggagtctagttctgatacatgctacaacatgcatggaccttaaaaatgttctgcaaagtgaagtatgcagacagtgaatcaaaacacaggtccctgtgctcatggagctaccacatttaaggataagaaagaaatatcaaacacaaaggactatggtaggcttgaggatctgaaagttgaactggactggggatgtttgggcaatatcatcaaatttacatttaaaatggctgctaaggggccagtcagtggttattgtagaaaatctgaatgtttatctcccaggaataattttggacagtaagcaacattagtataagttttcaacatttaaagtcaatagatcaactactgcagataaaactgaagacaagtcttctgtaaacttgcaataaagcaatggattaaattctgggatttaaatcttctgaatagtgtttcctctctcaaagtgatccataagtaacgtgtttatatgtcagtctattttagaatccrgaataagtagaaagtcaaataaaatttattatcactgatgactttttatggaaactctataccc

SEQ ID NO: 538362 - DNA, 622 bp, Homo sapiens
gccttcctaaagtgctaattattacacaattaagacagacataatatgactagaaagcctaagaaaatctaatgcaatctcacagaagctttttaaaatttttttccatctctatctccaaactacctaccaaaaaacccaaaatacaaaggagtacctctcgcctatgacttctaaacaagcgaagtcaggagtagcaccaaaccttcccctggttctaacatcacctagtcagatctttagaggagaaaagcaatcctatctgttaccttgtttcccatcccgcattttaagagataagaaacccaggacctgaaaagtgagtattttcctaaggcactcagggtgaaacctggactagaacctagatgtccctccataaaaaacaagattttgtactcttactcyaccccaccacgtgagtggggaaaagcagagttttgagggcctacaatcctcaagtctgatcactgggtctctcacatctaattacaatatccagccccatttccaacttaataagattaattctttgtcactgatgctcaatagtaactcttgctactcccagcagccaacaccctagtttgaaagacatgcaggtcaccagtgcatcttctat

SEQ ID NO: 538363 - DNA, 549 bp, Homo sapiens
cactgggaacataaatgctctgacaaacccctrctaggaatttcaaaatggaagtgaaattgagactgaagaaaaagaccacctaataggaaatataaaaagccatttcaaaaatgataaacaaaagaaagacgttaatcatttggggattttcctagtttaaaacaaaccacatctccgtaaaagaaatatggctaaatggctataacaagtaagggccaaagcaccctcatggctactaataaataaaacggtacaaacatccctttcaagtctaccatttgagagagtggatactaacaagagatatgatttgctaagctaaataaaagccttcattaacaagaagtgacaggatcacaaccctgctgctgataaactgccaacatacccaaggtcttcaatgaagggttgcccatttaacatactgcagctttaaaatgagttgctttagaacgaacagttctatgtcaaggcaggcctacaacatacaaaacagatggagctgctactgtaccttgggtttgtgtgtgtacccatgcacgagca

SEQ ID NO: 538364 - DNA, 624 bp, Homo sapiens
ctgcaacactgggaacataaatgctctgacaaacccctactaggaatttcaaaatggaagtgaaattgagactgaagaaaaagaccacctaataggaaatataaaaagccatttcaaaaatgataaacaaaagaaagacgttaatcatttggggattttcctagtttaaaacaaaccacatctccgtaaaagaaatatggctaaatggctataacaagtaagggccaaagcaccctcatggctactaataaataaaacggtacaaacatccctttcaagtctaccatttgagagagtggatactaacaagagatatgatttgctaagctaaataaaagccttcattaacaagaagtgacaggatcacaaccctgctgctgataaactgccaacatacccaaggtcttcaatgaagggttgcccatttaacatactgcagctttaaaatgagttgctttagaacgaacagttctatgtcaaggcaggcctacaacatacaaaacagatggagctgctactgtaccttgggyttgtgtgtgtacccatgcacgagcatgagcttggcatataacacaggagaacctggcccaataacgcttcttaaagttagccatccatgattag

SEQ ID NO: 538365 - DNA, 558 bp, Homo sapiens
tgaaaacacatctgcagcccatcagtcagygcagtagctggaagactccactctggaggatgaggacctaaagctcctttggaggggcccttgcatccccacacttcccatggcaggggaagtagtaagaacatagtaagtgctcagtaaatgttctcggctttattataagctgcggctagtgagattcatacaatatctccttgaggttacacaggttctactgtttctgcataaccaagaaggaaactggggtgtgcagaagtagcattaccacaaaacagtaatattatcaataaccaatacttttgataatactacaatatcctctaacactgactgaataagtactatgtggtaggcaactgctcttcttatttatttatttgagtcaggatctcactctgttgcccaggctagaatgcagtggtgaaatcatagctcattgcaacttcaaactcctgggcttgagcaattctcccacctcagcctcccaagtagctaggatcacaggtgcacaccattacacctggataatttttaaattttttgtagaga

SEQ ID NO: 538366 - DNA, 420 bp, Homo sapiens
ggtgaggcccagcctcccgccccgcccagcccctgggccgtgcgcgccgccgccgccgccgagagtcctcgccagggtcccccgcctccaccagagggcgtccgcctcccgcgcctgggagggagtctggcgccgcaaccccgaccgcggcgcggggtgggttygggcggcccttggaacgctccggccagggatgcgcggtgagagctgcgggccccgaggcttgggtctggggggtgcggtgggggcgctcctggagggacgggacggcgtgggaccggggcgagggtcccagcccgggagaacccccacagcccagcccaagctccctcccgctttgctctgcatcctctcccttaccaaggaatgcctgcccttccagtgccccggcccagctcgagcctgcatccgagtagcggt

SEQ ID NO: 538367 - DNA, 588 bp, Homo sapiens
tgcacaatcccctgggagctgcaaatgcggccgaggattactcacagcacagagggaactgcgccccgacggcacagtcccacaccgcagcctacccaacacagactgcttcaatctcacccgcccggctccaggcgcccacagcgctccttggtcctcccacaggaggcctctcatggccgccctgaccccagcctgacctcagagggccctaggcagatggagagacacagagmagcaagaatttcgccagagtcccaatcccaccaggtccagggtgggcctaaccctaaccccagccccgcttcctagagacatgtgtccttctagccagaagccccacagctcaccatcttcctgactggccatacacctgcagtcttggccttgggccttcccagggcctccagacacccaggtcgaggccgtactacagcccaccttgaaatggagcctgagatcaagcagagccctgggcagctccgggaagatccacaccaccgcacacttttcacttgtgcagaaactgttcttgatacacatgcaagttcagtggttcctcagccccccagcacttttttagcagcc

SEQ ID NO: 538368 - DNA, 556 bp, Homo sapiens
tagtgatacatgccctgtggtcccagctacttgggaggctgaggtgggaggatctctttgagcatgggaggccaaggctgcagtgagctgtgattgtgccattgttctccagcctgggtgacagtgagactggctcagaaaacaaaaggttatttctctgccattacagaagaagcatgstacactgtcttctcttattaaaatgcaattaataaaccctggacagaatgcattgttgagcagctatccaaggactctgagaagtaaattttagcaggtgaaatggagaagaaagccagaactttaaattccactgaaccagcagtgaatttcctgttttttttcccctgtggtatctcctcgctgatttctcctgggcttgccagaaacccagaactgaaaagtaggggcaggcaaaaatagttccaagaaaggctctctagttctcctctgcaaagaaagaatgagaggcccctttgaatcagagtggaagaaatctcttttttgcttttgttttgttctattctgccccaatcctcttgtaggcctttagcag

SEQ ID NO: 538369 - DNA, 503 bp, Homo sapiens
tgcctctccagggccagcctggccattgggtggcaaataagtggggcagatgcaaatarcatagcaaaggagttcataacaaacctgacactggaaccataacacaacctagaaacattgagtaaaaacttgaagcctaaaccaaaccagattgtctgctgaaagtttttaaaaatcaagacctagaatgatgtaacatgtcaaaatatccaggatgccatcctaaattagtcaacatactcaaaaccaggaaaatcttaacatctcaaaggaaaagacagcagacaccaacctcaaggtgacatggaccaagactttaaagtatctgtgctacaagttgtaagggtgaatactttgttttaagagagggtcttgctctgttaccctggctggagtgtagcggtgtgatcatggttcactgcaccctccatctcctgggctcaagcaaacttcccacatcagcctaccgagtagctgggactacagacctgcaccaccactcc

SEQ ID NO: 538370 - DNA, 616 bp, Homo sapiens
tcctgacagcagctctgtactaagtagactagaatctgttttctgaacactcttcaagcctaaatcatccttatttaagggagctttgttctcagacttttaatcaatgtttaagtagtctgaatatcactcctggaagagtaacaggtttttacttggcagcaaatgctctgaaatctgattgactagataactgttactggcagactagaaagcrtaaaggcaaggaagccctcttatacttactgaggcaatgaacatgtcaatggcagtggcagtggtacctacatgttctctgcatttcataagccccgtgactcttgcatacatggagaaggggtaaaaatgactatcaatcaaatatggaaaaaagaaagcagaggtggtttaacatatacaaagtaagatttaagacaaagaggatggaatgtttcagtgggatcatttgatcttgataaatggcaaaatcgatacaatagtctcctcttatccacagctttgatttccatggtttcaattagttactagttacccataatacagaacaataagatgttaagagaaagagagagatgaagagaaagaggaccacattcatataatttctgttatacga

SEQ ID NO: 538371 - DNA, 669 bp, Homo sapiens
ggcacagtgactcatgtctgtaatcccagcactttgggaggctgaagcagaaggatcactggagcccaggagttcgagaccagcctgggcaacacagtgaacacagtgagacctcgtctctacaaaacaacaacaaaaattagccagcacgtgcatctgtggtcctagctacgcaagagcctgaggcaggaggatcacttgagcccaggagttcaaggctacagtcagctacgactgcacgacagcactccagccttggtgatagagtgagacagtctcaagtgaaaaaaatgaaaaaagaaatttatcaactgtttggaaaagcagtacatttcttagaaaaaatacattagaagtatttacatctaaccacctatttcatataacattactgtatttcaggctttcaaagcaattactaaaaacttcgttttttaagaaaagtaaataaacttgcgtttktaaaggaatttggtctgcttttaaaatcagtggagcatctttaccaattaaaggcatttttaattgaatataattttgtgtattatgtgaccaactctgtacaaggcactggacagaatgatgatccttttgcagctagtaatttatgaggcatattagtatcacttacagtgactttacatatgtaagaacaaaggggtagaaaca

SEQ ID NO: 538372 - DNA, 642 bp, Homo sapiens
gctgggactacaagtacccgccaccatgcccggctaattccttttgtatttttaatagagacggggtttcaccatgttcaccaggatggtctcgatctcctgacctcgtgatccacccgcctcggcctcccaaagtgctgggattacaggcgtgagccaccgcacccgacccagagaatatttttaattaaaggtgaaaaactcagatgtaaatcttgcatttccagcctcttataaatttgtgatataattaatattgcctaaagtcatacttcaagggaaataacattttgctaactgtagtattaaacttttctaatgayattttatttcttctaatgtttcttctaaagacctgaacaatgttttggttatatactacattatatataccagaatcatttatctttaatgtaacctatgtgatttctggctccctaaaatagcattatgcattttctgagttaaccaaaataaaatctagaaagagctaaactgtaatctaccatgatcggagtgtaaaatcctttactatgcaaatctgcccactgtttaaaacagtaaaaaaaaaaaaaaaaaaaatttaacatgaacccaaaggacacagatgttctttcaaattgctggtatcaatgaacataa

SEQ ID NO: 538373 - DNA, 517 bp, Homo sapiens
tgtcatgggatttgattgctaatctgaccaagatttgctttaatttaaatatttgtattaccctcaaaattcatctgttgaaatcctaaccctcaaggtgataatagtattaggaggtgtggcatttatgaaatgattaagtcatgagtattctcatgaaagagactagttccagtattaaagaagccccagagagcctctccccacttctgccatgtgagatgacagtaaaaagaccaccrtctataaaccaggaagtgggcccacaactgtcactgaatctaacttgattttggatgtcccagtctacaggactatgaaacacaaatttctgttattcaatagctacctagtttatggcattttaaatgatagccctaatggactaaaaaaaataatactttacatatatatatgtatatatatgtgtgtatttgaagtaatattatatatatatatattcgaagtaatattagattatatttagacaattgggaatttatacatataaatttca

SEQ ID NO: 538374 - DNA, 584 bp, Homo sapiens
gaattttgctactttgttgattgtgtctagagtagcccttctactagggtggtttttctcagccttaacattaagttttgtctggaagattctttgttttggaggttgtcctagtcatagtatttagtagcatcctaggctgctactcactatatgtcaatagtattccccaagttgtgacagcacaaaaatgtctctaatgcatttccaaatgtcactggtgaacataatattcccaatttgggaaccactgttcaraggttagggtaagctacttctaaggtatggtcttccttgtgtttcaatgaaatgcctggtgtgtttcaggaggtcttttctctccaattagaatcaaaattctaacttatcttagctgcattaatcttcctgcatctccactcagctcacaggctattagtagccgttttcagtcagaactcacagacctcagaataactcagcttacaggctattagtagccattttcagtcagaactcaccgacctcagcgtacacagtttagcattcaactgaaaatccgagaagacctctatccatatttcttaagttcttttttttttcag

SEQ ID NO: 538375 - DNA, 635 bp, Homo sapiens
tctacacccctggtttaagatagaccttttcaaggatgggatgatttcctcatatgggagttaatgccagtatcatattgttatatcagctacatggagccctaaaagagcatatgctcctaaaagaccttggaatatcagactcaagaaaaagaaaacccaaataagaaaatgtttctttaaaaaaaatatattctttctttttctttaataccctgtaagaagactgaaacttagctaaatatgccaactcatctattgatagatttagtcaattattatatttttgcattgtgttatttaactcagtattttgagataattatggatttataagcacttgtaagaaataatacacacatgcctcatgcccttcacccagttccttccaatagtaatcttttgcccctgttgtcttatgaagcaactcttggaacaggtatttgagtgctcctgtcttctttgtctagcatcttctctgctcatcattttttctgttcatcatcttttctgcttcaactgggtccctctcagtctttgyaacttttcttagggtttcacagatattacttctttgccaaggctcttatggctttgatgaaataccttgatgtgtaatgctgcctgtgtagaaa

SEQ ID NO: 538376 - DNA, 635 bp, Homo sapiens
tctacacccctggtttaagatagaccttttcaaggatgggatgatttcctcatatgggagttaatgccagtatcatattgttatatcagctacatggagccctaaaagagcatatgctcctaaaagaccttggaatatcagactcaagaaaaagaaaacccaaataagaaaatgtttctttaaaaaaaatatattctttctttttctttaataccctgtaagaagactgaaacttagctaaatatgccaactcatctattgatagatttagtcaattattatatttttgcattgtgttatttaactcagtattttgagataattatggatttataagcacttgtaagaaataatacacacatgcctcatgcccttcacccagttccttccaatagtaatcttttgcccctgttgtcttatgaagcaactcttggaacaggtatttgagtgctcctgtcttctttgtctagcatcttctctgctcatcattttttctgttcatcatcttttctgcttcaactgggtccctctcagtctttgtaacttttcttagggtttcacagatattacttctttgccaaggctcttatggctttgatgaaataccttgrtgtgtaatgctgcctgtgtagaaa

SEQ ID NO: 538377 - DNA, 671 bp, Homo sapiens
tacagtaaatagtaagtggtgagactggatattattttcgcaggactgtagaatctctaaatatatttccttctatgggataacttactatcccaaatatagccatgaatcagcaaaattgctagattctacatactggatcatacttaagaatcaatgtggggcattacagaaacatgtaattgaacccatgcatgaagattagattttaaggtcaagcatgatacagaaacaaggatcaataaattagatcttgataatatatataaatatatatgaatatttatatatcaaatataaatgtgagtatatatgaatrttaatgtatattaaatacaaatatatgtgtgtatacttaagactaaagcatgaatttaataaatccagaaataatagtaatgaaattattctttacctttaatattatctttatttataaagttattatatgcaatatatatatttacagtacaccaaagttttaacatttttaatgttcggttcagttaaatttaactaataatggtaatgccaatcaaagtaaaattatgggccacacagcatgcaagagcatgaaatataatttctttgctaaaggtaaaaattcaaagagatttggcataattgtaaagcttgtgtaaagcttatgtccaatcccctctattcccatg

SEQ ID NO: 538378 - DNA, 671 bp, Homo sapiens
tacagtaaatagtaagtggtgagactggatattattttcgcaggactgtagaatctctaaatatatttccttctatgggataacttactatcccaaatatagccatgaatcagcaaaattgctagattctacatactggatcatacttaagaatcaatgtggggcattacagaaacatgtaattgaacccatgcatgaagattagattttaaggtcaagcatgatacagaaacaaggatcaataaattagatcttgataatatatataaatatatatgaatatttatatatcaaatataaatgtgagtatatatgaatattaatgtatattaaatacaaatatatgtgtgtatacttaagactaaagcatgaatttaataaatccagaaataatagtaatgaaattattctttacctttaatattatctttatttataaagttattatatgcaatatatatatttacagtacaccaaagttttaacatttttaatgttcggttcagttaaatttaactaataatggtaatgccaatcaaagtaaaattatgggcyacacagcatgcaagagcatgaaatataatttctttgctaaaggtaaaaattcaaagagatttggcataattgtaaagcttgtgtaaagcttatgtccaatcccctctattcccatg

SEQ ID NO: 538379 - DNA, 642 bp, Homo sapiens
atggtggctcttgatttgcatttattacatagtaatagcacattgaaatatggggaagacgaatttcaaagattgtccaggtagatcaggaatcagactagctttgtcctagaaggcttcctaaaggaggatgcatgtttaaaaaaataaataaataaaggaacaggaagcacaacttggtaggaaaacctaaggaaactgttaaccctggttctctcttcctgccctttttgcttctagtctttcctacagtggtcagcaccagctttatccagcatgaagtcgtggaagagtatagccacctgttcactatccaaggctcggaccccagcttgcagccctacctgctgatggctcactttgatgtggtgcctgcccctgaagaaggctgggaggtgcccccattctctgggttggagcgtgatggcrtcatctatggtcggggcacactggacgacaagaactctgtgatggtctgagatgcaatgttccctctgccttggggccctaaagatcaatcaggatgggggtgcttggctgaccctgggaggtgggagataatggtaaaaagaatcttggctccaggagacctgggttccagccatcagtttgtcacttcccttctctgggccttgatttctc

SEQ ID NO: 538380 - DNA, 619 bp, Homo sapiens
tgtagtgaattcttgcatgaaataytatctaccagtagtgctcagtgtccattttcttgctctgttttatgttccagtttctggttctggaggtacccatgaattagtgtagtgtttgcaacattgcacgtgggagctaaggaacattttgtagtaataaataatttatattatccttaaatttttatatttgtacctctagatacaacatgttaaacatgatactggttctttttattgacattagatggacactgaatgctagaattgcaagtaggtttgtttttataaaaatatttcattaggccaggtgcagtggctaacacctgtaatctcagcactttgggaggcccaaagtgggaggatcacttgagcccaggagtttaagaccagtcttagcaacacagtgagaccctatctctacaaaaaaatagaaaaaaaaatagccaggtgtggtgacgtgcacctgtggtcctagctattcaggaggctgaaatgggaggatctcttaagcctcggaagttgaggctgcagtgagtcatgatcttgccactgcactccatcctgggtgacagagcaagaccccctctcaagaaacaacaacaacaaaaaccaaccg

SEQ ID NO: 538381 - DNA, 466 bp, Homo sapiens
tggtgatgcacagatcactttatttgactgattatggtgacaattatggtagtatcacagtttgggtaagtccaggtccagaagtagaataaattgaagagtaaggggagagatgcaggagagagaggagagatgaagagacagctcatgagtccaagaagagaggggaataaaagggggaagaaagttctagtaagaagaaatatataagctctggagaaagcatcccagcaagagtgccctaaattaaagactcctatcagktaacaactggttgagatttctcaaatctacatttgttaagtcaagcctggaaggtgaagcagtgaaataaccagcataagacagataagggacaagagggcagcaaatgccagtggatcaagggatgcagatgtcgggaggaagggagaagccagatttctgctgactttaccttaccccggccttgttcttgggagagttt

SEQ ID NO: 538382 - DNA, 543 bp, Homo sapiens
gttgaatttgtaatacagccaaggcataactgcaagtcttctcattctctgtctccattctgtcatttaggtttctgggaaacatttggcctgaaaaacctattttagaaaataagcccagacatttagagaaacagaactgagccctttgggttttgaaactcttggtttgtgttagatatcttttgagaacatgttcatgtgtgaaatagagacatgcatgtaattaaatttggggccaaattaggtgcagttagaatagcatgcagtgcagacatatcccaagctgtttaattgacaagttccacttactaagatatgtcacctyagtgactgtcatttaattttgaatatcagctttttgtttgcaagtgcagagatttttgacagccattccagcttcaactgttgtggccaatagctaatgttaatcggagtgtttggtataaaccaagtactcacctaagtacttcacatggattatttttattttcacaatgaccctatgagataaatatgtgaggaaactgaggaacaaaaaat

SEQ ID NO: 538383 - DNA, 560 bp, Homo sapiens
ggctggagcaggccctgcagatggcaacagtgagatggcaggagggggtgagtgcagagggaccgagacatgggaccacagggagattgttattccacatccatgggagtaaaagggggactgacaatctcagattcaggaagagcgggatggtttctaaggattcacacctatattaccccttcataagctaagatggacttcagtaagagaatctgaaagtgccccaagaccatggggccatctggagaagctggctatggagtgtccccagcatcttggagcaactgagcaggagtccatrttgggcctggttcagatgtctccttggtccagggcccccatctttccttgctgctgtagaaaacttggtttctttttcaccaacgagatgcaaaaaaaataaaaataaaaagttgaattttaattttaatttaaaagaaaaagaaaacccactctcttcctagaagggtcatttctgcctcctcttatctgccctcccgtaaatgtgcacagcagcatctgcagtgaaataaggggctggtgctggcccaaagtag

SEQ ID NO: 538384 - DNA, 571 bp, Homo sapiens
cacagacatgactgttctaatttcctatgttatttcaactctctaggaggtgagaaaagcagaaattattgcacccataggccatccttagttatccactgataacctgcccctccttgccaagaacttggaagtagcattgtcctccyacccctctcaaagataaactgtgaaatccacatgtaatgagaggtgcccaggcaggaggtgacattgacccaaggtataaacacacctaaagaaggaatgcactgatccaaagaaaggtctcagaggcaaagaaaggagactctgaaagaattctggcttcacttctttgggctctgtctggcagagggaccagagtcttacaagaatatctggccctctgtcaggtatccctattgtgcagactcatgcagccaaatataacaaggcctggcgcctgctggacttttgcgttttaaaactaacttctctattaggattcctgactttccaggtactttctgatcatctgccttcccttgtggcttgcttccaggagtgaatgtgctggtcaggctgacgtgtccgtccagtccactgacca

SEQ ID NO: 538385 - DNA, 560 bp, Homo sapiens
gtgttacaatgacaagttttctatggattttgtgtccagcaaaacagtaagttagtcttgttgtatttttcttcaatttaaactggatattgagttgtacatctttattgttttagtagtacaaaatcacctaagcttagctcttaatattcaaagtagagaggaagatgggaatctggagcaaagaaatacacacttgagaaaaagaagacaagggaaaatttcctctaatcacggatctatctccaagcaggctactcagtctctggggttgtagagagacagacctaatacacacagttcttctatcccatcctgtcttctagagtggtagtacagagagagccagcaggttggaggtagaagatttaaaaataaaaaatttwtaaaaaaagagttggaggtttctttaacttcctggcagcatctccaaagagtggtacccttctgtggtcctgttctctgtggaagcagtctctgtctttagacctggttggttgactttcatgagatcacagaactggaagtgcccagcacacaatgctgaaaaatttttatga

SEQ ID NO: 538386 - DNA, 560 bp, Homo sapiens
gtgttacaatgacaagttttctatggattttgtgtccagcaaaacagtaagttagtcttgttgtatttttcttcaatttaaactggatattgagttgtacatctttattgttttagtagtacaaaatcacctaagcttagctcttaatattcaaagtagagaggaagatgggaatctggagcaaagaaatacacacttgagaaaaagaagacaagggaaaatttcctctaatcacggatctatctccaagcaggctactcagtctctggggttgtagagagacagacctaatacacacagttcttctatcccatcctgtcttctagagtggtagtacagagagagccagcaggttggaggtagaagatttaaaaataaaaaattttwaaaaaaagagttggaggtttctttaacttcctggcagcatctccaaagagtggtacccttctgtggtcctgttctctgtggaagcagtctctgtctttagacctggttggttgactttcatgagatcacagaactggaagtgcccagcacacaatgctgaaaaatttttatga

SEQ ID NO: 538387 - DNA, 560 bp, Homo sapiens
gtgttacaatgacaagttttctatggattttgtgtccagcaaaacagtaagttagtcttgttgtatttttcttcaatttaaactggatattgagttgtacatctttattgttttagtagtacaaaatcacctaagcttagctcttaatattcaaagtagagaggaagatgggaatctggagcaaagaaatacacacttgagaaaaagaagacaagggaaaatttcctctaatcacggatctatctccaagcaggctactcagtctctggggttgtagagagacagacctaatacacacagttcttctatcccatcctgtcttctagagtggtagtacagagagagccagcaggttggaggtagaagatttaaaaataaaaaatttttaaaaaaagagttggaggtktctttaacttcctggcagcatctccaaagagtggtacccttctgtggtcctgttctctgtggaagcagtctctgtctttagacctggttggttgactttcatgagatcacagaactggaagtgcccagcacacaatgctgaaaaatttttatga

SEQ ID NO: 538388 - DNA, 560 bp, Homo sapiens
gtgttacaatgacaagttttctatggattttgtgtccagcaaaacagtaagttagtcttgttgtatttttcttcaatttaaactggatattgagttgtacatctttattgttttagtagtacaaaatcacctaagcttagctcttaatattcaaagtagagaggaagatgggaatctggagcaaagaaatacacacttgagaaaaagaagacaagggaaaatttcctctaatcacggatctatctccaagcaggctactcagtctctggggttgtagagagacagacctaatacacacagttcttctatcccatcctgtcttctagagtggtagtacagagagagccagcaggttggaggtagaagatttaaaaataaaaaatttttaaaaaaagagttggaggtttctttaacttcctggcagcatctccaaagagtggtacccttctgtggtcctgttctctgtggaagcagtctctgtctttagacctggttggttgactttcatgagwtcacagaactggaagtgcccagcacacaatgctgaaaaatttttatga

SEQ ID NO: 538389 - DNA, 585 bp, Homo sapiens
gttgtgacatatgccacaggttcaggaaaagaagaaacaagttaccctcaaaagacactttctgggggtcgggtgcagtggctaatgcctgtaatcctagcactttgggaggccgaggtgagyggatcacctgaggttaggagttcaagaccagtctgaccaacatggcaaaaccctgtctctactaaaaatacaaaaaaattagccggatgtggtggcatgcacctgtaatcccagctactggggaggctgaggtggaagcatcacttgaacctaggaagtggaggttgtagtgagccgagatcacgccactgcactccagcctgtgcaacagagtgagaccttgtctaaaaaaaaaaaaaaaaaaaaaagacacctttcagaagtggtggcaagactttccactttgtggtggaaggaaaggaaggaaagcttggtctgctggacactcaggacttgtcccgataaataaaggtttcagatcccatttaaaggctaacaaatgggggtgcctggcatagggcagtcacccagagttctgaatctgagtacagctctggaaattcctagctggacaactatggg

SEQ ID NO: 538390 - DNA, 609 bp, Homo sapiens
cttttaatttactcttttatgggggcatgaatgtcattactatgtcccctatttcaaatgttcttgatgttgtagttctgccgtatcattttttctcatccttttaccacattctctctcattaaaggacatgtcacttccttcattaacttaaaattcactayggatttttaattatctgtgagctttcagaaattctttaactcaaaagttgctgtcatttttgttacatgcatgagctcaattgctgagaatcctttccaaacaaatccttttagagggtacttttgaaaatacattctttagatcattccagtctcaagacttgctgggaaagtggggagaaaacagggaggaaaagagttactgatcaaataaaattagggaaaaccacattctatattcatctcattgagattcacatatatatcagcatattaaaggcttggataagtcctataggaaaaactgttttaactcagtatttcccaaacctgcataaccatgcaacctcttcccaccacacaacatctaataaaatcccacagaattttactatatgataaacattagaaacacaataaacataatgcgtactaaataataaga

SEQ ID NO: 538391 - DNA, 609 bp, Homo sapiens
cttttaatttactcttttatgggggcatgaatgtcattactatgtcccctatttcaaatgttcttgatgttgtagttctgccgtatcattttttctcatccttttaccacattctctctcattaaaggacatgtcacttccttcattaacttaaaattcactacggatttttaattatctgtgagctttcagaaattctttaactcaaaagttgctgtcatttttgttacatgcatgagctcarttgctgagaatcctttccaaacaaatccttttagagggtacttttgaaaatacattctttagatcattccagtctcaagacttgctgggaaagtggggagaaaacagggaggaaaagagttactgatcaaataaaattagggaaaaccacattctatattcatctcattgagattcacatatatatcagcatattaaaggcttggataagtcctataggaaaaactgttttaactcagtatttcccaaacctgcataaccatgcaacctcttcccaccacacaacatctaataaaatcccacagaattttactatatgataaacattagaaacacaataaacataatgcgtactaaataataaga

SEQ ID NO: 538392 - DNA, 609 bp, Homo sapiens
cttttaatttactcttttatgggggcatgaatgtcattactatgtcccctatttcaaatgttcttgatgttgtagttctgccgtatcattttttctcatccttttaccacattctctctcattaaaggacatgtcacttccttcattaacttaaaattcactacggatttttaattatctgtgagctttcagaaattctttaactcaaaagttgctgtcatttttgttacatgcatgagctcaattgctgagaatcctttccaaacaaatccttttagagggtacttttgaaaatacattctttagatcattccagtctcaagacttgctgggaaagtggggagaaaacagggaggaaaagagttactgatcaaataaaattagggaaaaccacattctatattcatctcattgagattcacatatatatcagcatattaaaggcttggataagtcctataggaaaaactgttttaactcagtatttcccaaacctgcataaccatgcaacctcttcccaccacacaacatctaataaaatcccayagaattttactatatgataaacattagaaacacaataaacataatgcgtactaaataataaga

SEQ ID NO: 538393 - DNA, 502 bp, Homo sapiens
gagcagacagcaatgttcctgattgttaccgacctcaagttattacaacttgtgtatcgaatataaagtgatgcaatgattaaactaacatatatgataccattcctatagttyttagcctctctactatgaacacatgaggtatatatccacatatattcccagatggtctcctgtagttcaatataagaaattctaagctatattaatcttccaagggaactcttttagaccatttggaattgatattcacttctgtatctgcaaaagcatatagattcatcaaatattcatgatcatgaaaagcttcatacagtatatgtgggattagatattgaaatagtcaaatcccaagggcttatggtattaacattttcatttaaggggaaatatgatattaaactataagtaaattagagatttgccatgcttcttttcagaatgagatagcactatctttcatcaaaagggccttattctgagaggatatttatgaaagaga

SEQ ID NO: 538394 - DNA, 502 bp, Homo sapiens
gagcagacagcaatgttcctgattgttaccgacctcaagttattacaacttgtgtatcgaatataaagtgatgcaatgattaaactaacatatatgataccattcctatagtttttagcctctctactatgaacacatgaggtatatatccacatatattcccagatggtctcctgtagttcaatataagaaattctaagctatattaatcttccaagggaactcttttagaccatttggaattgatattcacttctgtatctgmaaaagcatatagattcatcaaatattcatgatcatgaaaagcttcatacagtatatgtgggattagatattgaaatagtcaaatcccaagggcttatggtattaacattttcatttaaggggaaatatgatattaaactataagtaaattagagatttgccatgcttcttttcagaatgagatagcactatctttcatcaaaagggccttattctgagaggatatttatgaaagaga

SEQ ID NO: 538395 - DNA, 615 bp, Homo sapiens
aagcttggaggtttgtgctacaattattcagatatgatcaaataagagtaaactattcataggctgctgagccatggcacgtgtagtttataaaaacaaccataataatttctttcagatttagtacttaaaaacctagaattattttgtcaaaggatatgtccatttaagcaattgtgttaaatacatccatttcccacacagacagtggtaaattgtaattcttctcatttccctgaatcctgatcaaaattcagagttagtgtttgtgggtgattgtattttccaaaatggccgcaaaatgtccgtacattcttcttaccatgtggctttgacactggtcccctaaagaagtcagggctatcttctctccttatgatattagggggactcatgactagcaaaagcaatgcaggcttgcatccaagsccagagcataaacagagtttctatttgacttttcttgggacacttggttttggaaaacagccaccatgtagtgagaaaaccgaacagtcacatggagaggctgtatataggcgtttggttgacagcccaatctgagattccagaaaacatgcattcactggcaacgaacagacctgctagtgaatg

SEQ ID NO: 538396 - DNA, 669 bp, Homo sapiens
tatatattttttgtctctggtgtgtgtatatattatgtatacacacacatatataacatacgcacccacatttataacacacacatatatatgtatataacaaatcaaatttgatcttagcactaggactctgttgtaccaataattcagggttttttttttttagttctaggtaaaaacagtgtcattgatttactatcagtgacttcatgcaaattcatatttttgcattggtcgrgtgccttgtactacaactacaatgttgaatagaacatgttctcttttttaggggagctcaagatacaggcaaacaaatgactacacttcagagccatgtcataataaaagtgcccatgaaatgatatacaatctaattctaatcagattctccaattgacttgctattttattcctgttctcaatggactcccatgtactttgtaaggagacagaatgtctgagcagagaatctttagagagaaaatcgtcaaataccatcttggataccaaatgtccatcttgtacttgtgaataataattcagtctagcaggatgtcctcttgcaaactgaaatgagcctacagtcccatctgtgggaaaacaaaaggactcctaagtgttacacacaggatgttgctgatcttgggtcacctggctagcacagggcag

SEQ ID NO: 538397 - DNA, 607 bp, Homo sapiens
gttcaaaagcatactttgtttgtaacttaaatgtttatacatccaatcttcttataaagtttgaatttttttaagataactatactagacttaatgttgtggtaggtttgtgactgtccttgattttagtcctcaaatatctatagcagcagcagtttgtatctgaaattattacaaggggatttgcctattagaaatatgcctaagttccattattcawtaaggtcacagcagcaattctgattaatggagctgattcttgatagctgtgaggatacttccaatacatattataacttttacaacagagaaagcccttaatttccttacctgtaaaatctgagtaataattcctgccctatgaattgtaatgaaaatgagagaagctcccaaaatgatctagatgagacaatcaggtggagataagaccaagatgctaggaagtcagctagccactttctcacatctagcaaactgctcctacctactatccttgcaagaggcagaactcagatttgtcatttttaaatattcagtgaaccactgggcttattcaggattatttgaaactataaatacatatattttttaaaattcttggattcaa

SEQ ID NO: 538398 - DNA, 603 bp, Homo sapiens
tttaaataccaaaaattgtttcacatctattcccaataaggtttgccaccaaaggagtttgctctaaatttgtgactggatgtttggttttcagaggtttcaggatttcagaatcatggtaagggattrtagacatgtatttggtatgtgcaatattgggggacttgaatattaagtctgattgggaacatctctgggtttctgtatgtgtacacattctacacaatagtgtaaagttttctagaaaatttagtgtcagcaaaaattacgctggggtctgagtttttatgtgagaatcttataaagatcaaaatattagctaaaatttaaaatttgagttgaaagggcttgaatgctgtattagtctgcttgggctgccataataaaatgctgtagattaggtggcttaaacaacaaacatttcagtttggaaggctgggaagtccactatctgggtgctggcaaggtaggtttcagaacattccttcttttggcttgtcggcaaccaccatgtcactgtgtgctcagatgacctcttctttgtatgtggtggtgggggtgggagctgggaggtctctctaatatctctgttgtgggattttt

SEQ ID NO: 538399 - DNA, 541 bp, Homo sapiens
aagaaggcttctataagtgtttcatatgaaactaatctgttatttacatttatctccttagtaacatggaatttcaatagtttagcctctcagttttgtatcagacttactataattaatgctttgttgatgattcaaaattgctcacagtttttagtataggaaagaatattttttcttcttcccccaacaacatttcagccaaatttcatataagcctgttagttccaagaactatattgataatgcagctatgaaatttatctttgaacctaagtttattggcctaacttgcaatttcaatatcgatattagttttaaagacagttgccgacactgcatcagagcccygtttgtccccaggcattgggagtcaaagtgaattctgctgccacatggagggtttctttcaggcttgaatctgtctcttttattgcggtacacagcttgcttatcagttaagtgtttcgtttatggatgtggtttgataaatgtctactgaacagtgacaaatgaacagcagtagggcctgtactgtgct

SEQ ID NO: 538400 - DNA, 409 bp, Homo sapiens
gtcaaaatgtaatgatgatgatgatgaaatgccaacttgctgagattttcagagatgttcttaaaagcttgttacccgagtgtagtctacagggcatttgcatcggcatcacctggggctgtgagaaatgtagaatctcaggccccaccctagactttacagaatcagaatccccattttaacaagatccgcaggtgcttcttgtgcacattaaagaaccacttgaaaaatcctgagtctggtgcagccttgtaaacaggcaacttaaatacatcctgatgccatatgaatagtggtacttgcatatagggtataggcggggaaatttcaccagggagctgacattttgrtgaggccttgagacgtatctattaaaacctgatgggggatcatcattcttggcaggaag

SEQ ID NO: 538401 - DNA, 592 bp, Homo sapiens
gtagatggcctaggcctaccttttaagggattctgatgctgcaaaattgaaaggtggggtttttgtcataccagggagcacagcactaatggggttaatgaaaattgcctctttttcctaaccctaaacacatgtgcacacacacacacacacacacacacacgcacacacggttcagctttcatttctcatattgcccaagrgggtgtaaaataaaaagaggtcagccaaaaaactgtctgttaaattagacttgcaaaaatgctactgacaaacaaacaaacaaacaaaaagtcatactgtgctcctgttgtacataattttacagcatacaatcttcttaatactgatcctagccccggcgccacattggagacatacatagcatagtaacccacctaaaaaaagaataaaaaacaccatgaggtataataaacactttgtttgcacaaggctattaatatctcagggttttttttcaaactgatcaaatggcgtgcttgcctcataaggaaactggattgttaccatttgcattaggttataacattagtcagcagacaagaccccccaaaaagtagaatgaacagca

SEQ ID NO: 538402 - DNA, 546 bp, Homo sapiens
taatgtaaattataaactttagttaacaayaatgtatcaatattagttcatcaattgtgacaaatgtaccacactaatgcaagatgttaataacagaagaaactatctgcagaggagagggggtcatatggtaattccacatacttttcactcaattttctgttaacctaaaattgcactaaaaacagtctattaagttaaataaataaacatccattgtgttaatttaccccttctcatatgatggttttggtttctattattattgaattacctttaaacacttttttccactactacattacgtatttataatgatggaatacaaaactgtctaagtcctggacctagtttcttattttataatttctgtatgtattattaaaacaagttttcttcctaattgacttatttttattactaatattactttgataggccgttttgagaaatgctttcattaatgtaggtttgccttcctgaaaatcattttttaaagtcagagattcattattgttggtgaattgcagcattgtcaaggtcagt

SEQ ID NO: 538403 - DNA, 540 bp, Homo sapiens
agccactagtcaacccacagctgacttcagtcatacatgaaagaccatacaaattcaaagaaccatccagatgagcccagcctaaattgctgaccccagcctraattgctgaccccagaaaaatgaactaaataaatggtagttattttaagcactatgttttgggtggtttattactccatcataggccactcatacattcaacatccattctccctcctttcttgctagcagagtgcaaattaattcaagtaaatcaaaggatagtgacctaattcccttctctaagactaagtcttgattgatctaagccatcgatctattgtcttgttgtttgtggcacattgcctaagccattgatagctacaggctgtaactgatctattatcattgcttggtgagtaatgagtagtgatcccttttggccagtgaaatctgaggggtggtctgctggaggaatggatgcttctctgcttctaaataatgtcaagtctggctgtgagacctggaactgctgtagccgttttgttcccagcctaa

SEQ ID NO: 538404 - DNA, 540 bp, Homo sapiens
agccactagtcaacccacagctgacttcagtcatacatgaaagaccatacaaattcaaagaaccatccagatgagcccagcctaaattgctgaccccagcctgaattgctgaccccagaaaaatgaactaaataaatggtagttattttaarcactatgttttgggtggtttattactccatcataggccactcatacattcaacatccattctccctcctttcttgctagcagagtgcaaattaattcaagtaaatcaaaggatagtgacctaattcccttctctaagactaagtcttgattgatctaagccatcgatctattgtcttgttgtttgtggcacattgcctaagccattgatagctacaggctgtaactgatctattatcattgcttggtgagtaatgagtagtgatcccttttggccagtgaaatctgaggggtggtctgctggaggaatggatgcttctctgcttctaaataatgtcaagtctggctgtgagacctggaactgctgtagccgttttgttcccagcctaa

SEQ ID NO: 538405 - DNA, 540 bp, Homo sapiens
agccactagtcaacccacagctgacttcagtcatacatgaaagaccatacaaattcaaagaaccatccagatgagcccagcctaaattgctgaccccagcctgaattgctgaccccagaaaaatgaactaaataaatggtagttattttaagcactatgttttgggtggtttattactccatcataggccactcatacattcaacatccattctccctcctttcttgctagcagagtgcaaattaattcaagtaaatcaaaggatagtgacctaattcccttctctaagactaagtcttgattgatctaagccatcgatctattgtcttgttgtttgtggcacattgcctaagccattgatagctacaggctgtaactgatctattatcattgcttggtgagtaatgagtagtgaycccttttggccagtgaaatctgaggggtggtctgctggaggaatggatgcttctctgcttctaaataatgtcaagtctggctgtgagacctggaactgctgtagccgttttgttcccagcctaa

SEQ ID NO: 538406 - DNA, 540 bp, Homo sapiens
agccactagtcaacccacagctgacttcagtcatacatgaaagaccatacaaattcaaagaaccatccagatgagcccagcctaaattgctgaccccagcctgaattgctgaccccagaaaaatgaactaaataaatggtagttattttaagcactatgttttgggtggtttattactccatcataggccactcatacattcaacatccattctccctcctttcttgctagcagagtgcaaattaattcaagtaaatcaaaggatagtgacctaattcccttctctaagactaagtcttgattgatctaagccatcgatctattgtcttgttgtttgtggcacattgcctaagccattgatagctacaggctgtaactgatctattatcattgcttggtgagtaatgagtagtgatcccttttggccartgaaatctgaggggtggtctgctggaggaatggatgcttctctgcttctaaataatgtcaagtctggctgtgagacctggaactgctgtagccgttttgttcccagcctaa

SEQ ID NO: 538407 - DNA, 574 bp, Homo sapiens
caaagaatagtggtattaagtccatattattccatagcattctgtggcaatgccagaaaacctatgaatgagagcagaagcaggaaaagggagtggggagtagataagatggtgagagggcctggtggtgagtcctgggaggtgaaaagtgtttcataataataaatgacagagtgagaagctgaaacttgtcagctaatgagaaaaatgccaagcttaggaaaatggcagcaaactgagaggttggttgttacactgatgaccaacagagtggctgttggagtgactgattgactcaracgacaggccactggcttgccccactttcatccaaagcatcatagctttgctaatgttatgattaggtaagtggatagaagtgttgcctcaattgtaacagcagtacccattggcttatttaaacatgaaatcaaaatgtctgctaattcccaggatcctgggggtagactttgacctaccattttgagtaggttttattagcagctcaggccttcattaaggcagtggctgataaaggctaaaacatcctgccagttgtttatggaatagaggc

SEQ ID NO: 538408 - DNA, 560 bp, Homo sapiens
tttgctgttgaacatctggctaaggaatgttcaaagtccaaaaaggtcttgtgtattatctgagtgaacttttagggggaaaaaaaaagtaacattggagtattaggcattttcccagaaatgcattttcagaggaaatactctttcatgagagtcagaacattctaaaactataaagatagaataaaagactttgattagtattacaaattattgtcgtgtggacattgaaatgtgccattctaggaggctcaccttagaaccatagaacccactgacagccacggccggcagacctagacaacgcatgtgctggacagcactgtctactcaaacttgtgcctggcaggaaactaacaggcaaagctctcagaattcagattagaatgctcttccctgcttgtgtcagtgcttcttctcttgaggtccaggaggaaagtagataaaatttctcttacggaatcatctggtcaggcccttgaccatttagagttgagttcaaagaatttttgtgctgaaagtatgtgtgtgggtagartgagtggttgtgagtataattc

SEQ ID NO: 538409 - DNA, 491 bp, Homo sapiens
agtcagacagcccccaaaccagaataagttcagagaggctccagcacagccatttggtggaagatttatgcacagaaaaagggaagtaatgtatagaaaacagaaatgaggtacagaaacagctgtactggttacagctcagcatttgcattattttgaatggagtttgacagttgaccacttttgattggccaaactcagtgattggtatgagagtaggttacagtctatttatatatcctgttaggtacagttcactatgtatgaagaaacctatgagtcaaactyaaaatatgtaaggaggcagctttggactaaatttaatttaacaagccacaccagaaagtgttatgtgagctcacagtaatcctagtaaagtaagaactttgtcatccctgacttttcctttctggtccccgttctatctgggagaagcaatgacagcttaccatggttttaagaccactgtgtgggggcactggggaagggac

SEQ ID NO: 538410 - DNA, 635 bp, Homo sapiens
attttctatttgaatagtggtgtcacaagacattgtccagaaaccttaggagcattattatttcttcttcccaagctgcttctctcaaatggaacactgtgttattgattctatatcttgaggatttctcctttcagtctctttctttattttcatggtaccactgctcttatcatcccatgcctaaactattgcaatacttttctaactttttccctggaatgctgcttcaaaacatcatccccacaggtgctgggatgtgctttctaaaataaatctgaccagatgatagcacgcttcgactcaaaacaatgactggctcctctttgcacatgatacagagccctccatgcctggcctttgcatatctctcctctctcagcacctattgttctctgccttatgccccaaagcattaccaatgttcaggttagcyggcatccattgaaatgggatgcacctgtaactttgtgcatgtgttttatttctccatagattgtccattttcccaatgaatgccttttttttttttttgagatagagtttcactctgtcacccaggctggagtgcagtgctgtgatctccactcactgcaacctttgcctcctaggttcaagggattctcctgcttcag

SEQ ID NO: 538411 - DNA, 599 bp, Homo sapiens
aagacattgtccagaaaccttaggagcattattatttcttcttcccaagctgcttctctcaaatggaacactgtgttattgattctatatcttgaggatttctcctttcagtctctttctttattttcatggtaccactgctcttatcatcccatgcctaaactattgcaatacttttctaactttttccctggaatgctgcttcaaaacatcatccccacaggtgctgggatgtgctttctaaaataaatctgaccagatgatagcacgcttcgactcaaaacaatgactggctcctctttgcacatgatacagagccctccatgcctggcctttgcatatctctcctctctcagcacctattgttctctgccttatgccccaaagcattaccaatgttcaggttagctggcatccattgaaatgggatgcacctgtaactttgtgcatgtgttttatttctccatagattgtccattttcccartgaatgccttttttttttttttgagatagagtttcactctgtcacccaggctggagtgcagtgctgtgatctccactcactgcaacctttgcctcctaggttcaagggattct

SEQ ID NO: 538412 - DNA, 589 bp, Homo sapiens
gagctctctctcaggtgagatgcctcttccctctaagcctgtctaaccgtggatttcctctacctaatattgcaaaagtgtatttatttgcagagaaaaatgttaaggaatcagcagttttcaaaaagagataaccgaaagcagcgtttaaagacagaagcacctagtgtggtcttctctgctgtccttcctttgacttgcaattcttctcagaatccttgtatcagagcccaagggtcyggagcagctttggcctccgtgcggtatggggtgtttccagacacatgtcgccttcatcagtcacttctgaagtcttggctcctcacccctctctttagctgttttttcatctcaacatagcattaatgacaagctccatcttacctgtattgcaaggtagttttagtgaacaagcgaagtccttgccataatgtgcttcacaaattgtgacttcatagagaatgtttgttcttgctgtcggggcagtagatagtccgtggaggtagttttgctgggtgtagtctgtctgggaagttttctgcctgacagggggaacccgcgtttcccttttggttgccccctctgctgt

SEQ ID NO: 538413 - DNA, 589 bp, Homo sapiens
gagctctctctcaggtgagatgcctcttccctctaagcctgtctaaccgtggatttcctctacctaatattgcaaaagtgtatttatttgcagagaaaaatgttaaggaatcagcagttttcaaaaagagataaccgaaagcagcgtttaaagacagaagcacctagtgtggtcttctctgctgtccttcctttgacttgcaattcttctcagaatccttgtatcagagcccaagggtctggagcagctttggcctccgtgcggtatggggtgtttccagacacatgtcgccttcatcagtcacttctgaagtcttggctcctcacccctctctttagctgttttttcatctcaacatagcattaatgacaagctccatcttacctgtattgcaaggtagttttagtgaacaagcgaagtccttgccataatgtgcttcacaaattgtgacttcatagagaatgtttgttcttgctgtcggggcagtagatagtccgtggaggtagttttgctgggtgtagtctgtctgggaagttttctgcctgacrgggggaacccgcgtttcccttttggttgccccctctgctgt

SEQ ID NO: 538414 - DNA, 608 bp, Homo sapiens
agtggctgtaaactttcccaaatttggcaaaagagacacacctataggttcaagaagctgagtgaacctaaaccaagataaacacaaagaaatgtaagttcagacatatcttaattaaacttctgaacactgaaggcaaacaaaaagtcttgaaagcagtcagagagaattgggacattacctagagaggaagaccagttagaataaaagcagatttctcatctgaaaccatggaggccctaatgaattgacaatatattcttcaagtgctgaaacaaaggaattgtcaaccatacattttatatctggaaaactatctttcaggagtaaagaggaaataaaaacttctcatatgaaggwaaactaaacaaaattatcactaggaaacctaccattaaagatggtcaaacagaagttcttcaaacaaaaatgaaattattaaagaaccgtggagcatgagaaaagaaaaaggaaagtggaaaaagcaaaaatatgtgtacatacaatagaatatccttttccccataaagcttgtgaatcatatttaataaaacaagaaattataatgccctctgttattcagtataatgatatggaaaagttgaaag

SEQ ID NO: 538415 - DNA, 608 bp, Homo sapiens
agtggctgtaaactttcccaaatttggcaaaagagacacacctataggttcaagaagctgagtgaacctaaaccaagataaacacaaagaaatgtaagttcagacatatcttaattaaacttctgaacactgaaggcaaacaaaaagtcttgaaagcagtcagagagaattgggacattacctagagaggaagaccagttagaataaaagcagatttctcatctgaaaccatggaggccctaatgaattgacaatatattcttcaagtgctgaaacaaaggaattgtcaaccatacattttatatctggaaaactatctttcaggagtaaagaggaaataaaaacttctcatatgaaggtaaactaaacaaaattatcactaggaaacctaccattaaagatggtcaaacagaagttcttcaaacaaaaatgaaattattaaagaaccgtggagcatgagaaaagaaaaaggaaagtggaaaaagcaaaaatatgtrtacatacaatagaatatccttttccccataaagcttgtgaatcatatttaataaaacaagaaattataatgccctctgttattcagtataatgatatggaaaagttgaaag

SEQ ID NO: 538416 - DNA, 580 bp, Homo sapiens
gaagttcctctgttccctatataattccatggtttaaactttggttaattgctggtatcttaagtcacaaagttaagacatcttgctgggctgtgttgatcaggtgagattccttttaggtcgatgtagtagcccatgggagagaataatgcctttctagtgctttggggattattctgctaagtgtttaaacaaagtaaccttgccatgacagagtagccagtcatccactagtagatgggagggctgccatagccagcaccacgctyttgagtttgggcgtttttccctgaggtcctctttcaaaatgccgttgctctgagaggagcagcaggatactaatttccactgacactgctgacaacttgtcttattcactttcctctcctaggaagaatggggccacctagagcagtgggcatctctgggacatcagaggatcttgaaaggggaggtgaaggcatgaaaacagattccaagcatggtctagagctcggccctcgcttggtagtaacacagtcagaattctcagtcagacatttccgttcccaccgcagttcacaagaacggaatgctgagg

SEQ ID NO: 538417 - DNA, 649 bp, Homo sapiens
tggaaactacaggaagcagaatacaaagacatttaaagctggtgccttagggaaattcgagcacacctagacagcttcctttctaccacccagggatgcagggctagaaatgcattatccttttttggaatcagccttactgtaatttataaagctgcagatacacaattgctccaaagcagtgtattcatgtaaaaacattctactaggtttcagacgaacctgttttgtctttttctctaaaagtaaacagtgtttattattttactccctaatctccaatgtgtacaatacttcaggtataatatttatgttttacaagaaaaaagttagtagtttttgtaatgaggttttttattgttttgtttgtttttagttgcttcacttaatttsactcactttagttatcctaatttgaaacccagcttaatctaaattaaaatgtgtatttagtctggtaatatttaggaatcataaaactaaaagaatggtaatttactaaaagaaaggtaatttcagcaagctaatcagtagctgtagttaatagaaaaagagcaatacttgtataaagaacttaggagaaggaaaattttatcgttatcttttaatttatcttgcattatttagatatcactgaaaatgctctatg

SEQ ID NO: 538418 - DNA, 562 bp, Homo sapiens
taaagaaattaggtaattagttaagcttggctttatgtttagtgataaatttgaaagagaaaatrtgtacaacttccttgcaataagcagactctacaaattctggcctattagagtagcttatgtattctcctttatttttgttttcttgattgcatgttgccggcaagtaaagatagggaagactctttaaaaacttttatttgtttgagaggtcaatcaaccggtactctgcctttttccaaataatagtatgaaccttgttatactcatgaatgaatgataaatagctacagatagccacagaataagttgcaggaacatatttgcttattcttgctatttgattagttcatttttctctgccactacttggtttgtctttgataaatgtttattttgaatgctgtggtaattcatgaaaactctgatctttataaagaaagaattcaccaatttatgccagcagttgcaaattttttgtgtgaaaaatcagacttttgcaatgaccttgagcagtaggatgtaaataaaactcctacatgttattttcttgtttttc

SEQ ID NO: 538419 - DNA, 562 bp, Homo sapiens
taaagaaattaggtaattagttaagcttggctttatgtttagtgataaatttgaaagagaaaatatgtacaacttccttgcaataagcagactctacaaattctggcctattagagtagcttatgtattctcctttatttttgttttcttgattgcatgttgccggcaagtaaagatagggaagactctttaaaaacttttatttgtttgagaggtcratcaaccggtactctgcctttttccaaataatagtatgaaccttgttatactcatgaatgaatgataaatagctacagatagccacagaataagttgcaggaacatatttgcttattcttgctatttgattagttcatttttctctgccactacttggtttgtctttgataaatgtttattttgaatgctgtggtaattcatgaaaactctgatctttataaagaaagaattcaccaatttatgccagcagttgcaaattttttgtgtgaaaaatcagacttttgcaatgaccttgagcagtaggatgtaaataaaactcctacatgttattttcttgtttttc

SEQ ID NO: 538420 - DNA, 457 bp, Homo sapiens
ggctgaaagggcccaacatgaagctcgggctgtggcttcagaggatgcaagttcctaggaagcagtgacttccatggatctgacttccacattccatgatgtgacttccaaggagtcaccagacaggtgaaaacaaaagtkgcaattctttaaaaatgaagtccattatgtttcatctaatactgctgctagaagtgcaggctgtttcttcacagctactactgagctggagagtggaaaatgggactttggtaagttaaaataccataccactggctgtttttttaaaaccaaaattcaactcttttctttaaaaagtgctgctacgctgactccatactcttggttagtttctagtgctctaaaaacttgattctaactgatttttgactgtttttaaattgcttttatggagtggtggagtttttactccatcattttcatggaagtccagtaa

SEQ ID NO: 538421 - DNA, 511 bp, Homo sapiens
ctgtaatgaatgaaagcacattgtgctgtagtattatacagaataggcttcaaataagtatgttgagtaataaagtacttatgtcagcaatatttaaataaacattgggaggaaatagaacctgagtaacaacttagatgtgtacaaaatatgctytcttttttttgagacagagtctcactctgtagcccaggctggagtagagtggtgtgatctccattcaccaaaatctctgcctcctgggttcaagcagttctcctgcctcagccacctgagtagctgggattacaggcttgtgccaccacatctggtgaatttttgcatttttagtagagatgggttttcaccatgttggccaggctggtctggaactcctggcctcaagtgatctgcctaccgcggcctcccaaagtcctgggattacaggtatgagccactgcgtccggccaaaatatgctctcttcctgttgtattctcttttcagataacttaccaagcagtaggaagacta

SEQ ID NO: 538422 - DNA, 641 bp, Homo sapiens
atctacttgtacattcactcattcaagaattgtttattgagtgcctactgagtgccacttagtacatgaagtatttagatacaaagttaaataaggcatagtctctgtttctgttctctcttaagcagaaatatacattttaacagataatttctataaaatgtggagcataaggaagaaatatgttcttgaaagcccacctgaattcttcctttaacctgagctcatgctcttaccatataaagtatcagttccctgtctttgcatgtgggtctcctgggtgtatccaccactggcagagaaagagttttccatgattttgtgttaaccaggagagctgtaggcaactgagagtcagagtccattcagatagcaagatacgtgacagaaggttgactgtatttcctttttgtttatttttatcctctctctgagtaaagggaaaagaaaagaaggcccaataatattcaatggttgttcaccagggtctaattttgaagaatgtattgaatggaaagaaacttaaatttggtgtatccatcctcttccrtcccattgatgtgaatatttcaaatggttcatacactacacactctttcaacacacacacagacacatacccatacacataaactcctaca

SEQ ID NO: 538423 - DNA, 590 bp, Homo sapiens
  misc_feature (1)...(590): n = A,T,C or G
taaacttgcccaaagtgaggataatttagatggaggtgggttttagggacattgaaaatcatttttgctatgggttggtgaagatgtagtaggttaaatggttaattctggctaattgttatgaaacttgtggtaatcaacaacattttttctccaaggagttaattttcttacacaccatataaggttagtttatatattttcntaccatttgctaagaattaataaagcctttattatgtcctcagtctaaacaaggtactgtaaaggattcaaaaggtattactccctgtcatccagaagcatacattttggtaggaaatacagccttactcacatgaargagtgtcacttcctaatggtgggtgttgtaagcaaaaaatgcccccctccagaagctacccacatgaagtccctggaacctgggcctgttaccttatttggaggatttttgtgatgtgattaaattaaggatcttgaaagaaggtgataatcttgagttatttttaggtcggtcttacatgccattacaagcatcattatgagagggaagaggaaaaaacacagggggggaaagcaatgtaatgatg

SEQ ID NO: 538424 - DNA, 590 bp, Homo sapiens
  misc_feature (1)...(590): n = A,T,C or G
taaacttgcccaaagtgaggataatttagatggaggtgggttttagggacattgaaaatcatttttgctatgggttggtgaagatgtagtaggttaaatggttaattctggctaattgttatgaaacttgtggtaatcaacaacattttttctccaaggagttaattttcttacacaccatataaggttagtttatatattttcntaccatttgctaagaattaataaagcctttattatgtcctcagtctaaacaaggtactgtaaaggattcaaaaggtattactccctgtcatccagaagcatacattttggtaggaaatacagccttactcacatgaaggagtgtcacttcctaatggtgggtgttgtaagcaaaaaatgcccccctccagaagctacccacatgaagtccctggaacctgggcctgttaccttatttggaggatttttgtgatgtgattaaattaaggatcttgaaagaaggtgataatcttgagttatttttaggtcggtcttacatgccattacaagcatcattatgagagggaagaggaraaaacacagggggggaaagcaatgtaatgatg

SEQ ID NO: 538425 - DNA, 611 bp, Homo sapiens
gcaataacagaatgtgcttctaaattataattctcccaaccctggactctgaatcttctctttttcctgtcaacagttggtcccctctacaaaggccctgctgtttattcttcactggcacatgccctctgccacctgaaatctgttgctggccttctcacactctcttttcttcttttaacttcaaggtctttctaatttgtcctttctgcctgtcctttgttattacttatcacatctctcctggtcaccttcaccccttctttgtttgggcctccttctttatttctgsgtatctctttctttctatcagactctgaccttcttcatgtattatatttaagaactaatcttccaccttttcttttgttaaagtaattcttaacctttttttaaaatcccattcactaaaataagctcatgagtattaatgtttacattaggccttcccttctctgtcccttctcttcaaaatacccagcctacttagaagggagacatttccaatataataaaaacaatagctaacattatctgtgccagatgtagaagtccacaatagtctttacgactttgtcacaagcatcattattatcttcacattacagatg

SEQ ID NO: 538426 - DNA, 500 bp, Homo sapiens
cagcagccgcctctgatttctgcttgactttccaccaactgcaaaatgactcatcatttctggcagcttcagttggttcttaagccaaaagctakctccctatggcttctctggtcctgttgtgccccataggacaccttaaaaaaaaatgtgtggcccgggcgtgttggcttatacctgtaatcccagcactttgggaggccgaggcgggcggatcacaaggtcaggagatcgagaccatcctggccaacatggtaaaactactaaaatacaaaaaattagctgggcatggtggtgcgcacctgtaattccagctactcaggaggctgaggcaggggaatcgcttgaacccgggaggtggagattgcagtgagctgagatggcaccactgcactccagcctggtgacagagcaagacaacgtctcaaaaaaaaaaaaaaaagtgtgctccttcttacatgtaatagcctttcaaattcttgaagatgccctcttctcca

SEQ ID NO: 538427 - DNA, 281 bp, Homo sapiens
ctcttcaaaagactaaaaactgaatgcgacgatggattaattcaagtcctagtcgtgcgctctggtgagtgccataccctgtttcccgcgaggggacccacgagcgaccctcaccatcatcmctgccctggtggagcccccgtgcgggacacaggatccgaagatggcagcggaagctccgcagcggccccgaaagcgactgggcagggtgggcacaggctccctcagtgggtgaaggcggcgcaaagaacgcgaagatgcatcccaggagcccaccgggc

SEQ ID NO: 538428 - DNA, 578 bp, Homo sapiens
ataaagtctaactgccatgtctcaaaaggtcctaaagatacaatgtccctgtgacacatgaaggggttttccaggattatgtttgggacagaacagaaagtacagcaagaataaaccttttgcacaatggtaggcgatgattttcaatacactgctttccccatgctatcattttgtctgaattccaacgagtcagcttatgaactactttaaaatgggtaattgaagcctaaggggtggatcagggtatcactgggcccataccatatgtgtgtttctggaaaaaacttgttccctttatctttccagagaaaataaaatattgactcaaaataaattaattaaattttaaaaagaaacagggccaaccatggtggctcatgcctgtaatctcagcacagctctttgggaggccgaagcaggaggatcacttgagctcagcagttggagaccagcctgggcaatttagtgagaccacatctctacagaattattatttttcttaatagccaagtatgatggtgcatacctgyagtcccagctacttggaaggctaaggtgggaggatcactggagcc

SEQ ID NO: 538429 - DNA, 497 bp, Homo sapiens
ggggacctctgagaaactctgaacagcaaacaattgaaaaaagaaatttctaaaaaagaataatttttcagcacctaaacttctgtatgtgaaactataacaacaacctaaaatgcttctaatacggtaatggccctatttctctgcaaataaggattgctcatgattcttacactgcctttcaattaggattatacagctccattcctcattcaagcttccmatacgtgcacctaagtatcattttacaatgggatatacttaggtaaactgagacggtcagatgactcagcgagaagtcacccgaagaattttagaacaaagattaataactccaatataccctctcaaccaagaatttgaagaaactaaaaggttaaacacaaaatttctggagcttatgaaacttctgagaggtataagagaaacacagaaagtaaaactaaaagttaggcttgttgtctgcttttcattttgttttcaaactgggatttcca

SEQ ID NO: 538430 - DNA, 497 bp, Homo sapiens
ggggacctctgagaaactctgaacagcaaacaattgaaaaaagaaatttctaaaaaagaataatttttcagcacctaaacttctgtatgtgaaactataacaacaacctaaaatgcttctaatacggtaatggccctatttctctgcaaataaggattgctcatgattcttacactgcctttcaattaggattatacagctccattcctcattcaagcttccaatacgtgcacctaagtatcattttacaatgggatatacttaggtaaactgagacggtcagatgactcagcgagaagtcacccgaagaattttagaacaaagattaataactccaatataccctctcaaccaagaatttgaagaaactaaaaggttaaacacaaaatttctggagcttatgaaacttctgagaggtataagagaaacacagaaagyaaaactaaaagttaggcttgttgtctgcttttcattttgttttcaaactgggatttcca

SEQ ID NO: 538431 - DNA, 567 bp, Homo sapiens
tgtcttactaaattacatgcagtgtttctatctcaattaattcccaactgacaaaaaaatgtggatagttttcttttataagttgcycttacagtatgtaacttgagaggggtaatccaattcctctggtctcagtaattccaaagacagaaagtaactccaatagatactgctataatggaattgcagccactaactgagccctagttcctgttctaaaccctctctcccatcagaggtttgcctaaaattatacggtctcaattttcttactgaaaattcactgggatcccaaaattaaaaatcaaacctacaccaaaacaaaaccttaaacacaattagcacaagatgacaccgactatccctctatctatcccagggtttctcaacctcagccctcttacctttttgggcccaatataattctttgttttgaggggtctatcctgtgcactgcagcatgttcagcagcatctctggcctccacccactgcatgacagtagcaaccctcctctagcccctagttacaaaaatcaaaaatgtctacaggctgggtgtggtggctc

SEQ ID NO: 538432 - DNA, 594 bp, Homo sapiens
tgtcttactaaattacatgcagtgtttctatctcaattaattcccaactgacaaaaaaatgtggatagttttcttttataagttgcccttacagtatgtaacttgagaggggtaatccaattcctctggtctcagtaattccaaagacagaaagtaactccaatagatactgctataatggaattgcagccactaactgagccctagttcctgttctaaaccctctctcccatcagaggtttgcctaaaattatacggtctcaattttcttactgaaaattcactgggatcccaaaattaaaaatcaaacctacaccaaaacaaaaccttaaacacaattagcacaagatgacacygactatccctctatctatcccagggtttctcaacctcagccctcttacctttttgggcccaatataattctttgttttgaggggtctatcctgtgcactgcagcatgttcagcagcatctctggcctccacccactgcatgacagtagcaaccctcctctagcccctagttacaaaaatcaaaaatgtctacaggctgggtgtggtggctcacacctaccatcccagtactttgggag

SEQ ID NO: 538433 - DNA, 597 bp, Homo sapiens
cactgtaacctcaaatatcctgggctcaagtaattcttccacctcagcctcccaagtagctaggactacaagcacatgccaccatacccagctaatttttattttttttgttgagacagggtcttgctatgttatccaggctgggagaacattttaaacaaagggagacagaggtctaaaaatagataatgcataggagaatggtgaggtaaatgctatggccaaggcacagggcgtgtggaggaatgagttgggtttttgaagttgattagattaaatcatggagtctttttcttttttgagataagctcttgctctgtcacccagactggagtgtaatggcacaatcacagctcactgcagcctcgacctcccgggcttgagcaatcttccccgactcagcctcctgagtagctaggaccacagacacacaccaccacccctggctaatttttttaatttttstagagatagggtctcactttgttgcccaggctagtgccaaactcctgggctcaagcaatcctctcctgccttgggttcccaaagtgttggtataacaggtgtgagccacagcatgccccagtgagggatggt

SEQ ID NO: 538434 - DNA, 286 bp, Homo sapiens
ttgggggccaaatgcaaacttcagctaattcagaggtacactcatggctaactgagttgcaccaaaatgaagtaaattctgaacaacaacgtcctatcacagtactgataattcatctccatactctgatgmcccaacttcctataacttaatattctttcaaaattttactcattcattcaacaaatatttattaagaagagaaatacttattaagaatatgtctaacatattatgatccagtgttctaagtgctagggttatagctatgaatttgatgggcaaa

SEQ ID NO: 538435 - DNA, 558 bp, Homo sapiens
ctgctgcagaccctgggatcagcctagcttctacttttcttctgaaaaagttttgaccacgtgctttcctattagttccctattgttcttgcctccaatgagcactatttggaagcttacctagctaataaagaataaagccctttgagcataaacgggagggatgctattcctcacaccttcttccctggcttgctccaatgataattccagctctagaaactctccatgaagagtgactggaggtctcatacagcargaataggagggaggacatctctgcatcctcttctctggcttccaccttaaataaattattgagataaagttctccaatttctcatttagggaggctgaggaatctacatgtgcctgaaggagaaaggagacacttcttgtgccttttctcctggcttcagtgataactccagacgaggaatatcctccggctaggagggtgtaagacttataattgcttgaaccagagagtgggcactcccagcacttttttccctggcttgtcccagaaatacctcaagatctgcagactttctctgg

SEQ ID NO: 538436 - DNA, 621 bp, Homo sapiens
tatgtagtggaaagaacatatattcccctgagacttgtttgatcttgagaatacccttggactatgagtgaataagtattgagaggatgccactgaccatgttggtgcctctgcagtttaggaggacaagtaayagaggaatcccttgagccagagttacctttaagatcttctaaagcaggagtcagcaaacttattctaaaaagagctccacagtaagtacttttgctctgtggcccatacggtttctgtctcaccttcacaaccctgctgttgttgaaacagcattggtaaatggcattgagccattggtaaacaaataggtatgactgtcttccaataaaactttttatttaccaaaacaagaagaggactggtttggtctctgggctgtagtttgctgactcctaccctagagagaatatgaacataggcagagctacagtatttttgtagaaaactatttacttctttttttgtgaagagaactctcattggctattaaattgcccagttatcctcaagtcttgcaaaagctgaaagaggagcaaagcaagagcagttagaggcaagtttgcttcctgagaagctccacacttaacagctcaggcattgcatgca

SEQ ID NO: 538437 - DNA, 538 bp, Homo sapiens
attcccctttctgtctcagctttctaaagtacaaaaaagttttataatatacaccttggagaattattgtgtatatacagtggcaaacacaataaaaaagttccagtagttgctcagtaaattagggatattataactattttattatgtttttaattctctggtgatcactacttttcatgtgaaacttaaagaaaagaacagtaaactaggaggttgcaatcagaaacctgagttctggacccacctgtgccaagaactacctatgagaccttaggcaattcacctgtcttgtctgtatattccttttctctttgagaagatgaagaggtagtgttaaccatgttaccctgagtgaggtatggtgaggccggaggcacatcaaaagagagaaaccagaaagagtttcacagttttgttrctcacatttccctgggaaaaacacagccttgccacactgggaatgagggaagcatgaggcagaggaagaatgggacactgtgaacaagcacgttttttgtggtttctgcaggaagaa

SEQ ID NO: 538438 - DNA, 435 bp, Homo sapiens
aaaggtgccattttcactctatgattgtggtttgtgatgtgcacactatcttatagaggcaagacaaggtgtcagatttggttccatattgaatgccacaaagaatacagattgctttaaacaagtcattcttgattaaagatttttcttaaatctgacagtttttaaaaaaatttctaaagtagcaacagttttactttttcttatacaatgatacatttttcagaggtcttcttactgtgaagtaaattacttcttttaagctaggtggatctcttcacctaaattcaccttcccacgccccacaacaacattcttagaaatcttgcagactttcaagttaaatgtgactctcaggaggacaataaaaccatgctcttaggatataaactattyattaatttgttcaacaaacatttactgaatgcctaccaa

SEQ ID NO: 538439 - DNA, 638 bp, Homo sapiens
gtgacttctttcagaatatctgctttcattgttgcactatggatgtcctagggaaagaaaaatataataattcattcagtgaacygtaacaatctgagagcatgttttgcctaaagtgataaagtgaaaaaagttctgtttttattctattaacataccaaactaatgaaacaatccaaaaaaggcctaggtaataccagccacttgtataggtaaacgtttatatgtgtataatatattgaatcaactgtgtgtttggcttcatgaagaaacagtgacagagcagtaatggaatttggttgtttaatgcataatatacatattgctaatctttttaaattaacatatgcttcaaatgcatatggttgttttagaaatagtacagaaagttcacagttaaagcacatggatggtatgtatacttacagaagtgtgaaatcattataagagaataattgagcaattacaagcttttttatgggaagttcgataaaaagaatagttctgtgcaattatattagtccatttgcactgctagaaagaaagacctgaggctgggtaatttataaagaaaagaggtttatttggctcacagttctgcaggctgtacatgaaggatagtgctgatatctgcttct

SEQ ID NO: 538440 - DNA, 446 bp, Homo sapiens
tatgaagccccctattcctgacccctgaattgtgcaaccatctatgtggttgccttagctgtctcactacccacatccaacccatttggtacacccctttcttataaatatctcttgaatcatrtgtgtttctttgtcttcacactcacttctccagccctgtcattgctttagttggtttccctgattcgagtcatttggggaggagatgacagactatactaatgctgttaatgcaaatcagatgactcccttcttaaatatcctagttattgcttcccatcaacctcagaatgatgtccaaaattactgtagcctccaagactctttgtgtttgtctctactttcttttcaaaacacaattttcccatgtcatgtcttacatctgggaattgcatagctgagaatgccagaaatgtccttccttttcctgaacaactcctgtc

SEQ ID NO: 538441 - DNA, 528 bp, Homo sapiens
gggtaagtgcaggggagcggggcggagggcggcaacgcacagcagtcaagtcttccttgaaatgctgcaggcaaagccagacgtttacagttaaaaatggctcgatctgattccacagtcttgccaggaaagtctcatttcttcgtgaccctccgctgagggctaggacccgttcctaacagggagccttacattggcagcgcccccgcgtgcgttcagaaacggagtagggttactcgctgcgcctggtgcagccccctacacgtcctcagcctgccaggctgcgggccacatctttcccggggtggctttggactgacygcgtccctttatagtcaccatggcccctggttggaggcagcaagtccagggagaggtgatgagaagcccatccctccagacgggctcctcccacatccgggagtgttggcccccataccagatgaatgcttccagagtgacctccccataaagaggtggctgaaatggaaacagcttacctcgggttcaggcttgcagaaaatcaca

SEQ ID NO: 538442 - DNA, 534 bp, Homo sapiens
ttgctctgtcacccaggctggagtgcagtggcaggattgcagctcactggagcctccaaatcctggcctcaagcgatcctcccgcctcagcctcctgagtatctgggactacaggtgtgcaccaccacactaggctatttattatttttgttattattttgtaaagatagggtctcaccatcttgctcaggctggtcttaaactcctgggctcaagcgatgctccccctgtggcccctcaaagtgcaaagaaaacttaacagctttatccacagtgttattttcttttctcttgatgctgtgaattatcyccttgatgtcagtgaagctggggttgttttgaaagacttaaatcaatacttccattgagaaaattggaccttgctggctaaagatgaaaagctggaaccctttccaacagctcacttctgtgggctgagatcaggggcagatggctcagtgtcccttgaggtgatttgattacccgtcacggccggacgcctggtctgggtacgtgaagagaagcacagacagg

SEQ ID NO: 538443 - DNA, 534 bp, Homo sapiens
ctgtttcctcctacgagtgtgccaggcactgtgctaggtactggaattatttataaacacccaagggtaagttaaacccccttttataacttgtgtaagttagggtgaaattttcaaagcctcctgtactaactttctccagttggtactctgctaccattcactgtacctgtaattaattaacgatggccacaacagagccctttatcggaaacctggtaactgggacaagcagtatgtggaaaaatcccacaacagtactgtgcaagtgcagcatggagcaaagaattcatgtgaatttttcacatccacagagtgtcctttttgagtaactaaattattccccctggtctctctgaagttgtcgttactttccggttcactttatataatccgtgagaaaagttttccttctgacttgtcagggccccttgagtgcccatcttcatgtcagtctcagcttcagctcttatcttctttcttcctctttgcagtccrtaaacggccccatccgtccccagccctgaggtttct

SEQ ID NO: 538444 - DNA, 569 bp, Homo sapiens
cctgtcaatgggaagtaagtggagaggggagcgaagggccaggaatgacatgctagggcaggggtcacaaacatttcccatagaaagccagaaaataagaattgtgtcctatgcaggccactgggtctctgtcacactacacagttctgccattgtggtgcaagagcagctataagcagaacatatatgaatgaatgtgactgtgttccaataaaactttatttatgaatgctgaaattggaattttcatgttccacaaaatatcctacttatgactgattttcaaccatttaaaaatgttaaaaatcattttttakctcgtgggctgtacaaaatcaagtggtggctagatttggtttgcagatccctgctctagtggaagctgtttcataagaaaatatgaagtcaagagaaaggagttcctccagcataactgtaacctaatgagggtaatttttcaggccagtgttgttgctgcttcataggaaatgacttctatgatgagagcatcaagtgagatcataggggtgagctgagggggctgggagatgggacagaaagggaaactg

SEQ ID NO: 538445 - DNA, 610 bp, Homo sapiens
ggaattctaatagcatgggcaattatcttgcccatctttgccccatcttatcttgctagtgtataatgattgatgtagaaaagagcataggtaaataggaaacatgacctataacttgtaattacacttgtgttggtttgcactgaatttgtatwtagaattaatgcctagcttttaacagtttgaattgagtttttgtgcaaaagaattattttatttcagagagtcttttatgtttatatggcttaatttgtatcactattcagaaggtttgtgtgtttttcataagttcccagaataaagtgaaacttgcatgttatttttttaagttgaggatgaagcaaaatatagccaaggaaggaatacatctgcatatttaatggccaaataaataaatataatacaaccactaagattttcaggagtttacagttactgcaatgataaaatttggtttgtttttctttcaggttattcttttctactttttcctctgatagagcagttgaagcagttaaaaggatttcttaaaaaatctgacaacactgcacatttatgctgaatacatacagtatctaatttaaagtaaaaggaactaaactttttcccc

SEQ ID NO: 538446 - DNA, 610 bp, Homo sapiens
ggaattctaatagcatgggcaattatcttgcccatctttgccccatcttatcttgctagtgtataatgattgatgtagaaaagagcataggtaaataggaaacatgacctataacttgtaattacacttgtgttggtttgcactgaatttgtatttagaattaatgcctagcttttaacagtttgaattgagtttttgtgcaaaagaattattttatttcagagagtcttttatgtttatatggcttaatttgtatcactattcagaaggttygtgtgtttttcataagttcccagaataaagtgaaacttgcatgttatttttttaagttgaggatgaagcaaaatatagccaaggaaggaatacatctgcatatttaatggccaaataaataaatataatacaaccactaagattttcaggagtttacagttactgcaatgataaaatttggtttgtttttctttcaggttattcttttctactttttcctctgatagagcagttgaagcagttaaaaggatttcttaaaaaatctgacaacactgcacatttatgctgaatacatacagtatctaatttaaagtaaaaggaactaaactttttcccc

SEQ ID NO: 538447 - DNA, 610 bp, Homo sapiens
ggaattctaatagcatgggcaattatcttgcccatctttgccccatcttatcttgctagtgtataatgattgatgtagaaaagagcataggtaaataggaaacatgacctataacttgtaattacacttgtgttggtttgcactgaatttgtatttagaattaatgcctagcttttaacagtttgaattgagtttttgtgcaaaagaattattttatttcagagagtcttttatgtttatatggcttaatttgtatcactattcagaaggtttgtgtgtttttcataagttcccagaataaagtgaaacttgcatgttatttttttaarttgaggatgaagcaaaatatagccaaggaaggaatacatctgcatatttaatggccaaataaataaatataatacaaccactaagattttcaggagtttacagttactgcaatgataaaatttggtttgtttttctttcaggttattcttttctactttttcctctgatagagcagttgaagcagttaaaaggatttcttaaaaaatctgacaacactgcacatttatgctgaatacatacagtatctaatttaaagtaaaaggaactaaactttttcccc

SEQ ID NO: 538448 - DNA, 610 bp, Homo sapiens
ggaattctaatagcatgggcaattatcttgcccatctttgccccatcttatcttgctagtgtataatgattgatgtagaaaagagcataggtaaataggaaacatgacctataacttgtaattacacttgtgttggtttgcactgaatttgtatttagaattaatgcctagcttttaacagtttgaattgagtttttgtgcaaaagaattattttatttcagagagtcttttatgtttatatggcttaatttgtatcactattcagaaggtttgtgtgtttttcataagttcccagaataaagtgaaacttgcatgttatttttttaagttgaggatgaagcaaaatatagccaaggaaggaatacatctgcatatttaatggccaaataaataaatataatacaaccactaagattttcaggagtttacagttactgcaatgataaaatttggtttgtttttctttcaggttattcttttctactttttcctctgatagagcagttgaagcagttaaaaggatttcttaaaaaatctgacaacactgcamatttatgctgaatacatacagtatctaatttaaagtaaaaggaactaaactttttcccc

SEQ ID NO: 538449 - DNA, 424 bp, Homo sapiens
ctataacttataaattctgtggtttaataaaatatgttgatttcttattcctctgttgttcaactagtggcagtgtcaaggaggtgaggagagcataatttcagagtgcgacgtgtgaggtactgtcttcaagatcaagatactcaggctgatggagcctctaccatcttcaatacatagtttctcaggctgccctgagaattagcatctaaccagcaaacarggaacaaaaggagaatatacatgggacattttaagtggcactcattacttccactaacatcccactaattagaacttcgtatattgttgcttctaactgcaaaaaaggctgggaaatgtaatctctctgtgtaccagaagaaaaactgggtttggtcaacagttagccagtttctgctgaacctattctactggttatcac

SEQ ID NO: 538450 - DNA, 646 bp, Homo sapiens
atttaaattatttgggtgattagatttggggttttagagctcatggaatttagacgagattttgaacttaaattgatgctgtaatgggatgagaactttggtgattttgggatgaaataaatgtattttgtgtatgaaatagacatgaatctttaagggccataaggtggactgtggtaagcagaataattaccaccaccaccaccctttccaaagacttccatatcctaatttccagaaaaacagttagtttagattgtaaaagggaagggactttgccaatgtgattacagttatggacattaaaatagggatataaggccgggcgtggtggctcatgcttgtaataccagcactttgggaggccaaggtgggcggatcacctgagatcaggagtttgagaccagcctggccaacatggtgaaaccccatctctagtaaaaatacaaaaaaaaaaaaaaaactgggcatggtggcaggtgcccgtaatcccagctattgggaggctgaggcaggmgaatctcttgaactggggaagcagaagttgcagtgagctgagattgtaccattggagttttgctcttgtcactgaggttggagtgcaatggtgcaaatggtgcaatggtggtacccagagcagaaaagc

SEQ ID NO: 538451 - DNA, 540 bp, Homo sapiens
ggccatctacaagggagaaagagagcccttgacagaacctgactatgctggcaccctaatctcagacttttagcmcctagaattgtgaaaaaaatgtatttctattatttaagccattcagtctatggtattttgttatggccaagtataattactaataaaattattaaggaaaaaattagtttttgttctgtagctgctgttctatttaactttttacattgagactatattaatgaattcttttacaatttaaaataaagaaaaccaagtgaaaaaaaacacaaaaagtccataattcatttggagtgataccttccttcaattatctcttaaacttcagagtgggaccaattgcaggttgaatgagccatcaatgaaagacatcaatagactgtttcgtcaaactcactcccagtttgtaaggtgtctcattgattcacttgtcaactttaaagtgatgcaattgttgccattgcttttggagttttagacatgaagtccttgcccatgcctatgtcctgaatggtattacctagg

SEQ ID NO: 538452 - DNA, 542 bp, Homo sapiens
cttcactacctggaatagtactggcacttggtaaagcacagcgaatattgttgattgaattactaggggttggcttagagaggtacttaatggaatgattcaatggatgaatgaatgaatgcattgccacttttttgctcattatcatcaatytgtacatatgcctttcaactcaaatatttatccattggctaaagaaaaaaaatacctgaatccccgtgtctctgcagtttacccttcctcactgttaaaactcagtgcctgtgtaaaatttcattatattttatttacttcttattccacttgtgcattatgtggatattcctgcctcatccccacagccacctatcacttccggccaactcagatgcctctggctcgcaacaatcacttctctgttgaatttctgaagcgtttaatctgcagtatgtctgttactcatacagcagttagtgtgaattgtctcactcagaataagtattcattaaatgtgtaagaatgatgatatagcctaatttcagatcaagattgtgatttatagc

SEQ ID NO: 538453 - DNA, 534 bp, Homo sapiens
gcagaactaccacttgatccagcaatcccactactggatatatacccagaggaatgtaaatcattctaccctaaagacacatgcacgcaaatattcatggcagcactgttcacaagagcaaagacatggaatcagccgaaatgcccatcagtgacagattggagaagaawatgtggtagatatacaccatggaatattaggcagccagtttccttttctgtaagtaaggactgagatagtccctgcctcgtggagttgataaggatgtgaaacgcatccaccccagtcctttttgagtgggcactgctctttttattagtatgatttttcttccattgccatcctctggtctagtctagtggttctcaaagggggcaagtccagccccaggggcactgggcaactactggagacgtttttggttgtcacagcttggggaggggtgctgttggcgtccagtggatggaggctggagctgccgcagaaggtgctggtgggcacaagacggccccaccacagaggacggcccagccc

SEQ ID NO: 538454 - DNA, 513 bp, Homo sapiens
cctgtttcggttccctgagcatgggaggtagaacagggacccccaaagatgccccagtcctaatctctccacctctgaatgtctcaccttgccccgcagaagggactctgcagatgtgatgaaagtgaaggatgccgagatgggaggttatcctggttggtgccatagaaccccaaggtcccttccaaaagggaggccggagggtcaaggttgggaggagaaaatgtgaggagggaagcagaggttggagtgatgtgaaagaggccatgagcccataacacaggtgcctccagaggctagacaaggaaggattctctcctggggcctccccagcatggctgacacttggctcttggcccagggaaacccatatcagacttctagcctccagacctgcaagatataagtgttcacattaagccrtggggtttgtggtgacgttacggccacagtaggaagcagatacaccctgagacccaaagcatgtggctccccttcctatgcctgttctct

SEQ ID NO: 538455 - DNA, 609 bp, Homo sapiens
aattttttgtatttttagtagagatggggtttaccatcttggccaggctggtcttacactcctgaacttgtgatccacctgcctcagcctcccaaagtgctgggattacagcgtgagccaccrcacccagccgccattaagtttttacaaacttttcattgtcatatacacaaaagcacacaagttgtgagtggccagatggtgtatcatctcaaaccaaacacacccttggggccagcaccgaccagtcaaacactggggcacggtccactctccctggtcctcacacccttccacctggatccactgcagacctacagctcagcgttgcctgatttcgaactttgtgtcgacagagccccacttcacctgtacgcctggcttctttcctgagccgtgtttggggagccatctgtgtcctggctgggcgggacttctcatttcctccttggtgtggctatgttgtaggtgggagggctagttcaggttcttaactttgccatacaaaagaatttgagagccagtccatagtgagagtaagcaaagaagtttattggaaagcaaaagtccactccgagagacagagcagcggctcagagggagatagca

SEQ ID NO: 538456 - DNA, 657 bp, Homo sapiens
gtgacaaattactgcaaatgatacgaagttaccaactccaggttctggaggtcggaagactacaatggatcttgctgggctgaaggctccagggagaatccatccagtttctagaggccgctgcatttcttgggtcatggccccttcctccatctttagtaatcactcactcargttccttaatcacatctgcaaagttccttttgccacgtgaggtaccatatttcacaggttttggacattagggtgtgactttttttggcgggaggcattattctgctggccacagggacccctcttgtggtttttatgtgggctctgcccaagccttgtaactgttatttccagtggcaattttatatccattttattttcacaatttgcctctctacatcctcccattggcttttgagtattttccaatttctagctatgaaaatagttgcctccattttaaacgctcccaaaacactgtatgcatttttcacattttgaatagacaatatcctaaacccatccacccatttaaaatcgtttgctattactccattgttctggtaggcagcaaacccttgccataaattggaatccagagctgtaaggtgaatgagatttcctagggccagttctcaaaaagatacccaagggagccctgtc

SEQ ID NO: 538457 - DNA, 643 bp, Homo sapiens
gagagacaacgtggaggagaccagtccaggcgaagccctcctagagcagccgtccccacagactgcagcaaatccagcccagaccagcctagagcctgccaggaaacccaagtcttgtgagtgatcataactgattattgccttgagccacttatgttggagtggtttgttacacagcaatagttaactgatacagaaactcacttttgcattttctcatataaataacaatttaccaagtatgaaatgcaattatacctgacttttcaccatatgtactcctggaaagattctgtttactggatttgtagaaagagggctgccattstctctgttgtgctttcaatacaccatcctcatcctcatcttttttttttttctttgcagtgggttgggggtgggggcattgtctccaaacagtattcactggtctgagtctagattttttaatgtctgagaggatttcatgcatggaaagaacactcaccagcaccgcctaacagcttttggaacctttagttgataatgtacaatgttctaaacattttacgtttaatctttataatcttctaagatgagtgctgttgatgccacccccattttgtagatgaggaaataaggacaagtgttgacattttgctgc

SEQ ID NO: 538458 - DNA, 602 bp, Homo sapiens
attgggtggatcttttccactcagtctactgactcacctggctatctcctctagaaacaccctcacagtcaatcccagaggtaatgctttaccagttatctaggcatttcttaatcaagtcaagttgatgcctaaaattaactttcacactggtgtatcttctgctcatcctgaattggtgtgctctccaaacgtatatcctgaatgcatttacattcttactccacctgcctcacttaggtgaacccgttgcctcctgtggcttatagtatatgaatcaagagtccaaatctatactggaaattctgacttttctcctgaattgcawactcttatcctccaaatctttattagcattagctctttgccccacagacatctcaaagccaacatattgaacatatccaatactgaactcatgatctttccctttaaataaactctttctttatttacagggcttattcacagcaacatgtcaatggtaccaagtctgagaaatctccactctttctatatttccaatcatgggaacagtgtcaacactcaccccatgatcctgaatcttgggagtcattccacgctactcatttcatgcataa

SEQ ID NO: 538459 - DNA, 375 bp, Homo sapiens
tttaacaactgaaaactatagtatatcattgaaaaagtaaaagacctaagtaaatagaataaatggaaagacattctgtattcatggattggaagacttaatattgttaagaggcctgggcaacatagcaagacctcatctctactaaaaataaaaattaaatatatatatatttttaagagagaaattctccataaattaatctatacatttaatgtaattcctatcaaactctcaggtgcctttttcccccaaaattaccatgctgatcataaaattcatgtgatttaaagaacccagaataactgaaacaattttacaaaagaagtmcaagttgggcatgatgacagatgcctgtagtcccagctactcagg

SEQ ID NO: 538460 - DNA, 693 bp, Homo sapiens
ctgcttcagcagctccaatctctgactcctacctcattagctcagtgaggctgctatgttctgcttgggcttcacttttctacccagtcatctggaaattgcccccaggcagcaatccagggaaaatgtgaagttcatactatgtatgttccctctcttgaggattatgatcctgcatttcttgtggtccagtacctgatagcaattgccttatatattttgttaagttttagagttgtttagggtggttacactgtcatggcagagatgaaacctgacttttctcgttaaatggttgatttagaatatgcaaaatatgcaaccagatatatctagcttaaatgaggctagcaaatttagatgttcacaggaataatccggagacattaaaaactaataagatggtttagstgtaactcttctaactgctgagttatatgtatgtcctttgaaaacatgttggtcaaacaaaactcgtgagtattatagctcaaaatccctggtggcaacctctggcttcgtaaacttagtctctctaagtctcagttttctcatttgtaaaattagaataattatacttacaaggttattgtgaggtttaaataaatacttagcagggaatattcattcaataaatagctaagagctagtttcatctacagatcttggattctccatcagctcagtcaagga

SEQ ID NO: 538461 - DNA, 523 bp, Homo sapiens
atggccatgaggcatattcccagacaaagaaacataagcagaatctcttgatgctgcctcttttccttagccttcctctcactattacatgcacagcctggaggtacagcagacatcactgaaaatggtaaggcaggaaggcagaaaggtcctggatttgatggtatcatcragtcactccactggtcctggactgaccacccctggacttacttaagctacggtagcgccatttttaattacttgaaattgaacacaattctaatacaataaaatatctcctaggattcaaaccattgttcacttgaacaccaacattagaagaacaatgacaaaaaagaggcaggaagagctggtaggggactcttgcaataaagagttagatacgctcagatatgagataaggcagtaacaatggggatgaaataaaggagtcagacttaagatatttggcaaaactgggcctaactttcatctattcctcccaaaccccatagaaattaaaaaaaggaacacgggagaa

SEQ ID NO: 538462 - DNA, 523 bp, Homo sapiens
atggccatgaggcatattcccagacaaagaaacataagcagaatctcttgatgctgcctcttttccttagccttcctctcactattacatgcacagcctggaggtacagcagacatcactgaaaatggtaaggcaggaaggcagaaaggtcctggatttgatggtatcatcaagtcactccactggtcctggactgaccacccctggacttacttaagctacggtagmgccatttttaattacttgaaattgaacacaattctaatacaataaaatatctcctaggattcaaaccattgttcacttgaacaccaacattagaagaacaatgacaaaaaagaggcaggaagagctggtaggggactcttgcaataaagagttagatacgctcagatatgagataaggcagtaacaatggggatgaaataaaggagtcagacttaagatatttggcaaaactgggcctaactttcatctattcctcccaaaccccatagaaattaaaaaaaggaacacgggagaa

SEQ ID NO: 538463 - DNA, 552 bp, Homo sapiens
gagaaagacatgatagacactgaggaaagtttgaacttgtggccgggacctgtccctctcaggtcttctagacatgtctgagggaagtctcttgaatgtaagaaagtgttattggcaaagcaatccaataaaataagctacctatgatgcaaagccttcgatgtrctgtcctttttccttaggatgaaattattcaccccagagttttcttgcaccttaaagtgcagacaaatggggagaatggaaaggtgggaggaagggtccagacagagatggaaggtgttcccaccacaactgcctggtgaagtaggcagccagggaagctggtgaacatgaggtagccagccttgtccctgattgcccaagtttgtgggtgggggtgggggtgggggtgcagggggtggttttcagggagcaatggattctgaagtccctcatgccatgaattaaatcaaatacgaaggcttcctgaatctccattgaagaacgttctccgattgccaagtctatatttggatctgtctaggcaagattatggcaagctaaacctgt

SEQ ID NO: 538464 - DNA, 632 bp, Homo sapiens
gtcaatcatgatcactatccttggtggggaggktgaatgatgtggccccaataagggaacatttggagattgcaggtaaggactgagcctggggtgaaaagggggcttctgctctctgaactctcccaggcctcccggctctgccccaggggtcaggaaatatcactcctcgggacacagggagaatattgtctctggataatacagttctaaaagacagcccctagttggtccctccctgtgccagcactggggcagcagcctctgaaaacaaatgagtcataccatgcaggctgcaatggggcccgaaggtgacaggaaccaggactttccagtgacttttatgtcccctttcagaatggctgtaaagaaaacaagacataaaatgcctcccctgtataatttgctggtttataggtggtttcgtcactttttaaatggctacccaaggtgctctttacagtccccttatgactggtaatgaaagctccaggaagagcccagagagcccaggaaataaggaggttcccactccctgctgccctgtggccaggcggcggtgaggggctgcagggtgggccccgtcctcagggcatgcagttctgctcaccctgcatgctgcatgcagttct

SEQ ID NO: 538465 - DNA, 609 bp, Homo sapiens
agctgtcaatcatgatcactatccttggtggggagggtgaatgatgtggccccaataagggaacatttggagattgcaggtaaggactgagcctggggtgaaaagggggcttctgctctctgaactctcccaggcctcccggctctgccccaggggtcaggaaatatcactcctcgggacacagggagaatattgtctctggataatacagttctaaaagacagcccctagttggtccctccctgtgccagcactggggcagcagcctctgaaaacaaatgagtcataccatgcaggctgcaatggggcccgaaggtgacaggaaccaggactttccagtgacttttatgtcccctttcagaatggctgtaaagaaaacaagacataaaatgcctcccctgtataatttgctggtttataggtggtttcgtcactttttaaatggctacccaaggtgctctttacagtccccttatgactggtaatgaaagctccaggaagagcccagagagcccaggaaataaggaggytcccactccctgctgccctgtggccaggcggcggtgaggggctgcagggtgggccccgtcctcagggcatgcagttctg

SEQ ID NO: 538466 - DNA, 542 bp, Homo sapiens
acacgtgctgggcgacccccttcccaatctgcagttttctcatctattcaatgggataacacaatacctaccttataaggttgttgtgagaaataattaagatactccrtctcaataaattaaggtctactggtggcaaaatatgatatctgattctggccaacatgagcacagattgggaagacacagagtcatttgtccttatacaatgagaggaaaaagagaagcatgagatttcagaaagtacggggaccagatgggttccaggcacctgcaccgcagaaacggtcggtctcctgagggcatccacaaatatcttccatttctatgcaaatcacatttctagggagtcgattgagcctgggtcacatgtgtagccctgtacaggtgaggggggagcctcttgattgacagatccaccagcctgcatgcaagtccagtggaattgtcccccaaagcaaagttaaatttactggaacttaggggaatggatgcttggggggaaatggaggcagcacctgtacctctcagaggtgaagctc

SEQ ID NO: 538467 - DNA, 577 bp, Homo sapiens
ctgcaccacacgtgctgggcgacccccttcccaatctgcagttttctcatctattcaatgggataacacaatacctaccttataaggttgttgtgagaaataattaagatactccgtctcaataaattaaggtctactggtggcaaaatatgatatctgattctggccaacatgagcacagattgggaagacacagagtcayttgtccttatacaatgagaggaaaaagagaagcatgagatttcagaaagtacggggaccagatgggttccaggcacctgcaccgcagaaacggtcggtctcctgagggcatccacaaatatcttccatttctatgcaaatcacatttctagggagtcgattgagcctgggtcacatgtgtagccctgtacaggtgaggggggagcctcttgattgacagatccaccagcctgcatgcaagtccagtggaattgtcccccaaagcaaagttaaatttactggaacttaggggaatggatgcttggggggaaatggaggcagcacctgtacctctcagaggtgaagctctttccatggtgaccagagctttgtgagc

SEQ ID NO: 538468 - DNA, 542 bp, Homo sapiens
acacgtgctgggcgacccccttcccaatctgcagttttctcatctattcaatgggataacacaatacctaccttataaggttgttgtgagaaataattaagatactccgtctcaataaattaaggtctactggtggcaaaatatgatatctgattctggccaacatgagcacagattgggaagacacagagtcatttgtccttatacaatgagaggaaaaagagaagcatgagatttcagaaagtacggggaccagrtgggttccaggcacctgcaccgcagaaacggtcggtctcctgagggcatccacaaatatcttccatttctatgcaaatcacatttctagggagtcgattgagcctgggtcacatgtgtagccctgtacaggtgaggggggagcctcttgattgacagatccaccagcctgcatgcaagtccagtggaattgtcccccaaagcaaagttaaatttactggaacttaggggaatggatgcttggggggaaatggaggcagcacctgtacctctcagaggtgaagctc

SEQ ID NO: 538469 - DNA, 626 bp, Homo sapiens
ggctgaacaactaccaacagccacacttgatcagccgtccccaaatcatcgtggccaagcattccctgaggaccagcctcccatttctgcacgtccccaccactcacccccagggcccttgttctgcccatctcaagcaccttttctgaatcgttccattgaatctcactctcaagaaaggaacccaaaacttattctcactcaggtataagaggccaataaaccctraagctgttggctgagcatgaagcttttaagctcagaacctcagtaggaagtttgggagaactaccccatctccttggtgggagctgcagcccatatcaatgctgagtaacccacaggaaacacaggcttcctgacccatgaaagagtagtaggtgcattacattctgtggcctgtgaatcagagcccagacctcacaccttcacaatgccattagatggatacaattcccgtggtgctggggagggaacactagcttctcactttgataaggcaccaggccagacctgccagagaccctggtggcacagacagatgaaacaggaagctgcagctggtggcaagatgcaacctctggcccaaagaatacaagcccaccgtaagtcctcacactttctca

SEQ ID NO: 538470 - DNA, 576 bp, Homo sapiens
atttttattgtttgcatgttacatttttgggtgtctggattttgctatcttcatttaaagaatgcataattttgcttggtagatagttgtttgcagatcagcttgatccttgaacggcttatttttaagttttgttagtgttgagggcagaaggcgtctagaataccttttactatgtggctagttcagccccactacaaaggtgtggccctctgtggttctctacagagtgctctaggtcctctccaaggtctctatactcttactaattggagctttacagtctctcagccctgtgtgggctctgagaatcattcatctaacagctcctatccttgtggaatttcattccaygcacagaatttagttctaactttaaacacttaaggaggttcttatgcagatttctggaaccctcctcttcatgactctccactactttacccagcaaagcccagccacgtccatctccctgagctccaatctccactttttgagcgaaggaaactcactgtgctctgtctggaccctcctttaagtaagttgtacctccataaagctaaaaagaaagttagg

SEQ ID NO: 538471 - DNA, 581 bp, Homo sapiens
aactttcattctgccacgttgatttataatgctgtaattctctttcttgttgttatttttattttttcacaatacagtattgaggtcaacaagtatttattaagctcctggctgagggtgaaaagaataaaaaatcactctgtcctttggggatattaaaatctagtttatgcattcattccctcagtcaataattttttactgagcacacaccatgttcctagggagacagggaagtaccagatacagtacctgtccttgtggagcagacagtttagtgggacacaaataatcacacaagtaatataaaaaattataaaatactaaaaaattaaaaataaaaattataatacattttatgtagaaaagtacaattgctgtgatcgagtatcacacataatctcaacttagtttggggaagttagagaagggctctcttaggagtgaccgaagctggaacctgaaggagacaggcaaagagtgaggagaagaaagttccagacagaggaactgtgggtggacagaaggggtgtgacaggcttaaggakcatgaagattgtcagtgtgtctggaagtgccag

SEQ ID NO: 538472 - DNA, 435 bp, Homo sapiens
acatctccagaaaactgaagtgaagctctctgctgtagatgaccctcctcggattttctactgtaaaccacgcatattacagctatgatatgtggcatactctgtgctgtgtgcattggtttatcaaatgctgcccatgggccgcaagcttcagtggggtagtgactgtcatttaattttggatytgtagtgtctttgtatagtctctggcacatgaaaggcccttaataaatcttaagtaagtgggtgaatgaataaactaacaaataaataaaaaaggatgaccttcacctcttctgttgaaggatgatgccccaagagcaggaaccatggctgtgccccttgtctccccaacacagaatacactgtctgacacttagtcaatacttaatcaatgtctgttgaaaacccaaacacatatgctcacatactcag

SEQ ID NO: 538473 - DNA, 194 bp, Homo sapiens
ctggctatgaggtcaccatggtgactgttgacagccggcatcctcaggcctggcctggcacggccccggggagcagaggggctgtaggccacagcccgcccacctgctgcctyggggcagcctgtgagcatcgatctccccctggcagtaccagttcaaaagcagggctccaagcggaggcaaatgctgtcaaa

SEQ ID NO: 538474 - DNA, 552 bp, Homo sapiens
gagagttgctgagaaaatcaaaattaatttaaaataatatatgtaaaatccctttcaatccgtaaattagtacacaaatttacattacaaggagaaatgttaaatataatacaatggcactatttcaagtcttggtcgataccatctaacatagcaatctaatttctttagtaattttttctttcaaaaactcagttcataaaatgctttatgttatcaactgtaggcatatgtttacctagaggtaaataaccacaaactaatctgtcatataacatcctaattctcatcattaccataacaataatatcaagggacagaatttttatactttagtctcatatttctactgtgtgctttgtggaacaagacacatttactgagtaccyacttatataatactctaaataatttttaaaagaagaaaagataacatctctgactttaccaatcttgcagtctagctggcataatactgtatattcataaataatgcaaattaaagtgataggagacttcacttttggtcatgaggcagtaacaggcacaaac

SEQ ID NO: 538475 - DNA, 559 bp, Homo sapiens
tttcaactcctgtttgacctctctggacctcaccaaatatttatatggatgctgtcagattcggyactacaaacttattctctgctaaatatccttttcaaagtgaaattcactaatcacagcgcaaaataccaaaatacgtgtcttctatcctccttgttcctgacacttctgcaatattaaagaggggacttggaagttactatgtgacctttctttagcattcctgtcttccagattgatcacatacatcaaaataggaggaaagttttttactaacaatttctgttgaagtgatcataccttttttcatacggctaacaaccacaacacagaaaccaaataaaagtttctatctacatggtgcaatttatgaagcattttcatgctattatgtatttgactctcataacaattagagatatgcagtgcaaatattttacaaatgtgaaaaatgaaagtaatagaatttaaaggacttgatcaaagtcagacatctaacaagtgatgaagccagtaccaagaactatgtttcaactctcggtccagtatcttccca

SEQ ID NO: 538476 - DNA, 552 bp, Homo sapiens
ctgactgcactgctcacatgattatcttgagccaaccaggccaaataggttctggttatcctcctatacttgactgtcacacagcttatgttgcttgcaagtttgcttgattgaagcaagattgattgccactctggtaagaagctggaaggtgrccctaaattcttgaaatctagtgatgctgccatcgttcagatggttgctggagtgttgagagcttctctgaccatctccctcttggtcattttactgttcataatatgagacagacagttgctgtgggtgtcttcaaagcagtggacaagagggctgctagagttgggaaggtcagcaagtctgcctggaaagttcaggaggctaaatgaatattatccctaatacctgcaccctagttttattcagtggttgaagaacagtcccagaagtatttgcctgaataggccattttaagtttaatagtaaaaaactgattaatgatagcaatgcattataaaaccttccgaaggaaaggagaacattttatggaacatttttgggttttttttgtgtgag

SEQ ID NO: 538477 - DNA, 502 bp, Homo sapiens
acatgtttataaacatagtcattaacatttaacagttcattatatgctggactacaaaaagtaacttatagtaagatttcaacctcatgtatgtctactctcattttctttctttctccctcctttctaaagcttcatcactaaagagcataagctggttggtaatagagtgaacacactcaagttgcaggcctctttaggcccatttccttaaattgcttcctccagtgccagataagaccagaatgtttcattccaatggctcaagtgtttaagtggttaaatgctaataatactcctatgtaaaatcatagtatgaatgggtttcagattttttcctaatagcaaattgcgataccagagagaaaaacaaaagaacaaggacggtaggcaccttgyaggcatcttgaaggattgctgtcatgatgtggaaatcaggaaaacagcgaggctggagggagctgcccacgtcccaatcctcaggaagttctggaagcccctg

SEQ ID NO: 538478 - DNA, 524 bp, Homo sapiens
acctctttgcaccagagcctttttccagaaacagcagccccagtgatttgctggggagtgagaacaaggaatccctctattataatggaatactgcgagggagaataaggaaaaaactgagcaacagagcaggatgagaaattcttgtgttgcgcctccctttttcagtggttctgagttgcctttgagcctatggaatcacagcctyacacaccgttactgctgaatggaaccagagggaaccttctacttcaaattccccattttatagatgaggaaaccgaggcccagcatggggatgtgtctgctacaaggcctcccagcccctgagtttgggctctttcactgcatgctcagaagaaaggtccaggaagaaactaacagaatctttctaccccatggcctcctacttcacaccacaagtggaaaggagaccttcagtgggtgctttcctgggcttcctcgctggtttcacatgcctctttcctccggctgcaagtggcagcctggatctctcacatgtg

SEQ ID NO: 538479 - DNA, 524 bp, Homo sapiens
acctctttgcaccagagcctttttccagaaacagcagccccagtgatttgctggggagtgagaacaaggaatccctctattataatggaatactgcgagggagaataaggaaaaaactgagcaacagagcaggatgagaaattcttgtgttgcgcctccctttttcagtggttctgagttgcctttgagcctatggaatcacagcctcacacaccgttactgctgaatggaaccagagggaaccttctacttcaaattccccattttatagatgaggaaaccgaggcccagcatggggatgtgtctgctacaaggcctcccagcccctgagtttgggctctttcactgcatgctcagaagaaaggtccaggaagaaactaacagaatctttctaccccatggcctcctacttcacaccacaagtggaaaggagaccttcagtgggtgctttcctggscttcctcgctggtttcacatgcctctttcctccggctgcaagtggcagcctggatctctcacatgtg

SEQ ID NO: 538480 - DNA, 657 bp, Homo sapiens
agagctacgatcagaatgctgtgggaactgagaaaggaatgaaagtgccaggaaaggctccgcataggagacgacatttgtgatatgtcttgcaaaataagtagaagtttcagacagagaactggaagtgggagaagtacatcccaggcaccatgggacagatgggcaatggcattttggaagactacagagtagttcttttgcaggagaggtgagccccaaatctggggccttagctcaggaaggtttttggttttgctccagaaagaattcaagagtgagccagtggtagaagaaaatagctttatggaggtggcagtgttacagctctgtgacggctcctgcagaacggggctaccccacaggcagtgcgctgacagcaggagctcagggcagttctacagtcatatttacactcacttttaattacatacaaattaaggggcaggttatttaagagatttttagaaagggggtgataacttctgggtcattgccatggaaagrggcagtaacttctgggtatcgccatggcaatggtaaactattaaggcactggtggacatgtcttatggagcagtgcttcccgtgcctcttccctgttttagccagtctttgatctggtccagagtcaagttctgcctaactcaattctac

SEQ ID NO: 538481 - DNA, 576 bp, Homo sapiens
tggcctctgggaatggcagagcactagagtgaattgggaggcaaggcttcccccatgaacccttcttacacatcccagtgtggtgaccgcccactgcacaccatgtcagggccacgggcaggcaccgtttgggaggatatctgtaagagagaatcctgccctcaaccactcgggaccttgtagaggaggggaacaatgccatattaccagggagcagtgctcagtgtggtaagaggaaaaaatgtcactgaaggtcttcagaggaacgggagaacctggggaggaggaagagctcaggaagggcttcatagagttggtggcacttgaaattgcctttgaaagaggaataagattttctatgtcagaggagaagacttcccggtgggagaaaatgacacaaattaaaacaaacaaacaaacaccagcaacagaaccgataaggaactgatgtgttccaggagctgggaggagccctgagggagtgaggccaagaggtgggatgcrcagtgggggatgctggacactttcactctgtaagtggtaacgacctgttgagtttctttgtgtgttgggagt

SEQ ID NO: 538482 - DNA, 361 bp, Homo sapiens
ttgtgtgttgggagtgggatgatcagggctacacttcagagttacacttcagagttgcagcaggtgagacagggaagactggtggggctgggagaggggtcagcatgagctaggaacacaggcagtaggacttggtgactggtcaggtatggggtgggggatggtggtaggaagaagtcaggaatgactaagaggctttaggtcttagtcattcaacaaaatttattccattcacttatttaacaaacgtaagattcaggcctgctgtatgcctcatgcagcaccaggacctggggattcagagaggaaarctgcggtcagacaattattatgcagtagagggatcatgggtgtgttagac

SEQ ID NO: 538483 - DNA, 570 bp, Homo sapiens
ctgactgcatctgacttcccctaggatttccctaaggaagcagtggtagaaccctgctcagtactttccccaacacatgggcaaccttaaagtgtgggcctaatgcaacacatggcaaacctctgttcagtgggtttgtctccacccctgtcccactcccctggtggttctgagatctggatgatagggctactcaagggtgtggtcctgtggattgagcagccagtgacacttagcagtgtcctgcttgatgacacatcttcctattgagtctgtctccttacctgtctttctcacctcattccctattgttgcccytaaggctatacactctattgatgtgttagcacatcagcctttgcctcaggcctgcttcctggagaatccagactgagccaatgattccggtttgaaatgtagctttcctcattctacaatagtatgacattcagaccaagcctggagcatcaaagttagtaggtatccttcactgctagaacaagtatatgtgtgtagggaaaaacattctgacatttgatagtattcttgccagcatttatagggattttt

SEQ ID NO: 538484 - DNA, 570 bp, Homo sapiens
ctgactgcatctgacttcccctaggatttccctaaggaagcagtggtagaaccctgctcagtactttccccaacacatgggcaaccttaaagtgtgggcctaatgcaacacatggcaaacctctgttcagtgggtttgtctccacccctgtcccactcccctggtggttctgagatctggatgatagggctactcaagggtgtggtcctgtggattgagcagccagtgacacttagcagtgtcctgcttgatgacacatcttcctattgagtctgtctccttacctgtctttctcacctcattccctattgttgcccttaagrctatacactctattgatgtgttagcacatcagcctttgcctcaggcctgcttcctggagaatccagactgagccaatgattccggtttgaaatgtagctttcctcattctacaatagtatgacattcagaccaagcctggagcatcaaagttagtaggtatccttcactgctagaacaagtatatgtgtgtagggaaaaacattctgacatttgatagtattcttgccagcatttatagggattttt

SEQ ID NO: 538485 - DNA, 571 bp, Homo sapiens
acaaactagtttccaaaagggcattttcttcctctccttgtgctgcctgtgcatggtgaaatacagcaccaatggaaacttacactgagcatgaaagcatgaccactttccaacagacacaacggtttatccaaagagctctcctctccagacagtggctctgaaggccctgcttgggaaatatccaagcttgttgctactatcatgtccctatgtcctcctatgtttccaagacatcctgcctcccatcccccaccaccactgacaaactgtgacagccccccagttttatttgaattttctatcagaaaggaaattaaaatgtggaaagaaacagttaatcaaggacttccctgtcactaacttgtctgtcttcttccctrccccctaaaatagtctcaagattttaggaaaataaaaaattactacacacatactcacacatgttggggtccctattttaatatgtatagcagcctttaacccagtgggttctgtgggagtgggagggggcagctaaaatgatggtggccttttgctctgcctcccatgtcgggctcaggcaggagag

SEQ ID NO: 538486 - DNA, 623 bp, Homo sapiens
agcccctagcaatcacatttaactcttattttccaggaaactgagcctggaaggagcaagagtcctagaacctcagggctgagcagtcatctagcctaacctaattgctgctatgatctctccactgcctgccaatggtcttccaccttcttctgagcatttccactggcaaagcagcagagtggttaagtggactcggcctggtttcatggatctttgggtcagatcttagccttgctacttaacctctttgagcttgtttcctcatctgtaaaagcatctaacacataggattactgtgaagattaaatgaagcaaggcatgtaaagcacttagtataatagcttaataaagtgattgctgaataaatattagatatgcttatgccatttcccaatacagcccagcctatcattaggtagctctgttagaaatgttttagttttcttttagctgaaatctttgctcctagaatttccatcttgtttgagttgcccaaagtcacccagtgagttagagttggtgacagaggtgagaccagaacccagttcattccacaaggcaggctgtctctgaaatacttgctgcatgaatgaaatggacwgcaatttgccataataaac

SEQ ID NO: 538487 - DNA, 541 bp, Homo sapiens
ccctctgtgttaggaacccaggaagggccagagaccatgagcagtttgatgtgaccaaaatggaactaaatggttacagtattagcgtttgcagatgacattggagaggaaaccatgaaggatccagttaatgggcccttgaaggtgagtatgggaagcttggacgtcactgaccctgtctaggtttagatgccccaaacattccacctaggctttcgctcagccttattcctggcacccaccttccaccacccaatatgagtccatcctccacrctgatgctgtcatgatcttcctgaaacacaacttggcctatcccagcactccctccttcagctccttcaatgtatccttatggagtaaagtccaaactcctaagcctgcctttcaaagtcctccacaacctccttttgagcatgatccttcatgcacctgtccttctacaggccccacctctctggctgactcgtgttgggccctctacccattctccttcctctctgcaacctcccttgccttctcccagggtcttctgttgaag

SEQ ID NO: 538488 - DNA, 468 bp, Homo sapiens
agcaagagagggccagcctcctagaaaatgtttacaagcttcaaagaagacgtgcttgcatgggacagcacgagaaacatccccaggtgcgtgtcagagcaatgctggcagccctttggtctcacccagtatgaggctgtagagagcaggggttctcagcagaaatccctcctgaaacaaragctttcccctgggtgccacctttgtgccttcaaatacgctggtttaggttgtatgtacatgttccacctactcccacttgcagatatttctgcaataagttaaaaaatattttgcaattgtttgccattgatgggtcatttgtttttcaattacttggtgccatttttagaaatgtcctatcaactaccactattcagctatggcattctattgctggtgtgagcccacacatctgggcacactttcctataagaaaggtcttactgagttctgattggttgattt

SEQ ID NO: 538489 - DNA, 618 bp, Homo sapiens
gaaaatcataatgggaggtaacatttattaagcaatgaatgtatcaggcccagtactgagtatgtcacttgaataatttcatttaatcctcacaacaaccttctaaggtaggttgactaatattataaatatttgcattttacaaatgaggaaactgaggcttagctaagttaagtgacctgctcacagtcccatagcttgtaaacagaagaggtgggatttggtaacattaatctaggtcagtggattttgcatgtgaaattctaaaaatgatttaaaaataaaggtgcacttcagcatgttctcactcataagtgagagatgaacaacgagaacacatggacacagggaggggaacatcacactctggggcctttcagggggtgggggcctaggggagggatagcattaggagaaatgcctaatgtaggtgacaggttgataggtgcagcaaaccaccatggcatgtgtatacctatgtaacaaaactgcaygttctgcacatgtaccccagaatttaaagtataataaaaaaataaaaataaaaacaaaggtgcacttaattgcatagttgataaaaagtgctcctcagtgaataaaatggaaaaatgttctgag

SEQ ID NO: 538490 - DNA, 597 bp, Homo sapiens
gatggttactaagttctgtaggacagtcggaggtaccccaagagggcaaagctgggcccctacccagcattacatgactctgaacaacaagaaattatggaaggatgggtgtggtggctcacacctgtaattctagcacttttggaggctgaggcaggaggatcctttgagcccaggtgttcgagaccagccyggacaccacagggagaccctgtctcaaaaaaaaaaaaaaaaaaatatatatatatatatatatatatacatatatatatatggaaaggttccaaagagcaccatcctgcccaagtcacttctgtatttattctcatagatgcctatttagtctgtaggcatgggctacttgtaggttcagtgccagaaacagcactggatattgcagcacatgtaacattttgcaggtaagatgtaaacccaccttactcccttctttaccctctcctcctgtggcttcttccatctccctcacctattccaggaggctttgatgtaaggttttttgttagtatgctcagtgagtagggagcagtcagtatagggaggtgggtgggagccatgattgtctccctgtcaccacaa

SEQ ID NO: 538491 - DNA, 597 bp, Homo sapiens
gatggttactaagttctgtaggacagtcggaggtaccccaagagggcaaagctgggcccctacccagcattacatgactctgaacaacaagaaattatggaaggatgggtgtggtggctcacacctgtaattctagcacttttggaggctgaggcaggaggatcctttgagcccaggtgttcgagaccagcctggacaccacagggagaccctgtctcaaaaaaaaaaaaaaaaaaawatatatatatatatatatatatacatatatatatatggaaaggttccaaagagcaccatcctgcccaagtcacttctgtatttattctcatagatgcctatttagtctgtaggcatgggctacttgtaggttcagtgccagaaacagcactggatattgcagcacatgtaacattttgcaggtaagatgtaaacccaccttactcccttctttaccctctcctcctgtggcttcttccatctccctcacctattccaggaggctttgatgtaaggttttttgttagtatgctcagtgagtagggagcagtcagtatagggaggtgggtgggagccatgattgtctccctgtcaccacaa

SEQ ID NO: 538492 - DNA, 426 bp, Homo sapiens
gcaaggccagggataaaaaggcccccctctaacttggtcaccccagccttcacactgacacctcagttgttaagggccccatgttaaagctggagagatccaaagggaggggcagacaaactggtctttggggagattccaagctacggcaggaccaccctgttagactctgaggttgggagctgcaacttgtgcatgatggcatcccctggggcccaccatggtgctaggcacacagggcgtgctccttagatgttggttgagcttgaacttgcagtctgttcacttggaacacctctccctcaattctttgcaygcctggctctctcctgtcgcgcaagagtcagctttaatatcatctccccaaaaagggcttccttgatcacccagctacagtggcccccaacaatgtgccactaaaccatg

SEQ ID NO: 538493 - DNA, 671 bp, Homo sapiens
tagtggcagcacacagggtgggtctatacccaaaccactgcacagtrggtgcaggcccacgcactgactttttcatgagcactcagtagagtccacagataggagttggtgaatgaatattaactcccttttggtgccctcactattctagactggcacactaacccacacttagcctttggaagctcctttaaaatgtgattggtttcttcttccccacttgtattgtggcctacagctttttctcatgtggtttgctacaggtgagagagtttatgtcttttatctctccttagaagggtttatctctctttcaaactcagataactctattttcctcagttttctgattggttcaataaagttatgattttgcttttttctggacttttctcattgttgtgatgagaacaatagtctttgcagctttttaacacaaagcagaagtgaaaattcatgcttaatttttaaaatttctatgataatgatgacatcgaactattagtaagtgtatctcaaggtaaaaggtgttcttaggttgagtttcctaattaattaatattctagatcatttaaaattttggacaagttcttgttagatctgtttagacaaacattgctttttattgaaatatggctgaaatgttcattattaagagtggagagaatgt

SEQ ID NO: 538494 - DNA, 674 bp, Homo sapiens
tccttccagcaaaagttgatgcccttcaatgcccttcaagccacttcatattttcccaattgattcagtttcaaagtcagttctcatagtacatatttaatcggttgatctaagtcacatcaagagctttagctgcaaaggagtctgataaatacaggttttagctyttcaagcctctgtataacagtatgtcatattagaaggaagttgcaataaatatcaagtaggtcttatacccatttttagaatcataaagccactattttgacaggttaaataacttacctaaggtcacacagcagttaataaaaggagagaggttcaaaataagacctcctggctctaatgctgtctgtacctatatcctaagcagtttgttgttatctctggcataacatttatttcattaggtttgctgtatattcactcatctgctttgattaagacaaacttgtccaaccctcagcctgtgagccacatgtggcctaggatggctttgaatgcagcccaacacaaatcagtaaactttcttcaaacattgtgaggtttttttgcaatttttttttttttgagatggagtctcactctgtcaccaggctggagtgcagtggcgcaatcttggctcactgcaacctccacctcctgggttcaagtgattctccagcctcagcctc

SEQ ID NO: 538495 - DNA, 663 bp, Homo sapiens
atagaggacagagggcatgtactgtggtagtgtctgtccctagcttcctggcatcaagaggtggtggaggcagcagaggatgtggatccttgggtagcaggcatggcggcgtgtctttgaactcagcagttccagtagtggctttctggaggcccatcctagaatcccgtcctcccaccctttcaatcactttgtattacttcattttctgtattgcatttctgtgtgcttawaataaccaactttctgtattctgcatagaacactgcctctacgaggtcataaacaatgaagaaattcctgtcttgcttgccactaacctaggtgcagaactgagggccccaacagtagtggagagtgggagataatgaagggaaaaccaagccaggaagtggcagggccaggggaagggagtatgctgttacatgtgctgttacacttggttgtggggagaactcagagaggctttccaaatatatacaaggatgtcatcatgtttactggaatgtaaaatgttcatagtgcctaggcttgtcattaaaaacaagaatgggcttggactacataatgagcagaaatacctattaatctaagtcctcgtctggaaaaagtgtagaggaggtgggcaccacttattaaatgtatcttatgttttataaacca

SEQ ID NO: 538496 - DNA, 598 bp, Homo sapiens
ctgcccgtctgaaacctgggcaatggtctactccatagttcagcgcttaaagtccttactgtgctaattccgctcagcttcacacatgctcagttcaggagtaagctcaacacttycttatacacagctttaaaggatccttttctccagcaccttcttcataattccccactctatcctgcagtctctggcctttagggtttccccttcctgatgtctggctagaaagctgaggcattatcctacctatagggtctgctgtactggtgaggaagggaagaagctctgcctcttgctggcatttgcctggtgtagggcagagagactcaacaggactctgcccctcagggaccacctcagctaccagtgagagtagcagggggaaccaattctttgctggtgtttgcctggagtagggccgataaagtcaaaaggatttagaccgatggggtcctccctttccagagactctggcttcctaagggcttatttctgtctgtgtccagatttcaggctgcttcagtacccagaacaaaatctatgagaggtcaaaaaaaaaaaaaagacacaaagacacaagaaaaatgtctttagagaa

SEQ ID NO: 538497 - DNA, 598 bp, Homo sapiens
ctgcccgtctgaaacctgggcaatggtctactccatagttcagcgcttaaagtccttactgtgctaattccgctcagcttcacacatgctcagttcaggagtaagctcaacacttccttatacacagctttaaaggatccttttctccagcaccttcttcataattccccactctatcctgcagtctctggcctttagggtttccccttcctgatgtctggctagaaagctgaggcattatcctacctatagggtctgctgtactggtgaggaagggaagaagctctgcctcttgctggcatttgcctggtgtagggcagagagactcaacaggactctgcccctcagggaccacctcagctaccagtgagagtagcagggggaaccaattctttgctggtgtttgcctggagtagggccgataaagwcaaaaggatttagaccgatggggtcctccctttccagagactctggcttcctaagggcttatttctgtctgtgtccagatttcaggctgcttcagtacccagaacaaaatctatgagaggtcaaaaaaaaaaaaaagacacaaagacacaagaaaaatgtctttagagaa

SEQ ID NO: 538498 - DNA, 566 bp, Homo sapiens
gaatgatgcagccaaaataaacaaaaatgtgcctctgatatatgtggattcttgcatgaaattaaagggaccggggcacaggtaatwttttttagctttttacatttaaaagttatgaaattggtaaagaaaggaggatttggaaagtgaatagaaacacccgaagacaatttcaatgatttccctcacccctgtcctccttaggttgtggcttacaataccaacatgcaaggcttttgggaagggtcaatttaacatgattcccctaagctaggagctttctaaatggtcccataaccccttgtaccggcctccatcataacactgatatcactgcactatactggcatatttatttctctcacttctctcctaggttatgagcttttcaaaggcaggtaatctgacttattggccattgaatcatcagcacctgtgatgtgcctggtatataacatgccctcaatattttaatataaactagaagaacatcatagcaagctttgcaaactgttcaagacggtgtaacaaggaaatctcacagggagggagacaaatgttatgaa

SEQ ID NO: 538499 - DNA, 453 bp, Homo sapiens
gataggtcaggcagagggggatgagcgggcactcacatccartgtgtgtgtacgagcaattgccaaagttaaggacgacaaggggtaaatttttttttttttttttgagaccaagtctcgctctgtggcccaggctgcagtggtgcagtggcgcaatcttggctcactgcaacctccacctcccaggttcaggcaattcttctggctcagcctcccgagtagctgggattacaggcatgtaccaccatgcccggctaattttttgtattttttgtagagacggggtttcaccatgttggccaggctggtctcgaactcctgacctcaggtgatccgccccccctaggcctttcaaagtgctgggattacaggcgtgagccaccgcgcccagccaaacaaggggtacatttttaagatagaaggaaaagtcatcagggaaggtgggttagatca

SEQ ID NO: 538500 - DNA, 453 bp, Homo sapiens
gataggtcaggcagagggggatgagcgggcactcacatccagtgtgtgtgtacgagcaattgccaaagttaaggacgacaaggggtaaatttttttttttttttttgagaccaagtctcgctctgtggcccaggctgcagtggtgcagtggcgcaatcttggctcactgcaacctccacctcccaggttcaggcaattcttctggctcagcctcccgagtagctgggattacaggcatgtaccaccatgcccrgctaattttttgtattttttgtagagacggggtttcaccatgttggccaggctggtctcgaactcctgacctcaggtgatccgccccccctaggcctttcaaagtgctgggattacaggcgtgagccaccgcgcccagccaaacaaggggtacatttttaagatagaaggaaaagtcatcagggaaggtgggttagatca

SEQ ID NO: 538501 - DNA, 453 bp, Homo sapiens
gataggtcaggcagagggggatgagcgggcactcacatccagtgtgtgtgtacgagcaattgccaaagttaaggacgacaaggggtaaatttttttttttttttttgagaccaagtctcgctctgtggcccaggctgcagtggtgcagtggcgcaatcttggctcactgcaacctccacctcccaggttcaggcaattcttctggctcagcctcccgagtagctgggattacaggcatgtaccaccatgcccggctaattttttgtattttttgtagagacggggtttcaccatgttggccaggctggtctygaactcctgacctcaggtgatccgccccccctaggcctttcaaagtgctgggattacaggcgtgagccaccgcgcccagccaaacaaggggtacatttttaagatagaaggaaaagtcatcagggaaggtgggttagatca

SEQ ID NO: 538502 - DNA, 453 bp, Homo sapiens
gataggtcaggcagagggggatgagcgggcactcacatccagtgtgtgtgtacgagcaattgccaaagttaaggacgacaaggggtaaatttttttttttttttttgagaccaagtctcgctctgtggcccaggctgcagtggtgcagtggcgcaatcttggctcactgcaacctccacctcccaggttcaggcaattcttctggctcagcctcccgagtagctgggattacaggcatgtaccaccatgcccggctaattttttgtattttttgtagagacggggtttcaccatgttggccaggctggtctcgaactcctgacctcaggtgatccgccccccctaggcctttcaaagtgctgggattacaggcgtgagccaccgcgcccagccaracaaggggtacatttttaagatagaaggaaaagtcatcagggaaggtgggttagatca

SEQ ID NO: 538503 - DNA, 635 bp, Homo sapiens
gaaagtcccctcaaatatgcaagtrctcacagatgattttcaggaaatactgttcgttttactgtgataatggtatatttgttgttaaaagaaaaaagagtccttatcttttaagagatacttactgatgtcttcatggatgaaatgatgtgatgtttgggatttgcttcaaaaagtcttaaggggtagtgagaaagacaggataagaaaataaatgaaatgtacttattggtgttgtgtatatttgaatccatttcactattctcttggcttttggagatgttttaacagttttccataagagcgttttttaaaatgtagttgctcagaaaatttgtgccagttgatttttactcaccaggaagtcgactcccgcttaaactaaggccaccaccctctttcacagagctccaccctttagcacaagtcacctcatgccactcagagaaccatctccagccctggttactttttgtgaatgcaccaggtattgctccacagagtcatctctggagaaagtttttttctttgtctttggtcaatgatcctctgtccctcttggcagactgactccagtggccttttattttcagttattccatcctaaccccagggaatcctaagaggacccgccc

SEQ ID NO: 538504 - DNA, 564 bp, Homo sapiens
atagtgagtgctattgagctctttacaagcacaagacatgttctaagtacttaacatgagttaacttaattaatcctcctaacaatgctactggctaggtactatattttccctattttacaggtggaaaaactgaggcacrgaattaagtaactggttcaagcacacagccagttagtaggagatggagaattgagcacagaagcctatccatggcccaaagttgccctgtggggtgtactggggtagctgacagcggggggctggctaaatacagccacaggtaaaggggaagctatcagggactgctggaacatgttagagtggatatgctgccagattccaatttaggcagattttaaagattaaataaaaatcgggtggactctttcagccattggccaggcactaaagtcaggagggaactttggagtgaggacctcctagacttccctggcagcagcagcctggagcctgagggtcatttacaacaggccagggcctctctttgaggtctgttgcatattctgtgtctgtgagtccctcaggcccctggtagagagg

SEQ ID NO: 538505 - DNA, 564 bp, Homo sapiens
atagtgagtgctattgagctctttacaagcacaagacatgttctaagtacttaacatgagttaacttaattaatcctcctaacaatgctactggctaggtactatattttccctattttacaggtggaaaaactgaggcacagaattaagtaactggttcaagcacacagccagttagtaggagatggagaattgagcacagaagcctatccatggcccaaagttgccctgyggggtgtactggggtagctgacagcggggggctggctaaatacagccacaggtaaaggggaagctatcagggactgctggaacatgttagagtggatatgctgccagattccaatttaggcagattttaaagattaaataaaaatcgggtggactctttcagccattggccaggcactaaagtcaggagggaactttggagtgaggacctcctagacttccctggcagcagcagcctggagcctgagggtcatttacaacaggccagggcctctctttgaggtctgttgcatattctgtgtctgtgagtccctcaggcccctggtagagagg

SEQ ID NO: 538506 - DNA, 569 bp, Homo sapiens
accctgtctcaacaacaaaaaaagaactttacaaggtaggagttactatgatcttcatttgcagatgaaaaaattaggactaggccatattsccagaggccctgctggtgcattaagagagcctggtttttcaaggctgtggttacacacgaacaaaagaactggtcatgtcattcatctgcgattcttcagcaaagcagccagactgctcagtgacatacttagctagttccaagaaataattgtcagttcaacaaagaactaaaatttaaaaaataaaataaaatccccaaagcagagagcccagtattttttcattgagttaactgattactttgcagaatccaagaatcctactgaggtcttgaggtcatcaggacccagggtgagtcctgcccctgctgtgagtctcagggccctgcttgttcttggaagccaatgtatcaagggtggactctcggcaaaggtgtgaggcagatgagacttatcaacagagaacacgtccttccctcctgtgccatccacttcccccagcctcatccccactcttgcctcactccagaacttat

SEQ ID NO: 538507 - DNA, 517 bp, Homo sapiens
gcttgaacctgggaggtggaggttgaggtgagccaagatggtgccattgcactccagcctgggcaacaagagtgaaactccatcttaaataataataataataatgataataattcttatctggaagatgggaataacagattgtgactgaagctgtagccagtcagagcagtcactcattagccaggataagaagctacttggtcatttgtggtctggatgacattcttgcttttgtctgtgctccaacttggtgacagagtagtcttggttttgtgctgatccacctctgtcacagagtggtctttcctgattgtcagtgttctatgaaattattgtgtttgttgggagaacgccacagcctagctgtgtgtgccaggccagctcttggtattaggggctgctttcctcattttcaggctgaatgctgtccrggagagtcgtttgcccttgagcagactgaccgagttgtcagggaaggcaacttcagtcttgtgagccttccaagaaaccatgt

SEQ ID NO: 538508 - DNA, 566 bp, Homo sapiens
accaagacatagaaggctctgatgtcctcttttcctttgccttccatcccattacatcatgtttatttcttaaatgttcaatcgttccttctgccaaaacactagaaaaccagaaagttctctcacataccacagctaatccttcagcagttgtgttgtttctgccttcaaaactcatgtcaggtttgcccgcctctgaccatctcccctgctcccatccatggcccaaccactgtgatctctgggcaccagcttagtggcctgctggtgagtcttccactccatacttactttctaccatccacagtagacaaactggtcctttaaaaagcaagtcagatcatgtcactctcctcagagctcccagtgaggtccccaacacatctaagaataarctccaagacctttaccatggcctacaaggccacagccaaaagtcctccttccctggcccagctcctgctggctcctctgccttcctctcctgctcccctccccagtactcactctgctacagccccactggaccctgcctggccctgcagccattccccagacacaaccag

SEQ ID NO: 538509 - DNA, 622 bp, Homo sapiens
cgtaagtaaacaaaaaatgagaagggacaggagaggcggctctgcccagcratttatgtacagagatgttttgccgtgcagttgcctctgtgacacagccaatttctcgtcttctccgcctccttttctctccttaggttccgttggctctagattcccctctgacagggctttctatggtgtccacgatgtaccagttaggatcactttgggctacatgtaacaaaaagccaactgcagaggcttcaccaaatggggctttagtttttctagctgaataaaaagtccacatgttcgcagagcagggcagagacttgaggaagccatggagtgtccttcaaccagggtccttctagtttcctgctctgctgtcctgactgtggtttttgtcttcgtggttgcaggctgggtactgcaggtgagacagccaggtgggagggggtccttggagaaactccaaccagcctgcccactgaggtggagccacaggaagttcacaacatttgcagcagggaggagcctggcccctcctcttcctgtgtggaacctgggattcaaacgacatctagcaggagactctggccttgtggagagtccctgtttccctcttttcttccttttt

SEQ ID NO: 538510 - DNA, 652 bp, Homo sapiens
ctcgtaagtaaacaaaaaatgagaagggacaggagaggcggctctgcccagcaatttatgtacagagatgttttgccgtgcagttgcctctgtgacacagccaatttctcgtcttctccgyctccttttctctccttaggttccgttggctctagattcccctctgacagggctttctatggtgtccacgatgtaccagttaggatcactttgggctacatgtaacaaaaagccaactgcagaggcttcaccaaatggggctttagtttttctagctgaataaaaagtccacatgttcgcagagcagggcagagacttgaggaagccatggagtgtccttcaaccagggtccttctagtttcctgctctgctgtcctgactgtggtttttgtcttcgtggttgcaggctgggtactgcaggtgagacagccaggtgggagggggtccttggagaaactccaaccagcctgcccactgaggtggagccacaggaagttcacaacatttgcagcagggaggagcctggcccctcctcttcctgtgtggaacctgggattcaaacgacatctagcaggagactctggccttgtggagagtccctgtttccctcttttcttcctttttatccaataaaaccctgttttactcaccc

SEQ ID NO: 538511 - DNA, 622 bp, Homo sapiens
cgtaagtaaacaaaaaatgagaagggacaggagaggcggctctgcccagcaatttatgtacagagatgttttgccgtgcagttgcctctgtgacacagccaatttctcgtcttctccgcctccttttctctccttaggttccgttggctctagattcccctctgayagggctttctatggtgtccacgatgtaccagttaggatcactttgggctacatgtaacaaaaagccaactgcagaggcttcaccaaatggggctttagtttttctagctgaataaaaagtccacatgttcgcagagcagggcagagacttgaggaagccatggagtgtccttcaaccagggtccttctagtttcctgctctgctgtcctgactgtggtttttgtcttcgtggttgcaggctgggtactgcaggtgagacagccaggtgggagggggtccttggagaaactccaaccagcctgcccactgaggtggagccacaggaagttcacaacatttgcagcagggaggagcctggcccctcctcttcctgtgtggaacctgggattcaaacgacatctagcaggagactctggccttgtggagagtccctgtttccctcttttcttccttttt

SEQ ID NO: 538512 - DNA, 652 bp, Homo sapiens
ctcgtaagtaaacaaaaaatgagaagggacaggagaggcggctctgcccagcaatttatgtacagagatgttttgccgtgcagttgcctctgtgacacagccaatttctcgtcttctccgcctccttttctctccttaggttccgttggctctagattcccctctgacagggctttytatggtgtccacgatgtaccagttaggatcactttgggctacatgtaacaaaaagccaactgcagaggcttcaccaaatggggctttagtttttctagctgaataaaaagtccacatgttcgcagagcagggcagagacttgaggaagccatggagtgtccttcaaccagggtccttctagtttcctgctctgctgtcctgactgtggtttttgtcttcgtggttgcaggctgggtactgcaggtgagacagccaggtgggagggggtccttggagaaactccaaccagcctgcccactgaggtggagccacaggaagttcacaacatttgcagcagggaggagcctggcccctcctcttcctgtgtggaacctgggattcaaacgacatctagcaggagactctggccttgtggagagtccctgtttccctcttttcttcctttttatccaataaaaccctgttttactcaccc

SEQ ID NO: 538513 - DNA, 506 bp, Homo sapiens
atactgttctccatgccatggtcactcatattcactcagaataaacctctaagtagtttacagagttgttgtttttgttgttttctcactgacccatcaaaataagtagttttctgaatccacttcctcttttggaaagtagtacacacgctcatctcttctgtgctgagctgatttctgaaataaaatcaaaagaagttcatcattacaattgcaacttctctagttccttgggttataatctatatccattgggattcaaactgaaacacaaatactaggtggaatcaagaattcattctagggatttgacttcaggcacttgcggacgcttgtcttacatctggtgttggagtctgaattctgcagggcagcrggtcagggtggcaaggcagatgcagagcagggaagtgaggacagactggagccatcttctgccttgtgttgtctccaagtctggcccctttggctcaaggacctaaacatgtgctgcctgggtctgagag

SEQ ID NO: 538514 - DNA, 626 bp, Homo sapiens
aaagttgtaccctgtaagacaatgctaaagcagatgacttaattagaggaaaccaaataatttgcctccactgcttcatatggctattcataagattgctttgttggttcccagaccagaaataagcatagagacccaggtgtgtcatctgtgttttttcatcccaggtgagccaggaataaccatgttatttctgacagtcatcaaaagagaaatttgggttttgctgcagataagaaaataagaggcaacagctcacagtggaagtatcccagcagattaaaaaaaataatattacagccttgtcatccagactggttctcaattttatcatgcctgagaattacctaagacttgttaaaatcaattgccggggactatcctcacagtctctgattcagtaggtccaggatgggccctgagaatgtgcatttctaacaagttgccaggtgatgctgatgcagctagttccgagtccacaccttgagaatcagtactctaaagcagtgattctcagccctggctatatrttataatgccccgggggagatttcagaaagcatttcctggttcccacccccagagatcctgacctaattgaatgggggttgggcctgagcatctgg

SEQ ID NO: 538515 - DNA, 609 bp, Homo sapiens
tgtttgttatcaattcagattctactttgtactttgtggamcccaataatgtaccagcaagaaactcgagtctcctatgttgagaaaaatgtgactttggctgtaaggaggtttcaagaggcaaagatttttagtctccctgaacaaaattttgtgttttgtttttttttccaggagaggttcatatcaatgcttggaatatctgaagtacaggcattctggaattaatgaatataccacccattcaagcaagtcagggagttgtgttgcaaatgggaaggcttctcatgggcctggagaccagaaggcaattgcagaccccttcctcttcccagggcagccagctcaccaagcttctgtcacactggcctctttctgttcgtccaacacatgactcatcttttgcattggggcctttgtatctatgtacattctgcctggaaggctccttgaactctgctctttttttttcttagctcaaaaatcaagattttttttcccctgactgtcttatctaaagtagactttctcaagttagggcgtctattctagtctacaattgtatgttattgcaggtcattattatctggctcccttcacctccatgta

SEQ ID NO: 538516 - DNA, 609 bp, Homo sapiens
tgtttgttatcaattcagattctactttgtactttgtggaacccaataatgtaccagcaagaaactcgagtctcctatgttgagaaaaatgtgactttggctgtaaggaggtttcaagaggcaaagatttttagtctccctgaacaaaattttgtgttttgtttttttttccaggagaggttcatatcaatgcttggaatatctgaagtacaggcattctggaattaatgaatataccacccattcaagcaagtcagggagttgtgttgcaaatgggaaggcttctcatgggcctggagaccagaaggcaattgcagaccccttcctcttcccagggcagccagctcaccaagcttctgtcacactggcctctttctgttcgtccaacacatgactcatcttttgyattggggcctttgtatctatgtacattctgcctggaaggctccttgaactctgctctttttttttcttagctcaaaaatcaagattttttttcccctgactgtcttatctaaagtagactttctcaagttagggcgtctattctagtctacaattgtatgttattgcaggtcattattatctggctcccttcacctccatgta

SEQ ID NO: 538517 - DNA, 565 bp, Homo sapiens
ctgctcagcccctctcagaactttgagaaggaaacaagatggaagctcctccaccttggattaatttgctcaaggtgttctcctaagattatgacttatactccttggaaatttgtgtaattgatgcctttggaaaatatgtccaagactcacctttcactctgttcyggaatgaaggctgaatccagagaagctcaccctgctcccttctccaacgtgacacagaataaagagggtcagagtacaggtcttttattgttttaacctgaaccctggaagccaaagcctgcacaggcttatcttccacaagtatgggtcaatcactttgacctattgactctgcatctggtcaagcactccagaacgccatggacagctataggattccccaatgagcaaatgttgacttaccctgtgggtctcctgacactattataaagtctattccatcagagactaagttgttaaaaaaatgaagaacttggttttagtttattgtctgttgttcaaggagtatttatgcaaaattgcaatattactactccacatgaaccaatcaatatac

SEQ ID NO: 538518 - DNA, 572 bp, Homo sapiens
aaataaataatatcatgataagtagtggtagtggtcattgtgatagagaaaaatagcagaggaaggagataagaagggacgggggtggggggtgggtgggggatactaaggagatgatacttgagcacagaaggaatgaactatgaatatcccaggaggagaaaagcaaggacaaatgccctgagaggcactgaattttgagtgtcacggaatggtaaattcatgcatgacaatgtcttctctctcctcttctttcttttatattaaacacatctgcttctcggcaaaggatctgtgtaaagcaaggcatcatcttactgcaaggggagacatcgytggggtctggttagaagatctggctctattttctccaatgaaggtctttataggaaatctgcattagtgccttgtccatgttcatagaccctctgcttcatggcagaagggcgctgacttgaaggcccctaagcagcgaaggaaggggagcctctgtcccctccctagctggcttccctggcacatgctggtttccctccaattctgtggtgcacatcatgaccagcagaggaaag

SEQ ID NO: 538519 - DNA, 664 bp, Homo sapiens
tcagctgttagctgggtcacatgattctcatcttccagcaggctagcccaggcaggcgttcrtggcagtgtcagaaggcaagagcaagagcaagtctcaatatgcaggtcctttacaagcctctatttgcatcatgtttgctaacagcccactgggcaaagtaagttgcatggctgagcccagaagcagagagggagggcaccacacagttacagaataaagaacatgaacacttgaagaaataaagaattagggccccaaatactatctccccacagactctgtgctcacttaattgatgccacctcatttaatttcacaataactctatagatatttttactattacttccagtcaatagatataaatactaaggataagagaaagaccaaccaagtggtgatgaatagagtcactacctcttcccctcttttatagggtcttctgtctgcatatatgttagaattctcaaccttgattatttatagaaaagatatggaaaattatggcaaagagagcgagagagagagagctttcaaatagaatggtgtttggcagagaatggcaaagttaggagctaaagagcctagtctatatattccacttgcgtgtgacctggagccgctatgttttggccactttctccaatttggaataactgta

SEQ ID NO: 538520 - DNA, 664 bp, Homo sapiens
tcagctgttagctgggtcacatgattctcatcttccagcaggctagcccaggcaggcgttcgtggcagtgtcagaaggcaagagcaagagcaagtctcaatatgcaggtcctttacaagcctctatttgcatcatgtttgctaacagcccactgggcaaagtaagttgcatggctgagcccagaagcagagagggagggcaccacacagttacagaataaagaacatgaacacttgaagaaataaagaattagggccccwaatactatctccccacagactctgtgctcacttaattgatgccacctcatttaatttcacaataactctatagatatttttactattacttccagtcaatagatataaatactaaggataagagaaagaccaaccaagtggtgatgaatagagtcactacctcttcccctcttttatagggtcttctgtctgcatatatgttagaattctcaaccttgattatttatagaaaagatatggaaaattatggcaaagagagcgagagagagagagctttcaaatagaatggtgtttggcagagaatggcaaagttaggagctaaagagcctagtctatatattccacttgcgtgtgacctggagccgctatgttttggccactttctccaatttggaataactgta

SEQ ID NO: 538521 - DNA, 500 bp, Homo sapiens
gttttaggaatgagatgagatttgatttttactctcaactttgttcctcactagctgtatgaccttgggtaagttacttaacatttccaagcctcatattgtctacagaatgaagattctaatgaacttacctcataaagttattgtgagaattaaattttaaatgtgtgcaaagcatttttttatacttgttattattatctggagagaaatcctggattctcaataataaaacttgtctacttgaaatctctcacaaaggttaaagaaaatacaattcaatttctgctggcagattcctctyaaagatgcctattatttttttctcctaaaactcttgctccccaaaatgaacatttggctgacagcttagccagaatgcagagtggctcccagggaaagggggcaccttccaaaaatccatgatgaatatccttcagctatataactccacaggcttaaattctactttgtagccagggcctagggcattaaccttc

SEQ ID NO: 538522 - DNA, 643 bp, Homo sapiens
ccaccatgcaagggacccaggtgggaggaagccagtaggtttgcaggctagcaatccgttcktggggtctgcacactcgcagtcagccctcaggggctacaaagtcagccctcggggtctgcacactggccgtcagccctcggggtctgcacgctcgcagccagccctccgttctgtctcccctgcaggagttcatccgtctgggcagcctcagcaagctctcggggaaggagctccagcagcgcatgttcttcctggtgagtggagagagtggcttgtcctcacaaggactgtgtcacctgggcaagcaaggctcccgaggccggacctcggccacccaagtgagtgatctggggtagaggaggagcagccagaggtgcccaggcccaagttgttgaggacagtgaaggcacagttgaggacagggaatgctggagggaggcctgctgttgaacaccaactcttattttgaccttttaaaatgtatagatgcatactttctactgattttattgaattattactatagttaccataagtgctaatctgttgccaattatgtgttcctatttataaagaataagtaaagatccagttgagctgtataaatgcaaaactgtatagcagtgttaggaatgttata

SEQ ID NO: 538523 - DNA, 705 bp, Homo sapiens
ctgtttaactgaactggtaattrcattgactatattaggctctaagaaaaactaaggaaacaagagatggtttccccctattcttttgcaggaataaaaccacacaataaaagccctaccagacaattttcacatgtgaatccatctgttctgtgagtatactctggaggtgtttgcttcagatcaaatcaggctataaaaagagaactgaatcttgatcaggggttgccagagtatggccttctttagagctaaatgacagctctagttatagattttgtttctaaggatgacattggtgctgcagtacattgcaacaggaatgcatcagtgtgagagcacttatgatggtttcctttccccctcagcataaaaatagcttgtccctctaggaaagatagcctgactttattaatgaaagtgaaattcttcctaaggccctaacagtatatttaaaatgaatagaaagcaccaccaatgacagataagatgaattttgcccaaattgtcctggagccctttcctatgtattttggagaatatgaaataaatacatgggttaccatatcttctgaaaagatattgaagacacatttctttactctgactttcctatatgtatttcattctatacttacacaacttaaagttactgttctgagaagtggtttccagttttcccaatgagaagtaaaaatgagttct

SEQ ID NO: 538524 - DNA, 612 bp, Homo sapiens
tgcaagcatggcaccagcatctgctgggcttcggatgaggcttcaggaagcgtttactcatggaagaaggcaaaaggggaacaaatgtgtcccatggtgagagaggaggaggtgccaggctctttaaacaaccagctctcacatgaacaaatagagtgagaactctcattcattaccatggggaaggcaccaacccgttcatgagggatccgcccgcatgaccaaaacaactcccattaggctcctgccccaacactggggaccacgtttcaacgtgacattgggaagggaacaaatttccaaactatatcactagcatatagtagaacttactrtctgccaaccattccactcaatgctaataaacatatttatgacattaatggattcatgatcaatgtattatttcatttaatgttctttacaaccctatgaggtaggtactattaataatccattttaaagccaaggaaactgaagcacagagaggctaagtcattcttgacataaatgctaagtgatggagctaaaattaaaactctagatattaggcttctgagtctcaagcatcaaacacaatgtaatgaatgtgaaataagggtaggacactag

SEQ ID NO: 538525 - DNA, 612 bp, Homo sapiens
tgcaagcatggcaccagcatctgctgggcttcggatgaggcttcaggaagcgtttactcatggaagaaggcaaaaggggaacaaatgtgtcccatggtgagagaggaggaggtgccaggctctttaaacaaccagctctcacatgaacaaatagagtgagaactctcattcattaccatggggaaggcaccaacccgttcatgagggatccgcccgcatgaccaaaacaactcccattaggctcctgccccaacactggggaccacgtttcaacgtgacattgggaagggaacaaatttccaaactatatcactagcatatagtagaacttactatctgccaaccattccactyaatgctaataaacatatttatgacattaatggattcatgatcaatgtattatttcatttaatgttctttacaaccctatgaggtaggtactattaataatccattttaaagccaaggaaactgaagcacagagaggctaagtcattcttgacataaatgctaagtgatggagctaaaattaaaactctagatattaggcttctgagtctcaagcatcaaacacaatgtaatgaatgtgaaataagggtaggacactag

SEQ ID NO: 538526 - DNA, 578 bp, Homo sapiens
gctgtttacagaaaaataaaaccacagaattattcctgttacctgggttgaagaacctaatagctaggtgtaaatttggataaggtacagtaattcgaaataagtagtgcatgaagttttaatgtctggtttctctataaagcataaatagattttaaataccttatatctgtgacccagaatgtcaaattacagcatgtattgacagtagctgtctatggcagagaggcaatacttggtctgctatgaaggacaawaaagaaaaaacatacttttttttttcttgagagaaaagagtattaaatagaaataatatcagggaaaataaaagcctggtcccaaaataaaagggccattaaatgaagagaacgattttactttttcttgacaataaacagcattatccctattattaggaataatgtaataccacctcattcttattatgtattataatcattatgtatatatgaacgcatatataaaaatacagacactgcatagtgactaagcaattttggaataaatccatagactaagtcacaacatgcataaattgtttatatcttaactgctca

SEQ ID NO: 538527 - DNA, 578 bp, Homo sapiens
gctgtttacagaaaaataaaaccacagaattattcctgttacctgggttgaagaacctaatagctaggtgtaaatttggataaggtacagtaattcgaaataagtagtgcatgaagttttaatgtctggtttctctataaagcataaatagattttaaataccttatatctgtgacccagaatgtcaaattacagcatgtattgacagtagctgtctatggcagagaggcaatacttggtctgctatgaaggacaaaaaagaaaaaacatacttttttttttcttgagagaaaagagtattaaatagaaataatatcagggaaaataaaagcctggtcccaaaataaaagggccattaawtgaagagaacgattttactttttcttgacaataaacagcattatccctattattaggaataatgtaataccacctcattcttattatgtattataatcattatgtatatatgaacgcatatataaaaatacagacactgcatagtgactaagcaattttggaataaatccatagactaagtcacaacatgcataaattgtttatatcttaactgctca

SEQ ID NO: 538528 - DNA, 618 bp, Homo sapiens
tgtttacagaaaaataaaaccacagaattattcctgttacctgggttgaagaacctaatagctaggtgtaaatttggataaggtacagtaattcgaaataagtagtgcatgaagttttaatgtctggtttctctataaagcataaatagattttaaataccttatatctgtgacccagaatgtcaaattacagcatgtattgacagtagctgtctatggcagagaggcaatacttggtctgctatgaaggacaaaaaagaaaaaacatacttttttttttcttgagagaaaagagtattaaatagaaataatatcagggaaaataaaagcctggtcccaaaataaaagggccattaaatgaagagaacgattttactttttcttgacaataaacagcattatccctattattaggaataatgtaataccacctcattcttattatgtattataatcattatgtatatatgaacgcatatataaaaatacagacactgcatagtgactaagcaattttggaataaatccatagactaagtcacarcatgcataaattgtttatatcttaactgctcatttatacctgaacaaattttcattaagcatactgctaatttt

SEQ ID NO: 538529 - DNA, 635 bp, Homo sapiens
aaagaagacaattagagagcagtttgtatttcaatatgttattggcaatcaggaaatctagaaatcaatgcagccaggtgtgagagacaaaggttctttctggttgggtactcaggaattgcttttcaggaaagagaaagaatgatagagaaggctaagatgtgtggctaggacacaggtagagtgtggccagattttgcagcgtcttaggtcctggcatggtgagcagggatttcattgtaggaagyggaagtattttaggaagatatctggaatggcaagggagagtgttaaagatagtgatatagtttggatgctgtccccacccaaatctcaagttgaactgtagtcccagtattggaggtggggcctggtgagaggtgattggatcttgggagcagatttctcataactggtttagtagtatcctcttggtactgtggtcaagatagtgagtgacttcttgggagatctggtcattgaaaagtatatgccctgccctgcctgcacctgtctttgtcatgtgacacatctgcttctgctttgccttctgccatgaggcccctccagaagcagatgcctgcaccatgctttctgtacagtctgcagagctgtaaacaaagtggccaatctgc

SEQ ID NO: 538530 - DNA, 636 bp, Homo sapiens
aaagaagacaattagagagcagtttgtatttcaatatgttattggcaatcaggaaatctagaaatcaatgcagccaggtgtgagagacaaaggttctttctggttgggtactcaggaattgcttttcaggaaagagaaagaatgatagagaaggctaagatgtgtggctaggacacaggtagagtgtggccagattttgcagcgtcttaggtcctggcatggtgagcagggatttcattgtaggaagcggaagtattttaggaagatatctggaatggcaagggagagtgttaaagatagtgatatagtttggatgctgtccccacccaaatctcaagttgaactgtagtcccagtattggaggtggggcctggtgagaggtgattggatcttgggagcagatttctcataactggtttagtagtatcctcttggtactgtggtcaagatagtgagtgacttcttgggagatctggtcattgaaaagtatatgccctgcccygcctgcacctgtctttgtcatgtgacacatctgcttctgctttgccttctgccatgaggcccctccagaagcagatgcctgcaccatgctttctgtacagtctgcagagctgtaaacaaagtggccaatctgcc

SEQ ID NO: 538531 - DNA, 572 bp, Homo sapiens
ggtttgggtttcacaattacttgctttttcagcaatgcgggttatgcagtcctggataactgtgaaaaaactgcctgaacctgtggagtttttccactggaaacttctgaacttggcatagtaggtggaatcctttacctttttcctgtggcaatgtgacctaaaaagactcagtggcagacagtttgggtgcatatgcctaaggattttagacaaatatattacgtaacattaagatgatactcatctgatttctagttagtaatgggaagggagcaggatgcttatgttgcataagcagctaaatgtctaggtagggttaattaaaaagagacaatgtttactcaatcagttgtcactcatttcaaatatgtcttacaaaaatagaaatacaccttaaaagttttataattttcaaaagaaattggccaatacaaaaacttctgttacaacgatgaattacattgattgattttttaacsttgtattcatgagataagcaccccttttcacggtgttttatcctctttatatattgctgaattcaaatcgctgatattctattaaatatc

SEQ ID NO: 538532 - DNA, 413 bp, Homo sapiens
ttgcaatacttgcctatcaacagaggacatggtgagtttcctcatccataaaacagagttaattaaacctatgcccttgctaatcacagggatgcattttgaattaaaagaatcatatttttttwaaaaaattgggcttcataaagaaagaacttgcataaacacaagctattatcattataagtgggttgatttattactgaaaccacacctgcatcactctaaacaacccacctgcttgtttttgttaattttttttttttttttttttgcgcaataccagctttcaccctgtcttctgcactgcttagccttggctctgctgagttgtgcaacacattctgagagatgccatacaatgctccaggcaaacttatagaaaaacaggaatgagtgattttatacgggatgtg

SEQ ID NO: 538533 - DNA, 413 bp, Homo sapiens
ttgcaatacttgcctatcaacagaggacatggtgagtttcctcatccataaaacagagttaattaaacctatgcccttgctaatcacagggatgcattttgaattaaaagaatcatattttttttaaaaaattgggcttcataaagaaagaacttgcataaacacaagctattatcattataagtgggttgatttattactgaaaccacacctgcatcactctaaacaacccacctgcttgtttttgttaattttttttttttttttttttgcgcaataccagctttcaccctgtcytctgcactgcttagccttggctctgctgagttgtgcaacacattctgagagatgccatacaatgctccaggcaaacttatagaaaaacaggaatgagtgattttatacgggatgtg

SEQ ID NO: 538534 - DNA, 639 bp, Homo sapiens
ctggtgagcagatcctgacctggtctatctacaaagcactgctccttcactgctattctctacacctgctggctgatgatgttctatactcgagcttctcccagtatgaattagtggcctatggtcagtagtttccacatgtggcrtttctaggaaaaggaactatccctattcccagaacaagccctaggttacacttggatccaggcctactttgagagattgttgccactgaaggggagacagcctactaaagacagagctctagcttcaaaattggagagatcagctttccattttggctttcatatttactagctgtgtgatctaggtcaaataatttaacctgtctgaacttcagcaacccagcactatatttaacatggagagagctaaaaagtcattagggacatacgagccctagattacacttaggctctgtgcttctaaaaatccgactcctctggggagtcggaagtgagagtacgtgtgtttgggagaaagatataacagagttgataaaaagtgggcaatagtgatgctacccacctctcctaagcagacctcaccagttgatcagggcaccattttgtgatgagtctggtttcagtgtcagaattcttctcaagggttccaagc

SEQ ID NO: 538535 - DNA, 639 bp, Homo sapiens
ctggtgagcagatcctgacctggtctatctacaaagcactgctccttcactgctattctctacacctgctggctgatgatgttctatactcgagcttctcccagtatgaattagtggcctatggtcagtagtttccacatgtggcgtttctaggaaaaggaactatccctattcccagaacaagccctaggttacacttggatccaggcctactttgagagattgttgccactgaaggggagacagcctactaaagacagagctctagcttcaaaattggagagatcagctttcmattttggctttcatatttactagctgtgtgatctaggtcaaataatttaacctgtctgaacttcagcaacccagcactatatttaacatggagagagctaaaaagtcattagggacatacgagccctagattacacttaggctctgtgcttctaaaaatccgactcctctggggagtcggaagtgagagtacgtgtgtttgggagaaagatataacagagttgataaaaagtgggcaatagtgatgctacccacctctcctaagcagacctcaccagttgatcagggcaccattttgtgatgagtctggtttcagtgtcagaattcttctcaagggttccaagc

SEQ ID NO: 538536 - DNA, 639 bp, Homo sapiens
ctggtgagcagatcctgacctggtctatctacaaagcactgctccttcactgctattctctacacctgctggctgatgatgttctatactcgagcttctcccagtatgaattagtggcctatggtcagtagtttccacatgtggcgtttctaggaaaaggaactatccctattcccagaacaagccctaggttacacttggatccaggcctactttgagagattgttgccactgaaggggagacagcctactaaagacagagctctagcttcaaaattggagagatcagctttccattttggctttcatatttactagctgtgtgatctaggtcaaataatttaacctgtctgaacttcagcaacccagcactatatttaacatggagagagctaaaaagtcattagggacatacgagccctagattacacttaggctctgtgcttctaaaaatccgactcctctggggagtcggaagtgagartacgtgtgtttgggagaaagatataacagagttgataaaaagtgggcaatagtgatgctacccacctctcctaagcagacctcaccagttgatcagggcaccattttgtgatgagtctggtttcagtgtcagaattcttctcaagggttccaagc

SEQ ID NO: 538537 - DNA, 639 bp, Homo sapiens
ctggtgagcagatcctgacctggtctatctacaaagcactgctccttcactgctattctctacacctgctggctgatgatgttctatactcgagcttctcccagtatgaattagtggcctatggtcagtagtttccacatgtggcgtttctaggaaaaggaactatccctattcccagaacaagccctaggttacacttggatccaggcctactttgagagattgttgccactgaaggggagacagcctactaaagacagagctctagcttcaaaattggagagatcagctttccattttggctttcatatttactagctgtgtgatctaggtcaaataatttaacctgtctgaacttcagcaacccagcactatatttaacatggagagagctaaaaagtcattagggacatacgagccctagattacacttaggctctgtgcttctaaaaatccgactcctctggggagtcggaagtgagagtacgtgtgttygggagaaagatataacagagttgataaaaagtgggcaatagtgatgctacccacctctcctaagcagacctcaccagttgatcagggcaccattttgtgatgagtctggtttcagtgtcagaattcttctcaagggttccaagc

SEQ ID NO: 538538 - DNA, 618 bp, Homo sapiens
ctttcttgatgtgaatgacagctttgtttcatccactttggtgggtaaaagaaggcaaattcccctgtggtacttttggtgccaggtttagccatatgacgaagctttacataaaacagtacaagtatctccattgtcctttatgatcctccatgagtgttttcacttagtctgatgaagggttcactccagtcttttcggatgataaaatgcttcggctgtcagtctaataagggattccctgaggagtttggaggctgtaagagcaccccccgtctcaatgccagtgcttcttatctcagcctctcctgcactcctttacccccgtctcgatgccagtgcttcytatctcagcctctcctgcactcctttacccccgtctcgatgccagtgcttcctatctcagcctctcctgcactcctttacccccgtctcgatgccagtgcttcttatctcagcctctcctgcactcctttacccccgtctcaatgccagtgcttcctatctcagcctctcctgcactcctttaaccccgtctcgatgccagtgcttcttatctcagcctctcctgcactcctttacccccgtctcaatgccagtgcttcctatctcagcctc

SEQ ID NO: 538539 - DNA, 618 bp, Homo sapiens
ctttcttgatgtgaatgacagctttgtttcatccactttggtgggtaaaagaaggcaaattcccctgtggtacttttggtgccaggtttagccatatgacgaagctttacataaaacagtacaagtatctccattgtcctttatgatcctccatgagtgttttcacttagtctgatgaagggttcactccagtcttttcggatgataaaatgcttcggctgtcagtctaataagggattccctgaggagtttggaggctgtaagagcaccccccgtctcaatgccagtgcttcttatctcagcctctcctgcactcctttacccccgtctcgatgccagtgcttcctatctcagcctctcctgcactcctttacccccgtctcratgccagtgcttcctatctcagcctctcctgcactcctttacccccgtctcgatgccagtgcttcttatctcagcctctcctgcactcctttacccccgtctcaatgccagtgcttcctatctcagcctctcctgcactcctttaaccccgtctcgatgccagtgcttcttatctcagcctctcctgcactcctttacccccgtctcaatgccagtgcttcctatctcagcctc

SEQ ID NO: 538540 - DNA, 618 bp, Homo sapiens
ctttcttgatgtgaatgacagctttgtttcatccactttggtgggtaaaagaaggcaaattcccctgtggtacttttggtgccaggtttagccatatgacgaagctttacataaaacagtacaagtatctccattgtcctttatgatcctccatgagtgttttcacttagtctgatgaagggttcactccagtcttttcggatgataaaatgcttcggctgtcagtctaataagggattccctgaggagtttggaggctgtaagagcaccccccgtctcaatgccagtgcttcttatctcagcctctcctgcactcctttacccccgtctcgatgccagtgcttcctatctcagcctctcctgcactcctttacccccgtctcgatgccagtgcttcctatctcagcctctcctgcactcctttamccccgtctcgatgccagtgcttcttatctcagcctctcctgcactcctttacccccgtctcaatgccagtgcttcctatctcagcctctcctgcactcctttaaccccgtctcgatgccagtgcttcttatctcagcctctcctgcactcctttacccccgtctcaatgccagtgcttcctatctcagcctc

SEQ ID NO: 538541 - DNA, 618 bp, Homo sapiens
ctttcttgatgtgaatgacagctttgtttcatccactttggtgggtaaaagaaggcaaattcccctgtggtacttttggtgccaggtttagccatatgacgaagctttacataaaacagtacaagtatctccattgtcctttatgatcctccatgagtgttttcacttagtctgatgaagggttcactccagtcttttcggatgataaaatgcttcggctgtcagtctaataagggattccctgaggagtttggaggctgtaagagcaccccccgtctcaatgccagtgcttcttatctcagcctctcctgcactcctttacccccgtctcgatgccagtgcttcctatctcagcctctcctgcactcctttacccccgtctcgatgccagtgcttcctatctcagcctctcctgcactcctttacccccgtctcgatgccagtgcttcttatctcagcctctcctgcactcctttacccccgtctcaatgccagtgcttcctatctcagcctctcctgcactcctttaaccccgtctcratgccagtgcttcttatctcagcctctcctgcactcctttacccccgtctcaatgccagtgcttcctatctcagcctc

SEQ ID NO: 538542 - DNA, 565 bp, Homo sapiens
ttggtctttcctgcctacacagaagctgaaagctttgaaaaatgtcttccaagctgtagatcagggtacaaagattaagagagcaataaatctctgaaccagacagattagcatcacctaggaacttcttagaaatacagattatcaggcttcattccagatctgctgactcagaaactctaggggatgggacccatcatctgtgtttttaacaagctcatgcaagtttgagaagcactggctaagatgcagacttgaagtygggcagaacttggtttgaaccgcagctccatcacttactagcttgagtaacaaacaagtggtataacctctctcaacctcagtgccctcatttttaaaaaattagtataataatgcatacctcaaagggagattatgagggtatactgaagtaacacatgttcagtactaagtacatagcatgcagaagtgttctgttgatgggagctactattaattatatttatgtgtgtttattcttaggttttgatcattaacgactgatttcaatatgttttctgtaacgataacataacaacagcag

SEQ ID NO: 538543 - DNA, 345 bp, Homo sapiens
aagccttgtttctttgaatatcttgaatgaataaatgagataatatacatrtagtgcatagtcaataattggcatttgacagatggtagctaatttttcaatatgctactaaactatgattataataatgctcagcctctgggaccaaaataagaaatttgaagactgagtcaattaagagccatctcttctgcctctgctcaaatattttatcttattctggagttattaagaaaataaggaatttggagctaggattcaaataatcccccaactcttcaaaacataatgacaatgatgttatcttcaatgtttctttgggatttcctgagtttctacttccta

SEQ ID NO: 538544 - DNA, 512 bp, Homo sapiens
tgggactgaggccatgttgggagagggagtgaagtatgacatgagatcacccatgtcttcctatttccaggtagtcagggaggaatgccctaactgagcttggggaagcccttgaatgtggcagaatggccaactcttccaaagtgaaagtctacaacccaacgtggcagcaggagaaggtaagcctagagtacacagcacagcagcttcaagcacagcagacactcaatgagagtttgctgaactgaaatgaagatcctatgctacggcaaatatctaacccaatgctagtactcaatgaagtcagtgctgtgtaggcattaccttagtttttttagctataactacttcctctctcttgccttgcatgagtggattctcttacataaatgttctgttgaaatatcccctttaactcctttatcctactcccacatcaagtgcctcaatttgtctaaatgtctcaaaggtctgcaragataataagtgactgtcacttcatcaaaaatggt

SEQ ID NO: 538545 - DNA, 493 bp, Homo sapiens
gtcctgtactcacttcctctgatttgtcatccctgtcctcttgcagggatcattattctgcctgcctagagtacaacacaacatgggccatggactcacattgccttgggtttgaatcttcgctgtgctcttagggtcacaggagttaacctctctaagccttagtttctccacttgtatgatggaactgatgcttcttctcttgtaagattactgtgagaattcagtgggataaagtacatgcaaatatgagtccagagcagaaggcctggcccactgcagacactcagtgaytgataactcatgtcttatcatttttgcagcttacctgccttagtgacaaattgacagttatctttattttattcccactgttccccatctgacttgcccttgtctagcccatttcaggtcagcccacccatgctgatgatccagtcttgtcatcttcctgcctgacctagtttgggttcagccctgctggggagatagt

SEQ ID NO: 538546 - DNA, 552 bp, Homo sapiens
gtggcacttcctctccgtctgaggctaagccaacccattccccattccaagccatatcaagccccccaagtccttgcagccttcagttccccccacccacattcttctctccaaagcccccctggmccccgccacagttgtgctttcttccaaggagctagcttctggggaggggccagggagaggccagagaaaagcgtagaatgaggaggaggccagggcaagtgcagccctcccaccaagtcatgctctccacagagcctgctctcattccttgtttttgccaggaactccagcccccgcctgccagtcaaacaagggagcggcagcaggaggctgggcaagaggaggtttcaccgggcccccacttcagttaccagtctgattaggaacaagagggaagaggcagagggaacccagtgactctgaagttggggttctcaatgcaggatccgtggatagcagagagccactgagttgtggcttagggcttagctaaggaggagttttccagagcaagccaggccccagtacccattgtcccaagatgca

SEQ ID NO: 538547 - DNA, 613 bp, Homo sapiens
aactcccctatcatttccatcactaaaatctcctgcgagtttccagccagccctttgaggtaggtgggcaggtacaatcactcctcttgatggatgagtggaaggaggggcagagaggaaccacggcttgcccatagtcacacagaggcagggcctgaccaagagcccaaggaaggggtgtgcaagcaagctctcacatcacacatgggccacaggtgactccaccgcgaactcagagagaagtggaggggagggagttgggcccttggtggagagttggctgtgagaagctgcctcargctcccaggctctgactggggggtggcttccctgcagcgatagcccacaggcccctggaggggtgggaaaacagagtggccagtgactgtccctcccacagcccaagccttgggcatgtcacccggctgctctgaggttggtgcagccccacctcagcccaggcttgctatccacacattctcaccccatccccaggcagatgctgccctggacacacctcgcagatggatgcactgatggccaagagactagaaccaccagaggttcttcgtgcaaggggagcattcactcacctacagccaatcatcacaag

SEQ ID NO: 538548 - DNA, 635 bp, Homo sapiens
tgtgcattgaatatttaccttccattttgaattatgtgacaataaattacttcattttcctcgaatcatttccttatgtttacctttctccggtggctgtgtgatatgacagtgttaatatataacaagaaataattggaatttagagctagtataatatacaacttgatatatttagtttctgtgatgccaaatatattgactataatctcgatggtagcattctgtggtgtgaagctgaactcgatgaccaaactatattaagaggtgttttttccattgtcaacaaataaaaggaaaatgatattttaaggtaatacaaatatatttaaaagtagacagttgaaatatttctaatgaatgttaattgaatataggttgtgtttatatggtatcatggaagttctgtcttgccttggtgcgcacccagttcctgactttaaggtattttatcctggctgcctttcccccggctgtcctggcactgagtattgggcttactgattcagtttcatttctttcaggtcttttttcatatttacatcgtacttctgtccagtagtagaaaataataaacactttaagcaaaactctatcaattsttcattttctgttctgctggagaattttaactg

SEQ ID NO: 538549 - DNA, 375 bp, Homo sapiens
atgtacaaactgagggaatacagtaagtagaaacctcctccctgaaatatccgtctacctctatttgttcttctctaatccactctccttgcaacactacagtgagttttttataaattacaaatatggacacgagcataagccccatccactgcacaagcatccacatatttayacttatcatctttcaactgtttttcactgcccttaggataactttcaaaatctttcatggggcttacaagacctccacaacatagcccctgctgaaatctccaacctcagcatggcatcccttcttcttggtctttatatactaattgagagaaagagtagggttaagaattgagttctgaaagcacactacctgaaatg

SEQ ID NO: 538550 - DNA, 630 bp, Homo sapiens
acatttacccagtgggggttagggccatactagtgggcttgggttcatacgcaacactttcatcactgagaagaatgtggctaggctccaactctcgtggggtaggtgggactgggaaataaaatagcaactggagctaaaacccagttacagtcttccctggtcactggctcttagaagaagacaggcattycatgcacctcactcaggagatcaccagaagtccagccaagccctgcctgggctccttcccaggaaagtgcttctgctgacactctcctggccacgatcttcttcccagcagaggaagaaatcttgtccatataggagaagttgaggtatggagtttcattgctaggcagggaactagggtgggtgggttgacagtaagcaggttataggttccatggaaatagacaaagaccaaccaaatgagaaaaagcaaaggctatttattctgagcttgctatagcaatgaagttggccaccatcacttgcattttgtcagagaccccatcacaggcaaagcactgggaaagctttagagtggaaaaaaagggaagtcttgaggtgtgccctgatgggaggctgttggcctggggaagctgcaggtgggctaactggaagcag

SEQ ID NO: 538551 - DNA, 488 bp, Homo sapiens
ctggcagagaggacatttacccagtgggggttagggccatactagtgggcttgggttcatacgcaacactttcatcactgagaagaatgtggctaggctccaactctcgtggggtaggtgggactgggaaataaaatagcaactggagctaaaacccagttacagtcttccctggtcactggctcttagaagaagacaggcattccatgcacctcactcaggagatcaccagaagtccagccaagccctgcctgggctccttcccaggaaagtgcttctgctgacmctctcctggccacgatcttcttcccagcagaggaagaaatcttgtccatataggagaagttgaggtatggagtttcattgctaggcagggaactagggtgggtgggttgacagtaagcaggttataggttccatggaaatagacaaagaccaaccaaatgagaaaaagcaaaggctatttattctgagcttgctatagcaat

SEQ ID NO: 538552 - DNA, 216 bp, Homo sapiens
acaagcctggacaacataatgagaycttgtctctacaaaaaaaattaaaaatcgtaataataataattagccaggtgtggtggtatgcacctgtgtacttgtaagagacactgagagacactgtgatgtgacttggaggacccccttctgaggtgaagtaattctcccagcagctaagagtgctgctggcagacagccctcaacggtcagccttct

SEQ ID NO: 538553 - DNA, 680 bp, Homo sapiens
tgttgtagcaccagatgacaattttaatgctctcttgtggctgagttgtatcagaacctcaaacaagagctcttgtcctctagccaagccagctagtaggatttaccacgatttgctgccaaccagcttactgcaaattacattgcatttgcaaccataggctgatagaagataaactcttagcagaaaggggcaggtaagagactaaaactgattttgcagttattacaggatggctaacagtgtaaattgattattatgagagaaatgataaatattctgacactcaatatcattaaaacctacasagaatttggcatttgttatttcaaaacagaaataaacaaatgaaggaatgttttatgggggagcaaagtttttaaaattttactcttaaaatgaggcatggttatgcaagaaaggaaatataaccaagttagctagaaatggaattttattcatttacaagctttccttggaagatttgagtattaaaaactatactgttctctctcatataacctcttttccaaatgttagtttgagaataaattaaagaatagctttatccctataactctccttaccacatcttccaatactccactgtcttcctgtattaaaatgtatctatagcacaaaacacaatacaggattttattttatgttatagtaggtta

SEQ ID NO: 538554 - DNA, 529 bp, Homo sapiens
acatggttaaaatatgcagttgcacaggggtcttatatggctccagcctccttgtcctctgctccaccctgcactattcctagttccaaatttaacgattttcatttttagttcttatggtcattatgtttagccttccaataagaygcttatactcttctttcttgactggtgaactcttggacataatctatcctagacatactccatccaggaggtgaatagcaaggacttgtttatactgcttcttcgttttatgttgcccatattcctaatactgttttattattttcagtttatctgtttcttgtgtgttactgtgaaaaaatcatttcacttattatccttgttctatgaatttcagacagaattgctcattctccaccttgaaaaatgaagatactagctttttattgtttcctctacctgtcctttacttggagtttcttcatttttcaccttcctcatctgatgaggagaaatgccattttccttgaaatggactagcacttgcttcaggtaggaagtg

SEQ ID NO: 538555 - DNA, 307 bp, Homo sapiens
acagtgcccaggtccaggttcaccctctgaggggagcagcacaggctttctactcctgcccctctaccaatcacacaacaaccctgaggacagatcaccaggcacctycttttataaggagcaaccaaggctgagaaggtgaggaacttccctaaggtcacacagaggggtgggccctgcccaattcacagcaacagccccaccaggctgtgcatgccttgacccaggggatgccaggggaggtcggatgtgggctgggtggtgacgcattctgatgggcggctccctggggacattcttggacgac

SEQ ID NO: 538556 - DNA, 572 bp, Homo sapiens
tggaggtcaggagaatggctgtccctgataggggtgccagctttactgtttaccaaccagggtttgtcataacagcgagagaactgaagtgaagtctgtgaaacggaaatccaaagggaaggacaggaacaattgaaaaaggaacaaaaagggtgcacattgggaacagaaaaaaataaatagaagatactaaattttaaagaaacagaaaacaaaataaaatgcatgttggtccatcaggatgagaaggaccaggcaggcactaacatcattcacacataacccatcataacatcaaacttagctgttagctccactgcacagccagtgcctggattttctgtcctttttccttawtttttttttttttaatttttattttttagagacagagtctcactctgttgcccaggctggagtgcagtggtgcagttcatagcttactgcagccttgtattcctgggctcaagcaatcctcttgcctcagcttcctgagtagctgggactataggtgctcaccaccatgctaggctaaatttaaaaattagagatgataaatttagaaatttgta

SEQ ID NO: 538557 - DNA, 533 bp, Homo sapiens
gatgctgcattctttttgaaagcactaattgaaagaaatgcccctttatcttatcttaagctaaaaaagagcactattgttccctcaggtttttgctaatgaagtaaatgctcatcgagaccagatcattgagctggatcaaactgggaatcaattaaagttccttagccaaaagcaggatgttgttctgatcaagaatttgttggtgagcgtgcagtctcgatgggagaaggttgtccagcgatctattgaaagagggcgatcactagatgatgccaggaagcgggcaaaacaagtaagttggggaagaaagatactaattcactgaagagtcttgggctgcatgtattgagtctctgggatgattstcaaacgtgctgtatagtgtgtatattcattcctgttaacttatttcttatgtaattttagttccatgaagcttggaaaaaactgattgactggctagaagatgcagagagtcacctggactcagaactagagatatccaatgacccagacaaaattaaacttca

SEQ ID NO: 538558 - DNA, 635 bp, Homo sapiens
ctgagctagcatttacagccacattttctggttgtttttttctttcttttttctttttttccccttgagattgggtctcgccatgttgcccagactggtcttgaactcctgggctcaagcagtcctctcatctcggcttcccaaaatgctgggattacaggcatgagccactgcgcccggcctggttgttttttcttatgcattgctctgcctccctctatgcataaaagacacatgattagaacctaccaagaaaattattatttcccagtggtttcttggactcaaaacattccttgaacaaacaaattctcctattttcttttctaggttttccagaaggaactgggaaagcgaacaggaaccgttcaggtcctgaagcggtcaggcmgagagctgattgagaatagtcgagatgacaccacttgggtaaaaggacagctccaggaactgagcactcgctgggacactgtctgtaaactctctgtttccaaacaaagccggcttgagcaggccttaaaacaagtaagggatatttgctgtcccaacccaagggatagatctgagtgggtttatttggtttttcttttactagaatctgttccagtcagtcttgaaataagtataacagagtt

SEQ ID NO: 538559 - DNA, 497 bp, Homo sapiens
ttcttgatgctctcctcactctgctaagatttatctggtctaacagctttagctattacctataaagcttctgcatctttttcatcttcagcactatcatctcctaaagtccagacatacagtaaactagaagcagttctaaaatttccactttatctttgcccgcttgcctgacgtcatttgtccattccagatctgccccccctttcctcattcagaggcctgtgatgtctggagttcctccttttcctcacatctagccactcaccakggcttgtcagtcccactttcaaaatacctcttggttccatctttcctgccctggctctggccctcaccatgttttgcctcagttgctgcaatggtttcttaacctgtcttctcactgctagccactccccatcccacacttacccccacccccacatcactccatgttttacactgaagccagagtgatagctgtaaagcatgggtctgatcatgtctcttacctg

SEQ ID NO: 538560 - DNA, 600 bp, Homo sapiens
ttaagaccggcctgggcaacatagtgagacctggtttctataaaaaatwtaaaaattagctgggtatggtggcgtgtgcctgtcatcccagcaactcgggctgaagtgggaggattgcttgagcccagcaggttgaggctgcagtgagccatgacactgccactgcactccagcttgggcgacaaagcaagaccatgtatgtctttaaaaaaaaaaaaaaaaaggcagccaggacctgatgccaggtcgacttggctccaaaacctgccctctccttttcacagcctcctttcctgtgaaataatagggaatttctctaaagcgcatcgcccggtccctatgtaaagacaaagaaacaggactttgcacgctcacctggcattagggccagcactgtgctgcagttgtgaagatggccactgggttgggggttgttctgcaccaaatggccccagactccctgtcagtggctacttgttgcagccagtgggcctgagctgaccacccttatttatgctcctgatgtgcagccttgaatgcatcctgggctgtgggaggcaaccaggccagaagatgaccttgatagctgagcactgaccc

SEQ ID NO: 538561 - DNA, 237 bp, Homo sapiens
tgggcaggccccttccagaaaggtggagttggaggcccagagggtcacttgtccgcttctagatacctcagccttttccacactgctcctgggaaactgacgcccagggcaaatcaggtgcccctctccaggagccccaaaaggcaccccactgcccactagatgacatttcatttcaagcccccaaccccagccatagtccctggycccttttccacacccccagtctgtgccctc

SEQ ID NO: 538562 - DNA, 590 bp, Homo sapiens
tgtgccgttggaaagcaaaacggtaggttacaactgctggaatgtgcaaaattaatagccaacaccgagcaactactaattgttttgcatctgttagttttttaaaatcatcactatgagttatctgttattgttttttccatttataaatgaggaaactaaggcagaatgatgaagcagcctgtcccatgtggcaaacagagtcaagcccagcaagctcattcttgcattatgtagaacaccgatgccacttgttgtaacagaaactccaagaattttcagtccttttgatcttttgctcaacattccaagtgaatgacaggatcatcagattagcccaatttgcgtttgtggagaaagaacttccgattacaatccaycagcccaataccaacgaagaagagctaatttcttattttgaaattagggcactgctagaaaggggaaatggatgtcagaaagccaaaaataaaaagccatgctataaaaagtctgcccttcatcacacttcactgaaatgaatatttgagattgtcttccttatttaatgagagaaggtaaacacactaatttattttacataactactt

SEQ ID NO: 538563 - DNA, 494 bp, Homo sapiens
tcattagatcttcacaaagaggaaacaaggactcctagcaagtatgttctacagaagggcaggtcttgaatgtaccttaatcctcagatgcacttacaaagcagggaggtgcaaaaktgtacattggtggcatcatgaaaatagtgttggtagaatgtcagagaagaaagatctaattatactgtaacgaaaggaagaagagattgaggcagaggagatggagggcttgacaagaagcccaggttttgaagggtaacttgaaggtgaattcacttgaagatttatctatgaatttccttgttgttagcggttttcagactaaacaaactaagctatgagttcttgctttagaacaacacttctcagagctgtggaggattaacacaatcttttggacatgaccccgttacacaaagatttttttgggagggaaaatttatttatataagttaatttaaagatatatatactgtaaaataatcatatactattag

SEQ ID NO: 538564 - DNA, 494 bp, Homo sapiens
tcattagatcttcacaaagaggaaacaaggactcctagcaagtatgttctacagaagggcaggtcttgaatgtaccttaatcctcagatgcacttacaaagcagggaggtgcaaaagtgtacattggtggcatcatgaaaatagtgttggtagaatgtcagagaagaaagwtctaattatactgtaacgaaaggaagaagagattgaggcagaggagatggagggcttgacaagaagcccaggttttgaagggtaacttgaaggtgaattcacttgaagatttatctatgaatttccttgttgttagcggttttcagactaaacaaactaagctatgagttcttgctttagaacaacacttctcagagctgtggaggattaacacaatcttttggacatgaccccgttacacaaagatttttttgggagggaaaatttatttatataagttaatttaaagatatatatactgtaaaataatcatatactattag

SEQ ID NO: 538565 - DNA, 494 bp, Homo sapiens
tcattagatcttcacaaagaggaaacaaggactcctagcaagtatgttctacagaagggcaggtcttgaatgtaccttaatcctcagatgcacttacaaagcagggaggtgcaaaagtgtacattggtggcatcatgaaaatagtgttggtagaatgtcagagaagaaagatctaattatactgtaacgaaaggaagaagagattgaggcagaggagatggagggcttgacaagaagcccaggttttgaagggtaacttgaaggtgaattcacttgaagatttatctatgratttccttgttgttagcggttttcagactaaacaaactaagctatgagttcttgctttagaacaacacttctcagagctgtggaggattaacacaatcttttggacatgaccccgttacacaaagatttttttgggagggaaaatttatttatataagttaatttaaagatatatatactgtaaaataatcatatactattag

SEQ ID NO: 538566 - DNA, 568 bp, Homo sapiens
ctccagctgacatattttgatatttatttgtccagcctagtccagttttcaccttggttgcttattctggtaagatttggcttacacctcctgtagttaatttttggagtaacaatctgctttggggtataactatagctaatatataatctctagtctctgggagtcatcggggaggatagacgtcggtttgtctttgagcacagagcttccctcagtagagaatggctatccaaatagctaaaccctgcttaagtcactcactgaagtgtatacatggaatgaagtctgggtgtttacagaacttcacttctttgatcctacaatgtctgattgcttctggatagatgtatgtgagttaactgaagctgtaragtgaatttatctacagaagaaaattcattaacttttaagttagaacccagaatgatatattgactcttcaatattttatttgagaatgtgataaatccactgctcaagtaatgctaaatattctatcaaaaagcgtactttgattctaattagagttttattttaggtagaaggaaaaagcaagagatgactt

SEQ ID NO: 538567 - DNA, 577 bp, Homo sapiens
agcacattccctattttattattccttacatctaatttaaaagatactggtttattatctcytttttataaaattagaagctgaggatttgagaaaatgaatgtcttggcttgtaacacaaagactgactctggcaatatacaaactcagggcctcttaccaccaaatgcctggtaaggaagaagccataaatcttctatggcaaggcgagtcttagaggcagaaagtttgggtttctttgtttataaattaaggttaatataaaggtctactttgcacaattttgagaatcaactctaatgcagaagtatttcacatattgatataaaaattattttacttatatataaagaagctatatcttatctcctcaggaaatattagattttttttttgagacgtagtctcactctgtcacacagtgagcagtgtgcacccagcatgcagtggcgcaatcttggctcactgcaccgtctgcctccacagttcaagtggttctcatgcctcagcctccagagtagctgggatcgctggtgtgcaccacaacccctggcaattttttttttttttttgtata

SEQ ID NO: 538568 - DNA, 577 bp, Homo sapiens
agcacattccctattttattattccttacatctaatttaaaagatactggtttattatctcctttttataaaattagaagctgaggatttgagaaaatgaatgtcttggcttgtaacacaargactgactctggcaatatacaaactcagggcctcttaccaccaaatgcctggtaaggaagaagccataaatcttctatggcaaggcgagtcttagaggcagaaagtttgggtttctttgtttataaattaaggttaatataaaggtctactttgcacaattttgagaatcaactctaatgcagaagtatttcacatattgatataaaaattattttacttatatataaagaagctatatcttatctcctcaggaaatattagattttttttttgagacgtagtctcactctgtcacacagtgagcagtgtgcacccagcatgcagtggcgcaatcttggctcactgcaccgtctgcctccacagttcaagtggttctcatgcctcagcctccagagtagctgggatcgctggtgtgcaccacaacccctggcaattttttttttttttttgtata

SEQ ID NO: 538569 - DNA, 577 bp, Homo sapiens
agcacattccctattttattattccttacatctaatttaaaagatactggtttattatctcctttttataaaattagaagctgaggatttgagaaaatgaatgtcttggcttgtaacacaaagactgactctggcaatatacaaactcagggcctcttaccaccaaatgcctggtaaggaagaagccataaatcttctatggcaaggcgagtcttagaggcagaaagtttgggtttctttgtttataaattaaggttaatataaaggtctactttgcacaattttgagaatcaactctaatgcagaagtatttcacatattgatataaaaattattttacttatatataaagaagctatatcttatctcctcaggaaatattagattttttttttgagacrtagtctcactctgtcacacagtgagcagtgtgcacccagcatgcagtggcgcaatcttggctcactgcaccgtctgcctccacagttcaagtggttctcatgcctcagcctccagagtagctgggatcgctggtgtgcaccacaacccctggcaattttttttttttttttgtata

SEQ ID NO: 538570 - DNA, 577 bp, Homo sapiens
agcacattccctattttattattccttacatctaatttaaaagatactggtttattatctcctttttataaaattagaagctgaggatttgagaaaatgaatgtcttggcttgtaacacaaagactgactctggcaatatacaaactcagggcctcttaccaccaaatgcctggtaaggaagaagccataaatcttctatggcaaggcgagtcttagaggcagaaagtttgggtttctttgtttataaattaaggttaatataaaggtctactttgcacaattttgagaatcaactctaatgcagaagtatttcacatattgatataaaaattattttacttatatataaagaagctatatcttatctcctcaggaaatattagattttttttttgagacgtagtctcactctgtcacrcagtgagcagtgtgcacccagcatgcagtggcgcaatcttggctcactgcaccgtctgcctccacagttcaagtggttctcatgcctcagcctccagagtagctgggatcgctggtgtgcaccacaacccctggcaattttttttttttttttgtata

SEQ ID NO: 538571 - DNA, 630 bp, Homo sapiens
gacagtgaccaaattttcaacatggaggtcaggaccactctggatgtgatctgcctgagcgcaaagccttcaggaatgacttaagtcccctaagttagctgtcaacttcattttatttatttattttgagacagagtctcactctgtcacccaggctgtgagtgagttagctgtcaactttaaataaattgaaaaaacatagtaaaggaataattttgaagatttaggagccagctaatctctttatctcattgggtcaattttccccaccctctctgtccctcgttgatttcagctgctctacttgctcagctctctgcgtgattgggttccgccacattgcctggtcatcatgcacactgaccaggagccagagttcaactcacacagcccagtggttttcatttgttagaaatgacagggttttcttgtgctgttataaagcttatctgctcatgttatttctcaatatcaaatcacagtagaaaaacagaaatgcccctgcttaacacaggtaggattacacttgggagtgttgatgacttaagcaaagattttccacctacrgccaagtgattgatggcttatccatctgcacgtaataccagtgtttaaatcctggcttgaatg

SEQ ID NO: 538572 - DNA, 671 bp, Homo sapiens
catgcagttcgtgagaaaaaggaagaaagacagacagacacacacacacgcatacaagtttatacacagactcacacaaaagccacctcagttcctgactgctttygcttccaatttcggtttacccatgtctcttatcttggggcaccttgaatgaactgcctctgccccttatggccaaatgagccttgacaacatcagtgaagcctgatgaacttatgttgaatattgtgacactatggataatagtattacagaaaccaagataagttaactggaggatatccaatgtaattgttaccctcccactaccatttcccaatcataaaaatgtcttgtgaatgccttgactacatgtctgtagttgaaaaactgaatgtctgtagttgaaaaaccactggaaattgttttcttccttgttaccaatgtccataaaaaaatcagatgccactaatatcagaactcagaagtccttattatatagtcctttattattaattcattttaatgaatacggaactaaaaagttgttatgtgtgatataaaaataagctataatgaagttttgtgctgaatatatgatctggaaaccactagacatttgtgtttcattcgcatagcgtgctggttgccattaaattactcttggtagggaatgccatgttctgatg

SEQ ID NO: 538573 - DNA, 550 bp, Homo sapiens
ccataataaattaatgttttctcctccccactgtgatcctttatatataacctcctcatactcagaaaaattttccgctgatgtttaaatatatttatttggcaagtgtgtgtgttctcagtgatgaagttctcttgactgagaactataatattatgagaaagacctcctcctaaccctgattatgtgttcatgcttaagataggctcacagtaacatcataacccgacttctatatagcaacacaatgatmaggcacattggcacatggatagaatcactgcccctaagctgaaaatttgtctgtgtaatattttcttgcactctccttttcctcagacagtgccagagcagcagccagcacctgcagttactggcaaggtgtgttggcagctggaccagccagatgccaaggtctagcctgctccaataatattttagtgtctgggtggcaagctggcttcctgctgacatataagtctgccactgccccatggagtggtcctggaggcttgcatcagggttggctgctaaccacccacctctaggg

SEQ ID NO: 538574 - DNA, 550 bp, Homo sapiens
ccataataaattaatgttttctcctccccactgtgatcctttatatataacctcctcatactcagaaaaattttccgctgatgtttaaatatatttatttggcaagtgtgtgtgttctcagtgatgaagttctcttgactgagaactataatattatgagaaagacctcctcctaaccctgattatgtgttcatgcttaagataggctcacagtaacatcataacccgacttctatatagcaacacaatgatcaggcacattggcacatkgatagaatcactgcccctaagctgaaaatttgtctgtgtaatattttcttgcactctccttttcctcagacagtgccagagcagcagccagcacctgcagttactggcaaggtgtgttggcagctggaccagccagatgccaaggtctagcctgctccaataatattttagtgtctgggtggcaagctggcttcctgctgacatataagtctgccactgccccatggagtggtcctggaggcttgcatcagggttggctgctaaccacccacctctaggg

SEQ ID NO: 538575 - DNA, 478 bp, Homo sapiens
gtcctccagccaaatggcctgctctgtagacaaactcttagatgcaagttggtaatatagcttattctggtaacagktacaagcagtggctttacagaattcaaatcctagtgacactatttattagctgtattagtgttctccagaggcacaaagctggtaggatctatatcttatatctctttttatctctgtataatctatctatatctatctaatcacacacacacagtcatgtgctacatgatgacattttgatgaacaatggatggcatatattacagtggtcccataagattatgttggagctgaaaaattcccatcacacagtgaccttatagctgtcataactgcatagcacaacacattactcacgtgtttgtggtgatgctggtggaaacaaacctgtgtctaaaagttgtataaacatatagctcatacaattatgtatagcacataatacttgataataaacaac

SEQ ID NO: 538576 - DNA, 499 bp, Homo sapiens
taatgtttagagtgatgaagaacaaataacataactttgaaccaccctccagaccttatattctaccgcggtcacaaaatattagacctttccattagaatatgatggaatgattatgtgcaagattttgagacactactataagatctgctaaatacatctacaggtcaaagattgggggggggaataatctacttgaaagctgtgragaaaagatggacgaaacacaagggaataaataagagttgagtttagagagaagaaccagacatgattttgttcaaaatttcattctttattagcaataaattaaaataaggtggatttttttgatgagtcataagatagatgttgcatgaaagggcagtggaatcaacaggcacaaaataagatggccaaacatggaaaaatgatcataggtagatcatttgttccagttgccttttatcttttacacctgtgtttgaattcacccaaacttgcgtaaatcctttacaca

SEQ ID NO: 538577 - DNA, 531 bp, Homo sapiens
tgcaaataatgtacaagttccttgaaactgatagaaaacgttcacgtctcaagcttcaggagtccactgtgttcttgtttgctaagtgagaayaccgtgtacaatggaagtgagtcagttctgtccaaccttccttaggatgttataaaatttggcataattttaattagtagtagtcattgctctttaagctcacaacaatgtatttcatcagaactgcatgacaaaataaataggatgtttatttttatcaccacacctgtagtcatcaatgatatagcagtcagcctaagaaactaagaaactcccaaagcaaacaatataaatatgtctttataggcttatcatttggccagtctaaacatgttacaagtttaaatgatctttttaaaagttccctagctttgctatagacataaagcatattacacctgtctaacatgtttttatcatcattagtctattttatcttcatactgaccatatgagagatttaagtagatattatgatctctattctacaagctgaaa

SEQ ID NO: 538578 - DNA, 536 bp, Homo sapiens
gctgcaagtcttttgttaatatcctgatttctgggaaagttgattttggcaatccaatttttgccagttttctcattaattttatggattagagaatttttggagatttttactctgccattttcactgacattacttgctgtatgctttttttttttttttcagggtctcactctgacacccaggctagaggtgcagtggtgcaatcacagctcactgcagcttcaatttccagggctcaggtaattctcccacctcagcctcctgagtagctgggactacaggcacctaccaccagagtccagctaattttttttaatttttgtagagacagagttttgccatgttgcccaggctggtctcaagctgctcggctcaagcattctacctgtcttggcctcccaaagtgctgggattacaggtgtgagccactgcacacagcccactttgtgcttttgaactcattttctcttcctggatcayccttccattcctaaactcctgcacgaattctttccacatttcaattatttgtc

SEQ ID NO: 538579 - DNA, 636 bp, Homo sapiens
gttattgttgtgtctggataggttgaacttgaccacttttattgatggagctcctgmccaaaaggccaaattttattttctcaacattgattgtagattataaactcccataaacctatggtaaaaagccatgttctcttggtatttggtttcctcaatcatgtttcaagaacaaatattgtggtttctgaatagtgaaaccaaaatgtgggatctgagtgttccttttggtgatagtgactccaacattcactatgagaggttttattattctccgaggaaggacggggtattatctccaaggtaaattttgtgagcttttttagcttcccaaggtcctgagggaaagcttagaagaaatcttttgattctaatttggatgcttgaatcaggaactttacgttatcatgactgatcaccaggagactgatttgaagagtacctgccaggtcttctaaagaaaaataataaaggaggaattgaagtggtggtggtaatagttagcttcctatgatactaggattgagactcctgagtaaagagggaagataaatctgtccccagcttctggtgggcatgggaagtgtagcagaaacatgtccttaaaaagcaaaaaactcacctttcagaaaatac

SEQ ID NO: 538580 - DNA, 605 bp, Homo sapiens
cagtgatctaaagaaggaggctctaacacaagtagacacccattgcaagcccaaccctggaaatcctttactgcctctcaaactttaggaagccagcaagataccagttgcagcttcaaggcagccttgaggcaaccttgtcaccaaacttagttcatggcaaaacatggaaacaaatgttgtttgggccttgctcttcccaggcatgtctccatgctgtcaaggtccttgtcccatcttgggctgctttcccctcctcctccttaaccacagcatcaggttcattgttgccccacaagtcatttgctgctattaatagctcaagttcatgaataatttactgcttcaaatataaattatggggatttaaggttatcccctataataatatcactctgactcacttgcattccgatacgcttccttgcaatggagacagagtggtggtgctaagtagcatgcyaggaatgtcacacaggcctgatcacacccatgaccatgcagactatgtgtatgtcattcccaatgagtgttactgagaagaaaaggctgaggacttccttccagaaaacaagaagtcagacctttaattccagaattgcatg

SEQ ID NO: 538581 - DNA, 586 bp, Homo sapiens
ctatcctgaccctatcatggaaaacttcatctagctttggatcttgtgggtattaagaagatacactttctgtgacacacccttggaatccagatttcaaggatggcagttctttagcctgttgttaaagatgtatagtgcmtccatacagttctgaaagataccattctgtatgggttgaaaacagtcccagagatcatttgcaatcaagcatatgtgcgtatttctgtttggttcaatgcctcccaataccttttcccaactcattctgtttcctggaaaataattgatgaatttaatttgccctcattattggtttaagtgaaaatgttgttagatctcaaaagttgagaaacatatctcagggtaaatgctgaaagacatgattctttatcagaagcaccttgtggcttaaaaatatatatccaggacttagaagagctaacatcgtcttccaaatagcctggcagaagagtttgagaaagcagctccagaaggtggagtctggcagagtctggactactctgttcaagacacactctttaaagaagatttattttatagttaagcagggaaggtgaaactt

SEQ ID NO: 538582 - DNA, 625 bp, Homo sapiens
gcaaaggcatagaggcttgctcagggacaggggtcaaagtagaggatgccagattagcttggagagattacacaaagttctgaattccagcctaaggaaggcaatagagagcctttggagcattttgaaagaagattgatatgatagcaatcgttctttaaagtatttgctttgaagatagttgtctctgaaattatccatctctactaacctgtcaatcttgagggcagagactgtgtctagttcattgttgccatgggactcagggctgctactagccacttcaacatcactgtgccaatagtgaaagcaacccctctgagtgaacctagccatgcagggtcaaggctccatgagcttgccacgcccctgtgagaaaaattatccaggaagcaacaggcctacataagcacccatgggttggccggsagaatatgttagatttcagccccacttgcccatcactcagacatccttgtgctgtatgcaacctgcataacattaggttgagaccctaaggaaccacagggaggggactggtttagaggtgagcagattaggcactgaattaggctaatggcagtgggaaacgaggggagaaaagtaagacaagtgtctaagagac

SEQ ID NO: 538583 - DNA, 572 bp, Homo sapiens
cggaatcaccatcagaagataaacagtaatatgctaaatagaattattcctatttaaatatcgcagatagctctgatcctaaggagagcaagtacattttgatggtaagaatgtttctaactgtaaagcttatagtttattcataagtcaaccatttttacataagcaatctttttcccttcacttttagtttatgtacattaataccacatatcaccattttcagggcatttgcatcttacgctgaagaaaaatctgcaaaatctgcatctgttctttatttatctcaaagttgaatgctattgagattccaaaaattgtgtttgcaaagagtatgarggcaagtctcctagccaaaggaaactggatagagaagtaacttttgatgatctacatgatggtaccatataattcaagaaaacagttaaccaaaaaccctttagaattggctttgctatgaagttttgtcctcttagttagaacatagatgtgtttggggtaaagggaaaatcattttctaaaaataataataatgggcccagaagaaagaaaatgttaaaaggcctgtaaaa

SEQ ID NO: 538584 - DNA, 593 bp, Homo sapiens
catatgatcatagctctccatcaggttcttttaaaacaacacactagcgagaaagctctttttatccgmctccatctgctgttggtggtgatcagcatactgtgggcattgtggtatcatccgagattaggctgtgaaataggaagtggggttacaggcagatccgcaagtgtatgcaaactgttgagttctatctcttgctaaaaccaagggtgcccaattcaggtttggagagtagggaaagtaaggttatcagcgcattcctatcagggtcgttttcttttttgcactgctcttgttctggttttataaggagaacacaagcagagtctatggaaaatagttgccaaagcatacaggaaatactccttatactgaacaaatgcaagaaaacagaacgggttagaaaccgagggagacaaaaaggcagtgggtgccaaggactgtgaaaagcaaatgcaacgatagagacagcacagtctcaggcttatttttcaaaaattctcattgtaagcctctttcctttctaaatggagactatcttaacactttagctcgcattagacttaatttaataagaaggttgtaaacca

SEQ ID NO: 538585 - DNA, 593 bp, Homo sapiens
catatgatcatagctctccatcaggttcttttaaaacaacacactagcgagaaagctctttttatccgcctccatctgctgttggtggtgatcagcatactgtgggcattgtggtatcatccgagattaggctgtgaaataggaagtggggttacaggcagatccgcaagtgtatgcaaactgttgagttctatctcttgctaaaaccaagggtgcccaattcaggtttggagagtagggaaagtaaggttatcagcgcattcctatcagggtcgttttcttttttgcactgctcttgttctggttttataaggagaacacaagcagagtctatggaaaatagttgccraagcatacaggaaatactccttatactgaacaaatgcaagaaaacagaacgggttagaaaccgagggagacaaaaaggcagtgggtgccaaggactgtgaaaagcaaatgcaacgatagagacagcacagtctcaggcttatttttcaaaaattctcattgtaagcctctttcctttctaaatggagactatcttaacactttagctcgcattagacttaatttaataagaaggttgtaaacca

SEQ ID NO: 538586 - DNA, 567 bp, Homo sapiens
ctgctgtttcttctgttctctttatggcatgcttattattcagatctgaggccttttgttctggtcttttctttcctactttctgcagtgagtcaagattgtgccacagcactccagcgtggcaacagagcgagactccgtctaaaaaaaaaaaaaaaaaaattagctgggcgtgatggcaggcgcctgcaatcccagctacttaggaggctgaggcaggagaatcgcttgaacctgggaggtgtaagttgcagtgagccgagatcatgccattgcactccagcctgggcgacaagagcgaaactctgtctcagtaaataaataataaataagattctgagtataaacttacatatcaccctttgtatcagtcaaggtccaaggggattgccttacaaatggatacataaaactttacaggataccctagggttaagggaaagtacccaaggaaggmtcaaactcttagatagggatgtccctccccaagtttgggtttcagatcttgcagaggtgtggctgcagcccactgtatggcagggacatttgctggattgcgctgggtga

SEQ ID NO: 538587 - DNA, 481 bp, Homo sapiens
gctgagccatagatagcgtgaacttaaaagtgaaacttgtgaatattttaagaaccaaatatcttctggaagcaagctatatgctccacccaatgggcagatattaaaagcttaatttactttctttataactgctttttagttaaatggtcaactggaaaataattaagttctattagtctttttacttcagatcgcttttttttctaagtggaagtggagcttaagctgaataaaatttctctatatctagcaaaatttcaaagatttcagttccaaaagcagtcactttttttttttttttttttgagataaagtttcactctgtcacccaggctggagtgcagtggcttgaccacagctcaatgcagcctcaactttctgggctcaggtgattcttccacctcagcctcacctcccacctcagccttacctcctgaaagctgggaccacaggcrcaagcatcacacctggatagttc

SEQ ID NO: 538588 - DNA, 490 bp, Homo sapiens
gctgtgatgaagaccaagtagagacaaactgaaggttcatcagcctatgcccaaaattttccatctctgtaccacttaggttttagcaattggagaattcttgctatacttccttgaaatataagcacccaaatattttcatagaacattcctagtcactgtagtatgggagtagtaagaaaaggaagtttgaaatagaaaaaaaagcagcaaacaatagcatgaagtagaaacttgacctgtcccttaatggtttctgcaatgacgtttttggcagaagcttccaattctccgttgaactggtcacccaacatccgaaggcgaccagcaatgatagccacatcaaaagaacaaggctctcctatgacagagggaacacatttgttacaatgcttgaagcaatggcaagtcccaggaatcygggcaatgagaaaaatttgtcttgtcttttaaataattttcatatcatgatctcccaagagcttaaatg

SEQ ID NO: 538589 - DNA, 464 bp, Homo sapiens
ctgggctgtctgcctgggctggctgccactttcaaccatgctgtggtccaggtggaggactctaagaatttgacttggcctctccartgaaaagatgttagtttgatcacagagcgtctgtccttgcacaaggaaaagtgtgtcaccatatatctgagattctaagaatccaaacaaccatgatattacagcagaatggagccttgtagatgggatgttttttctgagacatctgttaccccactagtcgccagggctgtctggcctgatctggctggcatgttgcctctccctgtaaaagagtgcaaagacattggcaaatctcacccaaatatatatgaatttggctgtcagtttccaaaagttcacttggaagttaattatttggaactcagaacatattttcccataacagtaatataataaatggtgattatatttccaggctgacatgcaagtgtgtt

SEQ ID NO: 538590 - DNA, 601 bp, Homo sapiens
tgagaatcattgagctacctccaggtacccagggctgtgttaagatgttgccatcttctacggttttcatggcagcaagactgctggtacttccataatggcagtaataccagctctcctaactctagcccttactgtgacccaactatatcaatcagtcttcaaaacaaccctgtaagatagataccttgcattatcacatttttatagatggggagattgaagcttagggagkttaagtaacttgcctaagctgggcatggtggctcatgcttgtaaccgcagcactttgggaggctgaggcgggtggatcacttgaggtcaggagtttgagaccagcctggccaacatggtgaaacaccgtctgtactaaaaatacaaaaattagccgagcatggtggcacattcctgtaatcccagctactcgggaggctgaggcaggagaatcgcttgaacccaggaggcagaggttgcagtgagccgagatcgcgccgttgcactccagcctgggcaatgagcaaaactctgtctcaaaaaaaaaaaaagagtcacttgcctaagatagattgctgacagtgttagggctccaagctcctgctgt

SEQ ID NO: 538591 - DNA, 448 bp, Homo sapiens
ttttcctgtgactacctgatgacctgaatgattttccctgtgtttctaggagcttggtcctgaactcaccttgggccacccatagataggacatttattcctagaaacggtgttttggagctaacctttctgcctatgtagagaagtgtggctcattcaaaagatgttcacattagcctgtcaccaagtaggcctcagtggtggattccaatgaggccaactggattcagtgtctcaaagctcccacattgtcaccactaagaatttgtttttcaaaaatcaagctaaccacaaaatgaaacaagctataaccgctgrctacaaccctgacattccgaaactacctatttccatcattttctctgcagattcaaggtgtcatccccatgagctgtttcatggggattttgctggggcctgcggtgggacaaaagagggggagcttacc

SEQ ID NO: 538592 - DNA, 547 bp, Homo sapiens
tgtcctgggcacttattcctgctctttcttagagggctctgagggaagctagctgccatattgtgaggcagcccaayggcccacatgaatgaacttggaagtggatccaagagcctactcatctaatagtctgtgaacatggtgcttattttctttgtgggccaggaagctgaagcctagagaggggaagaaactctgtcaagattctctggctaaatttggacagacccaaactagaagtccagacctctactcccaggcgagagcttgggcactatagaaggctgcctctcagaaatacttctggaggtcacatcaggctgggacactggggatccattatggtcttggagttttgagattttctggagctagtccccaagccttgccgtcctgttgtgtgccaggagtgttgccttgctgtccacagtcctctttggcctcaagggctccattcccccatgaccctgccccccagggtttctgcagcctttctacctttactcctgatgggaggtgctgaccactaaccatctttaggggagca

SEQ ID NO: 538593 - DNA, 590 bp, Homo sapiens
ccattatggtcttggagttttgagattttctggagctagtccccaagccttgccgtcctgttgtgtgccaggagtgttgccttgctgtccacagtcctctttggcctcaagggctccattcccccatgaccctgccccccagggtttctgcagcctttctacctttactcctgatgggaggtgctgaccactaaccatctttaggggagcagttggaatcatgtcactaactagccaagggaccttgggcaagtcagtttccctctctggaaaatggggctttgcatgagatactctctacagctcctccttcttcagttttgcaattctttctcctagaagargatctttaaaatttcttgtggtcaaattgtgctcagtgggaggactcccaggatggaaaaccatagaacaccacctcccctgatgcttcccttgaaggtttccaggaggaagagatatgctttcatgcctcatcctgagccagggctgcctcccagcatgagcacctgtgacctggagcagcatgcctctgcctactgagggcctggcaggctgtgtttgtgaagtgatgcccgccacgcacctgg

SEQ ID NO: 538594 - DNA, 523 bp, Homo sapiens
ggcagcaatggaacagcattcctttctcaaaagacagagctaggagggaatggagtggaggagaccatcatgagagctcctgcatgaaaacccacaaaccattagtagagagagtaatggagaaggtaaggagagagagggaagggggactgtggtctgcacaagaggttgtgcagccagatttaaggcctggaagccacgctcctgagaatcacagtccacatgctgggttggggcagagagccacatgcagctcactagcagggaaaatcagggcctggagrcatagaaagccaagagtcaggcagcagcaactggctgaccctggtaggcagttccaggagtgggcacatctgggctcagggactggaagcaaaatggattgactcaagagtagacaaatatgggttcaaggtcaatcaaagagcagaaaccaggtgacacaggtgagtcaaatctagaaagagagttgtaaaagtgggcagacacaggtagaggaggacctaggaacagaggctagaaa

SEQ ID NO: 538595 - DNA, 653 bp, Homo sapiens
atgtccagctcccccaatggagggacgtggcactstcagacaatgtggccttggtgttttaactttggtcattctgtattgtgtttgctaacttttggggatgggggtggggaggaggagaggctaacaattaagataaaagaactgaaaggagcttcgacttggcaaaaacatattgaagagttacatgatcaatcaatcataaagcgttgaaattggaaggaaacttagtaaaaaaaaaatcttttccagagcagttttgacagtagttcaaataccctctgctttagtgtttccaatcctaacagcaaactgtctcaaaaagcagccggttccattgtcacaggactctgatagaaggagacagggttttcttgtattgagttgaaatttatctctgagcaacttccactcatttgtcttggttccattctctggagggagagtaggtcaacatcccttttaaaatgtggtgcccagaaagcaacacaagactccaaatgtggtctgatttagttaaagccctgtagggaatttagagggggaagaaaaataaagccactgagttaaccagctttaaaaaatgacagtcatagaaagctcccataagtggaaccttagaatcataaactaaagagagcctttgaaaatac

SEQ ID NO: 538596 - DNA, 276 bp, Homo sapiens
ttgaaattggaaggaaacttagtaaaaaaaaaatcttttccagagcagttttgacagtagttcaaataccctctgctttagtgtttccaatcctaacagcaaactgtctcaaaaagcagccggttccattgtcasaggactctgatagaaggagacagggttttcttgtattgagttgaaatttatctctgagcaacttccactcatttgtcttggttccattctctggagggagagtaggtcaacatcccttttaaaatgtggtgcccagaaagc

SEQ ID NO: 538597 - DNA, 653 bp, Homo sapiens
atgtccagctcccccaatggagggacgtggcactctcagacaatgtggccttggtgttttaactttggtcattctgtattgtgtttgctaacttttggggatgggggtggggaggaggagaggctaacaattaagataaaagaactgaaaggagcttcgacttggcaaaaacatattgaagagttacatgatcaatcaatcataaagcgttgaaattggaaggaaacttagtaaaaaaaaaatcttttccagagcagttttgacagtagttcaaataccctctgctttagtgtttccaatcctaacagcaaactgtctcaaaaagcagccggttccattgtcacaggactctgatagaaggagacagggttttcttgtattgagttgaaatttatctctgagcaacttccactcatttgtcttggttccattctctggagggagagtaggtcaacatcccttttaaaatgtggtgcccagaaagcaacayaagactccaaatgtggtctgatttagttaaagccctgtagggaatttagagggggaagaaaaataaagccactgagttaaccagctttaaaaaatgacagtcatagaaagctcccataagtggaaccttagaatcataaactaaagagagcctttgaaaatac

SEQ ID NO: 538598 - DNA, 512 bp, Homo sapiens
cttaaaggccattgcagggttattaactgggttaatttcaacactgttgtgtgtctgggaataggcccgagaaaagtgagatgagaactgctgtcagtggggcagttggaaaacacatatttatgggttaagtttgcagtcttatatgggagcrgttcatggtaccccagaataattacaatactaacatcaaagatctgattacagatataagatcactataaaagttataataataacaaaattatttgaaatattgtgagaattatcaaaatgtgacacaaagatactagatacaagtgaacacatgctattggaaaatggcactgatagacttgcccaatggaggattgccacaaaccttcaatttataaaaaacaaaaaaaaattatctgcaaagcacaataacatgaacaaaaattaaacgaggcatgcttgtactaataagcttggttttagtttcctattaaatatttccacatgttttgcatgtgatttaaatattaactata

SEQ ID NO: 538599 - DNA, 542 bp, Homo sapiens
ggccaggctgtggcttcactgtaaaacaagcggatggagggcggcagtcaagaccccctctgaggctgctgttaggagaggggcactaagggtcgggggctgactccctcaccgggtctgtcgcctgacttaacaggtgacctagacacaaagtggtagagtcatttgcccagggtcaggccgggaggatgggaccaagcgagaattccatctcaggccaagccctgacctcaggcatgtgggaggccagtgtttccttccagcacactccaggagcctcccttccccggtgcttttatcagggagcctgcacagcctgccaccctcaagagacgaggacattgtggcccaayctaggctgcagcccctgataactgtccccctccttaaccctgcccgataaggcgccttctggcctctggggaggctggccaggggaggggggggtggggcagggcagcaggtccggggcagcggctggtacagctagaccggtccctgtctggggaggatgcgtggctggccccaggcagtgagcacgc

SEQ ID NO: 538600 - DNA, 542 bp, Homo sapiens
ggccaggctgtggcttcactgtaaaacaagcggatggagggcggcagtcaagaccccctctgaggctgctgttaggagaggggcactaagggtcgggggctgactccctcaccgggtctgtcgcctgacttaacaggtgacctagacacaaagtggtagagtcatttgcccagggtcaggccgggaggatgggaccaagcgagaattccatctcaggccaagccctgacctcaggcatgtgggaggccagtgtttccttccagcacactccaggagcctcccttccccggtgcttttatcagggagcctgcacagcctgccaccctcaagagacgaggacattgtggcccaatctaggctgcagcccctgataactgtccccctccttaaccctgcccgataaggcgcctkctggcctctggggaggctggccaggggaggggggggtggggcagggcagcaggtccggggcagcggctggtacagctagaccggtccctgtctggggaggatgcgtggctggccccaggcagtgagcacgc

SEQ ID NO: 538601 - DNA, 555 bp, Homo sapiens
gctgggtccacaggaagcaagcatttcccagcaggaccaatacattcccgagccttgggtcctggtccctttacttactgtccccttcacaaagttggaggaaagttccaaataagttgccttggccaaacacagggcccagcaagacaaaggcccaggctggtgagagttgggtgtgtgtgggaagggaggacagacaggcgggaaagctgcaggacaaggaggatggggcttaagaggcagccgagggagccccctgtgataggaggcctgtgaggagggaggcaatcctgcggggcatggtgggcctggccatgacaggaaactccacaggggccccgaaggctgatggagctgggtcctagcaaaggctgagggaggagaggagggtgartggttctttctctctactgggcagggagctcccaagctcagttcaggtgtgagcaccctcccgagcagagggctaaggaagcagaggtggtcagggaggaacggtggaagggaagggtccatgggacagagccatgacagataccagtggctgcagcggca

SEQ ID NO: 538602 - DNA, 532 bp, Homo sapiens
agaggctcccagaaccccttgctggtgacatcaggcctaagcacccttttacgtggaattgataatgcctggcagaggtgggcctaacacagttctcaaaagatgaatcacccaggaactggttggaaatgcagattcctgggtactacctcagacctactgaattagaaatccaggggtggggcccaggcatctgtgtttttccaagacctccaggggattcccgtgcacactcaagtttaaaaacgacgaaactgatggaatccctgacatgacaacccctgccctagcatcctaccgaggtctgggatcagggcaggctgaggccgtaaggctgggcctctgagagccagactgagcagaactcaaggccacgggaagctggagtagtttgcctctgtgagtcacgccctccctgaagggaaaccccacagatgaaaggaagctgtcctgctgggttttgcarcctggcttcttggacctggatggtggaagcagtgcctcatcccctccacagacccacaggcccaca

SEQ ID NO: 538603 - DNA, 625 bp, Homo sapiens
ctcgctctgtcacccaggctggagtgcagtggcaagaaaaaggcttactgtagcctcaacttcctgggctcaagggatcctcccgcctcagtctcccaagtagttgggaccacaggcatgtgccaccacatctggctaatacacatatattttgtagagatgaggtctcaccatgttgcccaggttggtcttgaacccctgaactcaagtgatcgtctcacctcagcctcccgaagtgctggggttacaggtgtgagccactgcacctggcctgagctctttattgacctatttattcatttttctatccatgcacatacctggcctttcctctctccatccatcttttggagcatatgctgtgctcccaccacaccgggctagcacagtgctttctgccatgcagggcccaggtctcagtgttgcacattgctgcaccagcaaaacaggaagtgaacatgaccagcacaccacaccccccacagccctgcgcaggagggaggagagcagatgggcatggttaggcagaagccagaggatcttggtggccacactgattcttagtcctggtcactcttggtagcayggggaagaggtacaaggaagaggtacaagggaatgtacc

SEQ ID NO: 538604 - DNA, 524 bp, Homo sapiens
tgccctttgcctctgttccctttattccctggttctagcctcccttgctcttcctccacactgggttgtaatcatctgtttctgtctgtctcctccacagactatgagatctttgaagataagtctattttgaatttatctttgtgcccccaagagcagtgcttactaaacagttgatataaaataactattgctgggtgaataatgagatcccaaaaagatgccaactgcttcccactcttgccacccaatgcaccccaacccacacaagagctcacagctctgctggtcctcactaaggaaagatggggccccagctctggtctcaccatagctttcatacaggggccaagatgtaagacagtggaggaagaatgagaggggacaaaaatcaaccaaaattggcccactggaagtgggtgctgtgctgagccaggtgcccatctgataaaaatcaaggtttcrggagattggatagtgaggtacagagagatgggggatcttgggtttgattgagaatgatt

SEQ ID NO: 538605 - DNA, 524 bp, Homo sapiens
tgccctttgcctctgttccctttattccctggttctagcctcccttgctcttcctccacactgggttgtaatcatctgtttctgtctgtctcctccacagactatgagatctttgaagataagtctattttgaatttatctttgtgcccccaagagcagtgcttactaaacagttgatataaaataactattgctgggtgaataatgagatcccaaaaagatgccaactgcttcccactcttgccacccaatgcaccccaacccacacaagagctcacagctctgctggtcctcactaaggaaagatggggccccagctctggtctcaccatagctttcatacaggggccaagatgtaagacagtggaggaagaatgagaggggacaaaaatcaaccaaaattggcccactggaagtgggtgctgtgctgagccaggtgcccatctgataaaaatcaaggtttcaggagaytggatagtgaggtacagagagatgggggatcttgggtttgattgagaatgatt

SEQ ID NO: 538606 - DNA, 439 bp, Homo sapiens
aaagaagtttaaaaaaatagttacattatgtgatagaaatatgagtgattttctattttgtctaaatttttcattttttaaaagttatcatgcaagggagaaaccttttttttcttttctttttttctttttctttttcttttttttttttttttttttttttttgagacagggtcttgctctgttgcccagactggagttcagtgatgatcatggctcactgcagactcaacctgccaggaccccaaatagttaagccttcagacacacaccaccatgctcacatagatgtkgggggtctctctatgttgcccggactggtctcaaatgcttggcctcaagtgatcttcctacctcagcctcccaaagtgctgggattacaggcataagccactgcatctggccaacttcccactgtattttttaagaaagaaatcct

SEQ ID NO: 538607 - DNA, 462 bp, Homo sapiens
gtgcttccatgggaaatgatgcaatctctttgattctgttagaataatatggataataatacttgctttaggtaaggggcaggggagtgaattcattgagctgatttctgaaaaatatatagttcagtacgtggcacatataataggatgttcttatcagtattaatattagtagaattactgattccagggatttacaacctccctgatttgcacctcatgagatgatttcctggactggaaggcctgcatgtttgaccccaccaaacacatcttccttgagaccaaatattatcatagtttaccccagatactctctggagttcttctgtaatraagtacagtatattatgatatccttctaagcctgtctaactggtaaacagactgatcatatgaaatatgggcttatttcagtattgtgaaaaatacatcctaagatttaaaatatcaaaacatatt

SEQ ID NO: 538608 - DNA, 642 bp, Homo sapiens
ccagttgccataaagggtaaaagagacatcctcttaatatgaatgaagatgaccagagttcagcaggtttgtagttctaatgagtccgatcttcctgcactggatggcaactggcttattggtatgcagatgtttcttgggcatattttggtctcagcagaccctagaaagagcttaatgatttctgtccccagggttgtctgtattaaccttamgaaaaggcacatacggaaggaaaactcttagcactgacatggaacccttaagttaaaatttttttttttccccctgagttggaggaataatattcttcggtattctcttttcttggaactgggggttcttagtggaatacaaagtaacctatgccatagataattctatcattagacctaggattcacttttacatccctagggtaattggatctgattctttggtcttcatagtcctttgaattagaatgatactctagcaaccctgtaggattgtgtattgtatgtgttggaactgataaaagggattgttattaacatttgggaagactgtccaaagagctgcactaacggtgttttcaacaaacctacatttctagacatttaaaaattctctttgaagagacttgaaatgatctctgagttc

SEQ ID NO: 538609 - DNA, 621 bp, Homo sapiens
acttttttctactcaggtgctacatgttatagaatcagccatctgcagggtgttgtcagagaagagagcatgagagtgtgtgtgtgcaagagtgtgtgtgtcagcatgccccaggctgggtgtgcatccacacagaagggaaaggcccttcctgtattgccagttttggcattagtcctctacatgagcctcagaccttcgcattgtgcattttctcttcatgcatctgctttgccatttttgtttggatgaaaattgtgttcctaaaacactgctraactgaaccttcatctgatttcgtaactgtggacataagtagaaagtgaatagtttgaccactttgcccattaaaatagtttatatcctagaaagatgtgaagctacaagggtcacactttcggagcaaattttcttttaggcaaagtgcagagcctggagctacatcctttatatcctctggcacactcgggtgtggtcaaggcttccccatattttgaactgagccgtatgggtaactaggaattggagactaatgcaataataagcttacgcaggtttccttctaaattcaaactctctagttcctttgggtttgggtttggccatttgcttttaactatt

SEQ ID NO: 538610 - DNA, 592 bp, Homo sapiens
cttatatccccaaaactcagcaacaaattttgatcaagcaaaatagcaaaagaggaaagtagaaaactgagtttgccgtcatgtatttggagcatttgaatgcatgcatgtttattagactgagaaacgcattatgaaggaagtaattcaagaaattgcaattaagtatttgagaaggaaaccaaagttaagagggcatgaattctaccatgggaactgcaagaaaaacaaacaaacaaaaaaaggtattcatgtcctggtggggaaaagataacccccgaggagatgaaagagactcttacagagaaacgagactcacagataaggcaagggagatgggcccacggagccaggtcagtaaatagcgtaagaaatctaagtgacaagaaacattcaaagggatgtacacacatygctgggaggcagcccttttcccacaagaagggaagatgtaatcagcatgggctaaggataagaaatgacttcacccctacccagaatcacttttgctttgcctgccttttacacctgacaaaggagactgttcttggtggcgaacaaaagaaatggggtggaaagtataacagttttc

SEQ ID NO: 538611 - DNA, 649 bp, Homo sapiens
acttatatccccaaaactcagcaacaaattttgatcaagcaaaatagcaaaagaggaaagtagaaaactgagtttgccgtcatgtatttggagcatttgaatgcatgcatgtttattagactgagaaacgcattatgaaggaagtaattcaagaaattgcaattaagtatttgagaaggaaaccaaagttaagagggcatgaattctaccatgggaactgcaagaaaaacaaacaaacaaaaaaaggtattcatgtcctggtggggaaaagataacccccgaggagatgaaagagactcttacagagaaacgagactcacagataaggcaagggagatgggcccacggagccaggtcagtaaatagcgtaagaaatctaagtgacaagaaacattcaaagggatgtacacacatcgctgggaggcagcccttttcccacaagaagggaagatgtaatcagcatgggctaaggataagaaatgacttcacccctacccagaatcacttttgctttgcctgccttttacacctgamaaaggagactgttcttggtggcgaacaaaagaaatggggtggaaagtataacagttttcactctgggcaattagaataaagttagctggggctaagacctggggctggcagatgc

SEQ ID NO: 538612 - DNA, 669 bp, Homo sapiens
cctgccttttacacctgacaaaggagactgttcttggtggcgaacaaaagaaatggggtggaaagtatarcagttttcactctgggcaattagaataaagttagctggggctaagacctggggctggcagatgcagtcaaatgctctgtgcagatgcttatttgagagagaaaatgagactctccccaaagatgggagagtcagcgtatcttagcatgcagactgagaaggaggcaggacgccaggtcttacccggggggctggctgcagagaagctgggcagagtgggcccatgggaaaggggagtcctgcttcaagatcttggggggctcaatggggtagagccatgcctggaaagagggggcctcagctaatggtgcctttccaccacttgtcagccccaccccaaatggacaagaagaatgtcccatgggattggggggaaggaggaggagagagaggtaacaccattatatgtgcaaaggcgttctcattctttgctgcaacctcccttcagcccagctatcaagaagttaggccacagccactaccacctggtcctggtcctcattatttttccctggactgttgcaataacttccttagaggtcttcttctacatatgcctagcccctcgactcatcctacacccccagtctctctgctgca

SEQ ID NO: 538613 - DNA, 511 bp, Homo sapiens
gacttttagcaacaaggaagtgggcctgagtgcagcctgatgaatccttgattgtaactatatttttgtccagaaccatggcatgcaattcttgtcaaccctctgggattggtttcaaagtgataactttgaaaagagaaaatgggggtatgttggccaatgaggccacagcgagcctgacctcacagggccttgtgtagtaaagggttaatcttacccaaagagaggtctggccttggctctctgctcctgggaggtgatctctgtggccttgcaatgtcctgyctggtaaaagtgtttttttttaccttggggccttggggtacactggattgtgaaacaatatgatgggggccttaggtcatgtcatatcagtttgatttctggagaaagttttgatttctggaggaaaacaaaacatcagccaccaacacagtcgacaatatctatgtagtgagcctcaagaaaagctctagataccaaggctcagatgacctttcctggttggcca

SEQ ID NO: 538614 - DNA, 542 bp, Homo sapiens
tctaatattctactatgatgataaaaaccattacaaacatgtattttttgaaaataagttccaaatgacatcctgtgttttttttttttttttttttttgagacagggtctcactctgtcatccaggctggagcacagtggtgtgatcatggttcactgcagctcctgtgaacctgcataccttctgggctcatgcaaccctcaggccttacttagcctcttgagtagtgggactataggcacatgccaccatgcccagctratttttaatttttttgtagagatggggtttttccatgtttcctaggctgggacatccttttaaaatagcagacttattacagcaaaataacagttgtacagtttttctctctttttctgtaaaggggaattttttttaagagatgaggtcttgttatgttgctcaggctggccttgaactctggggctcaagcaatcctcctgcctcagcctcctgagtagctgagactacaggagcacagcactgcatctggcttgtaaaggggatttgacagtgccag

SEQ ID NO: 538615 - DNA, 488 bp, Homo sapiens
atcaggagcctgtcagaggggacctggtggcgggcacctggatggcagagggaggcggacaacagttccgggacagcgcgctcccatctcctgctgttttgagagcctcttcccctgcttcctgccccagaaagccccatgccttcctcgggaaggtcactcacgggtaagctcagcatggctgtgacgggtctgggtccggtgatgctcagcttgggagackccagagaacccgcacgtggggcctagtgcccgcagacacccgtggggtcgggggtactgtttgctctccaagccaccagccaggttgtgcacaacgccaggacaactcttcagggctgagacacgtggcttccctgggcccagcacctgggcagcacgttccgtgtgtatgccctgaaatcacaccaacgcatgcagccaaccccgagactcaaccccaaggccaggacacggggccagtcctggagcagcacaacggggtgccc

SEQ ID NO: 538616 - DNA, 493 bp, Homo sapiens
gctgccactggagaagtgattatcctctgagcttcattttgttcatctgtaaaacccggcgaccagcacataggaagaacacagcaaatgctggtgtcattgaacatgcagataaatgaatgattaacagtcaatgaattgaaaactgtttaccaaacccaggcttggaagattcaaaacagaaacagtggtgttgacagagcattatattttaatggatgacagtaaatagaaaaagggggttgattctggaaaagcggaaagagcttcagaaatactgggaagctcctggcttttggcgctcygtcttgttgaaatatttaagcctcaacatactttctcaacctcattgttagtgaaagaaggaagttctattaaagagagcaagagaaagaccatgcctcaatagccagagtaaatctagtttccatcacactcagggtgaccggttggtcaaggcaaagcagcatggatgctcctgatgtcaggattt

SEQ ID NO: 538617 - DNA, 623 bp, Homo sapiens
ttcccctcaccttgcctcctgaatcaggtcgtaaaacctaggaaggattttctgaccttctcctgaagcaggtcatcgtaagaccctcctgtgagcggtgccctccctagacccggagaaagggaacatccttatttctgaagacaaagaagaagctgaacaaacaggccttgctcagtttcccccagtttattcccatcagaccacactctttccccaatcacgtttccgcacacctggccacttctcgtcaaacctgttgtacaaaagaagccaggctgaactgtttctctgggtcatttccttatgaagkttcccgtgtcgagtaaaacttagattaactaaatgtgtatacttttctcttcttaatctgtcttttcttatatgggcctcagccctgaacctgagatgggcaaggaagatacatttcctcccgtaccgtgacaaaataagtgtcttctcgttcagagtttccgattccaaatccaggagtctttccactacatcaaacctaatggtaaatattcaagcatgtacaaaagaaagatccctgtagttgagtgcatccagagaagcgccttggctctcccagtagtactgctctgacctgaggaagaataagg

SEQ ID NO: 538618 - DNA, 623 bp, Homo sapiens
ttcccctcaccttgcctcctgaatcaggtcgtaaaacctaggaaggattttctgaccttctcctgaagcaggtcatcgtaagaccctcctgtgagcggtgccctccctagacccggagaaagggaacatccttatttctgaagacaaagaagaagctgaacaaacaggccttgctcagtttcccccagtttattcccatcagaccacactctttccccaatcacgtttccgcacacctggccacttctcgtcaaacctgttgtacaaaagaagccaggctgaactgtttctctgggtcatttccttatgaagtttcccgtgtcragtaaaacttagattaactaaatgtgtatacttttctcttcttaatctgtcttttcttatatgggcctcagccctgaacctgagatgggcaaggaagatacatttcctcccgtaccgtgacaaaataagtgtcttctcgttcagagtttccgattccaaatccaggagtctttccactacatcaaacctaatggtaaatattcaagcatgtacaaaagaaagatccctgtagttgagtgcatccagagaagcgccttggctctcccagtagtactgctctgacctgaggaagaataagg

SEQ ID NO: 538619 - DNA, 511 bp, Homo sapiens
gtgtatagtccactctcttttcctaaccaaatttaagttctaccgcaggaagagcatcaccttttttttctggaggcagggtctcactctgtcacccagacgggagtgcagtgacatgatcacagctcactgcagcctcaacctcctgggctcaagcgattttcccacctcagcctcccagtagctgggaccacaggtgtgagccaccacgcccagctatttttttttattttttgtagagctggggtctccctatgctacccaggctggtctcaaattcctgggctcaagcagtcctcccaccttgacctcccaaagtgctgagattacagacatgagctcccatgctccgccctcttctaggtcttttgctagtcctacaaagcgcaaatgttgccttccacataggaaacaytcactgccaggcccaggccagctctgaagacggctctgagggcctaggtggggtgccgtcagaggttggcctcctccactcatatggaggctccag

SEQ ID NO: 538620 - DNA, 582 bp, Homo sapiens
agctgctgcctctgcttcttcaccttactctgcttatagtagtccatgatcatcattgctgcatagattttgcccacagtcaggtcagaggctagaaacacaaatgtggcatgatggtgaacagggagtagataatgggagagagtgaggaacctctaagctttgttacccactctctggaacaggtctgtgctatcagtcacccattcatccaatgtatattgagggccsccatggtgccaggatctgaggatgcagagtgcatagatcccctgatctgtcctcagggggcttgcatgcccacctagtgatggtgacgatactgaggataagcagtacatgagtaagcatcacgcctaccattctaaatctctatagctaagtgacaacatcctttctcccatgaaggtttgctgagcagtattatatggagggagagagctatacacccaggaagtctcatccacaaccacagtgacctatcttaaagaacatgttttatccttaagtcccttttgtccttattaattgaaaagggcaaactttccttatctctttgatcactctgggttccccccaaag

SEQ ID NO: 538621 - DNA, 582 bp, Homo sapiens
agctgctgcctctgcttcttcaccttactctgcttatagtagtccatgatcatcattgctgcatagattttgcccacagtcaggtcagaggctagaaacacaaatgtggcatgatggtgaacagggagtagataatgggagagagtgaggaacctctaagctttgttacccactctctggaacaggtctgtgctatcagtcacccattcatccaatgtatattgagggcccccatggtgccaggatctgaggatgcagagtgcatagatcccctgatctgtcctcagggggcttgcatgcccacctagtgatggtgacgatactgaggataagcagtacatgagtaagcatcacgcctaccattctaaatctctatagctaagtgacaacatcctttctcccatgaaggtttgctgagcagtattatatggagggagagagctatacacccaggaagtctcatccacaaccacagtgacctatctkaaagaacatgttttatccttaagtcccttttgtccttattaattgaaaagggcaaactttccttatctctttgatcactctgggttccccccaaag

SEQ ID NO: 538622 - DNA, 493 bp, Homo sapiens
tgggtcatcatctgaccctctcatcgccactcagatttttgaaaaaacttttataatactattaattcaaatcaagtactttgggtttgaagaccttctgttcaaatttgattacaggtttccttagtttcccatgcctccagttctatgaaattacaagttcatctgttcttgacctaaatcagtcttttggagtggttgagagggaggtgagataatctgtgtacaagtgatttcaaaagcatcaagtgagctaccaattctgggctgtttgtcatartctgcatattaatagcattctcgcacagcccccaggctgtgtggaggagcagctctgtttgtatatatccaaacagtaggatccaacaatcctctgcctacttatcctctccccactattgttggatcctatggtttgggtatgttgtttggataatattggttctgttccccgaaacagaagaaatattatccaaacaatatatcctgttcg

SEQ ID NO: 538623 - DNA, 493 bp, Homo sapiens
tgggtcatcatctgaccctctcatcgccactcagatttttgaaaaaacttttataatactattaattcaaatcaagtactttgggtttgaagaccttctgttcaaatttgattacaggtttccttagtttcccatgcctccagttctatgaaattacaagttcatctgttcttgacctaaatcagtcttttggagtggttgagagggaggtgagataatctgtgtacaagtgatttcaaaagcatcaagtgagctaccaattctgggctgtttgtcatagtctgcatattaatagcattctcgcacagcccccaggctgtgtggaggagcagctctgtttgtatatatccaaacagtaggatccaacaatcctctgcctacttatcctctccccactattgttggatcctatkgtttgggtatgttgtttggataatattggttctgttccccgaaacagaagaaatattatccaaacaatatatcctgttcg

SEQ ID NO: 538624 - DNA, 640 bp, Homo sapiens
gcaaaatatctcaagcactgatcttaggttttacaatagtgatgttattcccaaaagcaacttggggaggttcagagtcttgcagccaggggctgcacaacccgtaaactgtaatttctaatcttgtagctaatttgttagtcctgcaaaggcagactggtcctgaggcaagaagatggccttttcaggaaagggctgttatcaatgttgtttctaagtcaagctgtgaactgaatccatccccaaagttagttccgtctacacccaggaatgagcaaggacarcttaacagttagaagatagagcttgttaggtctgatttctttcactgtcataatttcctcagttataattttgtaaatgtggtttcagttccactccacgatgcacaggtcatgtttcaggtctcatgtgctaggctgagcagaggaaactaggtagagaacatataggacatgtggccaccctcctgcccttgaaatacctgaaggccttctgtgtaacccaagactagttccacctgagtctttgggggaaaatttgggagaatttgattcagtatttggataactttttcgtgggcagatctgattatagaaagaataggcctcatcaagtttcctggtatgggagtgtatgc

SEQ ID NO: 538625 - DNA, 660 bp, Homo sapiens
tacttaagaatctcttcccccagataaatctctgaacattctgtgaaaaataaatgcatctaaacttctctaacttggaaaaagtttattttagtcattgttttatggcaaagatgagataagaagtgtgaagtgtcctaagttgaggatggcaatagatctattgccaaaaggatcacagatattccctaatattatcaatccttccctaatctccattcatgccggtattcttaatttgtgttccatgaatcaagggccactgggctatgactcagtagttctcaactcagggtgattttgtctacctggggacatttgacaayacctagatttcttttttggttttcaaaactcaaggaggtggtaggtgctactgataccaagtggatagaggctaaggatactgctaaacatcatcaacacacaggacagatcccacaactaagaattatatggctagaaatatcaatagccctgaaattcagaaaccatggaatgggcttttagaggtacatgattgtcgtgtgtgtgagtgatcattcagtaaaccctagaagggcattgtttcattaaggttattgagaataaatatgtcccccaaatgtttaattatcgctgacttagagtgaaaaaagctgtagaaaatagagcagagac

SEQ ID NO: 538626 - DNA, 565 bp, Homo sapiens
  misc_feature (1)...(565): n = A,T,C or G
tgccaataggaaaggccacctgagagccaggcatgttccacatgnaggctctatcttcccttttctttgtcaccacgtgtacagtaaggaaacaggcaacatggcatcagccagatagagaacccatctgcataataaaagattagggtggggtggccagctttttcatgccctatgcaaatggcacatctagccctaaccagtttttcgcaccctatgcaaatgacacacctggtccaaccaatcttttgtgccctatgtaaatccaataccacctcctcaagctcatctataaaacctgatgyatttcacaatggaccagaaaacctgctcgggacccctctctctgcaggagagagctcttctctttctttcacctattaaacctctgctcttaacctcactgctcgtgtgtccgtatctttgatttctttggcgtgggacactgaacctcgggtattaccccagatgaatgatgctgctttgcattgtttctatagtcaattgacctcatcaattgtgctcagtttataatctctgaactttttctacctgaggccctttt

SEQ ID NO: 538627 - DNA, 592 bp, Homo sapiens
acctgtttccaaaacactattaaaataaaaactcatactcagaccttggatcaactttatatttttgttttttatttagaggcaatgcatattttttctctatactttcagaagcagaccaaaaacattcataatgrtaagtaatgcatgggtttctttgtttgtttgttaagttacatcctcttgagtgttgatgggattggaaaaattaatgttaaggggtgaggagagtgtggaagaaagaagtgatgggaagaaattaaataaataaaactggaaagtctcagaatataaaatcaatgtgcaaaaatcacaagcattccaaaacaccaataatagagagccaaatcatgagtgaactcccattcataattgctacaaagacaataaaatacctaggaatccaacttacaagggaaaggaaggacctcttcaaggagaactacaaaccactgctcaaggaactaagagaggacacaaacaaacggaaaaaaattccatgctcatggataggaagaatcaatatcgtgcaaatggtcatactgcccaaagtaatttatagattcaatgctatccccatcaagctaccatg

SEQ ID NO: 538628 - DNA, 592 bp, Homo sapiens
acctgtttccaaaacactattaaaataaaaactcatactcagaccttggatcaactttatatttttgttttttatttagaggcaatgcatattttttctctatactttcagaagcagaccaaaaacattcataatggtaagtaatgcatgggtttctttgtttgtttkttaagttacatcctcttgagtgttgatgggattggaaaaattaatgttaaggggtgaggagagtgtggaagaaagaagtgatgggaagaaattaaataaataaaactggaaagtctcagaatataaaatcaatgtgcaaaaatcacaagcattccaaaacaccaataatagagagccaaatcatgagtgaactcccattcataattgctacaaagacaataaaatacctaggaatccaacttacaagggaaaggaaggacctcttcaaggagaactacaaaccactgctcaaggaactaagagaggacacaaacaaacggaaaaaaattccatgctcatggataggaagaatcaatatcgtgcaaatggtcatactgcccaaagtaatttatagattcaatgctatccccatcaagctaccatg

SEQ ID NO: 538629 - DNA, 442 bp, Homo sapiens
gtttgtttcattcattcattcattcactcmgtaaatatttatggagctaccactatgtgccaggtactgttccaaatactgtgataggggctgaagaacacagtggtggattatgtaaagccttatctagtgagagagactgaaaataagtgaatgcataacttaatgttacaacataatagtggtatgaaaaaaatattctgcagggtaagagacagagggtaggtgggattctctgtggaatagagagtctgtactctaactcctgggttcagtcctctgcttcatcctacagactcttattgttgaaagaaactgatagtcatgaaatgtcgtgtagcccccttttattgcagacgctacccaggggttggaatgtgcacatttgagcaccagaacgcatccagcacaaggttatctcagcaatcacaggctatacaca

SEQ ID NO: 538630 - DNA, 665 bp, Homo sapiens
gcaacttgagatttttagcttgaagaagcaaatcaccagaggaaaagaggtgaatggacatgtttccttgatttgccatcttggactttgccctttcctttagagcyctctaatttttaatttttttagacaggacctcatcgtgtcacctaggctgcagtgcagtggcaccatgttggctcactgcaaccttgacctcccaggctcaggtgattttcccacctcagccactcaagtagctgggactacaggtgtgcgccaccatacctggctaattttttttatttttagtacagacagggtttcaccatggtgcccaggctggtctcgaactcctgaactcaagcaatccatctgccttggccttccaaagtgctgggattacatgcctgagccaccacacccagccagagccctgtaattttaatccctgctaccaccactttactggcccttgtgataagttgcttccctttcagcactgttggttccccttagaatagctcaaaatttcaaaatcttttcattaaatgctaagagaggctacagaaaagaagaaacacaaagaatctaggttttgatcttaccttggtttatttgctcccaaggttcacagactctgtcttactgaacgctttgtcttaagccccacaggactggtacag

SEQ ID NO: 538631 - DNA, 665 bp, Homo sapiens
gcaacttgagatttttagcttgaagaagcaaatcaccagaggaaaagaggtgaatggacatgtttccttgatttgccatcttggactttgccctttcctttagagccctctaatttttaatttttttagacaggacctcatcgtgtcacctaggctgcagtgcagtggcaccatgttggctcactgcaaccttgacctcccaggctcaggtgattttcccacctcagccactcaagtagctgggactacaggtgtgcrccaccatacctggctaattttttttatttttagtacagacagggtttcaccatggtgcccaggctggtctcgaactcctgaactcaagcaatccatctgccttggccttccaaagtgctgggattacatgcctgagccaccacacccagccagagccctgtaattttaatccctgctaccaccactttactggcccttgtgataagttgcttccctttcagcactgttggttccccttagaatagctcaaaatttcaaaatcttttcattaaatgctaagagaggctacagaaaagaagaaacacaaagaatctaggttttgatcttaccttggtttatttgctcccaaggttcacagactctgtcttactgaacgctttgtcttaagccccacaggactggtacag

SEQ ID NO: 538632 - DNA, 621 bp, Homo sapiens
ttctaatgctgtgctcctttctcccaacaccccacccccaaaggagcttttaactccccagtccctgtcctgaaccactgaagggaaactcaaaaatactttgttcctctacaaggagctaagaatcgaagctttaacttgcttcaggacagtacaaaatgctaccataaaaatatgaaagcctaatatctcctatacacatgtgatgtcatgtttactgcgtgagacagtctgttattctctgattgtctcatacatgttaggtccatttcctccgtaagtaacatgaggatcagggccatactccaaattgcctttgtttatataatagcaatgtaggcattcaataaaacagtagcttctggttgattgtcataactcctatgacatacagtaactcttgtctttaataataataactattattattattatgctaactaacacatatgctccaggyattgatttaagcgtattatacttacccattaagtccttttaaggactgtaaggtggttacccttgtaaaaataagtaatgcaaaatctaagctgttggaactcaaaagtattttgagccttcaaggaatgtgaattacagggcctgagctacgtgacaggc

SEQ ID NO: 538633 - DNA, 608 bp, Homo sapiens
gcgtcccaggaaaggaacatagtacaaaagagatgcacaggaagtcatggtgattcaaaactcagcagagagagaatgtttggataacacccttaatacttcacttcctgcccacaagaatggcaagggcttcaaagtgaccacctccttccttgctccacccaaaccctgacccttgatgtatgacagcaaagagcgatgaaggtcatgtccccaagtatcttgcaagattgctggcagggacactaagaagaactcatccagattttttgycacgatattttttgccacaatagtttgagttttcttttgccaactttacatgagctttgcttttgatccaccccaatataggaagatcagggttcacatccttctctccctccccaggaaggaccttcccggctggctgcagggactgtccaggactctgatgtgctcccagggaggggaatttataggggggttagcatgaatcagaaacagtactgggcatttcacatctgttatctaatttgcagagatgaatgtttaaagacagtctgaagcaccttccctctaacctgccttcagagtttgtttttaaaagttaaagaatactaccaagc

SEQ ID NO: 538634 - DNA, 608 bp, Homo sapiens
gcgtcccaggaaaggaacatagtacaaaagagatgcacaggaagtcatggtgattcaaaactcagcagagagagaatgtttggataacacccttaatacttcacttcctgcccacaagaatggcaagggcttcaaagtgaccacctccttccttgctccacccaaaccctgacccttgatgtatgacagcaaagagcgatgaaggtcatgtccccaagtatcttgcaagattgctggcagggacactaagaagaactcatccagattttttgtcacgatattttttgccacaatagtttgagttttcttttgccaactttacatgagctttgcttttgatccaccccaatataggaagatcagggttcacatccttctctccctccccaggaaggaccttccyggctggctgcagggactgtccaggactctgatgtgctcccagggaggggaatttataggggggttagcatgaatcagaaacagtactgggcatttcacatctgttatctaatttgcagagatgaatgtttaaagacagtctgaagcaccttccctctaacctgccttcagagtttgtttttaaaagttaaagaatactaccaagc

SEQ ID NO: 538635 - DNA, 626 bp, Homo sapiens
gcaacagagtgagactccgtctcaaaaaaaaaaaaaaaaaagtggtagcctttcttgtcccttcttcctttcccccaagaggctctactgcaggtgacattctgtgtttttttgtttgtttttttttttggcgttattatttccaaggtaggttaaaataagcaaagrgggggtctgataagaatctattcttgttataaatctgagtgggaggccttctatagtttgacaatattccacaagtgactctgacatgctgtcccttctgcccaaccaaggactacccattcaaaccagagattcccaacactgtctacatattggactctcctggggaacttctgaaagcttattggatgccctggtctcaccccagactgattgcatctcctaggataggttgggagccctggtctaactgaaccatgatgcctcctgcctttcgtttcacgttttataattttcaaagctctttctcctaaagatcccatatgatttccagaacaacttttggaggtacatggaggcaggtagatgaaggcagcatgtgaatgctttgtccattgtgttattattgcattcagtggatgaagaaattgatgctcagagatgttaaacaacttgcc

SEQ ID NO: 538636 - DNA, 626 bp, Homo sapiens
gcaacagagtgagactccgtctcaaaaaaaaaaaaaaaaaagtggtagcctttcttgtcccttcttcctttcccccaagaggctctactgcaggtgacattctgtgtttttttgtttgtttttttttttggcgttattatttccaaggtaggttaaaataagcaaagggggggtctgataagaatctattcttgttataaatctgagtgggaggccttctatagtttgacaatattccacaagtgactctgacatgctgtcccttctgcccaaccaaggactacccattcaaaccagagattcccaacactgtctacrtattggactctcctggggaacttctgaaagcttattggatgccctggtctcaccccagactgattgcatctcctaggataggttgggagccctggtctaactgaaccatgatgcctcctgcctttcgtttcacgttttataattttcaaagctctttctcctaaagatcccatatgatttccagaacaacttttggaggtacatggaggcaggtagatgaaggcagcatgtgaatgctttgtccattgtgttattattgcattcagtggatgaagaaattgatgctcagagatgttaaacaacttgcc

SEQ ID NO: 538637 - DNA, 430 bp, Homo sapiens
atgtttcctgccttccttctcccgccatgcctgcttttgaagactcactcttcacgcccgattctcacaatggcttagctgccatgttgtcagaggcgtgtgaaccagagcaactccatcttgaataggggccgggtaaaatgaagctgagaactactgggctgcatttccagatggttgaggcattctaagtcccaggatgagctaggaggtcagcacaaaatacagatcatgatgaccttgctgataaaacatgtttgcagtaaaaaagctggctaaaacccaccaaaaccaagatggtgatgagagtgacctcagtcactgctacactcccacmagcaccacggcagtttacaaatgccttggcaatgtcagaaagttaccctatatggtctaaaaaggggaggatgaataatccacctcgtttagt

SEQ ID NO: 538638 - DNA, 430 bp, Homo sapiens
atgtttcctgccttccttctcccgccatgcctgcttttgaagactcactcttcacgcccgattctcacaatggcttagctgccatgttgtcagaggcgtgtgaaccagagcaactccatcttgaataggggccgggtaaaatgaagctgagaactactgggctgcatttccagatggttgaggcattctaagtcccaggatgagctaggaggtcagcacaaaatacagatcatgatgaccttgctgataaaacatgtttgcagtaaaaaagctggctaaaacccaccaaaaccaagatggtgatgagagtgacctcagtcactgctacactcccaccagcaccacgrcagtttacaaatgccttggcaatgtcagaaagttaccctatatggtctaaaaaggggaggatgaataatccacctcgtttagt

SEQ ID NO: 538639 - DNA, 521 bp, Homo sapiens
aaagtttagtagattgaactccaataggtcttgacgatgatccttacayacgtatttccaaaacatatctctctttcttgtttcaagatgactgcaaactactgggtcttagaaatgactggagaattttgtttctgtgtgtcatttgaaagcatttttatgccttaagattgtggccaacacaaggaatgtaacaggagtaaaaatcaagagaaacaacagataacagaaacaaacccacacctacttctggaagtggaattatcagggacatattgtaaataagctttttattatgtaaattacaaacttgaacatatttgaaggaaaaataggctctaaaaaatctagcagatatggaaaagaaccaaatagaacttccagaaatagaacacataggaaccgaaattaaacacactggagtttcatagaaaagtttaagggactgccctagttgggagaagatgagaggcaaggccttcaatggaaaggaacattaggcttcgtataattggaattgt

SEQ ID NO: 538640 - DNA, 521 bp, Homo sapiens
aaagtttagtagattgaactccaataggtcttgacgatgatccttacatacgtatttccaaaacatatctctctttcttgtttcaagatgactgcaaactactrggtcttagaaatgactggagaattttgtttctgtgtgtcatttgaaagcatttttatgccttaagattgtggccaacacaaggaatgtaacaggagtaaaaatcaagagaaacaacagataacagaaacaaacccacacctacttctggaagtggaattatcagggacatattgtaaataagctttttattatgtaaattacaaacttgaacatatttgaaggaaaaataggctctaaaaaatctagcagatatggaaaagaaccaaatagaacttccagaaatagaacacataggaaccgaaattaaacacactggagtttcatagaaaagtttaagggactgccctagttgggagaagatgagaggcaaggccttcaatggaaaggaacattaggcttcgtataattggaattgt

SEQ ID NO: 538641 - DNA, 521 bp, Homo sapiens
aaagtttagtagattgaactccaataggtcttgacgatgatccttacatacgtatttccaaaacatatctctctttcttgtttcaagatgactgcaaactactgggtcttagaaatgactggagaattttgtttctgtgtgtcatttgaaagcatttttatgccttaagattgtggccaacacaaggaatgtaacaggagtaaaaatcaagagaaacaacagataacagaaacaaacccacacctacttctggaagtggaattatcagggacatattgtaaataagctttttattatgtaaattasaaacttgaacatatttgaaggaaaaataggctctaaaaaatctagcagatatggaaaagaaccaaatagaacttccagaaatagaacacataggaaccgaaattaaacacactggagtttcatagaaaagtttaagggactgccctagttgggagaagatgagaggcaaggccttcaatggaaaggaacattaggcttcgtataattggaattgt

SEQ ID NO: 538642 - DNA, 521 bp, Homo sapiens
aaagtttagtagattgaactccaataggtcttgacgatgatccttacatacgtatttccaaaacatatctctctttcttgtttcaagatgactgcaaactactgggtcttagaaatgactggagaattttgtttctgtgtgtcatttgaaagcatttttatgccttaagattgtggccaacacaaggaatgtaacaggagtaaaaatcaagagaaacaacagataacagaaacaaacccacacctacttctggaagtggaattatcagggacatattgtaaataagctttttattatgtaaattacaaacttgaacatatttgaaggaaaaataggctctaaaaaatctagcagatatggaaaagaaccaaatagaacttccagaaatagaacacataggaaccgaaattaaacacactggartttcatagaaaagtttaagggactgccctagttgggagaagatgagaggcaaggccttcaatggaaaggaacattaggcttcgtataattggaattgt

SEQ ID NO: 538643 - DNA, 494 bp, Homo sapiens
gtggctgcgctggagtctctgtgaatctgctgtgattctgggggctgcccrattcatgactcattcattgctcaattaaactgctttaaagttaattcagctaaagtttttcttttatcactggttttccacatctatttgaataattacttttaaaaatctgtgcagcaagaggcattcctctcagccttgcttctgcaattgatttttatggccttaactgacatgatgggagtaaacttcctggagtgggtacgcttggatttggtgttaaccagagaagtggtggatggcaggcaaggctgggccacatgacgagaggaggaaccaacaccagttttacagacaccaatttgtggggctgtttattgccacgacaaggcaatcagctttgctgattcatgttgcttttttctttcatgtttttaagaccagagttttcacagtctgggcaattttaggaggttccaaatttttccatcatttccatgttt

SEQ ID NO: 538644 - DNA, 643 bp, Homo sapiens
gtatttaaatgttgacactgccatttataaaaacacatattgtggctaggcattgtagcttatgtctgtaatcccagcactttgggaggccaacgcaggtggatcacttgaggccaggggttcgagaccagcctgggcaacatggagaaaccccatctatactaaaatacagaaaattagccgggtgtggtgatgcacgcctgtggtcccagctactcaggaggctgaggcaggaggatagcttgaacccagaaggcagaagttgcagtgggctgagataggacaacagagacagactctctctcaaaaacaaaaaaaaaatacatattttattcacccaaattattctttcggtgccctctatacctcagtaagggaaactgctctattgaagttcccaagggaggcccattacttatattccccagtcacgcactgaatgtctctatgtaaaggagtcagttagtgactctggagaagatacgtgtgagagatcaacaggaattgaagaaaaggaaactagtttaaggagagaaatgggccgagaaggtaccctggaggaragcattccttttgggatgcatcatgaataaaaggtttgaggcagcaatgagctgtatatgtctaaaggaaaacgaggatg

SEQ ID NO: 538645 - DNA, 665 bp, Homo sapiens
ctgatggtagaataaatcatacagacattttggaacacaaattggcagtatcagcaacaattgagcatgaacctactgtttgttcaagtgattccatttctttatatctgctttagatgtgaagaaacaactatataaagaggtctagacagaggtattatttgcaacattttaatagcaaaaagttggaaacaggaaaatagtaatgtaaatgatggtatgtctatattgtggaacattgtgttgcaattaagaggaatgaggtactggatagaaaagatatccaagataaattctgaaatgaatataccggctgggcatggtggctcaagcctgtaatcacagcactttgggcaggcggatcacttgagattcaggagtttgagaccatcctggccaacatggcaaaacgttgtctctattaaaaatacaataattagctgggcgtggtggcacacgyctgtaatcctagctacctgggagactgaggcaggagaatcgcttgaacctgggaggcagaggttgcagtgagccgagatcgcgccattgcactccagcctgggtgacagagggagactctgtctcaaaaaaataaattaattaattaaatgaatacagttcctagttaaggaaatactaacctctattataggtaaacatcaaaa

SEQ ID NO: 538646 - DNA, 640 bp, Homo sapiens
tgctactattgtgcaaataccctgctaatttttacaactgagttctgaaagaggatggcaagagaagggactcgttatccatatgccttgtttcactatcacttcactccaagaggtccctctaaatagcccatgtggtttaaagtaatacagagtattattagcaggagtgtgtgccctaggccatatgggaacataaaatagtatttggaagatcttccttttatttattgatttcaacctcagagtggcaaatgatggcaatcatcatcatgagccctgcagcaatgacctaaaaggaggagggcaagcaagctaaagaaactaagagtagattctgcaaagtctgaatagcctcccacctcagagaggtagatgttgagaaggaggcagaaacagaggtatctatttgggacttctcccacttgacagtgtcctggggaattaacatgagcatcttctatcccttccatgtattaattctccagcattataaaaatgtcatggcctggccagaacctttaccaaagagaaatagaccagccctttaatagtaaaakttagaagggtgaggggctaacttcggaacaattctaaatttattctgctttaggcaggactgaagagactgtagtctcct

SEQ ID NO: 538647 - DNA, 475 bp, Homo sapiens
gatcaacatggtgaagccccgtctctactaaaaatacaaaaattaactgggcgtggaggcgcatgcctgtaatcccagctactcaggaggatgaggcaagagaatcacttgaacctggaaggyggaggttaaagtgagccgagattgcaccactgctctctagcctggacgacagagcaagactctgtctcaaaaaaaaaaaaaaaaagtgagattaacatggatagaaagagtctaagtactattactcaagaaaatgtggtcatgacagaaggccatagccctacccagaactggagctgattttgggaacagtgaaaaatataaaagtacaagcagcagcaggaatgccttgcaggcattcctaatctccagtgtggaacaagggaagccattccttatttatgtcagaagggagctcagagaagtaagccaactagcttagacaggggtagaagtttgaaagaagcaccca

SEQ ID NO: 538648 - DNA, 667 bp, Homo sapiens
cctaccctatgcaaaagtttttatattgtcaccattttaaagataaatatttgggatacggtgtcatttttctctagttttgaaagtttcagatttcacacattctttttcaaccttccttttttcattcaacctgcagtttatatttttatagcttgggaaatgtaaatcatttattttaacttgggaataaaccataaatgtttatgtgtttccttaaaatggaaaactaagtcatttgaaaactctgccattgcaaacagtgttttgtccatgtgtacattgtgcatatgcttgraagttaatttagtatagaaattggaagttattagtattaattatttagcctagatgtgtggttgctaaatggtggcaacacactttaaaatttactgtaaaaaaataaacctttaacatttggcctgtattgttccagttctacttgagaacataatcctgtctctttctttggaatgtacagcatcaagatgaatgtggatttttacgtcttccttgttgttgtgaaatgtccatctttggaattgacccagtataaatggctggtgcaagtggatactgcagccttcttgtgtcaacgtaatttacactgaccttgctattaatttcagtagctggacactccctgcacattgatgtgataaaagca

SEQ ID NO: 538649 - DNA, 582 bp, Homo sapiens
agatgagctctttggttttctggacaaggtctgaagctatgtaaaatggtgcaagcactaagagattgtaactaagagctcatgtgttagtttataatatatcagttatgaactgtcaagttcattaatgtctgacagaggctttaaacagttaagtttgatcacagttagacataatcactttactatataaaataaatttcacaatatataacagagcaccgcaaagtacttcatctaccatccacaaatttgcttgaagaatatcctacacctaggttttatrtcggttgtaatataggtcattctgttatgggctcttcccattcagagcattccatttattgaggcatgccttcctccggtcaattaccaattctttgaatgaaaaaaactttttttaaaaaatgagtatttttatagcttatatagattcttaatttgtgcattgtgggaacgttttatactagacattggatataaaatttattgcatgcagcaacctgattaagtaaacatgcagtcagaaatagtgaccttccaccgaagctttctgaagtctattctgatctccgttcggca

SEQ ID NO: 538650 - DNA, 388 bp, Homo sapiens
ttttctttggatgcccaaggtcaatgcaaaactggatttgatgttgaagattgcagagggtgggcagtgatgtgaaggaaaaatggagtcagccaggaggccttcttgaggcaaggaataagagaaagccccaactcactgggcattccctatcaccaggcctttttgatgtgtacataatacaatatatacatagatggagtactctgactgcagggtgttcaatatgcttatgatctttgtggatatctgtaccagtatttaasttggtaagagaggaggtttgaaagaacctgctgagacctcctctttgtgatatttggactttttaacccaccttatctctaatattatctttagtaagtagaattaatgttctcatattaag

SEQ ID NO: 538651 - DNA, 411 bp, Homo sapiens
ggaagccttgtcttttgaaaattagtatttaatttacagggtcctgaggttacttatttcattaaacccattcaaccaataagggaaattcattaatgactgcaattaacaattaattttgccttcagtttcttgatctctgttactgcagtaacattagccgtatgaggmgattctcaaaccatcagaggttgttgggatgaagtataaggacctctaatatttagggttatgcacacaattcctgttacattgtttgaatgaatgtgattcctggatcctgccccaagactgcagtcagcatcaacttggctttaacggacaattctcccttggctgatatggcttagtaattctgaccatagtggtataattgagataactttttgctgctctgtctttaatagcact

SEQ ID NO: 538652 - DNA, 536 bp, Homo sapiens
ccgtttaattagataaatccttcaagcacgtggcctggagttcgtcatggaaattaacctgctcccagatctcagatagtgaaacaagaaccggagtgttttggcatagcacagtgaaatgggagaggccgatggagtttcawacacctcatcttccataagtgcccctcgcccctccagtgccccccgcttcacggcctcatgcccttgcttccttaggtcactgcctccaccccacctctgcttctcctcctggccccgccctgcctgtctcgtggccctccacccaggcctggggagcacccatccctggggcaggtgggaaacctcagctccatccatgtcaggggctaaagggacaaccgttgtcctctgccccttggctaagcgccgaggctctgcgatgagctcaggccaagacccaactgaggctcagcccacaacggctgcttcatcctcctcctgcgcccctgctatgtgctgctcactagcagtgtgcgttccgtaaaataaagctcaaagtggaaccccagcaa

SEQ ID NO: 538653 - DNA, 536 bp, Homo sapiens
ccgtttaattagataaatccttcaagcacgtggcctggagttcgtcatggaaattaacctgctcccagatctcagatagtgaaacaagaaccggagtgttttggcatagcacagtgaaatgggagaggccgatggagtttcaaacacctcatcttccataagtgcccctcgcccctccagtgccccccgcttcacggcctcatgcccttgcttccttaggtcactgcctccaccccacctctgcttctcctcctggccccgccctgcctgtctcgtggccctccacccaggcctggggagcacccatccctggggcaggtgggaaacctcagctccatccatgtcaggggctaaagggacaaccgttgtcctctgccccttggctaagcrccgaggctctgcgatgagctcaggccaagacccaactgaggctcagcccacaacggctgcttcatcctcctcctgcgcccctgctatgtgctgctcactagcagtgtgcgttccgtaaaataaagctcaaagtggaaccccagcaa

SEQ ID NO: 538654 - DNA, 331 bp, Homo sapiens
cttccttaggtcactgcctccaccccacctctgcttctcctcctggccccgccctgcctgtctcgtggccctccacccaggcctggggagcacccatccctggggcaggtgggaaacctcagctccatccatgtcaggggctaaagggacaaccgttgtcctctgccccttggctaagcgccgaggctctgcgatgagctcaggccaagacccaamtgaggctcagcccacaacggctgcttcatcctcctcctgcgcccctgctatgtgctgctcactagcagtgtgcgttccgtaaaataaagctcaaagtggaaccccagcaaatgtc

SEQ ID NO: 538655 - DNA, 252 bp, Homo sapiens
gttctcttctgcctgcattggttgagcccctactgtatgccaagcccaatgctgtgctctacggggaaaagtaaaatattattagctcatggtactggccttgtatatgctctcaggcctggaggagaggagatgacatgtgccttcctagagtccctttctaaatagccaagttcttcttccacccataccccctgggtctgagggctccagtcctcaggggckcaagcaccccaggctcagccctggcag

SEQ ID NO: 538656 - DNA, 482 bp, Homo sapiens
atctggctgagctgcagcttgggtttttatgatggaaaaataaaataaatgcaggcacctttggagggctaagccacgcagcggcatctcctcgtcaaagtggctgccctggctcaaggccgtgcccgctgcctgagcaggggattgggtggggcttggaaaggctcttggccccggctcctcttcttcctgggtcccgccaggtcagtggtgcagccccagcctccatcagcctccttctagatcggttggcccaacacttttycagggctcagccatttctccacctggcccaccccccatgcccccaggccccaaggctcaccttctaacacggccttccctgagctgatttttacaccctgaccaccctggccgctgctcccacctcttcctccttttcctccttctcctcctcatcttcagagggggaaggaagttgcactgtagtaattaccgcccgtgggtccccacggcaagca

SEQ ID NO: 538657 - DNA, 590 bp, Homo sapiens
atctgctgtcctgagacggacagggacctccactccccctcactgcctcttctgtcctgctcaccccgtaggaactgtacccccctgccgggggctacctgctgagtcatcaggacggggctgccagagttagcaaataaaaatacaggatacctagtacatttaaatttcacacaaatagcacggactttttagtataagtatattccatgcaatgtttgggacatacttatatgaaaatagtattcattgttttttgttttgttttgttttgttttttgagatggagttttggtcttgctgcccaggctggagtgcaatggcacaatctcggcttgctgcaacctccgcctctcaggttcaagtgagtctctttcctcagcctccccagtagctgggattacaggtacccgccaccacacccagctaattttttgtatttttggtagagtcggggtttcaccatgttggccaggctggtctcgaactcctgacctcaggtgatccacccacctyggcctcccaaagtgctggaattacaggcgtgagccacggcacctggccgtattcattgtttactagaaattcac

SEQ ID NO: 538658 - DNA, 592 bp, Homo sapiens
tggtggaggtccagcctcctgcagccaaggagcttgatgccaggcgggcagtgccccaaggtgggagctctttgctctggctctgttctctaggagttaacagcatcctgtgccctgggaggcctcctctgccctggccccctgggctgccctcctcccagcctttcccggcacagccagccagggcatcttgtggtgtgagcagaagggggccgggggtgccgcacgagtgggaacctcttccgcttcccgagctctcagcctcttccccagcctgcccggtggtttggccccgtttctcgagccrgctcctgcccgtgttgcctctgaccaacatcattagcgtgggtatttatatttcattaacaacattaagcccaaatggcattaaaagcaaagctggtgataaatagcttattaataaacagggagtgctccgtgctgcctggcctctcccagccctggtgttaacccttgctgccctaaataaatatgcctcaccctaaagatcatccccctgaagatggggccagaagtcggcttctggcccctgtcggcttctctgccctctgtcggctactctgaggtcagt

SEQ ID NO: 538659 - DNA, 537 bp, Homo sapiens
gaacatggtatacacacagggctcggcctgccacccctgcccaggagtagctgctgcagcagtaaggacaggccgggcctggcaatcaccttctcctctgccaggcttagaaggggagttggatgcagggagcctttgaaaggcgagcacatggccgggcgcagtggctcacacctgtaatcccagcactttgggaggccgaggcgggcggatcacgaggtcaggagatcaagaccatcctggctaacacggtgaaaccccgtctccactaaaaaatacaaaaaacttagccgggcgtggtggcgggtgcctctagtcccagctacttaggaggctgaggcaggagaatggcgtgaacccaggaggcggagcttgcagtgagctgagatcrcaccactgcactccagcctgggcggcagagcgagactccatctcaaaaaaaaaaaaaaaagtcaggcaggtgagcacagtgtactgtgtaccctctcccagtgagtgctcattctggagggggagctagatgtggtgagacacccc

SEQ ID NO: 538660 - DNA, 629 bp, Homo sapiens
caatttttaaaaaaccattccatataaaacaagaccactggtgcctaactgccaattctttggcccacacctctgctatgagacagtagcagaaaaacattgatccaaatcccatcttgagaagcagaaaaaaggcagttctctccagagctctttaccaaatctcctgtccaaagacagagactkaagcccccactcttaaatgaaagagaagttttgaaaaacaactgaaataaagtctagacctttaatgataaagtaggagttccaaacttaggagaatccacccaaacacgaaacatccaatggaacttctgaagatatactgatcatgctggtaccaagtgcttctttcagagagaaacacaaggtaggtgggggaagtcactctgaatcctgccaactatgccagatatgtcaacctaaaaggaagaagctgaggcaaaattaatataagtagagtgttagagccaagcttgaggattacaacctgaaagcatagattcaactcgctctgaatatacaccctgattaacggcagttaaaagtggatttttaaaggcaaacatgaagggcaggaagtgggctatgacaaagttgtcaggaattctcactggtttacagaaaga

SEQ ID NO: 538661 - DNA, 501 bp, Homo sapiens
gattcaccttgtgggtttctagaggccagagctagaatgttagcttgaggtcaaatgcgcccagagaaaaggagaaagggtttgccacatccttcctcaccatgcccagtccctgcgcacacagatctgactttgccactgggggsccggctgtgctaatacctcactctgaaaattcataattagaggggaagtgaaacgtgtattttgcctcttctctaagaactatcttttacggtgaaaaaatagcctctcttgaagaagaaagcttatacagagttagggctggaatgctgtgacatgctaatttactttcaaacatatcagccaaaataaaaagatttagtaaatgtagcacaatgttaattaaatctaggtgatgggtatacggaagttcatttcactattatttctgcttgtgtgtatgtttgaatatttcataaaataaaaatgatgaagaatttataagatttttcaggagaactggtcttcactagcttg

SEQ ID NO: 538662 - DNA, 497 bp, Homo sapiens
atctctcctgaaggactcctcggtccccgaaggccaggcaggaggtcctcccccaccaatcgaagctgcctcctccaagcagtccctcggcggaaggggcctgctgctgtgtgatttcatgtagggaggaggactaagcccccttggaggcttggggacctggggaaaaggcgggccaggatgtggacgtgagagggtttggcattgaggaggggccaggtgggatgtgtggaatgggaagtcagcgggaggctggaaacagacctttgggaccctgactgggccacctccttttttgacagatggggaaactgaatcccacagacgaggaacgtggctgggtccagtgagctctgctagacccagactgaaagcagccacgctctcctccagggtccagcagacactttctgtaaagggctggacagtatgtatgtcaggctttgcgggcacacattcyctgttccaactcctcaaagctgcacagaagcagcctg

SEQ ID NO: 538663 - DNA, 574 bp, Homo sapiens
cacaaagctgggaagaagggtttgtaattatatgtgtatcaccagcagtcccagcctggcagggggcttagagccttcatataaattataccaatcagcagcggaggggagaaaacccacaaggctatcaaaagtgatactttcttataactggtgtacacaagtactaaatcatggcaaaacagtgctgggggtgcagtgctgtcatcatgaagcgggtgctgggctgcagcccggccgcctttgtaaatgcatgtgatcatcttaatgaygcatttggggagacgtggaaaatcacagtgtggagggaggctgcagaatgcgaatgcatggaacgctcccggggcagagcgagcgaatgcatggaacgctcccggggcagagcgagcgacgcgtgctcatgcatctggaagccgagcagcatgtgccaacatccatgtgctctggttctctctctttcttagaagggggcagtttctgggccagcaccggttcagctgccctgcggtggcttctgatgcactctcgtgtccacttaccttggtccctacagggcctggccgtggggctgtct

SEQ ID NO: 538664 - DNA, 555 bp, Homo sapiens
ttcatccactttgggaagtggaaggacagtcggtggtcagggtttcactgagagccgccgactgcaggtctagggcctgtcagtaactcagcaaatacaccgagaactcgggatgcctggcagacatccacagcacagatgaaaacaatggaaatgatggtataaaatggcctcgtgttctgacatcaaacccaggactagacaaaggcaagaaaacagagcaacctccacagtgagagaaaagactaggacccaatgcatgtgtgtcccagcctttctaattgtttagaaaacaattgaatgatggttatccgggtcccaagtccaaagwaagctagaaaaggctgctaactgggggaggaaatggaaagacacaggcagacacgaaactctgagttttacttgggatggggaagggttaggcaaaggcttcatttggtttttgagcaaagattgagattcatacaagattttgggaaacagaaaggacactggtagcattaaaaacaagatgcacgtctttcactcagttgaggcgaaacctcctgtaatgag

SEQ ID NO: 538665 - DNA, 491 bp, Homo sapiens
tgaagcagcaagcgaaaaacccacgcgtggactcccgtttggaaattgctcccarcggagacagttgttttttttttccccaagtaagttttccttcaaagcgatgctctgcagagaaattcctttctttacaactaactcagagacagtgaaaacagggacgatggggccacccccacgattttgggggagcttcagtttcctcacatactttctcaggcacaactgacccccacgaggttctcggctacacacagcagggtggctgcagggtgggctctttagtctgacttttggggttcaaagcccagttctgtactttgagctgtgtgaccttgagtgagaatcctgacctctctgagactgttgtctctgctgggaacagagcatgatcagggtgtgtagcgccctttctggggctgccacaggggctgaatgaagccgaggaggggtctgcctgggcctggctccaaggaggtgctctgtgaatg

SEQ ID NO: 538666 - DNA, 535 bp, Homo sapiens
ctcgtgatagtgaattctcatgagagctgatggttttataaggggctttcctctgcttcgatctgcacttctcctttctgccatcatgtgaagaagggcatatttgcttccccttccaccatgattataagtttcctgaggcctccccagacctgctgaactgtgagtcaattaaacctctttcctttataaattacccagtcttgggtatgtctttattagcagcgtgagaaccaacaratacagggtgcttgacatggaaaggcttagtgaatgcatgaatggatggatggagggatagatggatggatggatggacggacagacggatggatggatggatggatggatgatggatggatggataatggccaccacagcctgctgtcatcatcatttcatgcacagacagtttcaccttctcaagtatgaaggccacaactgaagaatgaaggacatctctttccaagcaagggctgttgccagcttgccccaacatacatactctccttcacccttaaacttgtcctcagaa

SEQ ID NO: 538667 - DNA, 523 bp, Homo sapiens
ctcgtgatagtgaattctcatgagagctgatggttttataaggggctttcctctgcttcgatctgcacttctcctttctgccatcatgtgaagaagggcatatttgcttccccttccaccatgattataagtttcctgaggcctccccagacctgctgaactgtgagtcaattaaacctctttcctttataaattacccagtcttgggtatgtctttattagcagcgtgagaaccaacagatacagggtgcttgacatggaaaggcttagtgaatgcatgaatggatggatggagggatagatggatggatggatggacggacagacggatggatggatggatggatggatgatggatggatggataayggccaccacagcctgctgtcatcatcatttcatgcacagacagtttcaccttctcaagtatgaaggccacaactgaagaatgaaggacatctctttccaagcaagggctgttgccagcttgccccaacatacatactctccttcacccttaaac

SEQ ID NO: 538668 - DNA, 593 bp, Homo sapiens
ctgcgtaaatatagccattaaagcatttcaagaaagggaacattttctgcttggatgagagggcggtaaacacaaagggcctgcctgttcctttcacacgagcaattaaaccacacaacccagggcagtagagtccaaaatgattgctttcttcacatccctctggcttcagcggggacaatgtgaatccccgtgggtctcagcgctgtgtctggctgccgggcgactcgcagactgcagcagggcgatcgtgttcatcttgggattgcgtcttcagaaccacactcaagacggtcatgggggtggtgcacatgtgtagccgcccctcctgcctggggccaggaaggaggtgggccctgaagtgtaggtgatgggcmaatggaagtgccacgctgttttgctgcggaaggagacgctgtttgaacggggggtccaactttctcaagggtccttgtttccccggagggctgagccgaagacccccaaagcctctcgttcacgtgttcttagagcagttcctcccatcctggacgtggattctgtgtctggtgaaccagaggggagatttccacagtccacttacaggggagaaa

SEQ ID NO: 538669 - DNA, 501 bp, Homo sapiens
tgttcttagagcagttcctcccatcctggacgtggattctgtgtctggtgaaccagaggggagatttccacagtccacttacaggggagaaaacccagactcaagctggctcctgggatacctccggccactggtttcttcccagagactttcagtctgaaggttcctttggaggaaagaaacctacctcattctccactcgctcgcacgctccctggctctgaaggcttaaaaattcactagcacagctagagctggagcatcaggggcctctgccctctaagaaagtggctaagtggctaagctggccccaaatctctctccaggtggctccttgaaagggaggtgtcctgaactttagagggccctgtccacctgggcaaggtctctacacacctgggtrggagccctgcacacctgggtgggggctctacacacctgggtgggggctctgcaaacctgggtgggggccctgtccacctgggtgagggctctgcgcac

SEQ ID NO: 538670 - DNA, 501 bp, Homo sapiens
tgttcttagagcagttcctcccatcctggacgtggattctgtgtctggtgaaccagaggggagatttccacagtccacttacaggggagaaaacccagactcaagctggctcctgggatacctccggccactggtttcttcccagagactttcagtctgaaggttcctttggaggaaagaaacctacctcattctccactcgctcgcacgctccctggctctgaaggcttaaaaattcactagcacagctagagctggagcatcaggggcctctgccctctaagaaagtggctaagtggctaagctggccccaaatctctctccaggtggctccttgaaagggaggtgtcctgaactttagagggccctgtccacctgggcaaggtctctacacacctgggtaggagccctrcacacctgggtgggggctctacacacctgggtgggggctctgcaaacctgggtgggggccctgtccacctgggtgagggctctgcgcac

SEQ ID NO: 538671 - DNA, 501 bp, Homo sapiens
tgttcttagagcagttcctcccatcctggacgtggattctgtgtctggtgaaccagaggggagatttccacagtccacttacaggggagaaaacccagactcaagctggctcctgggatacctccggccactggtttcttcccagagactttcagtctgaaggttcctttggaggaaagaaacctacctcattctccactcgctcgcacgctccctggctctgaaggcttaaaaattcactagcacagctagagctggagcatcaggggcctctgccctctaagaaagtggctaagtggctaagctggccccaaatctctctccaggtggctccttgaaagggaggtgtcctgaactttagagggccctgtccacctgggcaaggtctctacacacctgggtaggagccctgcacacctgggtgggggctctrcacacctgggtgggggctctgcaaacctgggtgggggccctgtccacctgggtgagggctctgcgcac

SEQ ID NO: 538672 - DNA, 501 bp, Homo sapiens
tgttcttagagcagttcctcccatcctggacgtggattctgtgtctggtgaaccagaggggagatttccacagtccacttacaggggagaaaacccagactcaagctggctcctgggatacctccggccactggtttcttcccagagactttcagtctgaaggttcctttggaggaaagaaacctacctcattctccactcgctcgcacgctccctggctctgaaggcttaaaaattcactagcacagctagagctggagcatcaggggcctctgccctctaagaaagtggctaagtggctaagctggccccaaatctctctccaggtggctccttgaaagggaggtgtcctgaactttagagggccctgtccacctgggcaaggtctctacacacctgggtaggagccctgcacacctgggtgggggctctacamacctgggtgggggctctgcaaacctgggtgggggccctgtccacctgggtgagggctctgcgcac

SEQ ID NO: 538673 - DNA, 354 bp, Homo sapiens
acctcaaagcgctctgtgctcagcttgccgccccgcatcaggctgcattcaccaccgtctctgtgattggggcttcttccaggagccgtctcccctacaacactgccaggaagctcatcagcttcctatagatggaaatggggacaggaaagcaccccacaaaccactgcctgtgctagataagaattcaatggaagatagaggggarggtggagggagggaggtggcaaacatgaacgtgtaggagtgtgtgtgtgaagcagagtggtatgtgcacatgtgtgcatgtgtgtatagtgtgcacgtgtgtgtgcatgtggatgtgtgtatagtatgcacgtgtgtgcatgtgtg

SEQ ID NO: 538674 - DNA, 570 bp, Homo sapiens
cattgacagacatggggaccttcagccctgctgtcggaagaaacctgagaaggggcagagctgggggtrgagctcctaaaagctgggcaggacttccagagggcagagaaggagagggcaagactcctgcagcctggaggctgggccaaggggggcctaggatgagctctgagtgttcaggggctagggctggggggcaggcgaactcggggtgtcccacaacccttatattccaggaagggaaactgaggcccaggccagtggaagaatttgtccaaattgcctggctagggagagctggggccaagtggcgagggagactgagggtggggtagggaggggagggtcagggactgctctggtgagggcaccgtgagcaaagtgggctcctggacccagaccgaggggcctgccagggagggaggtgtgggcccaggctccttcctgggtggcctagtggggtcctagagaacccagggctgggcccagcatccgcggtccctctaccctacccatactttcctcctgggagccaatcccagaggcgcgggggtgggcctaagggtccag

SEQ ID NO: 538675 - DNA, 570 bp, Homo sapiens
cattgacagacatggggaccttcagccctgctgtcggaagaaacctgagaaggggcagagctgggggtggagctcctaaaagctgggcaggacttccagagggcagagaaggagagggcaagactcctgcagcctggaggctgggccaaggggggcctaggatgagctctgagtgttcaggggctagggctggggggcaggcgaactcggggtgtcccacaacccttatattccaggaagggaaactgaggcccaggccagtggaagaatttgtccaaattgcctggctagggagagctggggccaagtggcgagggagactgagggtggggtagggaggggagggtcagggactgctctggtgagggcaccgtgagcaaagtgggctcctggacccagaccgaggggcctgccagggagggaggtgtgggcccaggctccttcctgggtggcctagtggggtcctagagaacccagggctgggcccagcatccgcggtccctctaccctacccatactttcctcctgggagccaatcccagaggcrcgggggtgggcctaagggtccag

SEQ ID NO: 538676 - DNA, 500 bp, Homo sapiens
acagaaagctgaccaagcacgaggcttccccacgtggggcctgccccctgccgcagcccaaggcgcccagacacagccatgccagagggagaatgcaccctctgagttttctcatgcagtgagcacaggcagccgagcgctgtcccaggggtgccgggacacagaccctctcactgtcctgcagaaccaattccttccccctgtctggcttgagtcaacccagycctggagatagcagtgccagcctcgaggacagcagcaagtttggacccggccgctgcctgcccccgacgagggtccataggagaggagaggcaccgtctgcagcgtgcagaggcatctgtgcgacaggtaggcacggcaagacggggcctcctgccacccacacaggctcacaagcgtctggcgggaatcaggagcacaggctggggacggggaggcttcgcaggctgctgggtgtgttctggtcaccacgcccaaccgtaactgccctcttcagc

SEQ ID NO: 538677 - DNA, 500 bp, Homo sapiens
acagaaagctgaccaagcacgaggcttccccacgtggggcctgccccctgccgcagcccaaggcgcccagacacagccatgccagagggagaatgcaccctctgagttttctcatgcagtgagcacaggcagccgagcgctgtcccaggggtgccgggacacagaccctctcactgtcctgcagaaccaattccttccccctgtctggcttgagtcaacccagccctggagatagcagtgccagcctcgaggacagcagcaagtttggacccggccgctgcctgcccccgacgagggtccataggagaggagaggcaccgtctgcagygtgcagaggcatctgtgcgacaggtaggcacggcaagacggggcctcctgccacccacacaggctcacaagcgtctggcgggaatcaggagcacaggctggggacggggaggcttcgcaggctgctgggtgtgttctggtcaccacgcccaaccgtaactgccctcttcagc

SEQ ID NO: 538678 - DNA, 500 bp, Homo sapiens
acagaaagctgaccaagcacgaggcttccccacgtggggcctgccccctgccgcagcccaaggcgcccagacacagccatgccagagggagaatgcaccctctgagttttctcatgcagtgagcacaggcagccgagcgctgtcccaggggtgccgggacacagaccctctcactgtcctgcagaaccaattccttccccctgtctggcttgagtcaacccagccctggagatagcagtgccagcctcgaggacagcagcaagtttggacccggccgctgcctgcccccgacgagggtccataggagaggagaggcaccgtctgcagcgtgcagaggcatctgtgcgacaggtaggcacrgcaagacggggcctcctgccacccacacaggctcacaagcgtctggcgggaatcaggagcacaggctggggacggggaggcttcgcaggctgctgggtgtgttctggtcaccacgcccaaccgtaactgccctcttcagc

SEQ ID NO: 538679 - DNA, 402 bp, Homo sapiens
agcagcatccgcgagtgggcatcggtgtgcttggccaacccggagccccctcccctccagggcacagggcagcactgggctggggctggtgatgggagggaagaaggcgaggatgggaggggtcccaggatcccccgtgggggatgcaggtgcagtgtrcacagctcagcccaggctaggaaaccgtgcgcccctgcctggcaccttcactggtgaaaaggttgaaatgtcttactgttaaaccccagggcaatccctgctgagacactagtacacgtgagagccggcctcgcgtggggaggcgggggcgggccgcagtctcacctggtcctcctcgccaccgccttcctcgtcatacttgaggatgttgtcgcggacgtcgtcctcggggtcaatgagcag

SEQ ID NO: 538680 - DNA, 684 bp, Homo sapiens
atatataaaaagtttgctataaaattaaggtacctattaagattacaaaactgcagggctaggattacattttcttcaccaagggagtgccttcagatttttaatctgtaaaataaagtcaaataagacaaactatgtacaaaagtactagcaaactctttttaattataaaaatcggtcttattttatagatgtaatcttttaaattataaaaattggtcttattttatagatgtaatctttttaattataaaaattggtcttactttatagatgtaaccaaaactatacataagtcaacatcaatttagccttaaccacatttacactgatggcatagatatatttacttgtgattgcatatataaaatacatctaatgctcttatgtgatgcattcgatatcataggccgtattgattttagaggactaacccttaaatgcttataatttttttttaaacttcatgttgaaagaaagcatgaaaaggaaataattcttttttctaaagttccaagtaaccttgtaaacatagtttaacatattgtttttcccaaaacaagtgactggagagctcttttgaattatttatgctaaccatctgttccttgcttatcatatcttccagamcagacaaatctcatggccttcagacgttagctactactacttctagatgagcag

SEQ ID NO: 538681 - DNA, 647 bp, Homo sapiens
gctctcatttgtattgctgtggtttaccccacaagtaagagagaacagtgtattttgaacacctatttgatttgcgtgattgctgatatcatccaaagagactcattttttttccaatcagatgatattttggttagtgagaagtcttgtcactgaggtgagggagatggtctacattttgtaactttgtctggaaaaccaaggattaaatatttgttttctatgtagatgtgaratagtaatttaagttaattcatcattgtttgtagtctcatctggaaaataatgtggccatagatggttaggcatactagattgcttctgtctttagaacagtcattttatacattctgattttattttctgtaaacataatgtcatattaaattgttagaaaaattaagagataatacctatgtactcttctccctgaaaagcaaagtcatgtgaaacaggaccacattttactgtttctattagtattttaaatgagccgacttttaaagttatgaattgtcattccttaaaccattgtacaaattttataccagcgtgtgcgcacacacacacacacacacgatttgcttatgctcataaaaggtaacatttgtaagggccgtataacctattatttcctggtgattttg

SEQ ID NO: 538682 - DNA, 465 bp, Homo sapiens
atttatataaaataatgtaaaaattcagaaatatagtaaggaggtataaaatagcattagataatacaattgtcattttaaatggttaaagagaatatagtttctctagcttgggtttgattttctgtttggaaatgaggattcaaaaacaagatttacatcttaaagcaaaagccaggaataaattaaattctagtggcttatagtgttaacactatcaacaaataataatatgagtgctagctggggagagctctagtgttaaaagattattctctcagaaagagctgctgaacagtaatataatgcaagccatacatgtaatctcaaattttcatgtagccactttttgttamaagcaaaagcaaaagaaaagccagaataaatgttttaatatattttaattaaacctatatatttaagatataatttcagatgtaatcaataggaaatattattactggg

SEQ ID NO: 538683 - DNA, 581 bp, Homo sapiens
ttatttgacaagttatttattcttttttttcctttttgggaagaccagatgccaattaacatacttctcagtttctcagctttgccaggggcaaactttattgttattaatacgcgcttttgcccagtsctaaatttttggacgtaggtgctttaaaaatactggtgtaggccaggcgctgtggctgacgcctgtaatcccagtactttgggaggccgaagcggcagatcagttgaggtcaggggttcgagactagcctggccaacatggtgaaaccccgtcttcattaaaaatacaaaaattagtcaggtgtggtggcatgcacctgtaatcctaactactggggaggctgaggcaggagaattgcttgaaccaaggagatggagattgcagtgagctgagatcatgccactgcactccagcctgggtgacagagcaagactctgtctcaaaaaaaaaaaaagataaataaaaaaatattggtataaaggttgaatctggccaggtgtggtggctcatgcctgtaatctgagcactatgggaggctgaaggggcagatcacttgaggtcatgagttcaag

SEQ ID NO: 538684 - DNA, 581 bp, Homo sapiens
ttatttgacaagttatttattcttttttttcctttttgggaagaccagatgccaattaacatacttctcagtttctcagctttgccaggggcaaactttattgttattaatacgcgcttttgcccagtcytaaatttttggacgtaggtgctttaaaaatactggtgtaggccaggcgctgtggctgacgcctgtaatcccagtactttgggaggccgaagcggcagatcagttgaggtcaggggttcgagactagcctggccaacatggtgaaaccccgtcttcattaaaaatacaaaaattagtcaggtgtggtggcatgcacctgtaatcctaactactggggaggctgaggcaggagaattgcttgaaccaaggagatggagattgcagtgagctgagatcatgccactgcactccagcctgggtgacagagcaagactctgtctcaaaaaaaaaaaaagataaataaaaaaatattggtataaaggttgaatctggccaggtgtggtggctcatgcctgtaatctgagcactatgggaggctgaaggggcagatcacttgaggtcatgagttcaag

SEQ ID NO: 538685 - DNA, 581 bp, Homo sapiens
ttatttgacaagttatttattcttttttttcctttttgggaagaccagatgccaattaacatacttctcagtttctcagctttgccaggggcaaactttattgttattaatacgcgcttttgcccagtcctaaatttttggacgtaggtgctttaaaaatactgstgtaggccaggcgctgtggctgacgcctgtaatcccagtactttgggaggccgaagcggcagatcagttgaggtcaggggttcgagactagcctggccaacatggtgaaaccccgtcttcattaaaaatacaaaaattagtcaggtgtggtggcatgcacctgtaatcctaactactggggaggctgaggcaggagaattgcttgaaccaaggagatggagattgcagtgagctgagatcatgccactgcactccagcctgggtgacagagcaagactctgtctcaaaaaaaaaaaaagataaataaaaaaatattggtataaaggttgaatctggccaggtgtggtggctcatgcctgtaatctgagcactatgggaggctgaaggggcagatcacttgaggtcatgagttcaag

SEQ ID NO: 538686 - DNA, 581 bp, Homo sapiens
ttatttgacaagttatttattcttttttttcctttttgggaagaccagatgccaattaacatacttctcagtttctcagctttgccaggggcaaactttattgttattaatacgcgcttttgcccagtcctaaatttttggacgtaggtgctttaaaaatactggtgtaggccaggcgctgtggctgacgcctgtaatcccagtactttgggaggccgaagcggcagatcasttgaggtcaggggttcgagactagcctggccaacatggtgaaaccccgtcttcattaaaaatacaaaaattagtcaggtgtggtggcatgcacctgtaatcctaactactggggaggctgaggcaggagaattgcttgaaccaaggagatggagattgcagtgagctgagatcatgccactgcactccagcctgggtgacagagcaagactctgtctcaaaaaaaaaaaaagataaataaaaaaatattggtataaaggttgaatctggccaggtgtggtggctcatgcctgtaatctgagcactatgggaggctgaaggggcagatcacttgaggtcatgagttcaag

SEQ ID NO: 538687 - DNA, 563 bp, Homo sapiens
gaactgagctgtgtttgtggaaggaacttcattcccccaggacattctccaatcactctggacatctgtgtctccagcttttagggctgaggcaaatcttgtcacctctcccaatctgatgaaggcctggcttatggcrcagccagagtccagtctacaacagaagggaggctctctacagagaaaaatagtcactgtaggaatatagatattgccctggctcctgcttgcaggacaatgtcttccaaagggctgcagtgccttgaataggtgctcgtgctccgtctgcccagcttagagtggccaggggcttgggaatggtgagacacaggagcccgaagtcctgggtgcagccaggggacagtcaggaagtcaaaggcagtgttaacagccaacaggggcagtgggcttctccgaggcagaggcagcagcaatggcagcaaccatctccaggcagctcaggtttccaccactcggatgacaggcatgggcttcgggctaggcggcttggatatcctaatactgaaaagaaggttggaaacactgagttgtgctgggaacag

SEQ ID NO: 538688 - DNA, 652 bp, Homo sapiens
ggtcagtgcataacaaaactgcataacaacgttttggtcagtgatggactgcgtagacaacagtggtcccataagattattatactccatttttactgtattttttctgggtttagatacattaccattgtgtgaygatcacctacagtattcagtacagtaacatgctgtgcaggtttgtttgtagcctaggagcaatagggtacaccatacagcctaggggtgtaggaggccatgccatctaggtttgtgtgtgtacactctgtgatgtttgtacaaggatgaaattgcctaatgatgcatccctcagaatgtattcctatgattaagtgatgcatgactgtatatatgtgagtgtttatgccaatacagctatatagcattgagctaaatttattgcattagggtaaatttccagaagtagaactgatagaccaaaaagtaaatatatttttaggtcttctgatccgaatcaccaaattccacccagtaaattggtggtaacaatttaccctcccaccagcactatatgaagctgcctatttttgtatagttaatttaatttgaggtttcttaactaaatggtgttcttatttcaggtgtacttgaaggggaggtctggagacaagatgattcacgagaagaatattaa

SEQ ID NO: 538689 - DNA, 624 bp, Homo sapiens
ggagatactgaacttcctgttacttgaagcaatgcagatagaaactgagaaccacctgtcagcagggtcccgtaggtgatcactgagatcctttctacctccaaggtgagagggttttgcaaattccctctgatcagaggaaatcagaggccccagacaaccaatgaagcctacagagcaaagattgtgccttctagaacttcaggaatttggaarttatgctgttggcaattaataaataagacctcaaatggtaaatcacatttaacatcagcatatttggtttgatcttcattgtgtaaggtggaccttttttagttcaacaagacattatctgaagggccttttaaggaattccaagatgaacagacacaattcttgcccttcagggcccctcagtcttggaggcattttctctcctttaggataacctagatttgaccttcctggcatggaaaatacacgtgtcatattgtagcctcctttctgactggactttatatcagaattaatatcagaattagtcagcactccttcctcggtgggtaggtgcgcatgggcagagcaagagagaccaaaaggactagataatcggaagccagggtttgggaatggcagtgacag

SEQ ID NO: 538690 - DNA, 492 bp, Homo sapiens
cagagcaagctgtatataaggattagggccatcaaaccggcctgttccctggggaggaacagcaaaaaacatgtagtgggggtggggacagaagaggaaatgtccttccaggagcgcacctcctgaacactgggtggcttttaaaagacttttttttaaaaaattttttcttatttttcttttattgtgcagcctcctgaaccagaataggttcagagacactcccatgggatggtttttggtttgggttttttttgttgttktttttttttaagacggagtcttgctctatcgcccaggctaaagtccagtggcgcaatctcggctcactgcaacctccgcctcccagattcaattgatttccggctaatattttgtattttttaataaagacagggtttcaccaggctggtcttgaactcctgtccttaagtgatctgcccaccttggcctcccaaagggctaggattacaggcgtgagccaccacaccc

SEQ ID NO: 538691 - DNA, 492 bp, Homo sapiens
ggacctccaaatatgccaagaaaaagaatgagaagacaaaccaaggatttcaatataaatgtgtaattttaatatttaatttaaaataaaaccaaggctggattggattgggaaagaacgtttgatttgcagaagaatataggaatttttttaatcacgacattacaagtcatttgtgaaaacagccttcctcctgccaccggctccctatacaacctgcttaggaaatatggaggtgaatcatcccccttacctcttccctaccagggcttggttctccccaaaatccaaaggagaaataaatgtcttccgttgcctcttcccatttttacagtcagcttctaaccccttgcaaagccctgaatcagagccaagcacctcagaaaatgagggtsccttggttctcttattgaagttgggcacatgtggtcagagaagccccaaggaaggccacagggactgacacctttacttttggaatttgtgcagcca

SEQ ID NO: 538692 - DNA, 603 bp, Homo sapiens
ctgcatcacctttgggatccactaccatgtcagagctaaggccacactcttcctgaacagccccaagccaatgactgacagtgtggttactgggacctggccgtttctgcccactgttgatttctctatgtgataacctttgccctggtgctttccactgggtagactgccacttggaaggatctgcaccacagcttgaggtttttcttgccygattttgcttctgccttcctttactttatcaggatagggaagcctatccaaagtctttctctgcccattcctgcctccttctttatctttcacaggtgttgccagccagtaagcctcttgcactcctaactttgtctcagtatctgctccccagaccacctgaactgactcaggtgaccactccagaagtggtctgaaaaagcgagcagtaagataggtttagggaactgcagtactcactgcctggctggcaacaagaacccctcctggatgttgtggggtacaggtagtctctggaacaagatggtagccaagttgctaaattttcactgatgtgaaatgagagaatgctcctgtggtggaacagttcaggcatagggggtaggcgga

SEQ ID NO: 538693 - DNA, 558 bp, Homo sapiens
aagcttcattcttgacaacttcttcttttttttactttggtaaaaccaccaccttgccttgagctatttgctcattcaaaactaaagtttatttaggccacttgatatgattcaccttgtctctagagaaatcttaaaactttttcaaggaagtggtcaattatttacataaacttgaaaaggctttgcttmtcatcacttcaaacacaaggctttgagaattacccatttgatttgctactttgcaaattcacaaataactctatatttgaacatttaaattgtttgaagtgtttggggaaacaatttacttcctggctctatatcctttttagttatctcttccttttatgtaagaactgcattaatagatgactttcaagaatattatgagaaaaaatagtgaaagtaatttaagcaaagtatattctgtactcaattctacatcaacaatgaacgaacctcttgtccacaaccatttaaaaacactccattgaactcagatgtaaaagtttactgagttatgtcagtggaaactttgccaagaacaaacaaaac

SEQ ID NO: 538694 - DNA, 656 bp, Homo sapiens
tctctcatgtgcttacctgcaaacaagttggtttcactcccaccatcaagggcagtgcccctactccacactccacagggggatcagatctgttttcttgcttccctggactcgaagcaagccctgctgctgcttctccagtgaatgaaggcgtgtccaccaggttgaggatgaccaggcatctgaaatcattttggttcttagagtcgcaaaacctctactctgatctaagtttctctcttatcctacaggctgcagtttgtgcaaaaaatcttgagatacatgggtttccaattctagggcacataagaataacttggtgagttgttaaaaatgcagactcgtgagccccacccaggactctggatkgaatttttcatgttgaaagtccgcaggtcacctgaaagctattctctggtgtactgacgatttggatagccaatggtctgttgttgggactattaagacagactcacttcttttctcttgtctctccagtctcttcctcacggccttgagctgacctctagccagagtgacatacgagaaatgcaaatctctatcatttatttctcaccatcctgcaacgcagtcattttctctcaataatacaatacaacaaaagcccaatatattaaactgatgtcataggagct

SEQ ID NO: 538695 - DNA, 666 bp, Homo sapiens
aaagcagtgaactcaacaaagtgctagtggcattgtgataagagctctgaggccatggtagtcatcatggccacccccatccttaaggaaaggtaatgattaaactatgtcttaaggataatttggtgtctkccaggtgaaaaaggtggagtaaaggtggctccacaaatataaatggggaaggtggcattgccagcagatgtcagcttgagccatgatccagggtcctggttaacccaggaaactgcagtcattccacactgcaggcccagagtgtaagtggagccagtgaattctaggaagatctccctgaggaagtgatgctctgagctgagatctgaaggaagaatgatggttaaccaagtgagaggtagggaatcatagcaggcagatggaacagcacatgccatggtcctggcgcaggatgaagaaataaagaggggatgattggtttcctctcctagagcaggtcaaccttcaggaaagaaggtcaacaccttcattttcttcacacttcattgccacttcccactcttcgcaatatcagtatcaatattaggtggcaaatattcctacattaagactgttccaaagttgggatgtttttcaactttcattaaacatttttcattcatagttctcaaattttaaatttcagatttgcat

SEQ ID NO: 538696 - DNA, 469 bp, Homo sapiens
gggttcatcctgtccctaagtggaactccctatggctgagggactcagaatcaaatgacttatagccaattaaatgttctagtccagatgcccaattaaatgggcatggacagacattcattagcctttaaattattttctaagtaaaaagtcaacaaacaaaaagttaaaggtgaggttacaaaactgacttttctttaacttctatgctactgtaatcttgggttttgttatggacttatagcaattatttatacaaaacataagaattgttctgaaaaaattaaaaaatatatacctgcatgrctcataactggaaatattataccaggaggctttgtcacttggtatctttatccttttacttattattttcttttaattctacaggaagcagtaaattctttatggttggagtggatgaagaggtgccatgtaatagctcagaaggcaaagtcccttgttttac

SEQ ID NO: 538697 - DNA, 620 bp, Homo sapiens
atattccacacgatggtgtagcagacactttccaaggtcaccacccatctcacaaaaggaaattaaatctgattcacagagcagaccacaaagagcatgtctggacctagaaccacagcatgtaacctcggaagcagtgagacaccagccagcatggacaagcagcaggcacttgatctataccaggtgagggtgtggagacatgacgtggtgcagggacaccagcacccagtcctagttctggtccctctcagccttgttaggtcctggttcctargattccagggaacatccccacagcctcacaataagatcctcctttcctgtatatgctagcttggatgggatcctctgttctgtaatcagtatggcaacagagcagatgaaatatttaatggtctttcatgagcactaaattttgttttttacaaactaggttagattctgtcaaataatcgtctaatggtgtattcgagtgtatattaaggatctgattcattctatacccactaaccataaccaaacagattaagttttctttctcagaatctaatccttcagtttcttggaagctggactagtttcagagcatctacaaacatttctggaatatttaactt

SEQ ID NO: 538698 - DNA, 620 bp, Homo sapiens
atattccacacgatggtgtagcagacactttccaaggtcaccacccatctcacaaaaggaaattaaatctgattcacagagcagaccacaaagagcatgtctggacctagaaccacagcatgtaacctcggaagcagtgagacaccagccagcatggacaagcagcaggcacttgatctataccaggtgagggtgtggagacatgacgtggtgcagggacaccagcacccagtcctagttctggtccctctcagccttgttaggtcctggttcctaggattccagggaacatccccacagcctcacaataagatcctcctttcctgyatatgctagcttggatgggatcctctgttctgtaatcagtatggcaacagagcagatgaaatatttaatggtctttcatgagcactaaattttgttttttacaaactaggttagattctgtcaaataatcgtctaatggtgtattcgagtgtatattaaggatctgattcattctatacccactaaccataaccaaacagattaagttttctttctcagaatctaatccttcagtttcttggaagctggactagtttcagagcatctacaaacatttctggaatatttaactt

SEQ ID NO: 538699 - DNA, 620 bp, Homo sapiens
atattccacacgatggtgtagcagacactttccaaggtcaccacccatctcacaaaaggaaattaaatctgattcacagagcagaccacaaagagcatgtctggacctagaaccacagcatgtaacctcggaagcagtgagacaccagccagcatggacaagcagcaggcacttgatctataccaggtgagggtgtggagacatgacgtggtgcagggacaccagcacccagtcctagttctggtccctctcagccttgttaggtcctggttcctaggattccagggaacatccccacagcctcacaataagatcctcctttcctgtatatgctagcttggatgggatcctctgttctgtaatcagtatggcaacagagcagatgaaatatttaatggtctttcatgagcactaaattttgttttttacaaactaggttagattctgtcaaataatcgtctaatggtgtattcgagtgtatattaaggatctgattcattctatacccactaaccataaccaaacagattaagttttctttctcagaatctaatmcttcagtttcttggaagctggactagtttcagagcatctacaaacatttctggaatatttaactt

SEQ ID NO: 538700 - DNA, 478 bp, Homo sapiens
gccgaccatttcctctgtgccaggctttgtgttaagtgctttacacgagtgatctcaatttattctcacaacaggactatgagggagattctatcattagcgatttacaaatgaagccagtgagcctcaaagaggttcagtccctttccccaattctcagagccagttgggcaaagagtcccagggcagaatgaaacctaatggaacctctttctacagggtgctgtttgagtagtggggcatgtgagtgtgccccctgccacaaccatctttctttctcattaactggcctattacatgttttacacaaagtaaaggaagatttctstctctgaggcctttctgaacttccagagcagacacatgtgaccatcctgagagactgggtcttctgcaagtgtggaaatgtgctttaacggcatgtcagcaaaacccaagatctgcatgcatcacttttgatgggaaaagtgtcagactt

SEQ ID NO: 538701 - DNA, 602 bp, Homo sapiens
ccagcccaagttgccatttaaatagtgtgttaggctgggcacagtgtctcatgtctgtaaccccagcactttgggaggcctaggcgggtggatcacttgaggtcaggagttcaagaaaagcccagccaacagccaacatagtaaaaccccgtctctaccaaaaaatacaaaaattagctaggcatggtggygggagcctgtaatcccagctactcaggaggctgaggcaggaggattgcttgaaccagatgggcggaggttgcagtgagctgagatggctgctgtgcattgcagagtgggcgaaagagcaagtttgggtctcaaaaataaataaataaatagcttatttattgaaggccttttagtcaaggcatgaaggaagcagcgaggagagggcgggcacaggaggagcttgctagacaggaggcgcttgctagacagggggagcttgctagacagggggagcggtgagtgcgagggccctgaggcggttgtgagactgcactgttcctggcccagccaggaggccagtgtggctggaggggagggagtgatgggcaggacaggtgagaagtccaagagggataatgccagattgtgac

SEQ ID NO: 538702 - DNA, 593 bp, Homo sapiens
cgaggaggcccagcctccagatgggcgagccaggtcatcttagacaactggggccacacgagcgaccccgggccacagcaacccccaactgctcacccacaggcaaggggcccagagcgtgggcatggtcagcgtggtcgaccatgacggttcctccaaccctggcccagagccctttccacggtgcctgtggctcttcatggaggggcggagcttctctccccacctgtcatgggctaacacttgtcccctgcacattcatccgttgagatcctaccttagaatggaattgtattagtttgtttatttgtttatttgagatggggtctcactctgtcacctaggctgagtgcagtggcacaatcttggctcatggcagccctgacctcctgggctcaaatgatcctcccacctcagcctcccgagtagctgggaccacaggtgtgtgccaccaagcctggctaatttttaaaattgtatttgtaragatggggtctccctgtgttgctcgggctggtctggaactcctggcctcaagtgatcttctcacctcagcctcccaaagttctgggattacagaaccaccatgctca

SEQ ID NO: 538703 - DNA, 607 bp, Homo sapiens
gtaaaaccatcactaataactgtcagaagtaccccctgagtcaccagggaatgacaaagcttggcaaacagcctcttccttggagmcccagagttcatctcccacctcattttgaaatggtcctcacgggtcttcaaagacccctgtctcttggcctgagtccgtccttcctctttgtgagacttcatgagtgctttacatatatataaacatgcatgagcataaacatgcacatgtaatacacagacagacaatgtaaaacagcttttttttttttttttttctggagactgggtctcactctgttgcccaggctggagtgcaatggcatgatcacggctcactgcaacctcaacctcccaggctcaggcgatcctcccacctcagcctcccaagtggcccagaccacaggtgcacaactactcctggctaagttttgtattttttgtagagacagggtctcactaggttgcctaggcttgtctcaaactcctgggtttggcaatcttcctgcctcaacctcccaaagtgctaggattacaggtgggagccaccatgctgcatcaaaacattttaagaaaagaaaaaaatccctttattttcaatt

SEQ ID NO: 538704 - DNA, 607 bp, Homo sapiens
gtaaaaccatcactaataactgtcagaagtaccccctgagtcaccagggaatgacaaagcttggcaaacagcctcttccttggagccccrgagttcatctcccacctcattttgaaatggtcctcacgggtcttcaaagacccctgtctcttggcctgagtccgtccttcctctttgtgagacttcatgagtgctttacatatatataaacatgcatgagcataaacatgcacatgtaatacacagacagacaatgtaaaacagcttttttttttttttttttctggagactgggtctcactctgttgcccaggctggagtgcaatggcatgatcacggctcactgcaacctcaacctcccaggctcaggcgatcctcccacctcagcctcccaagtggcccagaccacaggtgcacaactactcctggctaagttttgtattttttgtagagacagggtctcactaggttgcctaggcttgtctcaaactcctgggtttggcaatcttcctgcctcaacctcccaaagtgctaggattacaggtgggagccaccatgctgcatcaaaacattttaagaaaagaaaaaaatccctttattttcaatt

SEQ ID NO: 538705 - DNA, 607 bp, Homo sapiens
gtaaaaccatcactaataactgtcagaagtaccccctgagtcaccagggaatgacaaagcttggcaaacagcctcttccttggagccccagagttcatctcccacctcattttgaaatggtcctcacgggtcttcaaagacccctgtctcttggcctgagtccgtccttcctctttgtgagacttcatgagtgctttacatatatataaacatgcatgagcataaacatgcacatgtaatacacagacagacaatgtaaaacagcttttttttttttttttttctggagactgggtctcactctgttgcccaggctggagtgcaatggcatgatcacggctcactgcaacctcaacctcccaggctyaggcgatcctcccacctcagcctcccaagtggcccagaccacaggtgcacaactactcctggctaagttttgtattttttgtagagacagggtctcactaggttgcctaggcttgtctcaaactcctgggtttggcaatcttcctgcctcaacctcccaaagtgctaggattacaggtgggagccaccatgctgcatcaaaacattttaagaaaagaaaaaaatccctttattttcaatt

SEQ ID NO: 538706 - DNA, 607 bp, Homo sapiens
gtaaaaccatcactaataactgtcagaagtaccccctgagtcaccagggaatgacaaagcttggcaaacagcctcttccttggagccccagagttcatctcccacctcattttgaaatggtcctcacgggtcttcaaagacccctgtctcttggcctgagtccgtccttcctctttgtgagacttcatgagtgctttacatatatataaacatgcatgagcataaacatgcacatgtaatacacagacagacaatgtaaaacagcttttttttttttttttttctggagactgggtctcactctgttgcccaggctggagtgcaatggcatgatcacggctcactgcaacctcaacctcccaggctcaggcgatcctcccacctcagcctcccaagtggcccagaccacaggtgyacaactactcctggctaagttttgtattttttgtagagacagggtctcactaggttgcctaggcttgtctcaaactcctgggtttggcaatcttcctgcctcaacctcccaaagtgctaggattacaggtgggagccaccatgctgcatcaaaacattttaagaaaagaaaaaaatccctttattttcaatt

SEQ ID NO: 538707 - DNA, 597 bp, Homo sapiens
ctgctcaggtctcagaggatgtgtaggacccatcataaaatccctctttggaacaatgcaggcggctctctatactagtctcaaagcccatgagggccaaggggctctctgtggctagggccacaggagtctgtggtgggaatgcagccttgcggggatctctcatttaccttttccctacgttgggcagtttctcttggatctgagctgatcctggctgggccggctgcttcacatcaytctctttgcatgtttccgaagttccttgtcctttccctctgaattccagtgttctttctaagctgctctacttgacatgtgattattcatttgctgtttgagtcctttgtgaaggaagtgagtgctggatgcctctggtcaccatcttgagctgaagaatgtttcttaccattcacaattaaaaaaaaaataagacaatgatgaggtttgctgcatcaaatgactctttcaaaaacattcctctgtagcatatgatgctatttgataaccttttactcacagcagaactttcaaaattggagtcagttctttcaaaccctgccaatgctttatcaagtaagtttacggaatattcta

SEQ ID NO: 538708 - DNA, 597 bp, Homo sapiens
ctgctcaggtctcagaggatgtgtaggacccatcataaaatccctctttggaacaatgcaggcggctctctatactagtctcaaagcccatgagggccaaggggctctctgtggctagggccacaggagtctgtggtgggaatgcagccttgcggggatctctcatttaccttttccctacgttgggcagtttctcttggatctgagctgatcctggctgggccggctgcttcacatcattctctttgcatgtttcygaagttccttgtcctttccctctgaattccagtgttctttctaagctgctctacttgacatgtgattattcatttgctgtttgagtcctttgtgaaggaagtgagtgctggatgcctctggtcaccatcttgagctgaagaatgtttcttaccattcacaattaaaaaaaaaataagacaatgatgaggtttgctgcatcaaatgactctttcaaaaacattcctctgtagcatatgatgctatttgataaccttttactcacagcagaactttcaaaattggagtcagttctttcaaaccctgccaatgctttatcaagtaagtttacggaatattcta

SEQ ID NO: 538709 - DNA, 569 bp, Homo sapiens
tctgttctttacaaattacccagtctcacaaattttgttatagcagcacaaaatagacttaagaaaatgttggagaatatgtagccattctttattcaaatatggctaaaaaatagtttcttgtttgttttttacagctttattgagctattattcaaatatcatataacacctatttatggcattgaatttaataatgtttagtgtatcatagacatgtgcagtcatcatgctagtcaatgttacaactctttttatggctgcaaaaataaaccccatgcacattagttatcacctccttatcctctcacyctacttcatagcccttaagcaaccactaatctattttcttcttctatataatactctattccagacattacataaatgatttaggcatcagttaaggaagaaccagttagatttctaatttccaacactagataatattaagtataagttaaaaataaatactgataattaaaatttgtatttaattttaaaaggcatttctaggtaaaaacttgatttaatgagttttttttgttactgtagttataaaaagttag

SEQ ID NO: 538710 - DNA, 569 bp, Homo sapiens
tctgttctttacaaattacccagtctcacaaattttgttatagcagcacaaaatagacttaagaaaatgttggagaatatgtagccattctttattcaaatatggctaaaaaatagtttcttgtttgttttttacagctttattgagctattattcaaatatcatataacacctatttatggcattgaatttaataatgtttagtgtatcatagacatgtgcagtcatcatgctagtcaatgttacaactctttttatggctgcaaaaataaaccccatgcacattagttatcacctccttatcctctcactctacttcatagcccttaagcaaccactaatctattttcttcttctatataatastctattccagacattacataaatgatttaggcatcagttaaggaagaaccagttagatttctaatttccaacactagataatattaagtataagttaaaaataaatactgataattaaaatttgtatttaattttaaaaggcatttctaggtaaaaacttgatttaatgagttttttttgttactgtagttataaaaagttag

SEQ ID NO: 538711 - DNA, 439 bp, Homo sapiens
ttatttgcattcttctggtctccctgactttctctgtttttatcttcagtcttttagagttgatccccaacaaaataaaaacaaaagcaaaatgcttcacttaatctcgtttctccagcaygctaatgcccatcaattttcatccttggatatcttctacgcttactgctctgcttcctctgaaaatattcagttcttaactgattgaattctcatttctgacaatcaactatgtattatactttatctggtcctttaaatctttaataatttctgaattcaaagttcaattgtttcttttgaatgtatattttattcaatctctttatcgaatgtaatgccagtaactatatattttttaaaacactttttttttacatttttttcttttttttgtattactcttttattctggaaacactcctgctctgtatatttt

SEQ ID NO: 538712 - DNA, 439 bp, Homo sapiens
ttatttgcattcttctggtctccctgactttctctgtttttatcttcagtcttttagagttgatccccaacaaaataaaaacaaaagcaaaatgcttcacttaatctcgtttctccagcatgctaatgcccatcaattttcatccttggatatcttctacgcttactgctctgcttcctctgaaaatattcagttcttaactgattgaattctcatttctgacaatcaactatgtattatactttatctggtcctttaaatctttaataatttctgaattcaaagttcaattgtttcttytgaatgtatattttattcaatctctttatcgaatgtaatgccagtaactatatattttttaaaacactttttttttacatttttttcttttttttgtattactcttttattctggaaacactcctgctctgtatatttt

SEQ ID NO: 538713 - DNA, 439 bp, Homo sapiens
ttatttgcattcttctggtctccctgactttctctgtttttatcttcagtcttttagagttgatccccaacaaaataaaaacaaaagcaaaatgcttcacttaatctcgtttctccagcatgctaatgcccatcaattttcatccttggatatcttctacgcttactgctctgcttcctctgaaaatattcagttcttaactgattgaattctcatttctgacaatcaactatgtattatactttatctggtcctttaaatctttaataatttctgaattcaaagttcaattgtttcttttgaatgtatattttattcaatctctttatcgaatgtaatgccagtaactatatattwtttaaaacactttttttttacatttttttcttttttttgtattactcttttattctggaaacactcctgctctgtatatttt

SEQ ID NO: 538714 - DNA, 439 bp, Homo sapiens
ttatttgcattcttctggtctccctgactttctctgtttttatcttcagtcttttagagttgatccccaacaaaataaaaacaaaagcaaaatgcttcacttaatctcgtttctccagcatgctaatgcccatcaattttcatccttggatatcttctacgcttactgctctgcttcctctgaaaatattcagttcttaactgattgaattctcatttctgacaatcaactatgtattatactttatctggtcctttaaatctttaataatttctgaattcaaagttcaattgtttcttttgaatgtatattttattcaatctctttatcgaatgtaatgccagtaactatatatttttyaaaacactttttttttacatttttttcttttttttgtattactcttttattctggaaacactcctgctctgtatatttt

SEQ ID NO: 538715 - DNA, 702 bp, Homo sapiens
ctgtcacccagggagtctcaaaggcactaggcatacagtaccatcttcattgtgcttggataccagtatccttgggaaagttagaaatgaaaaatgatattatcaaaagacacttcaggaaactgtctcaggagattgatatcccttggactatcctccccatatccctactacatgttagaaacaccccttcaaagttaggtttgagtccgtttgaaatgatatatggagggccttatctcactgatgttttttgctagactaagaaacctctgatttaattaaacatataattttkttgtgccatatctaagaggaactgaaacaactgatggaggcccaatccgatgaactaggcccactcaattcaacccaaggaatctagtaatggtaaaggtacttccttatcttgctctctctataagccaaaactggcagggaccttacaccatacttctttctactcatatggtagtgaaggtcactggaatagattattggattcattatagctgagtaaaggactgggaagttaacagaattaccctgtcaacccagaagagcatccaaagtaccaatgtgaagatatcggtgacctcgagctaaaacttacaaaagattagtgttaataattaacctcccattggtatcctttttatagtcttgcctatgcttgttattcttaccttcgatctgttctat

SEQ ID NO: 538716 - DNA, 556 bp, Homo sapiens
gctgcttagtccctggacacctgggccctccccacctgggtcacctcacctggggcgaaccttttgggcaagcaggcaatcaatcccatccactacataatgtaagatctccagatcaggcgtcttcatcagggaccccagagggaggcaggggaagggccaggcctgcaccatcaccttcagaacctcgcagcgtctgctagtgaaggcctccacgaacagtcgggggaagagctccctgggcagctcatccaggacggagatggccaaggcctggtccctcagcaggctctgccctgccagctccaggagtctgcgtggggcctggaagctcatcctgataaatctgcaagaaaaatccagagaaaagacaaacttatcaggccagtcctctcacaccctgacttctcctsggccaaaagtcactactctgtcaggtgtgaaagagtccttagtttaccccaattcgactctgcaataattggccacagagacatagttctgcccttctggtaccaagaagagtgtctcccaacctccaaggagcgggcaagat

SEQ ID NO: 538717 - DNA, 373 bp, Homo sapiens
tttcctgctttgtgccttgccatgttcaccaacatcactcaatataaattgaggaaattttcttaattactgctgggtctctctgcattgtggccatgttcygaagtccaggagagatgggctgatggccttgggatgcataaagtgacgccggccccatcagctcaggctgagggagaaaacagaggctcaggaatattctagagagcctaagcaagggcctcataggagctttggaatcccagtgtggattctgggagtggagaataggtcaggtcgtttcctgagatgggtttcgaaggttgctctgagcttggcagcagatgagcacctcgagaagaactggcgacagaacatggtagaaaagacccca

SEQ ID NO: 538718 - DNA, 373 bp, Homo sapiens
tttcctgctttgtgccttgccatgttcaccaacatcactcaatataaattgaggaaattttcttaattactgctgggtctctctgcattgtggccatgttccgaagtccaggagagatgggctgatggccttgggatgcataaagtgacgccggccccatcagctcaggctgagggagaaaacagaggctcaggaatattctagagagcctaagcaagggcctcataggagctttggaatcccagtgtggattctgggagtggagaataggtcaggtcgtttcctgagatgggtttcgaaggttgctctgagcttggcagcagatgagcacctcgagaagaactggygacagaacatggtagaaaagacccca

SEQ ID NO: 538719 - DNA, 435 bp, Homo sapiens
tggtgtcttctccacctgggagagttgtcctgcttttttttaagttgggataggccagtgagtcgggaagtttgttcatcttgggcttggggtacaggaggagttggtggggtgcctgtggccactgcactgccctctgggattaggaggagacagtggggtcagractcaccccctggcctgtgcttcaggtgatccctctctgtcctgtggatgtggggttgggagcaggtttggggtcctcgcctatccccattggctcttcttgggaagatgaatttatggggcacctgcaggtggccacgtgtgggaaggaatctcagaacttacatggatccatgcaaatgaggcttccttcaggcagacacaggaactctgagcctccctgatgctgcaggcacctgggtttggggaccctcttggagacaaatgcat

SEQ ID NO: 538720 - DNA, 617 bp, Homo sapiens
gtgtgagccaacacacctggatacttctttttagtagagacaaggcctcgctgtcttccccaggctgatctgtaactcctgaccttgtgattctcctgccttggcctcccaaaatgcagggagtataggcrtggaccaccacgcttggcttggcctcctccagttcttcacttctttagatgtctgttaactccttgttactttctgtggctgttcagtgggttaatacacactaggtggacaccaaaggcctggaacattactgggcaaaaacagtgagccaatccacacggaaagcaccttcttctcagcgtctttcactgctagccagatgctgagaccctgcccactccctgtgagtctccacatgcttccagaagccttagttggtggatgtcagcttcactgcacaaggagccacactcttcccactgccctggaaggggatgtccatattgtgtattagctggagactctgggcagcatcaacccttgcttgttctcctgatgaccagcagcccttcttgaattaaactggttgtagccagtaaagacagccacattccctttaagtaaaatactaaaactatacaggcatgtaacactttttaaatatt

SEQ ID NO: 538721 - DNA, 617 bp, Homo sapiens
gtgtgagccaacacacctggatacttctttttagtagagacaaggcctcgctgtcttccccaggctgatctgtaactcctgaccttgtgattctcctgccttggcctcccaaaatgcagggagtataggcgtggaccaccacgcttggcttggcctcctccagttcttcacttctttagatgtctgttaactccttgttactttctgtggctgttcagtgggttaatacacactaggtggacaccaaaggcctggaacattactgggcaaaaayagtgagccaatccacacggaaagcaccttcttctcagcgtctttcactgctagccagatgctgagaccctgcccactccctgtgagtctccacatgcttccagaagccttagttggtggatgtcagcttcactgcacaaggagccacactcttcccactgccctggaaggggatgtccatattgtgtattagctggagactctgggcagcatcaacccttgcttgttctcctgatgaccagcagcccttcttgaattaaactggttgtagccagtaaagacagccacattccctttaagtaaaatactaaaactatacaggcatgtaacactttttaaatatt

SEQ ID NO: 538722 - DNA, 617 bp, Homo sapiens
gtgtgagccaacacacctggatacttctttttagtagagacaaggcctcgctgtcttccccaggctgatctgtaactcctgaccttgtgattctcctgccttggcctcccaaaatgcagggagtataggcgtggaccaccacgcttggcttggcctcctccagttcttcacttctttagatgtctgttaactccttgttactttctgtggctgttcagtgggttaatacacactaggtggacaccaaaggcctggaacattactgggcaaaaacagtgagccaatccacacggaaagcaccttcttctcagcgtctttcactgctagccagatgctgagaccctgcccactccctgtgagtctccacatgcttccagaagccttagttggtggatgtcagcttcactgcacaaggagccacwctcttcccactgccctggaaggggatgtccatattgtgtattagctggagactctgggcagcatcaacccttgcttgttctcctgatgaccagcagcccttcttgaattaaactggttgtagccagtaaagacagccacattccctttaagtaaaatactaaaactatacaggcatgtaacactttttaaatatt

SEQ ID NO: 538723 - DNA, 617 bp, Homo sapiens
gtgtgagccaacacacctggatacttctttttagtagagacaaggcctcgctgtcttccccaggctgatctgtaactcctgaccttgtgattctcctgccttggcctcccaaaatgcagggagtataggcgtggaccaccacgcttggcttggcctcctccagttcttcacttctttagatgtctgttaactccttgttactttctgtggctgttcagtgggttaatacacactaggtggacaccaaaggcctggaacattactgggcaaaaacagtgagccaatccacacggaaagcaccttcttctcagcgtctttcactgctagccagatgctgagaccctgcccactccctgtgagtctccacatgcttccagaagccttagttggtggatgtcagcttcactgcacaaggagccacactcttcccactgccctggaaggggatgtccatattgtgtattagctggagactctgggcagcatcaacccttscttgttctcctgatgaccagcagcccttcttgaattaaactggttgtagccagtaaagacagccacattccctttaagtaaaatactaaaactatacaggcatgtaacactttttaaatatt

SEQ ID NO: 538724 - DNA, 640 bp, Homo sapiens
caggttctcaagggcagccatggagatgaggttcccacagaagctgaaggtgctgagctgggagcagcggctcaggacaggcaggatggcgctgagttgggaatccatgatcccacagtcctctaagtccagggtctgcagggtggccacaacttgctccagcagacctgtgaggggctcagggctgaaatgggtcagygtgacacccctcaggtccagctcctttaattgacggatgctcgggcaccaagagagatgcttcaagtccgactctgacagcaggcagtcggtcataacgaccatctccaaggaggcctggagacacctgggagagaacaagaagtagttagaggagagaggtggggatgacttcagggtgagagatgatgctctccataacccagggctgctctgctcatctgaggatagtcagcacctggggtgtgggaatggagactctgttccttcagtgcagtcccaatcgaggctcagtccttcaccatcaccgaggtgattggatcaagtccatgaactctaagtctccctttcctcatctgtcaggtagaaaaccgcatctctgggccacaggagcccgatggagacacaggcataaatgacaaacccaggcaggatcctgcaa

SEQ ID NO: 538725 - DNA, 640 bp, Homo sapiens
caggttctcaagggcagccatggagatgaggttcccacagaagctgaaggtgctgagctgggagcagcggctcaggacaggcaggatggcgctgagttgggaatccatgatcccacagtcctctaagtccagggtctgcagggtggccacaacttgctccagcagacctgtgaggggctcagggctgaaatgggtcagtgtgacacccctcaggtccagctcctttaattgacggatgctcgggcaccaagagagatgcttcaagtccgactctgacagcaggcagtcggtcataacgaccatctccaaggaggcctggagacacctgggagagaacaagaagkagttagaggagagaggtggggatgacttcagggtgagagatgatgctctccataacccagggctgctctgctcatctgaggatagtcagcacctggggtgtgggaatggagactctgttccttcagtgcagtcccaatcgaggctcagtccttcaccatcaccgaggtgattggatcaagtccatgaactctaagtctccctttcctcatctgtcaggtagaaaaccgcatctctgggccacaggagcccgatggagacacaggcataaatgacaaacccaggcaggatcctgcaa

SEQ ID NO: 538726 - DNA, 594 bp, Homo sapiens
tccctgctttgtgccttgctatgtgcacccaaaaagctcagtagaatttggggagaatgtatgagtcactgctgattccagggagagtgtctcttagcattgtttgtggccatagtcctcggtgcaggagagatcggctgacatttccaggaagcagaggattcagcttctctcacagctcaggctgggggaggaaaacagaaattcagaaatattttagagaccccmatcaaaagcctggagaagctttggaatcccagtagaaattctgtgagtggaattgaagtcaggccgtcccttcagatgggctctgaaagctactctgacctggacagcagaggagcaccttcagaagcacaggcaaccagaacatggtagaaagacccccgaaactgcaggattctcactggggtcctgaggatggtgcaggattcccccaagaggttcatttttctcccaaattcttcagatacacagcttgcaccattcatgcttccagattgaaaagtctccctccttatgtctgaccacactgctcctctctgggctctgccccagctcacacactcagattcactcttcccaagctggtat

SEQ ID NO: 538727 - DNA, 594 bp, Homo sapiens
tccctgctttgtgccttgctatgtgcacccaaaaagctcagtagaatttggggagaatgtatgagtcactgctgattccagggagagtgtctcttagcattgtttgtggccatagtcctcggtgcaggagagatcggctgacatttccaggaagcagaggattcagcttctctcacagctcaggctgggggaggaaaacagaaattcagaaatattttagagacccccatcaaaagcctggagaagctttggaatcccagtagaaattctgtgagtggaattgaagtcaggccgtcccttcagatgggctctgaaagctactctgacctggacagcagaggagcaccttcagaagcacaggcaaccagaacatggtagaaagacccccsaaactgcaggattctcactggggtcctgaggatggtgcaggattcccccaagaggttcatttttctcccaaattcttcagatacacagcttgcaccattcatgcttccagattgaaaagtctccctccttatgtctgaccacactgctcctctctgggctctgccccagctcacacactcagattcactcttcccaagctggtat

SEQ ID NO: 538728 - DNA, 592 bp, Homo sapiens
ctgctgagttggtgggacctgggcaattacaagggaggtcactgcacccccaggcagttcccagcaagtgttttttccaatttcactgacattctttccgggctcaactcaatttgttttcaacttctctatggcaattgatgactgactgtgtaattcagcaggatctcctgtgaagtgcttcttccccagttgaataggagctggtgtttgtctaagcctctgcttatgcatgaggtataatgctttttatatgttatataatgctcttacgcgttagctatctgaatgatagatttaataaaatatacctcataatattatggggaaaggatgacgactgttatagagaggaacttgggagtatcacttctgtaatccttatctaacctgaatctgytagcaggaaactgaaaaggcctgtgtatgacaatgagataaacaattttaatctcttagcaatgtcaagtggaaaatctaactacctgccagtagtttaagaaatggctaagagattttgttgggcacaaataatcctgagacccagattgctgagccaagggtaggaaaattggttttgctatgtgttaca

SEQ ID NO: 538729 - DNA, 531 bp, Homo sapiens
catgtaaaatacctagcacagggtctggcacatagtaggtacttaaaagtgagatttcttcccttcctgctggttgaacgaagttaggaagtgctgggttaatctaaggagatttttgcagactcttccaagcctttaatatgctcatgtgtgacccactaatgtggggagcagtatatggggtttctcaaactcacttaacaaagaacacttttaagagtactaaaaaatactttgtaggacaccaggactccatgaaactcagctcaggatgtgttgctctgaagcatctggatagagaagtgaatgacaggaactacatccaaaactcagtattatttcttasgacatttgtgtgtttcttggttaagctctgagttgtgcagtcatcccctctccagatcctctgatggggccctgtgctgtggtaaggggttggattccatcccttgaagaagggacagaagcagcaaaatgttcatcagtgaggccacttgcctgaagtcacccagtgtatcttgcctcagaaac

SEQ ID NO: 538730 - DNA, 627 bp, Homo sapiens
ctctgaaaaagagcctcacgtgtggctgttagaaacaaaaatacaccaaaaccaggaggcccaaaaatgggaaaaaagaatccgagggaaatctgggcagagctccaacattatctgttatgttgcagagatgggaaacaagaattccataagtgggttattaaggtacaagaatgagggggctgtggtgatgggtgcataactctgtgaatgtactaaaacccatcacattggctacttaaaaaaggaaatttatatgacgtgtgaattatatctcaatgaagttgttattaagaaaagaaggactggggacactcctggtgggagacagcaccgtgtactggtccctggctaaggacgccaccggcctccaggacagggccctgcctcacagggtgctgcctccccgctggctccgcagcagaagcttcggcaggccattccaccatccctcagactagctactaggtgcaagcctgtggccatccttctctcactatccattgagttgctgggttggaggcactgcagtgtggcratgggtaaggcattccatatggccacagatggcattactggcagaagcatccagtagagaaggcaaatctctgtccagattccctgggg

SEQ ID NO: 538731 - DNA, 319 bp, Homo sapiens
acagtcaggacagtctctaaccaaaggtttctcgaaccaggtcactgtccctgcttcccagcagggctatggaagtgattttctcctggctgcattcccagatctatctgatcaggagccttctccactcaaagtcttttgagcagtgcattcgtttaattttcccggtatggatgttctttttctcaatgggcaggtatcaaggggtyattcaaaagccatatttatgctcctcaattatgcctgcccttcctgagccaggcagaagaggcagctacaggggtctcgcctttgcctcaggggcgtaggaaccacatga

SEQ ID NO: 538732 - DNA, 594 bp, Homo sapiens
atgtgttttacataaattattgcttattctcacaattagtcttcaaggttggtgttgtggttccccatttacataggaggaaactgaggcatgtcagggtaaggtaccttgtcaaagccttgtaagccagggcagtgaaaccaggtttggaagcctgactgaccgctcagccctttcctgccacccctgccacccccaccccgagctgcctctctcttttcccagttttgctttcacaccattggttttttttccaccagcctggtaggaggtgggaggaagtcatgctgagagaggaagtcatgttgcactttgctttcctggcattttctctgaccagagcctagaagcaggacggccacagtctcaaggctcagtgaaggtgccccataaaagagctccgtgacagacatggggtgaatgggcaatggcctgtgattcagagggtgtcaaggagagagacggattggtctcggcacaaagacggtacatggtagttgagatgcaatggacccctcccacccggtgcctgcacgctatcaccrattcagtgccagcccaattgtattcttggaaacacagaatggtttgtgt

SEQ ID NO: 538733 - DNA, 629 bp, Homo sapiens
gtaattttacagatgatacttagcttccacctgcctgatggaattgatataaacattgatatgtcctctccatttataagctcatattttttggaaaaagtattatggggcaaatacattatgtttatgaagcagctacttcaactgtcccttgatatgtctcccaaaattattctttaacaaaaccaggaaggcctcagtcatcagtattaagcttatagtactcagtaacacttagatcctgtatctccaaaggatccacagactgaccatctgtagttacatgaatcatagataagaacagaagagtgtagcatataaactcaaattacatctaacaaasaaaactctctttatatagactcaaacaatggttaaacataatgcaaacatagtggtctctgtgtttgttagaattacttggctcttttgattctgtcagataaaagctaaacatcatatgtgagtaatgtcctctctactttgaacagagaggtagacaggccagagaggtagataggccagaaaagcacatgtaaaggcctaattaagggaggagggatgactcagtcatctgtgcctagagactttctgcacttaatgttagtgcaaacctactacaacactcc

SEQ ID NO: 538734 - DNA, 629 bp, Homo sapiens
gtaattttacagatgatacttagcttccacctgcctgatggaattgatataaacattgatatgtcctctccatttataagctcatattttttggaaaaagtattatggggcaaatacattatgtttatgaagcagctacttcaactgtcccttgatatgtctcccaaaattattctttaacaaaaccaggaaggcctcagtcatcagtattaagcttatagtactcagtaacacttagatcctgtatctccaaaggatccacagactgaccatctgtagttacatgaatcatagataagaacagaagagtgtagcatataaactcaaattacatctaacaaagwaaactctctttatatagactcaaacaatggttaaacataatgcaaacatagtggtctctgtgtttgttagaattacttggctcttttgattctgtcagataaaagctaaacatcatatgtgagtaatgtcctctctactttgaacagagaggtagacaggccagagaggtagataggccagaaaagcacatgtaaaggcctaattaagggaggagggatgactcagtcatctgtgcctagagactttctgcacttaatgttagtgcaaacctactacaacactcc

SEQ ID NO: 538735 - DNA, 273 bp, Homo sapiens
caaggctgtagccaccatcagacccaggggattctcagtcctgaagagttagggaaaacagcaaggaaggaggaaygcaaggcatgcagagaaggtagtgtaagtgttgtggggagggggtgttttttaggtaccggattcccctccaaacaatggccaagtcccgtcctctgcttcacataccggattccccttgagattaaaaacaaacaaaccaaaaataaaacctggctactgtgcctctgtctggaagaagtgacaccactttaagaa

SEQ ID NO: 538736 - DNA, 591 bp, Homo sapiens
tcacagcttctgcacatcatatcaccccaaggcccagactgatggagaagccactagctcaaagcttgctggtcatagtgccagagggaaagaaagacctctggaagatgttgcattggcaattacgttcttctgccgggaagtgacactttctcttctgcccattggccagaactggtcatatggccccatccaaccacaagggggccagggagtgcaattcggaagaggagacccagaaatatttagcaaatagcactagcgactagtgagtagggcgcgcgcgtgcgcacrcacacacacacacacacacacacacacacacacacacttactgctcttcccacggtctccttattttatccttttgtgtcctggactcctaaacaattccctgtccctagtaatcagggtggaaagtctcctgccaggagccagaggttgtggaaacttacatcccccttcatttcagtcctgtcggctgccctgagtctccccgtctcactctgggccccatcatccatctccctccctgcccatccgtctgagcctcccctgccccagcttctgcctcctgccaagaagagataa

SEQ ID NO: 538737 - DNA, 250 bp, Homo sapiens
tctccttattttatccttttgtgtcctggactcctaaacaattccctgtccctagtaatcagggtggaaagtctcctgccaggagccagaggttgtggaaacttacatcccccttcatttcagtcctgtcggctgccctgagtctccccgtctcactctgggccccatcatccatctccctccctgcccatycgtctgagcctcccctgccccagcttctgcctcctgccaagaagagataaaagagaca

SEQ ID NO: 538738 - DNA, 263 bp, Homo sapiens
agagacagctgcgtatttattcagygctacttctacttctcactgctgccccaccacttgcttcaagctccccgctagcatcctcctccctttcttctttctacgattgcctgaagagctaagcgtgagctagtggcacccagagaggtggctgctacgggggaagggaggaatgaggggaggggggacctcagggcccttgggggtgacaggagaaggcagacgtgaacaaaaactcagagagggcatgagatgtagaataa

SEQ ID NO: 538739 - DNA, 263 bp, Homo sapiens
agagacagctgcgtatttattcagtgctacttctacttctcactgctgccccaccacttgcttcaagctccccgctagcatcctcctccctttcttctttctacgattgcctgaagagctaagcgtgagctagtggcacccagagaggtggctgctacgggggaagggaggaatgaggggaggggggacctcagggcccttgggggtgasaggagaaggcagacgtgaacaaaaactcagagagggcatgagatgtagaataa

SEQ ID NO: 538740 - DNA, 646 bp, Homo sapiens
gctgcacctgggcctcacgggggcgcacgttgaagccattatagcgggccgtctggcagcggtaggtcccgctcatgtctcggctcactcgctccagccggagcttcccgtccggagtctcctccaggggcagccccgagggcagcagtgcagcctccttgtccacgcgggaccagagcactggcggccgcggcttgccccgcacctcgcattgcagctcggcaggcgatccctcgcgcacggtcaccacggccctacccttgggcacactgatggtgggcggcactgtgggggtgatggtgatcrgcggagaggtaggagcggagttagagctccccactgggctctgccttctggctcctgcttacctccccctaggggcaagcctctctctcccatcccagacttcccactggtcccccagtatttccaaagcagaactcacttttccaaatcctctccatctcctgggtctccacctcagtgtctcccaactcaaaaagagacctgaagtcagcctggcctatattccttcttccccagcactagtaagtactagggattccacctcttaaacatttctaaatatatccattcttggtccttctgtcctactccgggccctggcctatttaaagacttcatc

SEQ ID NO: 538741 - DNA, 646 bp, Homo sapiens
gctgcacctgggcctcacgggggcgcacgttgaagccattatagcgggccgtctggcagcggtaggtcccgctcatgtctcggctcactcgctccagccggagcttcccgtccggagtctcctccaggggcagccccgagggcagcagtgcagcctccttgtccacgcgggaccagagcactggcggccgcggcttgccccgcacctcgcattgcagctcggcaggcgatccctcgcgcacggtcaccacggccctacccttgggcacactgatggtgggcggcactgtgggggtgatggtgatcggcggagaggtaggagcggagttagagctccccactgggctctgccttctggctcctgcttacctccccctaggggcaagcctctctctcccatcccagacttccsactggtcccccagtatttccaaagcagaactcacttttccaaatcctctccatctcctgggtctccacctcagtgtctcccaactcaaaaagagacctgaagtcagcctggcctatattccttcttccccagcactagtaagtactagggattccacctcttaaacatttctaaatatatccattcttggtccttctgtcctactccgggccctggcctatttaaagacttcatc

SEQ ID NO: 538742 - DNA, 214 bp, Homo sapiens
tagggaggcttggggacaggcctgggtctctccccgggactcagtaggtatcaccctgtccccagtcaccctctagtcctgtcctcagccctggcccacctttgckgacccctttgaaggaggaaagaccttgcttccacatggcctgcccccaccctggcctgccctgctctgattccccactttcttgtctgccccgcttcttacttctttt

SEQ ID NO: 538743 - DNA, 589 bp, Homo sapiens
cccctcagctgctgttctttgtctcccaaatacccccaagttcattcccgcctcaagcctttgcacactgtaccctcttcctggagtgctctttactcatattgccacacaatgggcttttctcccttttctcagggcttgacacctcttcatagaggccttccctgactacccacctaaagcatcacctcccaccctgttctattgccctgttggttgggtcagttgttttcctcttcatggcatgagtacaggtgccaaaagtgtactgggagggatgtcccccatttccatatgtccctcccaatgtccttccacagaaaagaaaaataacccttcatatacacaactgacattgcctcaatttttgaaaaccttcctgtatttggattttaagtagaatcattgtgtgtacttagcagactcagctttaagatgaactcccttctaatcatctcgttgcctccgagtcccctttggataggactactggaaccgtcatggaccaagcccccttaatcctaycatggtgggagttatggacctggggtgagagatattggccacttggagaggaaaccagttatgg

SEQ ID NO: 538744 - DNA, 488 bp, Homo sapiens
tggctgtagaattaataaagtgttgtaaccaaagattggaaaagagactaggggactcggctcctggagtggaactattaaaaaagaaagaaggcgctcagctccgctacagaggagtaagaatagggcccaggcctcctcttagatgctgggcaaacaccaggcgagggagcatccctaaccagctcaatgtgtctgctgttggccataaagatggggcttattagcgctatggtgctgggagaaccgaggagtaacaaaacggcctctttggagggggtaaagaggcaggtttattaccctcagcaacgagggatgctcaggaccacaaccagtctctcctgatgaggagccacagcccaccccactgggacgcrgggccacccctaccccacagtctctggacctttgctctcacccgactcccctggcaggagccagaacgagctccctgacctgtgcagtcctccaccctcgcccatccaggc

SEQ ID NO: 538745 - DNA, 550 bp, Homo sapiens
cctgggcaaaattgaactctctcaattttctcatcaaataaggataatagtgctacccccccaggaatgtagtgagaccaaagtcgatgatgcacacccatgcctggcrtgcagttgggtctcagcgcagcacataaccggggggagtgtaaatgattcagcaccttgggaggtccgtttgtcatatcttttaaaattacaaatgtgcattcctcttgtcccaataattctatctctagctatttttcctatagttttatttccaagtgtgtaaaataacttatgtacaagatttatattagtacatgattggaaataactcaaatttccattcgctgagaactagttaaaccaattatgggacataaatacactggaatactatatagctttaaaaaggaattaggaagttctttctgtacccacacagaaagatctccaagacactttgttctagagaaaaagaagaatgtgtttggaatgactgcatttatgtgcctgtctgtgcatagagtatctctggaaggactcatagcagatcagtgacagc

SEQ ID NO: 538746 - DNA, 454 bp, Homo sapiens
catgcctggcgtgcagttgggtctcagcgcagcacataaccggggggagtgtaaatgattcagcaccttgggaggtccgtttgtcatatcttttaaaattacaaatgtgcattcctcttgtcccaataattctatctctagctatttttcctatagttttatttccaagtgtgtaaaataacttatgtacaagatttatattagtacatgattggaaataactcaaatttccattcrctgagaactagttaaaccaattatgggacataaatacactggaatactatatagctttaaaaaggaattaggaagttctttctgtacccacacagaaagatctccaagacactttgttctagagaaaaagaagaatgtgtttggaatgactgcatttatgtgcctgtctgtgcatagagtatctctggaaggactcatagcagatcagtgacagcag

SEQ ID NO: 538747 - DNA, 366 bp, Homo sapiens
agctggcccaatgcataggccgtctggtcaaagaggaactctctgtagagaagcgaggagataaggtggaggcggcaggttgctgcctgggggtamcagaagggacaagagtggaggatgagatcaaggttcggagccagagtgattgggagaaggaagctcagaatggggagcccctgggtcttgcccatttgtcatctccacctccttccccagaaagctttgcacagtactgggcacatagtaggtgttttgtgtttgctgaacaggactcctacccataggggtcccctcctcctctgtctcttccctggatccaggctcctctgagcaggagcaggggctgtggaatgggaatggggatag

SEQ ID NO: 538748 - DNA, 616 bp, Homo sapiens
ctggcccctcgtgatctccctgactttccgtcctgccactctcccccggttcactccactcccgctgcccctgcctccctgatggctcctcgaatcccgggcactctcctaccccagggcctttgctccggctgctgcctctgcctggagcgctcttcccccaggcgtctgcagagctgactccctcacctccttcaggtctgtgctccactgtcacccctatggcactatttaaagctgtcacgctccccccaccagcacttcccaccctccatccctgctgtattgtcratagcacgcatgccctttaatatactatagaatttgattatttcctttgtcctatcagcttttctctgctaaaatgtgagctccatgaggcagagatatttgtctcttgtttcctgatgcacagtaagtgcgcagggcatattcatggaatgaatgaatgaatgtagtccagcccctcgtttcacacagtggaggcagtgtccttgagctaacagaaaaagttagcagcaggatccaggagcagaccaaacacctccagacacgcagtccagtgctccttaagcccctccaggtttgataaagctgagtgcggcagatggcgttc

SEQ ID NO: 538749 - DNA, 622 bp, Homo sapiens
gcagtctgcagtaaatggggggaaaggaggggcttgtggtttccttgtggggtcaataaggatttgtgggcacttgcctgggtggggcctktggtgaatggagccggggccctcctggcctggctatgttctcactgcccctctttgattctccccctggggcctgcctgcctcctcaggccctctccgaagtccaaagggaggctgcagggcctcgagccctccccacctcccttgtcttgtcctgtgactgacttccagacctcagagatgtctttccacctcagccaggggaggcgtgagggtcccccacccacaccccgtggaacacatttgtcttcccaaatcttttcccagccccagggaaagggaaaaaaaagagaagggggaagaagagagctctgggggaaggaaagctcaccaaaaatgagatgctggggctcacgtctctgctacttcctgacacctcacctttccccagtggcctgctgttgtccttcaggggagtggggctgccccgcacacctgctccattactgggaacgttacattgcacaggggaggacgctggggcttgaggagggcgggtccctggctccactggctagtcagtggaagggta

SEQ ID NO: 538750 - DNA, 667 bp, Homo sapiens
aacctaaatatacataaattgtgtgatatttacataaagtgtgatacgtccatgttctagttatctattgccgtgaaataaaccacctcaaaacataatggcttaataccacaattatttatttttcccatgtagctgcaatttgggcagggctcagcaaggcagccctgtgctctctgtggcatcagttgggacagcttgatttgggctggatgagtcacttaagggcaagtctcttacatggctggcaagttggtactggctggactgggggctcagctggggccgtggaccaggggtctctgctcctctccacaggaccctcctcatgactgcgtgggcttcctcactgcatggtggttgggttccaaatacaggtattccaagaggacaaggcaggattttttttttaacctagcttctggatcacatggtgtttagtagtcaagatagtcacaaaggtcagcccaggggaggggaaacagamcttgcttattgatggagaatggcaagtttctagaggagcttgtgagatgggaggttctgttgcagtcatctctggaaaatacaatctgccacagttcataatatgaaacaccatgcaatcattaagagattttaatgtatcttatcaaatgaaaaaaagaccaagtcatgaaacatttat

SEQ ID NO: 538751 - DNA, 612 bp, Homo sapiens
ctgggcaccattcgtgcccacccggtggggkagagcctgcgggtcatgggcctagcgacagcctagcatcagaaggccctgagcagactgatctccgtcgcctcacaagacgggtcacttccctcctgagcttccaagcctttacctgagctgttttcttgtcccttaagtctgttggtattgaagtctgggcggcctgacagccctggcaggcagcccagaggccagcgccccaggcagacactctctctgccttatttatgcagcttcgcggccgctgcgattgggtggcatttgtgagcacaaaagagaagactcgggcattcagaaggccctttcagcaaagggcgccacaggcctgctggctggaaattctcctgagatcggttggagtctatttgcaggcgtgcaggcgtttctgtttgcttcctgaccctggcctcctgggcactggggcggggaggggcaggcctctgcattcggggacaggaaggagggggttggcacagaggtttctgccagagcctccctgcctggaggacctggccttgtggtcttccccaggcccatgtgccctgcttgcctgctctctcaccaacagggtgatgaggt

SEQ ID NO: 538752 - DNA, 612 bp, Homo sapiens
ctgggcaccattcgtgcccacccggtggggtagagcctgcgggtcatgggcctagcgacagcctagcatcagaaggccctgagcagactgatctccgtcgcctcacaagacrggtcacttccctcctgagcttccaagcctttacctgagctgttttcttgtcccttaagtctgttggtattgaagtctgggcggcctgacagccctggcaggcagcccagaggccagcgccccaggcagacactctctctgccttatttatgcagcttcgcggccgctgcgattgggtggcatttgtgagcacaaaagagaagactcgggcattcagaaggccctttcagcaaagggcgccacaggcctgctggctggaaattctcctgagatcggttggagtctatttgcaggcgtgcaggcgtttctgtttgcttcctgaccctggcctcctgggcactggggcggggaggggcaggcctctgcattcggggacaggaaggagggggttggcacagaggtttctgccagagcctccctgcctggaggacctggccttgtggtcttccccaggcccatgtgccctgcttgcctgctctctcaccaacagggtgatgaggt

SEQ ID NO: 538753 - DNA, 612 bp, Homo sapiens
ctgggcaccattcgtgcccacccggtggggtagagcctgcgggtcatgggcctagcgacagcctagcatcagaaggccctgagcagactgatctccgtcgcctcacaagacgggtcacttccctcctgagcttccaagcctttacctgagctgttttcttgtcccttaagtctgttggtattgaagtctgggcggcctgacagccctggcaggcagcccagaggccagcgccccaggcagacactctctctgccttatttatgcagcttcgcggccgctgcgattgggtggcatttgtgagcacaaaagagaagactcgggcattcagaaggccctttcagcaaagggcgccacaggcctgctggctggaaattctcctgagatcggttggagtctatttgcaggcgtgcaggcrtttctgtttgcttcctgaccctggcctcctgggcactggggcggggaggggcaggcctctgcattcggggacaggaaggagggggttggcacagaggtttctgccagagcctccctgcctggaggacctggccttgtggtcttccccaggcccatgtgccctgcttgcctgctctctcaccaacagggtgatgaggt

SEQ ID NO: 538754 - DNA, 349 bp, Homo sapiens
tcctcccctcagctctcagtgatcacrggccagtgcttcctgcctgagccatacacttcgacggtgacaaaattcatctggcattcccagattcttattttctgtttctttctaattgctttggatctttgaacctcaagggtgtgaagcttgcctgccagaaacctgaagtagatagagatcacgttttctatgctgattttcactcctgaagttcccaactcaaagatggacatgctgggaggaagcagagtaagctaagaggacactggttctggattcaatgtctgcttccatcctcacaagagctgcgtgcgcttgggagtttacccaacctcactgagtcgca

SEQ ID NO: 538755 - DNA, 506 bp, Homo sapiens
tcttatctgtgcccttttgagttggccggccgggtgaccatccatctcctctgggttgyaaatgacttcatctcgaagttgcactgttggtggtaggtgaggacgccttctccaggtggagggagtgcatttgtggttgatggtgtgagcgaccatatgttggaccatatgtcagaacctgttaagagattctgacaggtatggaaatgcctcccattagaaactgaagccctgggtcctttgaccgctgcagcacccccagaggagagtaccctaaggcccttttaaccttgccctgccctggcaggttccaaggggaggcagaaatgactctggatgaattttgttttgattattcttccccttttccaggctctgtgtccagttcacctctggagctgcctgggtcactgcaacccagactagagagaagtatgaccccaagttgtggcttttattgggagacagccttcatctaaggaagtgggaaagaatgtgttccccag

SEQ ID NO: 538756 - DNA, 506 bp, Homo sapiens
tcttatctgtgcccttttgagttggccggccgggtgaccatccatctcctctgggttgcaaatgacttcatctcgaagttgcactgttggtggtaggtgaggacgccttctccaggtggagggagtgcatttgtggttgatggtgtgagcgaccatatgttggaccatatgtcagaacctgttaagagattctgacaggtatggaaatgcctcccattrgaaactgaagccctgggtcctttgaccgctgcagcacccccagaggagagtaccctaaggcccttttaaccttgccctgccctggcaggttccaaggggaggcagaaatgactctggatgaattttgttttgattattcttccccttttccaggctctgtgtccagttcacctctggagctgcctgggtcactgcaacccagactagagagaagtatgaccccaagttgtggcttttattgggagacagccttcatctaaggaagtgggaaagaatgtgttccccag

SEQ ID NO: 538757 - DNA, 568 bp, Homo sapiens
tgtgtctcatttcagtcagcggatgctctgctaaatctagtgatgggcggcctacctccgaaaggtgggtgggagtgagggatgagtgtagcagtagtacatgcaaatggggccaggttttggtgtgtgtgtgtgtgtgtgtgtgtgtggtgtgtggtttttttttttctttctttttttctacagtcttactctgtcgcccaggctggcatggagtggtgtgatcttggctcactgcaacctccgcctcctgggttcaagtgattctctgcctcaacctcccaagtagctgggactagaggtgcacaccaccacgcctggctaatttttgtatttttataaagaygagatttcacatgttggccaggctggtctcaaacttctggcctcatgtgatccacccgctttggcctcccaaagtactgggattataggcatgagttactacgcgcggccagggaccagttaagatttgacgattacattttattgaatgtttgcatcagaggcacctggaaggcttgtttagaccacagatttctgggcgccaggcccaggggttctgatt

SEQ ID NO: 538758 - DNA, 490 bp, Homo sapiens
ggcaccttctatgtgtgcccacatggttgaaagacacacaagatcccatgggtctctgtataagagcactattcccacttatgaaggtggagccctcatgacataatcagctcccaaagmccctacctttaatattatcacactggggactaagttgccacatgtgaattttgagaggaaataaacattgagaccccagcaaatggcctgggaacagaaatggcaggtgaaacttctggaataaggccactaggagcctgatgtctcttttattcctctctttcactggagaacacatactccagatgttgtagcatcaagaggaaattacatcagattttacataagcaagaaataaacctttattatattcagtctctgatatatgggtatttgtctgttgctgcagttagctttaattatttgaacaaacctcatagctcaaagcagcattcccagaccttatgtctttcatagcttattttaaaat

SEQ ID NO: 538759 - DNA, 624 bp, Homo sapiens
gtagtactcaagtccaaggtcaactgaagatactaattgaccctggacttgagtctgattatctagttcattcagtccaccaacatttagaggtatgttcaagacaccattccaaatagagaatatatatgataaagcccttgttctcttggaatgcacagtcatggacgataaggagagaggacagacactaaaaaacatagaatggtaaaaccaagtattatggaagtttagaaatttgaactaagccattttgtaaggtctctctgagctttgtgattctacagaaaccttgtcctgactaggaagaygattttactttttctgatgaggagatgtcttcagaaataatctgctaatgaatagatgatcctgttaggaatggggcatgacactttacaaactatatgatagaactggtgggagtttaataggagaagagctagccttgggtctccaagggaaggcagagaggagggctggaaattgtggaaattgtggctcaccatcaaggggagtgattggggcagggagtccaggatggcaaagcatcctaatgagtgacgagcgcagtgtgaagaattcagagcaagagatgcagacaaacagggcagagcagacaag

SEQ ID NO: 538760 - DNA, 624 bp, Homo sapiens
gtagtactcaagtccaaggtcaactgaagatactaattgaccctggacttgagtctgattatctagttcattcagtccaccaacatttagaggtatgttcaagacaccattccaaatagagaatatatatgataaagcccttgttctcttggaatgcacagtcatggacgataaggagagaggacagacactaaaaaacatagaatggtaaaaccaagtattatggaagtttagaaatttgaactaagccattttgtaaggtctctctgagctttgtgattctacagaaaccttgtcctgactaggaagatgattttactttttctgatgaggagatgtcttcagaaataatctgctaatgaatagatgatcctgttaggaatggggcatgacactttacaaactatatgatagaactggtrggagtttaataggagaagagctagccttgggtctccaagggaaggcagagaggagggctggaaattgtggaaattgtggctcaccatcaaggggagtgattggggcagggagtccaggatggcaaagcatcctaatgagtgacgagcgcagtgtgaagaattcagagcaagagatgcagacaaacagggcagagcagacaag

SEQ ID NO: 538761 - DNA, 597 bp, Homo sapiens
ttgcccacttgagtggtatgatgagagaggagggagagtgagatggagaagaagaactgggatcttttctcaccaacagctttgctggtaaatgatggagggcccattgccctttttggaagttttaaacaacttgctttcaccctcatttcctcccagtgctatccttctctgctccttaaatattaaaaaaataaaataaaagggagagaatattgaagtcctctgagggctagctacrcttctctcaccaccactcatgccagagggagttgctgcccatacagggtggctacaggctcagttggggaggaagctgacagtatacaagcaacttgcccctgcaggggcaggggcgggaggagggcctccacagaaagaacaataggagggtgtgaacattcagagtttacaggaagtttggcagggggtctggttagctgtggagctggcacggaaaggggctcagagacgggtctggctgaagggctacagaacagagcactagaggtggaatcagagagattgtgggctgggacatgacacctgtttccacctgcccacagtctcttcatctctaaattgaggagtatagta

SEQ ID NO: 538762 - DNA, 447 bp, Homo sapiens
aatgagacatgcgtttttactcatcctcatccaaggagctacaaagcattgaattaactttaaacatacttccacccactgttgtttgaaatcagatgtttggctgctgctgattatttcagcagtccagsgagaagggtaacagcttgtgatggtgcccacggaagaggacaatacaaggtgtctagcctgtgtggcccactttccctctgggaatcaatttgagtgcagagggaaactgacagcaggccccttggcggaatgctgagtccaggtggcatggtcatctgttggtcacctcccagagacctcaggacaaagaagccagggctctgctgagaaaagcaattaccatgatctgccttgggctgtccctagagtcccacctgtggtgaggggctgaggaaggttggttcagggaaaaaagaccctgtggagtctctaagc

SEQ ID NO: 538763 - DNA, 447 bp, Homo sapiens
aatgagacatgcgtttttactcatcctcatccaaggagctacaaagcattgaattaactttaaacatacttccacccactgttgtttgaaatcagatgtttggctgctgctgattatttcagcagtccagcgagaagggtaacagcttgtgatggtgcccacggaagagracaatacaaggtgtctagcctgtgtggcccactttccctctgggaatcaatttgagtgcagagggaaactgacagcaggccccttggcggaatgctgagtccaggtggcatggtcatctgttggtcacctcccagagacctcaggacaaagaagccagggctctgctgagaaaagcaattaccatgatctgccttgggctgtccctagagtcccacctgtggtgaggggctgaggaaggttggttcagggaaaaaagaccctgtggagtctctaagc

SEQ ID NO: 538764 - DNA, 693 bp, Homo sapiens
gatgcccatgttagtttcctagagctgctgtgacaaagccccatgaacttggtgacttgaagtaacagaaatatattatctcacatagaattccaaaatcaagatgttggcaagtgggggctatgctccctgtgaarcatttaggggaaaccttccttgcctttttctagcttctggtggttgctggtttagaaaacatgtcttaagccatccttggcttgtagatgtgtcactctaatcctccatcttctcatggagttctccttatgtgtctttacgtaggattccctgtctgcctgtctgcttatgagcctacatttctccttatgagaacaccagtcatactggattagggcccaccctaacaccctcattttaacttgattacatctgcaaagaattatttccaagtaaggtcacattctgagatgctggaggctgggactttaatatatctttcttgagggacacaaattcaacccataacaatgcctgtgactctcctatgatctcatattattctttgaacaggctttccgggtacagtcttttgttcttcctgtggaatattctattgattaaattgcctctttagttcttcagctatcagatgcttttctctggcaggccaatgtaattagggaactaataacggaatcaataaggaaaagagtatgttctttcatattttcc

SEQ ID NO: 538765 - DNA, 693 bp, Homo sapiens
gatgcccatgttagtttcctagagctgctgtgacaaagccccatgaacttggtgacttgaagtaacagaaatatattatctcacatagaattccaaaatcaagatgttggcaagtgggggctatgctccctgtgaaacatttaggggaaaccttccttgcctttttctagcttctggtggttgctggtttagaaaacatgtcttaagccatccttggcttgtagatgtgtcactctaatcctccatcttctcatggagttctccttatgtgtctttacgtaggattccctgtctgcctgtctgcttatgagcctacatttctccttatgagaacaccagtcatactggattagggcccaccctaacaccctcattttaacttgattacatctgcaaagaattatttccaagtaaggtcacattctgagatgctrgaggctgggactttaatatatctttcttgagggacacaaattcaacccataacaatgcctgtgactctcctatgatctcatattattctttgaacaggctttccgggtacagtcttttgttcttcctgtggaatattctattgattaaattgcctctttagttcttcagctatcagatgcttttctctggcaggccaatgtaattagggaactaataacggaatcaataaggaaaagagtatgttctttcatattttcc

SEQ ID NO: 538766 - DNA, 638 bp, Homo sapiens
acctacccctaagcagggaccagaggatggaacagggagggcatgggcagatgaaggagctgctgggatcaatgcataggagctcccagcacttggtatttcacagagcatgttcacattatctaatgttaatagccttcatcttaggaggtagacatcattgctcccattccacagatgagcaaactcagaaagctgagtcacttaagatcctaagccaggygaaggcagagctgagactcaccctgggctctgctgactgagtcagtgctctcctttcagtaatgtgggctttccatgctacctctcagatgagccaccatgccacatgtaattagatgcaagattatgtggtactgactggaagtgctggaggaattcggggagttaattataaaaaggcaaagggcattaaggagacagcttgggaggatgggaggatgttttgtggaagttctggagaagaaagaaaaaggaaccaggtgtatttataggctaataatgtgcagaagggggaaaaatgtgctgccttgggcaattttcatcaagttaatggatgttgccaattactgtggtaacatttttaattgtatctcagctctgaagagaataaaatcagaatttcctagtctttgcct

SEQ ID NO: 538767 - DNA, 654 bp, Homo sapiens
gtagtggtggaggacccagatgggagtgggtttaaaggtgattgaaggtaaggaagcacattcattacaactaatttcatacaatttagcaatgaagaaaaggaggcaaacaggaaagtcacctgagtggaaaaggaaaaaattgaggtttattatttatttgagacggagtctcagtctgtcgcccaggcaggagtgcagtggcacactctcaactcactgcaacctccgcctccggagttcaagcaattctcctgtctcaacctcctgagtacctgggaataccggcgcctgccaccacatctggctaatttttgtgtttttagtagacatggggtttcaccatattggttaggctggtcatgaaatcctgccccccccaaatctgcctgccttggcctcccaaagtgttgggattacaggcttgagccaccatgcctggccttgtttattcttttaaattgacagatagagttgaacatatttatcatatataatatgatgttttgaaatatagatgcacagtggaatggtttctttttgtctctttttcaagatggaagagaaataatgaggttttcagtggcagagaataagaaatttgaagatagygaaccaagagagagttaacggatgaagcaaaacccctaacag

SEQ ID NO: 538768 - DNA, 602 bp, Homo sapiens
gttgtttttagctcctaagttttgtagtaatctgttacacagaattattaagagataaccaatatgcttttctctgatccttattctttgcttgtttattttataacataatgttctacttctgtctacaygtagcctcctgtctacatacaactacttctgtcttggactacttcctctgttttctcttcattgttatcaactttagatatttcattttgcccattgtttgggtgtgtccttgaaatagaaaattatcaccatgttctggtattcctgacacctatgcccagactctatgggatttgacagttgatcagcaaacctcagagccctatcctcaacctgagtgaggcttacttaatatcatgagattgcctgactttgttataccttattattttatagtttgatggcaggattgcattttctaagaatattgtttattgtaaatatctgtgtatgtacatatacacacacaaggcatgtatgtacatgctcatttagagaagtgttaatttcattggtacaaatacttcactagaagtactaatataaatcacattgtctggattttagacacccgtgtcagcctaatagca

SEQ ID NO: 538769 - DNA, 641 bp, Homo sapiens
aagacaaggcccatgtttgcctaaggaaggacaaacaggattgatttcagtctgtcaaagtctgttggtataaaatattgagagaacctttctcaaaaggcatttgtagaagagcattaaatcatcactaacacagtgttttacagagttcagagccctctcattctgtcttagtctagggagagtttggttaaagggtgtaaacaggtgctgaccctggtctgtctaaggatcagaattagagggagatgctttgcttcaacgttatggaaaatgcccttctttacattcatattaagcaaaatttctattagtaatttayagcatgggtcccaattggaatagaatgaagttttcccagaccttccttacaggttgactttttcagtattgggtgaaattattaatcttcccagagaggatcagcatatatagaacttgttttatcaaactagtttgtctccaggtgggactttagtgacactattactaatcatggcctttaatctgctaaaataaaattctagctgattatcgaggcaggcagatcacttgagattgagaccagcctcgccaacatggtgaaaacccctctctattcaaaatacaaaaattagccaggcgtggtggtacctgtaatc

SEQ ID NO: 538770 - DNA, 641 bp, Homo sapiens
aagacaaggcccatgtttgcctaaggaaggacaaacaggattgatttcagtctgtcaaagtctgttggtataaaatattgagagaacctttctcaaaaggcatttgtagaagagcattaaatcatcactaacacagtgttttacagagttcagagccctctcattctgtcttagtctagggagagtttggttaaagggtgtaaacaggtgctgaccctggtctgtctaaggatcagaattagagggagatgctttgcttcaacgttatggaaaatgcccttctttacattcatattaagcaaaatttctattagtaatttatagcatgggtcccaattggaatagaatgaagttttcccagaccttccttacaggttgactttttcartattgggtgaaattattaatcttcccagagaggatcagcatatatagaacttgttttatcaaactagtttgtctccaggtgggactttagtgacactattactaatcatggcctttaatctgctaaaataaaattctagctgattatcgaggcaggcagatcacttgagattgagaccagcctcgccaacatggtgaaaacccctctctattcaaaatacaaaaattagccaggcgtggtggtacctgtaatc

SEQ ID NO: 538771 - DNA, 563 bp, Homo sapiens
ttcctattcggccatcttggaaccggggagcaacaygccacattttatgtatccattcccttcacaatgcatattgtgttttcattttttttttgtcattataagcaatgctacattttggaattaatttctcctttaacaatgaaacaggtatttccagagctagaaaaataataaactataattctggttttttgtgcaatctatgataaaggactaaaatgcctctaaatttaaatttaaattgtgtatgagttaaatttgtctaggtctcacaagtttgttaattttaggttaagtttgcttatcttggtagaattctctactacataaaagtgtagctttgagagccaaaatgcttgggttcaaattttgtctcagtctctgattagctgaggctcattggccagttggaaaattctttccctttctagtatgtagctaatgcatgaactcagggcagtcttcattggctatcagcacctttggacattcttccagtgtttgggcaagagggtccctatctgagaccctacttcctactaagtagctggggaacagat

SEQ ID NO: 538772 - DNA, 599 bp, Homo sapiens
ctttataataaatatctttatgtatatccatcctactggctgtttctctggcaaaccctgactaatatacacttcttaaagtctaaagttcatagtgttcatttatgtatccatgaattcaaaggactgtggaaggtgggttacttcctttaggtcattcttcaagagaaagcaaagataaacatgaaggaaaggagaattgcttgggcaaaaagctaacattaattcttgttcatagttytattgatgttactttcctcgttcaaaagacgagtttaaatttatattttatgattcctatgcatgcataaatacatttttttttcaaattgagtcctaagaacaccatctgtgtcctgtggtatttgagacaaggtctacacttcacggcaggaagcagaagccaccaagaaaagagacagggtttattggaagtacacagtgatagttcactgcccactgggggtctattttttttcttactaagaagttcaaaggttgtaggctggttgaacttccaggagccaggctgcttcttcctctagccctgtgattcctagtaatgctggctttgtgtctccatgctctccccatgtagc

SEQ ID NO: 538773 - DNA, 607 bp, Homo sapiens
gctctggttggttgagcctagtcataattagtttttatagattttatatactaatcttggaagtaaattacagatcatagattattttggctatagcagtagtaggaggaaagaaaaagagggaacaaattttagatacattttgaacataaaatgtaggggattgataattgattgaatgtgggaatgaagaagagagttaaaaawtctgggattttggtttgtataagtagatggctggtgatatcattaactagaaacgagatatagggtacatatacttggagaaggaagataatatgcttagacatactgagattgagatgccattgcaacatccacttggagatggttcaaaataggttggatatggtggtgtgctggtaaatatttaatcacttattctcaaacaataaagaagaaagctcatttttttctgtagcatttgctgatttccatggagcagatactcccaccgtgtccaagtttaataccaatgtgatgtcaacaatgcagagttgggaagagatgggcacagtccgctcttacaagaccattccagcacattgttggttggatacacaggtctggatctcagcatgaggtc

SEQ ID NO: 538774 - DNA, 607 bp, Homo sapiens
gctctggttggttgagcctagtcataattagtttttatagattttatatactaatcttggaagtaaattacagatcatagattattttggctatagcagtagtaggaggaaagaaaaagagggaacaaattttagatacattttgaacataaaatgtaggggattgataattgattgaatgtgggaatgaagaagagagttaaaaattctgggattttggtttgtataagtagatggctggtgatatcattaactagaaacgagatatagggtacatatacttggagaaggaagataatatgcttagacatactgagattgagatgccattgcaacatccacttggagatggttcaaaataggttggatatggtggtgtgctggtaaatatttaatcacttattctcaaacaataaagaagaaagctcatttttttctgtagcatttgctgatttccatggagcagatactcccaccgtgtccaagtttaataccaatgtgatgtcaamaatgcagagttgggaagagatgggcacagtccgctcttacaagaccattccagcacattgttggttggatacacaggtctggatctcagcatgaggtc

SEQ ID NO: 538775 - DNA, 635 bp, Homo sapiens
atgtaaagtattgtggttcaagaaatgttactattgaggccaggcacggtgtctcatgcctgtaatcccagcactttgggaagccaaggcaggctgatcacctgaggtcaggaggtcgagaccagccagaccaacatggagaaatcccatctctacttaaaatacaaaactagccgggcgcggtggtgcatgcctgtaatcccagctactcgggaggctgaggcaggagaatcacttgaaccyaggagacagaggttatgatgagccaagatcacaccattgcactccagcctggacaacaaatgcaaaactctgcctcaaaaaaaaaaaaaagttattcaaataacaggatgagaaaattttgaataatacaaatgaaatagatatttagacctttacagctcagtaaaggagtgacagggcattcttagatcattttatgctgcttatagcagaataccagaaactggataatttataaagaagcagaattcagtttttgctgttctgacggccaagaaatcgaaggtcaagggaccacttctggtgagggccttcttgctggcagggactctctgcagagttctgaggcagtacagagcatcgcatagcacaggagctgaacatgctcatgt

SEQ ID NO: 538776 - DNA, 635 bp, Homo sapiens
atgtaaagtattgtggttcaagaaatgttactattgaggccaggcacggtgtctcatgcctgtaatcccagcactttgggaagccaaggcaggctgatcacctgaggtcaggaggtcgagaccagccagaccaacatggagaaatcccatctctacttaaaatacaaaactagccgggcgcggtggtgcatgcctgtaatcccagctactcgggaggctgaggcaggagaatcacttgaacccaggagacagaggttatgatgagccaagatcacaccattgcactccagcctggacaacaaatgcaaaactctgcctcaaaaaaaaaaaaaagttattcaaataacaggatgagaaaattttgaataatacaaatgaaatagatatttagacctttacagctcagtaaaggagtgacagggcattcttagatcattttatgctgcttatagcagaataccagaaactggataatttataaagaagcagaattcagtttttgctgttctgacggccaagaaatcgaaggtcaagggaccacttctggtgagggccttcttgctggyagggactctctgcagagttctgaggcagtacagagcatcgcatagcacaggagctgaacatgctcatgt

SEQ ID NO: 538777 - DNA, 721 bp, Homo sapiens
gctgatgtaattagggctaccatttggttaagtttatggtaatcaccagctatccgctatgatctcatgggattttgcaggggctatgctgtgcatcctttaaaatttttgagggtggtgctactctctgctatcctacctggtatctgtgattgcttctgatttataatcttcacagaggaaaaaggactgtttcaaaagtttggctattcctatcataatgaatcttactacacagatcaggtatctattgggagagttgctacatgtatccactccgatatactcagggactagaaaaatggtaacaaaatagatccttgggtttattaggcctactgtgatgtggacctgagctaggactccatttatactctgcctctatttgctaattttttaacagatggggcatagtgatattttagcttggttgatgtcaataaccactcagctcctgtatccagcagtcttcaaaaaaaaaaaaaaaaaaggtttttctttcccctgtttggttcatctagttatcaactatataataaactgagagaaactctctaaaagaaaaaggtacgtatctgggaataggatattgcaataggaatacatgtgccatagtaaattatgtgtgtgctcagggaagtaaaggatgacaaagatcttaaaagaaaaatgaggaggattatatacytgtcttgaaattattattgttggctacagggat

SEQ ID NO: 538778 - DNA, 581 bp, Homo sapiens
aatttataagaaaagaggtttaattagctcatggttctgcaagtgcacaggaagcaagcatagtgccagcatcggtttctgggaaggcctcaggaagcttttattctggccaaagttgaagtgggagcaggcatgtcacttgatgaaaataggagcaagagggagacagagggggtggcagtggaggtgccacacacttttaaatgacctaatctggaaagaacttactattaggaagatagcaccaagccatggggaatctgaccacataatcaaaacacctcctaccaggcttcacctccagccttggggattgcaattcaacatgagaattgggcagggacaaatatccaaactatctctctctctctctctctctcttgctctctctctctcctctctctctctctcacacacacacacacacatacacatacacatacacacacatatatacacagtgctttatagttttcaggatgcaatgttgatttttctaatcatcaaaaagctgccgatgtatatatatttttaaacgagaggtatttccatgtctccrtccaacattttgtatttgaaag

SEQ ID NO: 538779 - DNA, 568 bp, Homo sapiens
ctggaaaaagtggccaaggaggtagccccgcactcaggaacccgcctcggggaggagagctactgtttgtgtttgcggtcatctcggagaagaaaccgctttaaaaaaaaaaaaaagggcgggggacaggaggtggtggtggcggcggcggcagaatggagcttccagaagggccggctaatgccttggatgtttcttggattgacccaggggaataacccggggtggagaatgggtgtcctaatagaagtgtgcaggcaaaaccgaccagcgaggggagaaaaaaagtgattcaaattaaattcccacgcgctcagggcggccacggctttagctggaggaagggagcgcagggcgcaccgggctgtggggcggayacacactctccagctcccgcagcgctgacggacagaaggacggacgggcaaacccgagcgagggacgtaccttcagggttggcgctgatgaagacccggacgctgcggccggcgggcacgaggtgagagggcagggccgtgaggttcccagagaaagccgcccgccggagcgcagagtctcggggacaggg

SEQ ID NO: 538780 - DNA, 129 bp, Homo sapiens
catacatataaaactttcaaaaccctcaacatacacatattatagtaattaacatatccactattccccatacttyccttgtgccactttgtaatctgtaatgactctatatcccaccctattctgaag

SEQ ID NO: 538781 - DNA, 599 bp, Homo sapiens
tgctgagaaaaatattgcattaaatagaatgaattacttctagccctatcaccatgtaacctttggcacatcattttataatttatccctatagtaaaaattgtaaaatggcaataataacatccacttcaattaagagctaaaatcagatatttaatctgaacatattgtgattkctataaaggtatatgtacagaattaaagattacaaaattgccttcatgttcttctccacagatttagccagattctagtattgtccggctaaatgccagtgtaaattttatttacctaccttacatagtagatattttaagttataagaaaatacaatatcttccccatgctaatacatgtatatgtttttaaagagaagtaaaataaaactgtagtatttttttgtcttttgaattggcctattgcatagtttaaaattttaaaaagtgaacactgttaaaaagagcaccacacaaagtctgggctacactgaagacttcagcggcttcatgtctgtgaatgcaaagaaatacttagaagtctgtcctaaaatatgtcacatttcaatttaagtacttaccctaaatatgcctttaatgtag

SEQ ID NO: 538782 - DNA, 599 bp, Homo sapiens
tgctgagaaaaatattgcattaaatagaatgaattacttctagccctatcaccatgtaacctttggcacatcattttataatttatccctatagtaaaaattgtaaaatggcaataataacatccacttcaattaagagctaaaatcagatatttaatctgaacatattgtgatttctataaaggtatatgtacagaattaaagattacaaaattgccttcatgttcttctccacagatttagccagattctagtattgtccggctaaatgccagtgtaaattttatttacctaccttacatagtagatattttaagttataagaaaatacaatatcttccccatrctaatacatgtatatgtttttaaagagaagtaaaataaaactgtagtatttttttgtcttttgaattggcctattgcatagtttaaaattttaaaaagtgaacactgttaaaaagagcaccacacaaagtctgggctacactgaagacttcagcggcttcatgtctgtgaatgcaaagaaatacttagaagtctgtcctaaaatatgtcacatttcaatttaagtacttaccctaaatatgcctttaatgtag

SEQ ID NO: 538783 - DNA, 506 bp, Homo sapiens
caatcttcccatatcctcttgttcattttgataccttaggaaaaaaatgagcttaaataatattttgaaaatattaaattaatgaatgtgtaattcatattttctcacagtcatgccacctaaccacctaacaaagaagaaacacagcctagtgattaagctttgatttgagcaagatcgcattggtccaaatcctggctttactactayctagctaaatcctttatctgtaaaatgagaaaaataatagtatttatcctatgggctattatgaggattaaattagttaatttttgtaaagcttttagaacaactcttgcatataatagacactacataagtgtgcagggggaaaatcacttcacgaaagaaaggggtggaggagccaagatggcccaagaggaacagctccggtctacagctcctagcgtgagcgacgcagaagacgggtgatttctgcatttccatctgagcttcgaagagagcagtggttctcccagcacgca

SEQ ID NO: 538784 - DNA, 506 bp, Homo sapiens
caatcttcccatatcctcttgttcattttgataccttaggaaaaaaatgagcttaaataatattttgaaaatattaaattaatgaatgtgtaattcatattttctcacagtcatgccacctaaccacctaacaaagaagaaacacagcctagtgattaagctttgatttgagcaagatcgcattggtccaaatcctggctttactactatctagctaaatcctttatctgtaaaatgagaaaaataatagtatttatcctatgggctattatgaggattaaattagttaatttttgtaaagcttttagaacaactcttgcatataatagacactacataagtgtgcagggggaaaatcacttcacgaaagaaaggggtggaggagccaagatggcccaagaggaacagctccggtctacagctcctagmgtgagcgacgcagaagacgggtgatttctgcatttccatctgagcttcgaagagagcagtggttctcccagcacgca

SEQ ID NO: 538785 - DNA, 506 bp, Homo sapiens
caatcttcccatatcctcttgttcattttgataccttaggaaaaaaatgagcttaaataatattttgaaaatattaaattaatgaatgtgtaattcatattttctcacagtcatgccacctaaccacctaacaaagaagaaacacagcctagtgattaagctttgatttgagcaagatcgcattggtccaaatcctggctttactactatctagctaaatcctttatctgtaaaatgagaaaaataatagtatttatcctatgggctattatgaggattaaattagttaatttttgtaaagcttttagaacaactcttgcatataatagacactacataagtgtgcagggggaaaatcacttcacgaaagaaaggggtggaggagccaagatggcccaagaggaacagctccggtctacagctcctagcgtgagcgacgcagaagacgggtgatttctgcatttccatctgagcwtcgaagagagcagtggttctcccagcacgca

SEQ ID NO: 538786 - DNA, 321 bp, Homo sapiens
gaaaagtaattaaacagaaattattttgggagcttggaaggctttaacatgtcatcattaaggctaatttgaatattgctgaaggcatccttgaacattgctatttcatacatcagaaagtattcacttctgtggcaaagacatgtatgctttcatattggtcatttcaggacagaaacagtttctcaattaaaakaatttttttccaactcttctggatgtaaatttattacacagctatactcactatactcagctcaaattagaaatttatacttaagatgtaggtaaaatctttgtaaatggcaggtgattttatct

SEQ ID NO: 538787 - DNA, 321 bp, Homo sapiens
gaaaagtaattaaacagaaattattttgggagcttggaaggctttaacatgtcatcattaaggctaatttgaatattgctgaaggcatccttgaacattgctatttcatacatcagaaagtattcacttctgtggcaaagacatgtatgctttcatattggtcatttcaggacagaaacagtttctcaattaaaagaatttttttccaactcttctggatgtaaatttattacacagctatactcactatactcagckcaaattagaaatttatacttaagatgtaggtaaaatctttgtaaatggcaggtgattttatct

SEQ ID NO: 538788 - DNA, 575 bp, Homo sapiens
tgctgcacagcccagcagctcacctattccttttgtaccactggcaagatattgggatgttgggtgcaattagtcaacatggatgcttgtaacgccctggccggcgtttgccagtctcsggccatgaactccgggatgatggcaggcaccagtgacaggagcattatggaagagaagaaaaaagtgctggacttgaatggattttgccaacaaccttgggcgagtcagtccacctatctggggacaatgatactctgctaacctaatagggttattgagagaatcaactgaagtcattatgcatatcaaagcactttctaaactgtaaggtgccatccaaatgaaaggtggtggtacctggctcagcatcggcttttctttgtagacacctactgagtgttgttagtaaggtcatggtagcaacgtgtaccccttcagctgactcaaggggaaaggccctgggcttcccagcacttcaagccacaaccgtgtgactcaacccagctttgttttttctaactgcagtttcctgcttccacttctctgcttacctcttgctggtcactgaccacttt

SEQ ID NO: 538789 - DNA, 665 bp, Homo sapiens
cagctcacctattccttttgtaccactggcaagatattgggatgttgggtgcaattagtcaacatggatgcttgtaacgccctggccggcgtttgccagtctcgggccatgaactccgggatgatggcaggcaccagtgacaggagcattatggaagagaagaaaaaagtgctggacttgaatggattttgccaacaaccttgggcgagtcagtccacctatctggggacaatgatactctgctaacctaatagggttattgagagaatcaactgaagtcattatgcatatcaaagcactttctaaactgtaaggtgccatccaaatgaaaggtggtggtacctggctcagcatcggcttttctttgtagacacctactgagtgttgttagtaaggtcatggtagcaacgtgtaccccttcrgctgactcaaggggaaaggccctgggcttcccagcacttcaagccacaaccgtgtgactcaacccagctttgttttttctaactgcagtttcctgcttccacttctctgcttacctcttgctggtcactgaccacttttggaatgaagaatgtgctggactcttggtggctcatttcccatggacatgaacacagccccagaggccaccttggttgtttgatgtcaccgttctgcccctgctc

SEQ ID NO: 538790 - DNA, 633 bp, Homo sapiens
tctgtctgtccgggcgttcccacttatgaactgagactccaggcggtctgagtggcctccccacgtcctgtcccaatttcgtcactggtgaaatggagttcagcctctgttatgggacagcggtgaggaataagtagagttatgtccctggaagtggtttgtgaattgtaaattgaaaggcaaatgggagtattactttgtattgattgcatttttactttggaaaactatgttcagaaaatggaaatattttctttttttwattttactttaagttctgggatgcatgtgctgaatgtgcatgtttgttgcataggtatacatgtaccataccattcaggacataagcatgggcaaagacttcatgactaaaataccaaaagcaattgcaacaaaagccagaattgacaaatgggatctaattaaactaaagagcttctgcacagcaaaagaaactaccatcagagtcaacaggcaacctacagaatgggagaaaatttttgcaatctatccatcggacaaaagtctaatatccagaacccacaaggaacttaaacaaatttacaagaaaaaaacaatcccatcaaaaagtgggtgaaggatatgaacagacacttctcaaaagaagacatg

SEQ ID NO: 538791 - DNA, 633 bp, Homo sapiens
tctgtctgtccgggcgttcccacttatgaactgagactccaggcggtctgagtggcctccccacgtcctgtcccaatttcgtcactggtgaaatggagttcagcctctgttatgggacagcggtgaggaataagtagagttatgtccctggaagtggtttgtgaattgtaaattgaaaggcaaatgggagtattactttgtattgattgcatttttactttggaaaactatgttcagaaaatggaaatattttctttttttaattttactttaagttctgggatrcatgtgctgaatgtgcatgtttgttgcataggtatacatgtaccataccattcaggacataagcatgggcaaagacttcatgactaaaataccaaaagcaattgcaacaaaagccagaattgacaaatgggatctaattaaactaaagagcttctgcacagcaaaagaaactaccatcagagtcaacaggcaacctacagaatgggagaaaatttttgcaatctatccatcggacaaaagtctaatatccagaacccacaaggaacttaaacaaatttacaagaaaaaaacaatcccatcaaaaagtgggtgaaggatatgaacagacacttctcaaaagaagacatg

SEQ ID NO: 538792 - DNA, 680 bp, Homo sapiens
gtgcctgagatgccctggtttttctgtatgtgaattcagggatatattaatttggaagatgatacccaacaagcattatgagatataagtaatagtgtgaggtgccttccaaattatgctcttaggcccttacaaatttatgaatgaaggaatcagtagttttaaagattgctttgaaagaaccttggcctagaaatgagaagctttccatcactctccacccagaggcctggcttactcttggtttccttagttgctcttattagatcaatgcttttttttgacattctattagtcataatacaaagcaggaactgtgagtggcccaaggctcaacattagctgggagtggtttccacattaaccaagttcagcatttcctgagcaattatttgcccttctccatccaccctcccctatcatcccaaagagggtttatgtgtattttcaaatataaccaaaatatagttgtagtgtaaccagagaaatcgggtactaaacttctgttggaagtccaaaaagactrtccctgagccaagttggtttaatgaagtggcttcccccatcttgggcttcgttcatgtgcatggtctgcacacttcagagcccctggggaagcatgtctttccaaagcctgaaagacagacattgacaatgtggagcaatttctttttttgtga

SEQ ID NO: 538793 - DNA, 475 bp, Homo sapiens
tgggcatggtaacatgcacctttagtcctagctccttgggaggctgatgtgggaggaaactgggaattgcttgagcccaggaatttaaggtggcagggagctatgatcatgcccctgcactccagtgtgggcaacaaagccagaccccatctctaaaaaataaaataaaatatcttctaataatgagctcccactttccttccctgtcagagaggcagggtggcatcgaacaggaagacttcatccaagcctaggattctgcagatctgctacgytcgataaaaacataattgactcctgcaagaagttatccgctttttaaaaaactagatgactagaaaaagaaaacacaaataatacaagatccagaacttatcagaagtaacaactctacgaaaaggggagttgttcagacagtggaagtgcactgctctcggcctagttttagggctctttgctttggaataagtggcct

SEQ ID NO: 538794 - DNA, 374 bp, Homo sapiens
catccaagagcttaactaccaaatctgaaactcattcgggggctgtcctcaacagatgtcttagtgagagctcctaagtggagccagggaagggtggaaggttaggtcacactgcaaggagagaagtaacttgccaaagagtcagcgccaaaagcaagaaaaggccccttggatttattgcttgggtgtggggtctggttctttctctggggtctgcagaacaagcgttgcctctggcttyttcctagaggaaaccactgactcttggtattcaggaatgcagaggagtcatttgaccttttggacgtatttgcatttggacgttgcaaaggctaacaggccttcaagagctaaggaccagcagagggtgggca

SEQ ID NO: 538795 - DNA, 540 bp, Homo sapiens
ctaactctgatgcttattagcagcgagggctcacacaagtttacctcacttttgagcctcaacgttctcatctgtaaaatggggatgcaatgtacctcctcatgagctttagggaggaaaggggctattacaaatgaaccaattgcccccttcagggctctgttccctaatggggtgagtccttgcctttcccaaacccacccaattattggctgatcttctttcattctccagttcagcttgttctttttyttctccaaaaattgaactagttttactgatcttaaaaaccatttccttggctatactgcctcttcacactataattcccacttgcaagctttccttcagcactaaacttatcaggacagaaataatctatctcttatgcatctatcaagtgccacttcagtactctataacctggtttccacctccatcatgctaccaaaaccagcagtcaggctaacttgacatctgcaggtcattgtgagataaatagcaacatagaaatatttatacatacacaacacatacaca

SEQ ID NO: 538796 - DNA, 604 bp, Homo sapiens
tcttcaaatagatgagaagttaatttaaaagatacttttgaattcaatgactattagctttagtaaaactgctctaaacaatttttctatttaatgtgtattttaaaagtaaattgttcatcagaaacaagtcaagggtgtttacttttaccacgrctagtcaacgttgtactggaaattctttctagacagaataattagagaggaaaatgaaataaaaagcatccaaattggaaaggaagaagtaaaactatctctattcacagagaacatgatcctatataaggaaaatcccaaagaattcacatgaaaactaaagctaacaaacagattcaacaaagttgcagagcacaggataaacacacaaaactcacctatgttactatacaccaacaataaacaatctgaaaaggaaatgaagaaagcaattccatttacgatagcatctaaaagattaaaatacttaggaataaatttaacccaggagatgaatgacttgtacaataaaaactatgaaacatgactgaaagaaagtcaaaagatctaaataaatgaaagcacacccaatgttcatgggtttgaagacaatactattaagatggca

SEQ ID NO: 538797 - DNA, 598 bp, Homo sapiens
ctgccatttcttcagtattcagtgatgcttgcaccatattgtatacaatatggatttctttcacttagtcaaggccttgccacctcttagatgagtgacttgggacaaaacacttaatctgtccaaaccttggtttcctcatatgtacaatgagactaaaaatagtattaagacagataacaaatacctgatcagtacaatgccagacacacaataaatgttctgtaaatatcagctattgttatttttactctgagaataactctaagagttaactacttgccrgacacggtggctcacccctgtaatcccagcactttaggaggctgaggcaggtggatcacttgaggccaggagtttgagaccagtctggccagcatggtgaagccctatctctactaaaaatacaaaaattagccaggcgtggtggtgtgtgcctgtaatcccagctacttgggaggctgaagtgggaagatcacttgaacctgggagttggaggttgcagtgagccaagatcatgcttctgcactccagcctgggcaatagagtgagattatcttaaaaaaaaaaaaagacttaaatacaattattatcccca

SEQ ID NO: 538798 - DNA, 548 bp, Homo sapiens
gctgcgcatgacctgccccactgtcgacagccagctgtgactcacaactcctgagcctttcctcttggccagagatcgtggagtagatattacagtaacattactaaccacaagtagaggcggtgaccgtacttacgctcagagcacctccccccacccctgagaccagagcaatgacctcacactcatgttcggcagcaagcacggacagtcctgcccggaggcagggggatggcccacatggccctggtcttccagagaagcccagcgtctggcctcttcccctcagcgctggtcacattctccccaccttcccctccaagcagcccacctggggtaggtgctgagtcccctgctgctgcctcccccgggtgaaagcagagtaamcagtccccctctcccccgcctccctggggagggctggaggaaagaaagggaagtgacaaaagctgccctatccctgtccttcctcactgctgggtctaggacacttattctggggaaagtggcgtctgaggatgtggctgcagtggccagttgctggcgcc

SEQ ID NO: 538799 - DNA, 443 bp, Homo sapiens
gtcctgagactgcctcccgggaactgactgagctgtgtgaagacagtttagacactgtgatttcatccccagccaatgaattgtttcagtttcccagccccctgcccaccaaagaacccttaaaraccctaccctctgaatctcagggaagtggatttgagaaatttcttccgtcctgcttggctggccatgggatcatccaattcttctttgctgcagcacctgctgttctcagtgcattggtattttcagggcagtgggcaagaagaacctatcaggctgtaacatagacacagcttatggactctggagaccgggctaccaaacaggccagaactgtgggaaatagggttcaccctttccacctaccccattacttacccagagaaggccaagggcccctggctagcatctggagggagactttctgggtgtggacagat

SEQ ID NO: 538800 - DNA, 675 bp, Homo sapiens
tgaagggaaaaaaatgacaaatttagattattattgttgtgtgggggccctatgctagtttcttaacagacattatatgacttaattcttgaaggaaggccctatttcacaaacaaggaaatgaaggtgtccggtgtggtggctcacacctgtaatcccagcactttgggaggccgaggcagggggatcgtttgggcccagaagtttgagaccagtgtgggcaacatagtgagaccttgtctctacaaaaaataaaattaaaataattagctgggcacagtgccgcatgcctgtagtcccagctacttggggaggctgagacgggagaatcacttgagcccagaaggtccaggctgcagtgagctctctgatcatgccactgcattccagcctggatgacagagcaagaccctgtctcaaaagggaaagaaaaaaagcaactaagsctctaaggagggaaaattacatagtgcccctgaagttgtacctctaggaaattgcagagctgggatttgaactcacttcttactcaacccctctcccaactcttttcctgaatttcatggaattattttttttccaactaggttttgtgattcagaaggtaattctacaaagagttctttagctcctgtgtgcccaagaccagacagcatgcacgggaagcccaagtcc

SEQ ID NO: 538801 - DNA, 518 bp, Homo sapiens
attccagacccgaggattcccaaataagacatgaatactgaaaataccttatgcctttagtgatgcccatagtccatccatgggataacagagtctaaaagcgtattctgaatttgaaatgctctttgtcaaagcattcttttataaccatttctatgtgcattcagcaaaacatctactggtttgttgccagacactgtgctaagtattggaggtagaaagataaagaacatgcaaaccctgtccacaactttacaacaaagtaggtcagaaagatgcacaaaaacaattatcgttccatgtaccatgtgccaccacatgtacatatatgcactcacattcagggccggctttatgggtacrtgatttgtgttgttgcacagggccctggcttagttagatggggcccatgcttggtctaatactccactgttgccatgttgaaattcttcacaacttttgaacaagggctttatattttcattttacaatgggctctgcaaattacatagccaatc

SEQ ID NO: 538802 - DNA, 563 bp, Homo sapiens
tggtaccttttatcttgcactctgctctttatccaccccacagaattgcacagggctggaaaattgctggttcacttcactcttctcagtataattttgcattttgaaagtggagtttatcaaatacatgagtgactaactggtagaatgtgtaacagaggaaccttgtgttttattctggagtccgtgccctttgttgtccccatacgcacaactgaaggagttcatgccagatactgtcattgatgccctttgaccttgcccaaattgcttcacccctgggcccccatttccatattttgaaaaattaaaaggttgaactgtataagtctgtaaagtcatttccatattgaaacatgttgtagaaagaaractttttttggatcatttaaaaattttgtaactatctacaagatagttttgggtgattattttcaccctttttcacttggacatcattcctaaattttcgatgaaatgtttttcatgattaattcttccctcaccaaacaacatgtaagtttactctttggttgatggaaaaacacatatttaattttatt

SEQ ID NO: 538803 - DNA, 654 bp, Homo sapiens
tatgaactgtataattaatgatatagggcagtaatgctatatcacagcttatgaaaatccataatttcttttataatgctgccactggggcaaagacccatgtaataggccaactgcagcaaaacccacagggtttggtagagtttacagaaaacatgatttaatctgtcacatgatagaatatgaactaagattttacagtaggtcctcaaagaggagaatgaatatttaagcctcatattttgtttgatcataggaatcttggctggtatgatactgaaatgacccaattccatgataattgagcctttgaagtgtgcttgagacttatggcttgatgtgtgatccatttttaccgatggtttatgtgtgcttgggtacaatgtactacacgtgttccttagaacaagcttgttwagcatgttccacaaattttctgcctgcagcttgttatctggtctgctgcatccatcaattactaagaaggatattttaaaatcttctgagggcagatttgtcaatatcttttcattgttctggtgaattgtgccttatatattctgacatggttaattattaagtgtaaacaaaaattatgtatgtgacttcctggtgagttgaaccgtccatcaccatgcaatgttttctgctttt

SEQ ID NO: 538804 - DNA, 533 bp, Homo sapiens
atctcctgaccttgtgatctgcccgtctcagcctcccaaagggctgggattacaggcwtgagccactgtgcccagccagaaattttatacttaatttaaagccctagcaaagaggatgaaagtcataggattgaggctaccccccactgttgttcctgtctgcaggaagggtaacttcagaattcctttccacatggaatcaatcccacaagccttgtattcacagaatctgccaagtgttactcaagtgaatgttatctctacatatttgagatttcaagtaaatataggatagtatttataagatggaaagagaaaaatagaaaacagttctctcctttaaaagattatcaaaagagtaataaattagcatatttcagttaccaacatgttgtaatgaacagccgcaagtctagtagtttaaaacaatgactatttcatcatatgtcaggatttagtgagccagaaatttgggcagagcctggctgggtgagtcttctgttctgtggtcatatggactgggtgtcgggtgg

SEQ ID NO: 538805 - DNA, 631 bp, Homo sapiens
gcgcggcggctcccgcctgtaaccccagcactgtgggaggccaaggagggtggatcacaaagtcaggagatcgagaccatcctggctmacacggtgaaaccccgtctctgctaaaaatacaaaaaattagccaggcgtggtggcgggcgcctgtagtcccagctactcgggaggctgaggcaggagaatggcatgaacccgggaggcggagcttgcagtgagccgagatggtgccactgcactccagcctgggcggcatagcgagacaccatgtcaaaaaaaaattgtaatatatatcttaaaataaaaatgaatgttcacaatctcaaagaggtcttaagatccctcactacccccaaagagatttttacatttttattaaacttctcactttggagtaactttagatttatagaaaacttgcaaaaacaatgcagtcttcatgtgccccttgtcccattccccgtgatgtgaacgtgttacttgaccgtggtgaggtgtcaagtctgcggggtttttcaccctgagagggttcggtctgtggcatctgcagggtttggggcacggttctcagtgctctgtgtggtgctgccgggggcccgccctgtaccccaggccggtggtcaccgcg

SEQ ID NO: 538806 - DNA, 498 bp, Homo sapiens
aggcaggaagagcatgggagagcacagacaaggatggttatgggagtgatgggtggccaagcctccagactagaggtcccagtggggtcagaggtctgccgaaatgcaggaggcaccggaatgacggagctgggaaaccagggaaaactgtggttagagagcagagattctggagctgggacagttatggatcacgaccaagtctagggcgcgacgctgggagtgtgtaaaagctgagggaagagcccagcagagcaagggagcagggagctgagggaagagcccagcagagsgagggggcagggaactggtgccctgccctgaggcccagcagccacgggtccccactcacccattgccttttggcagttgaggatcttaaagccactgtgcatgcaggcggccaggagcaggtggtggtggaaagggtgccacttgattctccataccccaccctgcacaggcgtatctgccaacggctgcttcatgtttcgtgtg

SEQ ID NO: 538807 - DNA, 551 bp, Homo sapiens
ggctgactgagtccttcaggcacgctgggggccgtggggctgtccctggtgcatggcacccggcctgggttgatttagggcagggagatgttggcgtggggatgtgagatcaggtcagggcggctcagtgtcacgggggagatgtaaactactttggccactagtctggccttgtgataaatggattccagaatcagaataccaaatacagaatcaaagacaacagtgagaacaggctcccctcgggcagcagagggaggcagccaggctccgttccccagcagacgtggccaccgtctgccctcctcagcgctgcgcttgcttttgtggaacaaaaccgagctttggttggagccatgagtgggatcagaagggttcgtgttctccttttaaaaggaaagaaaattcgtcaccccctgtgcggcagcagctcccaagcaggcctgtgctgcattcacgtggcccggggctgccaccagccccascagcgagtcccaaggccactgacaccttctcccctctctgttcagaaatgtttctttccctaaaat

SEQ ID NO: 538808 - DNA, 543 bp, Homo sapiens
tagactgatggataccatgtgagaggacaaagtgaggggctccctgagtcctggggtgaggggctcacctggttcagggggatgaggggttcactcggtcatggggtgaggggctccctcagtcctggggtgagggggtcacagcagttcgaagtcctgggcacatgtaatgcagtgcgaccccagagaaagaactcaattttgttcagcccttgggccatgagcttccctctgtggaggcggcctcagagagttgggacctaccagctccaggactgcagtggcaaggccctgaaccctggacccaggaggagcctcctccgggtaaccagcagctccgggccccctccccaggctccctgtggyggtacgtgcgtgccagcatgtccctgtccggttacatgccccctctctgtgacccgaaggacggacacctgctgatggacgggggctacatcaacaacctcccaggtactgcggtggggggaccacgcccggcaggagcacaggctcctgggtcacgccgccccacggcccctgcca

SEQ ID NO: 538809 - DNA, 621 bp, Homo sapiens
  misc_feature (1)...(621): n = A,T,C or G
gagaacggggttggtggggtggtttatgcagcttctttactccgtgatgcagcagggctggggctgcccacgcttgcctctgagcagccagtgctcgctccagggcctgttctgtacagcacatgcctttgaggctccgttcttggtagaactctcccgttgtaggcatctggcctactcaagcaggaggagtttttagacggacgtatggcagctcccggtatggaaggggaagtggaccgacggggcagtaatgggcacctctgcatgtcaagggcaaggagaggggccgcctcgctttgcacaggggcctgacctgggccctgtctcctgcctactgtgtgcctgtcagtcccaggtgctggggagagggtgatagatgaggccatgcttaygggttagtgtgaagatgagacacaatatttactgtcaggtggtgaaaagcacatgcagcagggatgggccaaaggagactcaaactcgggctgggtgtcctgggcaggatggcactctatggagtcattgcatcgtctgctgtgtgctggcccngtttggccagagtgcactcaagtgtctgcttcttctttaaggagcaaagcttgtattggctgcaattcacag

SEQ ID NO: 538810 - DNA, 504 bp, Homo sapiens
gaggcacacgtcagcagggctggggaaggaagggaggcttgctagagacccgggacacaaggcaggagagggaccatgcagggagggcgggaagggccgagcacatggctctgcggggcatctggtggcaccggcccagccctggcggtggtgggggtgagacagggcaggcacgcagaggagcacaccagggtgttctgggcggcaggacggccaccaagcctcgaccctagagccagaggacaggcacaggcccccctgggcacgtggggctctagtggagggygcccgcctcggcggcgatgctgggcatcagtgcagctcagcctgggtctcagatgccgagggcctgtgggtcacactggctgggcagccgtcgaggttctttaccttgtggggccgaagggtcagggtcacctgccccgggcttctccagctcctccaagatctgtttgcgaatggaaggcgcggggacggagtggctcctcttcagcaggggcccag

SEQ ID NO: 538811 - DNA, 569 bp, Homo sapiens
accctttctccctaaaatgacatcctctctcttttacgtaaattcacaaaaatacgagtgtctgtttctgcattttctgccttgctccactgtttggtgtctgtctctgtgccgatgccctggtttggcatcggtggctctgcagggtgcccagtgtccatcaggcccttgttggaggacagcctcggaggagggccttgcccggcctctggcctcaccgctcgttgcccctgaacagcccagtgcagcctctgttctctggaccttcatttatgcttcccrcccgtgttccctgagtctgctctgtttttaggactcatctctgttggatggccgggtggcgcttctgcacgttcctgcaggcacggtggtgtcaaggcagggagaccaggtgagcgggggtctgggggggggcactgggaccacccaatgccatagcccagtgccaagtggagcaccagaggagggcctggactggacaccagtgactggggacctcccagcaccgggccactgcccctctgggcaccatggcagagcccctcccctcaggcagccctgagccctga

SEQ ID NO: 538812 - DNA, 324 bp, Homo sapiens
gctggggcagcaggaggacacccacaggatcgtgctctaccaggyagatggcacgctcacaccctggacccagcgctgcgtgcgccaggccgactgcatcctcatcgtgggcctgggtgaccaggagcccacagtgggcgaggtgagcacggggagggccggtggagctggggagagccctctcttcagaacctcctgtttctcttttcctttgagtaaaatactgcacaaactcagaaaaagacagatgataagagccaacactcagatatctgctacccatgttttaaaaacacggtgctgtattgacctccaggggttcta

SEQ ID NO: 538813 - DNA, 603 bp, Homo sapiens
atgattgtcttaataataaaaaattaaaacttattggcccgttattgcaaagggtgataaaagttacagccaggcagtggaaaaaaagaatattgatattttttgccattctttttgcgagattcttttttttgggaagaatccctgaaagccatttatcttgctttatatgaaattatttttttctaaaatagtttgtaagattatttcatatattttggtagcaatagctaagtatgcagcaaggcaagagcaaagaaattaattgttgaataaaattctcactttgaaattcaagtaaagggcttcaggcctggagaactcactgaacttggagatcatttcttaatatcctccaatgagatgtgccagatacctgcaagggtctggaaagtggatactgcactctagagcttactaatattgattcgtatacacacaaaattcaccttttgccctgatgcttctttgagcragaaaataaacaggcacactaatattttaaatatatatatatatttttttataaaatccacaaataatctgattactagaacattcaattgggtccttaatttaaacaaaaaaacctacacggttgga

SEQ ID NO: 538814 - DNA, 476 bp, Homo sapiens
ggaggggaagaaacaccccaacctccatctcctctctccctggcatctccggcctgtgcctcccactggctcacctttccaggaagcagatggaaggaagccagcatgacacagcccacaggtgccagcagggcaagggcggctctgggtggggagtagggacaaacagaacaaccagtgagaccctgagaagggagatgtgagaccctggggaatgatccagagcaggagtcacctggaagggtctgaaggggttccttctggtgggctcctcagtggggagggtcactatcctcccacgaygaggctctgacagcagccgcccagtccttgcaatgttctcaggcagatgctgtgatgatcccatttacagatgggagaactaagacgcagaaaaggaacagaccaacaaaagctcacctaagggcagagagcaggaaccggattcaaacccaggtctgcctgatgccaaagct

SEQ ID NO: 538815 - DNA, 388 bp, Homo sapiens
ctggagagcaagcaaacatcgagtgcagcagragactataaggttagacaacaagaaggacttcctggcaggggagagcaatgcttgcttggttagagctgcctttcagtagaatgggctgctttggattgcagtgaggtcgctggagttgcaaacagcagagccagagatcaaggtcaagtggaagaaagctgggaaaggttcagtttggctggtgaagggtggagagggtaaagggaggcagggaccaccgtggtgcaggggtgaggtgccctgcagggagctgatcctgaggccgatggtgggaggagctgtgtgtggtcgggtgggacggggtggggacagcaggagacactgagaaggtggcatggccaggagctaggggctg

SEQ ID NO: 538816 - DNA, 540 bp, Homo sapiens
tgtgctctgagcccaaactctcaagggttggtcagtgccaggcacagggtaggtgctccgtccctgacagctattgttgcaattactgttatcaaaattatgtcttttaacctcagaaggtaaacatttttgaaaaagagtatgccaaattattctgcccaaaagagaatttcaccctttcctgatgactgagtgagtgtctgcaagcctccatggttattcagccctacccttgtagggtagagccytgggacccagggatattagatgaacaatttcttcccctatgctagaagttcccacaccttatgagatcttaggtcgcttcttagaaatattctgtctcttgatttgttgggacaggaagcttccccagtaaatgcttctttttttgtttgtggtttttcgtttttgttttgttttttttttttttttttttttttttttaagaaagggtctcaccctgttgccctggctgcagtgcagtggcaaaatcatagcccactgtagcctcgacaccctgggctcaagccatcctcc

SEQ ID NO: 538817 - DNA, 540 bp, Homo sapiens
tgtgctctgagcccaaactctcaagggttggtcagtgccaggcacagggtaggtgctccgtccctgacagctattgttgcaattactgttatcaaaattatgtcttttaacctcagaaggtaaacatttttgaaaaagagtatgccaaattattctgcccaaaagagaatttcaccctttcctgatgactgagtgagtgtctgcaagcctccatggttattcagccctacccttgtagggtagagccctgggrcccagggatattagatgaacaatttcttcccctatgctagaagttcccacaccttatgagatcttaggtcgcttcttagaaatattctgtctcttgatttgttgggacaggaagcttccccagtaaatgcttctttttttgtttgtggtttttcgtttttgttttgttttttttttttttttttttttttttttaagaaagggtctcaccctgttgccctggctgcagtgcagtggcaaaatcatagcccactgtagcctcgacaccctgggctcaagccatcctcc

SEQ ID NO: 538818 - DNA, 503 bp, Homo sapiens
tcgtgattcgcccaggactgcgagggttctggggacttggtactttcagttctaaaaccaggacagtgcagggacactgggaggagtgattaccctactcaagcatctcctgcctctctgggatctgaaagccaccagagtggaccttctaaaaagtaggtagggccaggtgtggtggctcacgcctgtaatcccagcacttcgggaggctgaggtgggtggatcacttgaggccaggagttggagaccaacctggccaacatggtgaaacgccttttctacaaaaaaatacaaaaattagccgggtgaggtggcatgcacctgtaatcccagctactctgcartctgaggcacaagaatcacttgaacccagtgggcagagattgcagtgggctaagattgcagcactgcactccagcctgggcgacagagtgagactctgtctcaaaaaaataaaaaacaaaaacaaacccaaaacaactaactaaaatgtaggtgggacc

SEQ ID NO: 538819 - DNA, 503 bp, Homo sapiens
tcgtgattcgcccaggactgcgagggttctggggacttggtactttcagttctaaaaccaggacagtgcagggacactgggaggagtgattaccctactcaagcatctcctgcctctctgggatctgaaagccaccagagtggaccttctaaaaagtaggtagggccaggtgtggtggctcacgcctgtaatcccagcacttcgggaggctgaggtgggtggatcacttgaggccaggagttggagaccaacctggccaacatggtgaaacgccttttctacaaaaaaatacaaaaattagccgggtgaggtggcatgcacctgtaatcccagctactctgcaatctgaggcacaagaatcacttgaacccagtgggcagagattgcagtgggctaagattgcascactgcactccagcctgggcgacagagtgagactctgtctcaaaaaaataaaaaacaaaaacaaacccaaaacaactaactaaaatgtaggtgggacc

SEQ ID NO: 538820 - DNA, 447 bp, Homo sapiens
tggtgagtggcagaatcaagaccaggtccaggtggtacagccacagagctggtgcccccaagtactcggctgctcacacgggccccaagagacctcctcactggcaagaggaagccacctcctctcrgaagaatgagcagggctagagtacagtggcacaatcacttctcactgcagtctcgaactctctggctcaagcaatcctcccacctcagcctcctgagtagctgggactacagtcgtgtgccaccacacctagctaattttttctatttcttgtagaggtggagtcttcctatatagctcaggctggtctcaaaatcctggactcaagcaatcctcctgcctcagccttccaaagtgctgggattacagacatgaaccaccgtcccctgtaactactgtttaagaaagtaaaaagatgcagaagaagttaatctaatattt

SEQ ID NO: 538821 - DNA, 606 bp, Homo sapiens
tggtggcgtgtgcctgtagtcccagctactcaaaaggctaagacaggagaattgcttgatcttaggaggcagagtctacagtgagccaagattgcgctgctgcactctagcctgggcaacagagcaagactctgtctaaaaaaaaaaataataataaataaataatcattgagatatcttactttcttccatactaagtcttcaaaatccagtgtgtatttcacacttgtaacacatctcagtttggaayagctgcatttcaactgctcaacagccacatgtggccagaggctactgcactgggcagcacagtgctagactataaactccatgagggcagggaccaagccatacccacaattattaaatctagcatctgacacagagtggacactcaagaaatgtttgttgactgactagctgaatgaaagaatgaatgaacaaatgaatgaaggaatgaacaaatgatctaaggccttctcagatctgaagccacactcccagcacaggccatgggaagggcatggagatgaattccagccccacctctgcacccacttctctgagtgactgtaagtacctccacttttggggcctcagtttctc

SEQ ID NO: 538822 - DNA, 578 bp, Homo sapiens
agagacaccagaatttgcacatatacaccttttcagacataaaaatgtcttctctacccctcagaactctgcagaggaggggagacttgatctgctgatcaagtctgggggtgactgtaagaagcggggggactcacgtgtcattccctggccagacatctgctcagccccagggccatcagatggggttgtggagagcagtgccagggaaaggcccctgggcttccggttcctgggagacacrggggtctgggagcagaggctatggaaggtaagactcgggggctgcagattcttgaacccatgcttggaccctctcagcacgggtccaagaatctcaacataagggaggggtgtggcacaggggccggccaaagattaactggaaggtgtcacttctctggggagaaaccaccagtgcctgaggaaggggcctggaattgagtccctgatcagtggggcctataggggccttcacctacaaccgccaggtgtcaggctttgagctcagcccaccacagccatgggttacaggaggggcaccacacaatcttctagccaagggtcagtccagagac

SEQ ID NO: 538823 - DNA, 352 bp, Homo sapiens
cccttccccggcgatgcccatcacactgtgacctcccatccctgaagggcacctgcctgagggcctggcctccttccagcttcatggacctggagatgtgccctttcatccttcctgcttcccaggccagtagatccgtttacacttttgggtcgacagtcagcttttccttttggttttggcgggtcccagaggcatgggtgtccagtccaatgtggggagccacrtgacaacgtgggggactgggacatgggactgggaagtcagcagacgctgggatagagagggccctgaacaccaggctcaggggcttgcttggtccttatcctgtaggaggtgggaccacctttcc

SEQ ID NO: 538824 - DNA, 497 bp, Homo sapiens
tggagcaaagggttaggaataataatgttcagacatttgcagggacttgtttcaaagtgagggggagcccactctcactctgcagcactgactgctctcctgagcaggtgaggggcagagggtgcgcaggccgtgggcttctgctgcactctggggagctcgtgggatgcactgctgagcggccgtgccgagctccgagcagggcagtctccatgctgtgtgttggctctacctacctctgtggccctctcctggcctcccctgcggccatgcttaccrtctttgaccacactgggccctggatattccccctccctgtcacctttgcttggagcactgactgctctgccgtcttgaagactcagctcagcgggacttctacgaagcccactggaggctaggagagctccctggctgtgcctcttcgcacttcatagataccatttaacctcttgtcactctgtttctgagtcaagttcctcaagggcagggcctgc

SEQ ID NO: 538825 - DNA, 552 bp, Homo sapiens
tacagcatgaatgctgtggaagtttgcgaatgaatgaaagccagcctgctgggggaacccccactttaccatcttcctggagctgcaccacactgtcccctttccccagactgtggctgtggtacaaaagtgctccccctctgggctcccatctgttctgagatgctaagatgtgaagaatgggacgatgtttgaaggtgagggtgtcaggtaggtaggggcaggcagaaagtgtttaaaatgatatcaacaagcaggtaccgtgctttatagaggccacttctacccctcacaagagcctaacaagaaggtgtcgcaatactgattttctagagggtgagggcttcatgagtccacccatccatctgtccatctgtgcacccaaccaagaggcgctttgagcctacytggtgtgagcagacccaggctagctgtgcactggggcatcactggtgaagaggtgaccacgtggccaagaagtggagaacagggactgcagcccggatggtccacccccaggggcctcaccctctcctgtgagcggggctcgga

SEQ ID NO: 538826 - DNA, 593 bp, Homo sapiens
aatccagcgctgcccacactgctgtgatggtggagggggctgggggcttccacactggtgtgactgtggtgggcgggggaagagagggaaccgcagtttccagttcaggagccactttccttctccagttggatgtactggctgagccaggctggttgggcagtgatttccacaggaggcctagctgtctccagaatacaccacctgtctcttgaaagtggcagggtacatccaggtgagaagtttgtcatctgatgtggtcagatcagagctttgtcgagtccaggccacatggatggcratacttacaagccttgggcgaaatgctgtccatacaatttctcatgaattctttactgcaaccccattttgcagacaaagtagccaaggctcagagagggggagtcacttgcccagggtcacacagcagctaaaggtagagctaggaactgaatgtggatttgccaactttcaaccactacgggatcttgcctcttcagttttctgggtcagaaacaacgaaataagagatagggtgtttcctcttttacttttaatgaaaggtgaggtttcaaaataaacttacttaaatt

SEQ ID NO: 538827 - DNA, 453 bp, Homo sapiens
cagcacgtcacgctggcccaaaatgaaatgctgacaaatgtagatatttcaaatttaattgacatttaaatgtacttgagataaagacggggaaaaatcagccaggacttggtctccggaggtggtgaaggggagctggtgatcatttttgaaaggatcacttcactcaggcacaaaggatcctcgctttgtaaatgtcttggctacgctgtgtccctctgtcacrtggctccagtgggcaggtgctgacgagcagggacagcccccagggtgaggctaggtcctgcctgtccggtgggtgccagtctgtctaaccatccactaccctccccttcctagtcaggctaccttggaaaagtcacttcatctccctgaacctaactttcttgtttaattttctatttccataggtttttggggaacaggtggtattcggatacatgagtaatttct

SEQ ID NO: 538828 - DNA, 617 bp, Homo sapiens
taggaaaaaatgttcagtcttccacaaattgaagtcccataacctattatgcagggattttactcctaggtatacactaagagaaactyacacatgtacaaacaacagacacatattagaatgttcatagcaagactgttcacaacagcaaaaacctggaaaacatgcaaaacgtccattcacaggtaaatgaattaaactatgtacattaagataatagattattcgacaaagtgaatgaactacaatgacatgcaacattatgaataaattttagcattacattaagtaaaaacaataagttccaaatgattacatcatagaataacctttttataaaaaataaaccaaaataaaaaagtattccttctaagaatccataaagatgtgataaagacaaataaaaacagaaagagggtgaatacaaaattcaggtttgaattctgtcgaggaagccatggggataggatggttggggaaacctggaagtcacatataggttattataataagtacctaccttttttttccccaatggtggataaacaagtgcttattgcaggccaatgaaactatgtcataaacaaggactatgactaatccattatctaattctg

SEQ ID NO: 538829 - DNA, 617 bp, Homo sapiens
taggaaaaaatgttcagtcttccacaaattgaagtcccataacctattatgcagggattttactcctaggtatacactaagagaaactcacacatgtacaaacaacagacacatattagaatgttcatagcaagactgttcacaayagcaaaaacctggaaaacatgcaaaacgtccattcacaggtaaatgaattaaactatgtacattaagataatagattattcgacaaagtgaatgaactacaatgacatgcaacattatgaataaattttagcattacattaagtaaaaacaataagttccaaatgattacatcatagaataacctttttataaaaaataaaccaaaataaaaaagtattccttctaagaatccataaagatgtgataaagacaaataaaaacagaaagagggtgaatacaaaattcaggtttgaattctgtcgaggaagccatggggataggatggttggggaaacctggaagtcacatataggttattataataagtacctaccttttttttccccaatggtggataaacaagtgcttattgcaggccaatgaaactatgtcataaacaaggactatgactaatccattatctaattctg

SEQ ID NO: 538830 - DNA, 617 bp, Homo sapiens
taggaaaaaatgttcagtcttccacaaattgaagtcccataacctattatgcagggattttactcctaggtatacactaagagaaactcacacatgtacaaacaacagacacatattagaatgttcatagcaagactgttcacaacagcaaaaacctggaaaacatgcraaacgtccattcacaggtaaatgaattaaactatgtacattaagataatagattattcgacaaagtgaatgaactacaatgacatgcaacattatgaataaattttagcattacattaagtaaaaacaataagttccaaatgattacatcatagaataacctttttataaaaaataaaccaaaataaaaaagtattccttctaagaatccataaagatgtgataaagacaaataaaaacagaaagagggtgaatacaaaattcaggtttgaattctgtcgaggaagccatggggataggatggttggggaaacctggaagtcacatataggttattataataagtacctaccttttttttccccaatggtggataaacaagtgcttattgcaggccaatgaaactatgtcataaacaaggactatgactaatccattatctaattctg

SEQ ID NO: 538831 - DNA, 358 bp, Homo sapiens
ccatcccttccctggctacccacccccacctcagcaacgcctcccagaacgctccaaagctttctcaagtccccgctcccaggttagggccctgtagccagttccaaggtctttttcaggagcgcgcttcccaaataaagttgaragggggcggggggaatgagggagccccagatccacctcagagtggtccccagagggcttgggccccttctccggattgttcagtgggaaggagggccggctggtgcctcaggcccgcgggactgtgacagccggcgacccctgcggcctccctttctacccgggcgcccccaccttgagatagtcgttctccgagcgcagctcctccagctcc

SEQ ID NO: 538832 - DNA, 442 bp, Homo sapiens
ccatcccttccctggctacccacccccacctcagcaacgcctcccagaacgctccaaagctttctcaagtccccgctcccaggttagggccctgtagccagttccaaggtctttttcaggagcgcgcttcccaaataaagttgaaagggggcggggggaatgagggagccccagatccacctcagagtggtccccagagggcttgggccccttctccggattgttcagtgggaaggagggccggctggtgcctcaggcccgcgggactgtgacagccggcgacccctgcgrcctccctttctacccgggcgcccccaccttgagatagtcgttctccgagcgcagctcctccagctcccgcaccaagccgctgggcccgcagtccagcatctcctcggtgaggtcggagaaggcaagcgaggcgatgagcggcaagcggctg

SEQ ID NO: 538833 - DNA, 528 bp, Homo sapiens
tggtaaatttaagacttgaaaaactccacatctccatgtctactcaatgctcaaactgtacttccttttaaccaaactgaagtcaacatctaccctcataatcctggattgatttatgagcaccaggtatgactcaagcatgaatgaaatacatatgaaggctttaactttatttatattcattttccattgtcagtactccctcacaatgctccagtttcaagaaaatacataatgggaattaaatttgarcagctcgaagtcctgtgattcattatcctgcttcatttacaattactagttgggcccagcatatcatcctccctcctggctgggtgtcaacagagagtgcaggcaaagggttttactgatctactagataaccagattgaaaaaaaagtatctttctacaagtcatacatagactgggagtcagaggcactacattggcctctatggtacacactgaacccatggtaataagaacacttaagaataatatcttgggatacacagaagcattattac

SEQ ID NO: 538834 - DNA, 239 bp, Homo sapiens
tctcgtggcactgagtctgctgtaaataggtactcaataaatgtcagctaccgaggtgcactttactagtgcttaccaatatccaagttcttttcctttcaggaacatagattatatttcccagcccccttacagttaggctttgccatgtgactagttataaccaatatactatgaccaaaattgtcagcaaaagtaaaaaaagargacattttgtatagtggaactataagactgaa

SEQ ID NO: 538835 - DNA, 634 bp, Homo sapiens
gccattaggtgagaaataaaaataatcaaccagtgctatacaacagttccaaagtccacccttcataaatatttcgttctgctcccccgacttccaggatgactggaataactggttgtttaggtatcttgtagataaggtcagtcaagtctctctctctggacagttctattcacaagaatatatttgtcaccatttttatagttcaagtcygaaaatgagggcattacctttctactttatgaaaatactccccaaaggcagtccttggggatttgtaaatactcttggagcttcaaaacttaatttttaaaataagccgtttcaaatggacaaattaaaatgatctgccattattatgtcattatgtcattctattttgtatgataaactgaatgtaatgtattttacataatataatgaaacagttcaaaatatttagctaagactttgctcaaagtcaaaaatattttgttaaagttttttcaccattttgggttaatgttggcactggatccaaaagtttatcataattagacgttttctttttttcaacaaccttcattttgtctttagcccactcggcttggctttaatgagagctgacaactctaaggtcatattagtagtggtt

SEQ ID NO: 538836 - DNA, 549 bp, Homo sapiens
ttgcaggaggaaggcttccttgaagatggcctattgtgggatgtcaccttatgattgcatgagtcaatactccttaatgaactcccttttatatatacttgtatcctattggttctgtccctctaaagaaccctgaccaatatraaaataaaagcaaaataaatttctaagaagaaaaacaaaataaaattcccaaaaatgaggagtataacccaagaggcaatgcctaatcctctgttttcaacagtggaaatggagtacacaagacccccaatatgacaccaagaagcagaaggagcacagtggaaccagaagtcacaaaaaactctattaataattaattactagttagattacagagacaattactaacagaaaactgtctacctccatatcaagatatatggggggtaccaggggaggggagaggatggccggaaaaaggagcaaacacacacatacaaaatttgggcctttagaaaaattccatctaaccaggagcatgaccctagcttctctagcttctcttaagcataagcctcctacaaa

SEQ ID NO: 538837 - DNA, 341 bp, Homo sapiens
acccaagaggcaatgcctaatcctctgttttcaacagtggaaatggagtacacaagacccccaatatgacaccaagaagcagaaggagcacagtggaaccagaagtcacaaaaaactctattaataattaattactagttagattacagagacaattactaacagaaaactgtctacctccatatcaagatatatggggggtaccaggggaggggagaggatggcckgaaaaaggagcaaacacacacatacaaaatttgggcctttagaaaaattccatctaaccaggagcatgaccctagcttctctagcttctcttaagcataagcctcctacaaaca

SEQ ID NO: 538838 - DNA, 711 bp, Homo sapiens
cccacttcccctgtcctcacctgtgttaaaaagtagttcctttgcccatttcctaacccaccgtcatgagtcagagaccctatcttcctccctctccaggagtgtgattaagcaataagctaatctgcatttttcagtgtagttacctaatatgtgaagtgccttttatgtatgactacacagtaaatttacaatttaaaaatgtactcttctatatttactcaaccagtatttattgaatacgtattctgagctacagactgtgctagtatggggaatgcaatgatgagtgaatcagatgtggtgctcattctctttaaccttgttatctagtgaggagtaagataattagttaatcgaagaatgtgaagtaattaaggcagaaaagaaacatgttcttataaagccctcacccatcttttatcattttaagttactggcaattctggacaccattgtgtgtcttaccctaatgtatctctacctttcctgtgtacaatagttcctacccttccttagcctgaactaatgctccgaggaggttagactccttatctccctcaaggacaaaacagcatttattcctgcttctgtacttgttttttatgtcttgactactgtctttgcttttgtctacttatacaaattcaacccatccttcaacacaaagcttrctctatgaattacttatagcccattctgatcttgtct

SEQ ID NO: 538839 - DNA, 622 bp, Homo sapiens
atttagtgactcctaaggaaattttgttttaagggaacagctatgttttctaaattagcaaacaagtttatttgtattcagttatctacttgcgcatttgttttctgaaatcatcattttttaaattaacatatttattttgaataatgtaaaaagaagtgcttagaaaaaagttctaatgtcaatataagctagatttcctgaaaaccgtaatttaaaaggtattgtgtactttatcagcaatgctttatagttttcatagaaaagtttttatattgttagttcttggagaaatatttccagagaataatgttatatatttatggctaagaaatcaaaygttgttctccaaagtttgagtataaagtgagcagttaaactatgttttatccccccagatatttataaaatatctattctaagtatatatttaccattgattgaataatagagaatatttaatataaatggtgggctgcacagtttaatataaactcttaatttgcacaacaaattaagaaagcagcagactggaatgatgttcagtttaaatacaggaactaaattcgtatgtcgttctgagtttatctctaacagggatagtaagacaaaagagaagtat

SEQ ID NO: 538840 - DNA, 434 bp, Homo sapiens
ctgtgaatggtccagacctagaacccagacagatccttgagaagaaagataggaatagaccacctactggggtacaggtttcccccagccaagccagccacatgcaaacccagaacaagccaggaatctattcttctcatagacatgccagccaacttgtgacttacctagcaggaatttagaagtggattaaggaaatgagagcgatgcaagttgatttcattatggtcagatgscagcaaaataaatctagatcatcattatgtatttatacccataaagggaagaacttggcatggattacaaggtatttaattataatttagacatgttatggcactcagtgttttgttttattatacctttcatgtattgacaggccagtgtgaccacagaaaatttaaccttcctgccagtccttctccctgacctcc

SEQ ID NO: 538841 - DNA, 598 bp, Homo sapiens
ggtggtggtggctgtggtaaggagccctcatatacacacagacacccacagctttgctaaggcaggggctgggtgggcctggtccagtctgcacagagtccccactgtcctgttaagggagtgaagggtgtggaggtgggcctctctctgcctgtgggccttcctgggctcagcagcccccacagtgctgtgtctctgttgcaggtaatgtatgtacagaagaaaaagcggtgagtgtccctgtcycccacccgccctaaccccacacccgttctgaaattcctgctcataggctctgacttttctgtaagatgtccctcagccatcctgatacaagcctgaaatttgttttccctgccccagcctcaggttactcactggggaaagcccctttgtagaatcagggttgtattcttggaggtatagtgtgtcccaaaaggcacccactggaattgcccctgcctgggaaagggaggagagacgaggcagccaggtgtttgatgagggttggggggacctcctagctgagtcccctcccctgctccccagggtggaccggctgcgccatcacctgctccccatgtacagctatgaccca

SEQ ID NO: 538842 - DNA, 532 bp, Homo sapiens
ccaacatgtcagtgtcctattccacactcctaggaaggagaaactgcttagcacaactttcatgaggggtccactcttagtccaatcagctcttgccaagggccagggtctttccatataaacatggctgtggtgactcactcctgtgcttagacagctcttagagagaggggatctgacatcttctctccagatattcyaataggtgatttaaaaatagaaccctctaactcactttgctccaatctcactcatactcaccaaaaagagccttagtgtaaagtattatttggacattattattggaggccatattggtatatatttatgaaatgtctgacatcaattagcatacatattaaatgtcaatcttattctcaaaaactaatttagaactgtctaaccatcttttttttttccagaaactaatttggaagtgtctaaccagctattgtaactgagagccccattttcctaaaagttatctttaccttttctgtttttccttgtgtgttcacctcttacttcgctc

SEQ ID NO: 538843 - DNA, 659 bp, Homo sapiens
tagctaaaaaagcaaaacgacctaattttccatcgacaggggaaatgagaagtaaacttgtttattcatgcaatggattatgtttcagcagatctacgtaaattgtacatttataactaggataaaatgcaacaacataatgttgagcaaaagaccccatttgtctacatttttaaagaaccggaaattatattatacattgcttaagattatatgtacacactctcacacacacacacacacatatatatctcaaagtctagaaatacgtgtaatagtcatctcagtaaaggaggaagaaaaacatatgagaagtaatacttaagtcgtatttgtaatttattattttatttaaaaagaaaagatccaggccgggcacggcgactcacgcttstaatccagcactttgggaggccgaggcgggcagatcacttgaggtcaggagttcaagaccagcctggctaacatggtgaaaccccgtctctacaaaaattagccgggcgtggtggcgggcgcctgtagtcccagctactcaggtggcttgaggcggaagaatcgcttgaacccgggaggcggaggttgcggtgagccgagatcacagccattgccctccagcctgggtgatagagcgagactctgtctcaaagtaaataaataaa

SEQ ID NO: 538844 - DNA, 659 bp, Homo sapiens
tagctaaaaaagcaaaacgacctaattttccatcgacaggggaaatgagaagtaaacttgtttattcatgcaatggattatgtttcagcagatctacgtaaattgtacatttataactaggataaaatgcaacaacataatgttgagcaaaagaccccatttgtctacatttttaaagaaccggaaattatattatacattgcttaagattatatgtacacactctcacacacacacacacacatatatatctcaaagtctagaaatacgtgtaatagtcatctcagtaaaggaggaagaaaaacatatgagaagtaatacttaagtcgtatttgtaatttattattttatttaaaaagaaaagatccaggccgggcacggcgactcacgcttgtaatccagcactttgggaggccgaggcrggcagatcacttgaggtcaggagttcaagaccagcctggctaacatggtgaaaccccgtctctacaaaaattagccgggcgtggtggcgggcgcctgtagtcccagctactcaggtggcttgaggcggaagaatcgcttgaacccgggaggcggaggttgcggtgagccgagatcacagccattgccctccagcctgggtgatagagcgagactctgtctcaaagtaaataaataaa

SEQ ID NO: 538845 - DNA, 595 bp, Homo sapiens
aatagtttgaatggtattagaactactwattgttaaactatattgaataatccattaactgttgctgttcaaatacggtaaatctttataaagtgtagcctaaaaatatttaagccaatatttcataagatcctatttatgaaaaagatcttcctgtgttgtaaaactacctaattctttgcttagaagatagaacttaaataccagggcttattacataatctgaaatctagttctctctggaaggctttaaaagatgtagctcagacatattttttagctgtccttggtagcaggataagctaaatctcttttcctaattgtgaaatctctgcatctgtgttgccatgttatatgcccaagttctgctcctgtagttattataaagccaaatttacagtaattaaagagacaactacccagttacagctataagaccagctctctaatgggaaaggaaacaattcaccaaggctgaaatcaaatccttttaatgggctttcaacttgctcgggaggagatctattccaagcataaacacagccttccagagatagtctttttatgttgctcttaaatgtctaataggtattcc

SEQ ID NO: 538846 - DNA, 595 bp, Homo sapiens
aatagtttgaatggtattagaactacttattrttaaactatattgaataatccattaactgttgctgttcaaatacggtaaatctttataaagtgtagcctaaaaatatttaagccaatatttcataagatcctatttatgaaaaagatcttcctgtgttgtaaaactacctaattctttgcttagaagatagaacttaaataccagggcttattacataatctgaaatctagttctctctggaaggctttaaaagatgtagctcagacatattttttagctgtccttggtagcaggataagctaaatctcttttcctaattgtgaaatctctgcatctgtgttgccatgttatatgcccaagttctgctcctgtagttattataaagccaaatttacagtaattaaagagacaactacccagttacagctataagaccagctctctaatgggaaaggaaacaattcaccaaggctgaaatcaaatccttttaatgggctttcaacttgctcgggaggagatctattccaagcataaacacagccttccagagatagtctttttatgttgctcttaaatgtctaataggtattcc

SEQ ID NO: 538847 - DNA, 569 bp, Homo sapiens
tattagaactacttattgttaaactatattgaataatccattaactgttgctgttcaaatacggtaaatctttataaagtgtagcctaaaaatatttaagccaatatttcataagatcctatttatgaaaaagatcttcctgkgttgtaaaactacctaattctttgcttagaagatagaacttaaataccagggcttattacataatctgaaatctagttctctctggaaggctttaaaagatgtagctcagacatattttttagctgtccttggtagcaggataagctaaatctcttttcctaattgtgaaatctctgcatctgtgttgccatgttatatgcccaagttctgctcctgtagttattataaagccaaatttacagtaattaaagagacaactacccagttacagctataagaccagctctctaatgggaaaggaaacaattcaccaaggctgaaatcaaatccttttaatgggctttcaacttgctcgggaggagatctattccaagcataaacacagccttccagagatagtctttttatgttgctcttaaatgtct

SEQ ID NO: 538848 - DNA, 569 bp, Homo sapiens
tattagaactacttattgttaaactatattgaataatccattaactgttgctgttcaaatacggtaaatctttataaagtgtagcctaaaaatatttaagccaatatttcataagatcctatttatgaaaaagatcttcctgtgttgtaaaactacctaattctttgcttagaagatagaacttaaataccagggcttattacataatctgaaatctagttctctctggaaggctttaaaagatgtagctcagacatattttttagctgtccttggtagcaggataagctaaatctcttttcctaattgtgaaatctctgcatctgtgttgccatgttatatgcccaagttctgctcctgtagttattataaagccaaatttacagtaattaaagagacaactacccagttacagctataagaccagctctctaatgggaaaggaaacaattcaccaaggctgaaatcaaatccttttaatgggctttcaacttgcycgggaggagatctattccaagcataaacacagccttccagagatagtctttttatgttgctcttaaatgtct

SEQ ID NO: 538849 - DNA, 441 bp, Homo sapiens
ctggctcatttttgtatttttgtagagatggggtttcaccatgttggccaggctggtcttgaactcctgacctcgggtgatcctcctgcctcggcctccccaaagtgctggggttacaggcatgtcccgccgcgcccggcctgaaagacgaaactttttaaagctttcctaagtgtattgagaacaaaaagaacagccaacactcatcattcaacatgctcagagcagtcatctttaacccaaccttaaaattcttggcttctctctttttctccttgtcattataaaaaatgaaaataagatggttacacagggaaagaagtgggctgaacctgactaagctcaggctccaattctaataaaaacccagacrccgggactagagtcttcacaatggaaccaagtgtgtaacaaccactgggatcacctacacggggccag

SEQ ID NO: 538850 - DNA, 557 bp, Homo sapiens
ggttggtggcatgcatccataataccaactactcaagagtctaagtcagttggcttgagccctggaattcaaagctccattatgattgtacgactgccctccagcataggcaagagtgagactcagtytatttttttttttttaagaaaagttattttcttaaaataacttttatttttttcttaaaatatatttttcttaaaataactgttatttttttaagaaaaaaaaaaaaaaaaaaaaaaaagaatcctccaaggccggaggattgcttgagctcaagctctcaagttcaaaaccagcctgggcaacataaggagaccctgtctctacaaaagtaataaaaaatattagctgagcatggtggcaggcatctgtgatcccagctacttgggaggctgtggtgggaggactgcctgagcccaggaggtcaaggctacagtgagtcttaattgtgccactgcattccaactcgggtgacacagtgagacccagtcttaaaaaataatactgacacctctgtagatccatctaccctcaaatgtcttactgttgag

SEQ ID NO: 538851 - DNA, 557 bp, Homo sapiens
ggttggtggcatgcatccataataccaactactcaagagtctaagtcagttggcttgagccctggaattcaaagctccattatgattgtacgactgccctccagcataggcaagagtgagactcagtctatttttttttttttaaraaaagttattttcttaaaataacttttatttttttcttaaaatatatttttcttaaaataactgttatttttttaagaaaaaaaaaaaaaaaaaaaaaaaagaatcctccaaggccggaggattgcttgagctcaagctctcaagttcaaaaccagcctgggcaacataaggagaccctgtctctacaaaagtaataaaaaatattagctgagcatggtggcaggcatctgtgatcccagctacttgggaggctgtggtgggaggactgcctgagcccaggaggtcaaggctacagtgagtcttaattgtgccactgcattccaactcgggtgacacagtgagacccagtcttaaaaaataatactgacacctctgtagatccatctaccctcaaatgtcttactgttgag

SEQ ID NO: 538852 - DNA, 557 bp, Homo sapiens
ggttggtggcatgcatccataataccaactactcaagagtctaagtcagttggcttgagccctggaattcaaagctccattatgattgtacgactgccctccagcataggcaagagtgagactcagtctatttttttttttttaagaaaagttattttyttaaaataacttttatttttttcttaaaatatatttttcttaaaataactgttatttttttaagaaaaaaaaaaaaaaaaaaaaaaaagaatcctccaaggccggaggattgcttgagctcaagctctcaagttcaaaaccagcctgggcaacataaggagaccctgtctctacaaaagtaataaaaaatattagctgagcatggtggcaggcatctgtgatcccagctacttgggaggctgtggtgggaggactgcctgagcccaggaggtcaaggctacagtgagtcttaattgtgccactgcattccaactcgggtgacacagtgagacccagtcttaaaaaataatactgacacctctgtagatccatctaccctcaaatgtcttactgttgag

SEQ ID NO: 538853 - DNA, 557 bp, Homo sapiens
ggttggtggcatgcatccataataccaactactcaagagtctaagtcagttggcttgagccctggaattcaaagctccattatgattgtacgactgccctccagcataggcaagagtgagactcagtctatttttttttttttaagaaaagttattttcttaaaataacttttatttttttcttaaaatatatttttyttaaaataactgttatttttttaagaaaaaaaaaaaaaaaaaaaaaaaagaatcctccaaggccggaggattgcttgagctcaagctctcaagttcaaaaccagcctgggcaacataaggagaccctgtctctacaaaagtaataaaaaatattagctgagcatggtggcaggcatctgtgatcccagctacttgggaggctgtggtgggaggactgcctgagcccaggaggtcaaggctacagtgagtcttaattgtgccactgcattccaactcgggtgacacagtgagacccagtcttaaaaaataatactgacacctctgtagatccatctaccctcaaatgtcttactgttgag

SEQ ID NO: 538854 - DNA, 510 bp, Homo sapiens
attgcctgtgccaacgccacaacatcccaccccaccactctgtgccaggttgtattttcccaaaaaggtcacgtccatatatatcccagcccacagctctttgctgatgaagagcctgtggtgctcctccattgagagatgaggtctgtgttcctccccttgggctggtgcaccttataagtgcctcatccaacagaatgtgcaggggacgacacgacgtgacctcagaggctaggccaaccaaggtaagacagctttcacctggttctcyctcgggaaatgtgccttgaatgacctgagctggcatgtaagaagtccagccaccctggagccaccaggcaggagagaccacatggagacaggaggggcactcaaggtacccactgacccaaccccactgctccccacgaatgagcaagggagtttccagaacagcccagccaccacagcagagatgagcggtccccaccaagctctttccggattgcagatttatgagaaaaagaagtt

SEQ ID NO: 538855 - DNA, 618 bp, Homo sapiens
tgcctgcatgttcacgggtgggtgtgctcttggagaagtgacatcagattctccacataatgagatcagtagacatcactaaaataattccaccaagttgctaaacaatacacaagcagaagccatcaagagcaagtcctagaagatgtggtatgataaatatccaaagttgctacagtgaattacctaaaattcccagttttcaacaaaaaatatgaaatwttttttctcatacaggaagaagcaggaaacagaaacttcccatgagagggccaaatgacagacttactataagatttcaaagcagtcattataaatataatttaaaaattaaaggaaattattctcaaaggagtaaacaaaagtataatgataatgtctcatcaaatagaagataatacaatgatagaaaatataaaaaataacaaaatagaaatttaaaaatagaaaaatgtaactgaaattttaaaaaatcactacagtggctcaaaagcagggtttagctggcagaagtaaaaatcaataaacttgaaaatagatagataaagactataaaatccaaagaacagagaataaaaagaacgaaagaaaagaactaaagcctcagaaaaatgtggg

SEQ ID NO: 538856 - DNA, 618 bp, Homo sapiens
tgcctgcatgttcacgggtgggtgtgctcttggagaagtgacatcagattctccacataatgagatcagtagacatcactaaaataattccaccaagttgctaaacaatacacaagcagaagccatcaagagcaagtcctagaagatgtggtatgataaatatccaaagttgctacagtgaattacctaaaattcccagttttcaacaaaaaatatgaaatattttttctcatacaggaagaagcaggaaacagaaacttcccatgagagggccaaatgacagacttactataagatttcaaagcagtcattataaatataatttaaaaattaaaggaaattattctcaaaggagtaaacaaaagtataatgataatgtctcatcaaatagaagataatacaatgatagaaaatataaaaaataacaaaatagaaatttaaaaatagaaaaatgtaactgaaattttaaaaaatcactacagtggctcaaaagcagggtttagctggcagaagtaaaaatcaataaacttgawaatagatagataaagactataaaatccaaagaacagagaataaaaagaacgaaagaaaagaactaaagcctcagaaaaatgtggg

SEQ ID NO: 538857 - DNA, 618 bp, Homo sapiens
tgcctgcatgttcacgggtgggtgtgctcttggagaagtgacatcagattctccacataatgagatcagtagacatcactaaaataattccaccaagttgctaaacaatacacaagcagaagccatcaagagcaagtcctagaagatgtggtatgataaatatccaaagttgctacagtgaattacctaaaattcccagttttcaacaaaaaatatgaaatattttttctcatacaggaagaagcaggaaacagaaacttcccatgagagggccaaatgacagacttactataagatttcaaagcagtcattataaatataatttaaaaattaaaggaaattattctcaaaggagtaaacaaaagtataatgataatgtctcatcaaatagaagataatacaatgatagaaaatataaaaaataacaaaatagaaatttaaaaatagaaaaatgtaactgaaattttaaaaaatcactacagtggctcaaaagcagggtttagctggcagaagtaaaaatcaataaacttgaaaatagatagataaagactataaaatccaaagaacagagaataaaaagaaygaaagaaaagaactaaagcctcagaaaaatgtggg

SEQ ID NO: 538858 - DNA, 544 bp, Homo sapiens
attctcctgtgctttccactaaatattggcaagttttaaagtattaaccgttaagtctttaatacaaccagaattgtgttttagtttattttcccttttctcattgggaagttaacccaatattatttatattctttagtgcttatctttcaaatcgtatcaggcattcttagctattctaaaattaatcagtaccataaaccctgccctaaagcactagaaaattagacaaaaattgattccaactacttcctcacatgcatactattttcctagtgcttagttctgtacttttaatttccatggattagatatcattattatcgctttttattgtatacaaacaatacttaaatttacttatagatagataggcaaggggcacagttcttatgtggagcataacatcttcaatatcaaagacatttcaayggcatttgaactttcatgtggttgttgagaagtgtgttttcagtagagatggctccagactttgtggggtctaaaatttattggcattaataacgcacagtctcaactagtc

SEQ ID NO: 538859 - DNA, 350 bp, Homo sapiens
ggctctgtttcaagtgagatcctaacatgagaaaaacagatgtgagcctgactctcatggctatggtattccagttggttagaaggactatacacaaggaaacaattgcagaagcagtgagtgacaatgagggaaacaaactgtgtgctggagaaaaggctaacacggggctatcttcattacactggggggtgagggaagactcctctaagaagygacatggaagctgagattgagaatgagatcagaaagtgagaagaagctggaggataagcaaaaagcaccaggaagaatgttttaggaagaggaaagaaaatcagcaaaggcccaaaagtggcaaatagcttgac

SEQ ID NO: 538860 - DNA, 639 bp, Homo sapiens
tcagaagaattgcaagaaatgtcaagttcacacagcaagttggtacgctgtacagcaaatagaggtcaaaatgttctatccagatctttacactattttccaaattcagactcttcttatcttattctctgccccaggaggctaggccaatgtctgtgggattcccataaatttcccagtggggacctctggcaagagattgtagggagagcagagagaggtcaggtgcttctctggtgttcacaaagtgaggtaacctttggaggatggattcctctgctgaacaccactgttcctcaaactctcatttcagtttctgaaccagctcttccttgagtcctgctagatctaagggtggtcatagctctcacgctgctgtgatggttgcctttaygagacaacttgattgggccacaggatgcccagatagcacttaaacatgatttctggctgtgtctgtgagggtgttcctggaagagactggtgttttaactggtggatggagtaaagcagacggccctccccaatttgcataggtatcaccaatcggttgagggtgggaatagaacaaaaaggcagaggatggttgcattaactctctgcctgattgcttgagctggaatattgatcttgtcctgc

SEQ ID NO: 538861 - DNA, 561 bp, Homo sapiens
ttcctcaaaacctaatagtataggttatgtgtcatacatataaaataagcacatagtattccctttgtttccagtttatcacttaagagtgcctctttgtgggtctgaagttgtatattcttagagccagttacctgcatataaatatatagaaaaaagtgaataatgcatgtttctcttccctaattccctaatatacaaaatataagagagttgaggtttttaactcatgcactgggagactcagtaatctatctatggcttctttggcaaggttgtaattgtgatgcagtacaggatgcaaaagctcttaggcyagataagtactagaaacctctcatctcttgttatctgggtttccaaggtgatgagagtgtaggaagaaactagaagatcaggtgtaatatcatggctaatcatctttctaaaagatttttttttccaggatattacctgactctcacagtgccagggattttccaggcaagactagcatctttcttaagttacaacaatgtgtgaacaaatataagaagctacaaatactgggaaggtagattc

SEQ ID NO: 538862 - DNA, 385 bp, Homo sapiens
taggaagcatggtcactatacattttggcctagaagttcatacttcctatttccccagggagaacgtggccacctcacaactcttccagacttgcatctcttttcatctctgtatttctgagaacccatctgatctctgttcttatcttcctctggggaagtggatagatagacatgaagctttgaagttactgagggttgttgatttttattttcactgtttataaactattattagtcatgactcatcaatcctttcataaccttagctttctcgtttktaaaagtcacttgtgtatgcctatttctcactttccagaatctcagttccaatatacttgaaattcaggacattcctattaggatcctacttgtaaatattttt

SEQ ID NO: 538863 - DNA, 385 bp, Homo sapiens
taggaagcatggtcactatacattttggcctagaagttcatacttcctatttccccagggagaacgtggccacctcacaactcttccagacttgcatctcttttcatctctgtatttctgagaacccatctgatctctgttcttatcttcctctggggaagtggatagatagacatgaagctttgaagttactgagggttgttgatttttattttcactgtttataaactattattagtcatgactcatcaatcctttcataaccttagctttctcgtttgtaaaagtcacttktgtatgcctatttctcactttccagaatctcagttccaatatacttgaaattcaggacattcctattaggatcctacttgtaaatattttt

SEQ ID NO: 538864 - DNA, 594 bp, Homo sapiens
tgccaggagcagggacaggccaggkagcaggagcaggcacttctgaacctgtcagggctggggactttctgggccctgagagcacagggatgcccaggtctggagctgcagctgggtgaccacagctatgcctgggagcatggggctcccacctgttcctggcccccaccagctctggggagcatgcagccccagccacacctctcctgctgcagctggcatcctcacagtagctgctctagatgggccactgtcaccatcaataggggtatccacactttcattgtctcctgccttgtgaaggtctagcaggggcagtggggagagctgcagaaataggaggttgtaccatccactgtcaattgctctaatcaataaaaccctgcatgcccaggcagcctagagtagcaaggatagagccaagcagagggaactctgcagaacccagaacagcactagggaagtatttagtttgcaaagcttgttcctccaaggcagaccctatgtcaaccccaggactaccttcagagcctgctctctagcatgaggttggagtagctggtgcccgagaggctggtcatccgtgggtgaatg

SEQ ID NO: 538865 - DNA, 594 bp, Homo sapiens
tgccaggagcagggacaggccagggagcaggagcaggcacttctgaacctgtcagggctggggactttctgggccctgagagcacagggatgcccaggtctggagctgcagctgggtgaccacagctatgcctgggagcatggggctcccacctgttcctggcccccaccagctctggggagcatgcagccccagccacacctctcctgctgcagctggcatcctcacagtagctgctctagatgggccactgtcaccatcaataggggtatccacactttcattgtcwcctgccttgtgaaggtctagcaggggcagtggggagagctgcagaaataggaggttgtaccatccactgtcaattgctctaatcaataaaaccctgcatgcccaggcagcctagagtagcaaggatagagccaagcagagggaactctgcagaacccagaacagcactagggaagtatttagtttgcaaagcttgttcctccaaggcagaccctatgtcaaccccaggactaccttcagagcctgctctctagcatgaggttggagtagctggtgcccgagaggctggtcatccgtgggtgaatg

SEQ ID NO: 538866 - DNA, 377 bp, Homo sapiens
gctggctcaatgatctcggtattgatattgataataagcaaatcacgttttatcataaatgggtgtcaggcatgtcatttatatagataacaaaaattaggtactttataataatcttaatgccaccaaatatatgctcagaaattgacttaagaaggaaagaaagtgaactagaaaagaaataagctagtgaatkaaagagttaaacagaaatgttaagtttcaagaaagctggttaaatatatcagaaaataaaatatatagctaggaatcataaagtacagagaagatgaaaacagaatactaagaataacataggaagatcaacaaagatcccagggataaactagggctgcagagaagcgtctcacttctgt

SEQ ID NO: 538867 - DNA, 621 bp, Homo sapiens
ttggcaataacaagccctagcataacacccttcagattataaaatccagacgcwtctcacatcacttttgattcccaccactccccctactcccaggaggtaaggatctttgtgctaatgctaggaaaaaaactgaagcagaggaaaggtctactggtttgttcaaggtaggaaagaaaacaaagctaggaactaaaacttctgaagtcaaagcttgggctctgggccatgcacagtggttcacgtctataattccagcactttgggaggccgaagtgggcagatcgcctgatgccaggagttcaagaccagcctgggcaacatggtgaaaccccatttgtactaaaattacaaaaaattagctacttgggatgttcaggcaggagaatctcttgaatctggaagtgcctgttgcagtgagcagagatcgtgccactgtactccagcctgggcgacagagcaagactccatctgtgatggttaacgctgagtgtcattttgattgaattgaaggatgcgaagtattggtcctgggtgtgtctgtgagggtgttgccaaaagagattaacatttgagtcagtgggctggggaaggcagacccacccttaatctgatgggtat

SEQ ID NO: 538868 - DNA, 584 bp, Homo sapiens
gctgcttggctgggtgactgggagaataaaaaatgagataatagatgaaaagtacccwgcagagcacctgggggcaggtaaaaaaggctcatacactgtgggtcacagtggagagtttcagaaatgcccagaacctaccaagcaacctctcaatggcaggaggaagtatgtcctgggactttcacagggaagcactgaatctttattaaattacccttccccctggggtttagagcaagaggcagcagggctgttcctgcctcactgatggcaagaggcctgcgcaggccaataacacggttacagtgttaatcattaaaatgctgtgtctgtttttgtctggggacgaggcatttcgatctttgttctccctctataaagaggaaaggtgaggtgctaagtggtgactccaagccaagaggctagcatgcctgccaggccacacggatgggaaggcttcagattcccccagccccagcatttttggagatgtccttggagggtaaatcctgagtagacgcagttggaataggaggaaaggcagattagctcctcccagaaagccaggctgtgcccattcaaat

SEQ ID NO: 538869 - DNA, 594 bp, Homo sapiens
tctcagatgagggtgcatgttgctgctggctttctggagggccatctggaaccagagatcccgtgtgcttaaccaggttgtgctctttaggaaataattttaaagaaatcattagagaagtgcacaaagataggtgaacagtgatgttcatcacagtgatatgtataatccccctaaaattagcagccacctaataagcatccaacaattgacatatgccacataagggacaacaataagggacaggtcaaaaaatctgtagtatatctatgtggtaaaatagcttttaagatcatgaacaggagatgatttaatgaggcagaaattctccaaaatatgttaaataaatgaaactgacccatgtgtccagtctgatcatctgttggtttctgagagaggggagaggaagatggagacagaggagacttagaaagtaagaaaatatgccataatttaatttttggatgagatgtagttttctgtattyctagtttttacaatgagaacatattacatgtatgaatcagagggaaaataataagttctcaaattttattcattcgacatttttaaaagcacaatgttctccaaggt

SEQ ID NO: 538870 - DNA, 609 bp, Homo sapiens
tccagaagctgacaacagccattttagacccagctttcttttgctcagatgtaacaggcaaagaacatcatgtaacataatggcaggaaagacgtacacaatggaagttttgatttacattttgaaagagtaacaaaaaaattcaagtggcaaaaaataccatacacataccatttaaaatttccccaatgtcgcactgccaataggtctatcatacaggagttaaatgttctctttaaatctgtttagcagaatataatgttgcaaagcaaaataggtctaccaggaagagcagccatagacccagaggaggagtgctgcatgcctggcccgtgagacagcctccgggaggcgtggtaacatggtgtggggagttgcacctttcacccagcttccaatttcagttctaatcwgcttaggaacaattagttctcagttataaggaagcagtttatccacaatcaaggtttaaacaattcctaagcctgaaatagagaaaggaagagacttagataaagaaaagaggccagagagccggaaggcaaagaggaaagtaaagcaaagcctatgacagatgaaaggtactctgagtcccaagctatgctagca

SEQ ID NO: 538871 - DNA, 582 bp, Homo sapiens
agaacaaagagctaaattcttgcctttgaactcaattccaagagctgggtgcttaaaagaggactggttttcctttgaatttcaaaggatttgagttaaatgatcaggagccagagatctgagactatagcatggagttgttaaagtccaagagtggaggaggtgagtgtgaagagggtctcaggctaggattcagaaccatttccctgccgagggtcatcagcagggtctgtaagtggggagacacagaatggacattacctgggtcccttttaagggactgagagagccaagttatattgaggaagaatctgaaggctcgcacagtgcagtaggctgccccacttcccatctaaaattctggaaggagattattgcctcaactagcttttcagcaacatgggagccccgggagagtagagctggtggtatggcacgtttgggcaacacaattattaagattcttggtttcaaacccartaaaagccaattctggctaactaagaaaaattaacagtatctttagctaactaaaccaaagatcatctctggcagggtctcagtgagaatgcccatagtgga

SEQ ID NO: 538872 - DNA, 609 bp, Homo sapiens
acaggtgtgaaccactgtgcccaacctcagagtttcttttttagatttttgctttgatgtgatccatatgtaatgctgacagtggggtgttgaagtctcccactattgtcgtgtggttgtgtaagtatttttgtaggtctaaaagaacttgttttatgaatctgggtgctccaatattggasgtgtatatatttaggatagttaaactttttgttggagtgtatcctttatcattatgtaagccctttacggtctgtaatttttattagtttaaagtccattttatctgatgtaaaaatagtgactcctgcttttgtttgtttgttttctgtttgcatggtagttcttactccacccttttactttgagctggtgggtattgccacatgtgacatggatctcttgaagataacagatgattgggtcttgtcttttaatccagattgccactctctgtcttttaagtgagacatttagcccattcacattcaagattagtattgatatgtgtgattttgatcctgtcatggtgttgttagctggttgttatataaacttgattgcatagctgccttatagggcctgtgggctatgggcttaggtgtgctt

SEQ ID NO: 538873 - DNA, 549 bp, Homo sapiens
gaaaaataaaaggaaggaagctaaattaaaagtcaaatattcgtgttactttctgatgctcagttctacttaacttattccccaggtgaaactttaaggaaaaaatttttattttttagttaacataaaacacttgtttgaaatctaaattcaggatggacacggtggctcacgcctgtaatcccagcactttgggaggccgaggtgggcagatcactaggtcaggagatcgagaccatcctggctaacacggtgaaaccctgtctctactaaaaatacaaaaaattagctgggcgcggtggcgggcgcctgtagtcccagctacccagtaggctgaggcaggagaatgrcgtgaagctgggaggcggagctttcagtgagccgagatcgtgccactgcactccaacctgggcgactagcaagactccgtctcaaaaaaaaaaaaaaaaaaaaagacatctgaattcatagcaaaatatgatgtttataaaacaagtttcatatgtcactgaaaaaaagtctccaaggatcctttgcctgtagaaatat

SEQ ID NO: 538874 - DNA, 575 bp, Homo sapiens
aaatcatcttctttttttcttttttaggaatctatcttcttttcctttcatggtcatattgcagtatgttttctgtatagatctaccactttagagcttacagaagtagaatatgtattcacatgtatcttggagtttatgcttttagtctcttcctttaaatagttttgccctccccagtgtttccttcccccatgggtatttaatcatgtatacgacaaaccagcactacatgtgattctcctagtaatgccatatggtttccctgaatgggaatagatggaggaatttattgactttgatcatcgcactataacaaatacaattatggcacaggaaacttcctactttagttcaagagaaaatggtgtaaccccctcctttggatgatttgtgtgtctgaatgaatcaggaggttttctccagatcccatcctctttcataygcaatcattgagatgacatgtccatatgcattactagtgaaggagttctctccacccccaccttgccaatcaaataatcactgcttaaaacagagggaatgatttagcagttgaagtgttggctttgaaa

SEQ ID NO: 538875 - DNA, 633 bp, Homo sapiens
tggtattgaaaatggtatttcatgaacacttgcatatttggatgcatggaaatctcaatggatagaattttctgttccatggggcaccagattctagtcattgatttttttacacattgagtctctgtaacagcccttttgcagataaagaaactgaaagttagagaaattaggtaacttacccaaggctacataccttgtaggtggtggagtctggattttaaccaggcctrtcttactttaaaggtacccttcagccgggcacaatggctcacacctgtaatcccagcactttgggaggctgaggtgggcagatcacctgaagtcagtagttcaagaccaatctggccaacatggcaaaaccccatctctactaaaaatacaaaaattagctgggcatggtggcaggtgcctataatcccagctacttgggaggctgaggcaggagaatcacttgaacccaggagggggggattaccgtgagccgagatcgtggcactgcactcccgcctggatgacagagtgagactccttctcaaaataaataaataaataaaaggtacccttctgccttaatagcatgggttaagtgttattcagatgaatcacagagcatatggaaaacagaacttc

SEQ ID NO: 538876 - DNA, 633 bp, Homo sapiens
tggtattgaaaatggtatttcatgaacacttgcatatttggatgcatggaaatctcaatggatagaattttctgttccatggggcaccagattctagtcattgatttttttacacattgagtctctgtaacagcccttttgcagataaagaaactgaaagttagagaaattaggtaacttacccaaggctacataccttgtaggtggtggagtctggattttaaccaggcctatcttactttaaaggtaccyttcagccgggcacaatggctcacacctgtaatcccagcactttgggaggctgaggtgggcagatcacctgaagtcagtagttcaagaccaatctggccaacatggcaaaaccccatctctactaaaaatacaaaaattagctgggcatggtggcaggtgcctataatcccagctacttgggaggctgaggcaggagaatcacttgaacccaggagggggggattaccgtgagccgagatcgtggcactgcactcccgcctggatgacagagtgagactccttctcaaaataaataaataaataaaaggtacccttctgccttaatagcatgggttaagtgttattcagatgaatcacagagcatatggaaaacagaacttc

SEQ ID NO: 538877 - DNA, 633 bp, Homo sapiens
tggtattgaaaatggtatttcatgaacacttgcatatttggatgcatggaaatctcaatggatagaattttctgttccatggggcaccagattctagtcattgatttttttacacattgagtctctgtaacagcccttttgcagataaagaaactgaaagttagagaaattaggtaacttacccaaggctacataccttgtaggtggtggagtctggattttaaccaggcctatcttactttaaaggtacccttcagccgggcacaatggctcacacctgtaatcccagcactttgggaggctgaggtgggcagatcacctgaagtcagtagttcaagaccaayctggccaacatggcaaaaccccatctctactaaaaatacaaaaattagctgggcatggtggcaggtgcctataatcccagctacttgggaggctgaggcaggagaatcacttgaacccaggagggggggattaccgtgagccgagatcgtggcactgcactcccgcctggatgacagagtgagactccttctcaaaataaataaataaataaaaggtacccttctgccttaatagcatgggttaagtgttattcagatgaatcacagagcatatggaaaacagaacttc

SEQ ID NO: 538878 - DNA, 562 bp, Homo sapiens
tgtcatttaatccaagtcttctctcctgaccaactcctttgactaatattcttaaaatctagtttcatgccatttaaccatcctgtttgttctaatttccctatagtgtgagatccctagctaaatgcaataatcttgatgtagtctaatcctcaaaaagggtatgacagactattataatctgtttattctgggttgatagcactagtgggttttttcgaggtgagggggaggaaggtgcacagtggaattacccaactgtaattccatatatgaatcttccagatatgaatcatattcacttgcactaacactaaactgtaccgctctcatttcttagtacctcaccagtaaaacmtcagattcatgtggggtaaatttccaccttataataattgactcctttctacagacagccgagggcttttgaaccctaatgctgctatccaggatgttattaagtacctacgtctccaaatggctgataagggaggcctctatatttttgttcaagtcagtgggaaatatactcatgaggacagggcataagaaaaaatactgc

SEQ ID NO: 538879 - DNA, 493 bp, Homo sapiens
tgatgaccttggaaaataaaaattatatttctctcacataagcactgtgtggtttaattaacatttacagtcagatactagagcttaagatgaaaactttatgagcacatgctatcatgattgcctctgcagaacagattaayacaccatccaacattttacttatccacagagatgctagctctttcaaaacatctttggtgcattacagaggtccagatgacacaccattggttgaaagagtcaatttctattactgtcatcaacagagaaatgaaattaagaggatgtatttcatttgaagtatcacaatgctgtgactctctctaatcattaaagccatgaatcagattttcaaaagaatacagagggaaataaatccataatggacatgaatgaaatcactaataattttttaaaaactgctgaaaaagacactgcttatggaaacaatcagacagaaccttaaggaaaatgcacactaattactagt

SEQ ID NO: 538880 - DNA, 638 bp, Homo sapiens
gctggggagaggggataataagaaattttgttcaattggttttacaacatggaaagacttctggagattagttgaacaaatatgtgaatgtacttaacattactgaactgcacacttgaaaatggttaaggtgttcaattctatggtatgtatattttaccayggttttagaaatctctttcaacccacaataagacaaacaactcaatttacaaaaagtaaaagatttgaagagacacttcacaatggaaaacatacaaatggccaaaaatattagctgcattgccagttatcaggaaaatgcaaattcaaaccacatggaatatcactactttccattaaaatgactgaaattaaaaatacatatcatgctaagtattggagaggatttgtaactttttgtgtgaatgcaaaataatacaacttagaaaactgttttttcttaaaaagttaaacttacatctgtcacttcactcctagatatttctaaaatatatttgtgaccaaaggattatgcaatcaagacttatgtgctgtgtgcattcttaaaaataataaatatgtaaatataataataaatatacatctgtagatatcatacatattctacatattatgtgtttgttcattttccactt

SEQ ID NO: 538881 - DNA, 505 bp, Homo sapiens
ggggccactattccaaagggcacaagtggtaagccttggtggcttccatgtgatgttaagcctgtgggcatgcagagtgcaaaagtgaaaaaggcttggcagacacctgcctcctccttcaccttcttccttgattgttacctccctgaggcttcaccagaagccaagctgatgtcaacaccatgcttcctgtaaagcctgtggaactatgagccaattgaacctcttttctttataaattccctagtctcaggtatttctttatagcaatgcaagaatggcctaatacaggccactcctaaaagcagccttttttgggaatatgcagggcttgaaaaattcaggttagctgtttcttatacaattttttwaaaatgttcttgacaatggtcatttaagtttcagtgttcaggaacttactacttcacaagtagcccagtgcagttgtgggaagtgctaccaaccttataatttgtcccccagtaactttctaatctattattta

SEQ ID NO: 538882 - DNA, 648 bp, Homo sapiens
gctggggccactattccaaagggcacaagtggtaagccttggtggcttccatgtgatgttaagcctgtgggcatgcagagtgcaaaagtgaaaaaggcttggcagacacctgcctcctccttcaccttcttccttgattgttacctccctgaggcttcaccagaagccaagctgatgtcaacaccatgcttcctgtaaagcctgtggaactatgagccaattgaacctcttttctttataaattccctagtctcaggtatttctttatagcaatgcaagaatggcctaatacaggccactcctaaaagcagccttttttgggaatatgcagggcttgaaaaattcaggttagctgtttcttatacaattttttaaaaatgttcttgacaatggtcatttaagtttcagtgttcaggaacttactacttcacaagtagcccartgcagttgtgggaagtgctaccaaccttataatttgtcccccagtaactttctaatctattatttataatgcaagatgagaataaagtattttagtggccagaatcagagaaggaaagacaccatcttagtttaagaaaatattctctaaagcaatttaagtgtggaaggtgaatatgttctgcattttaaaaaatctgtaagaac

SEQ ID NO: 538883 - DNA, 548 bp, Homo sapiens
tatatcagtctaaataccccaaactcctcattcctcagccatctgtyactggctatctacctgctactccctcttcctcacctcttcttagagaggtcaactgagtccctttgtctttttgcaattctatccccatgtgctcagcataagaaaggtccagaaagctgaaaaagaaagaaagaaagaaagaaagagagagagagagaaagaaaaaaagaaagagaaaaggaaaaaagactctcctttagaaagtgaagtaaaataaaagatcatacctgtatatattcccatttttatcccatctacatttgaataactacttaggcagatctccattcattcctagaaagctttcttaatgggctttttacttttaaaatataaagcatagaccctgcataaaaatcaacgtctttgaagaaatttgtcatcacccatcagtcaaaactctgcaatgatgacgaagtgggaaaatttaaaatgctctgtgggggagatggaagtgcatctaggaagaacaagttctgaagaatgagttgagtggtggg

SEQ ID NO: 538884 - DNA, 640 bp, Homo sapiens
tctgataaccataacagctgtttgcttgggattctcaaaaataatcccaaaaggttaactagaattaaccatctttcacaaagactgaagatcagtttcaaataaactcaatcactggaaaaagtgataaccactgcccaaaaggaaaaaaaatatatagactgtctaggaaaataacatcatagcctcaaatttctttaaaacggtttatataacattatgtaatgttgtacatttaagaaataattaccaggcattatcaggacaaaaacaggtaaccaaaaaccraaaggaaaaatataaagaaatagaccaaaaaagtagagctattagaggtattaaacatggtatttaagatatttgtgattaataagcacaatgacattaagtaaatttttaaatttccattatacttttttaattaaaatgcacaatgacaatatgacaaaaattttaaatttccattataaagtttaatttccattataaaattaatttccattataaaatcagaacttcagcagataaataggattttttatctttaaaatcaaatggaagaatttgaatcttcatagcaaagtctttgagaactaaactgagatttgaaaaactaaacacgaggtgaaagagaatttgc

SEQ ID NO: 538885 - DNA, 610 bp, Homo sapiens
tgccattaggtcaggagaaaaacttccatttttgaaattgtatagcatagacagtccctgggatcaaaaggagacaagcatgggtatggatcttgtctgcactacttaatagtcagsaaggtacttaagtcctgggcccgtttcttcttctgaaaatggaaacgatgcaaattaaatggcataaatgaaggtaaagatgcttccctttcagaacctttgtttctgcctagtgttcactccagggccacagatggcctgctagttgatgttaatgccattctttaactaccccttgtgtgtgttgtttgttcattaatgtggatgaatggttccacaattccaccagggactttggtaggtgttggatgagtgtgtaaaggagggagaaggtgttatatgcaaagctggtaacagagaatagggacagcccaatgctttgtataagaagagcttgataagggtttgtttgtagaactaaatatcaagaagaaaatcttccaatgaggatactgcagaatgagaagctgttagggccaactctgtaaattctcacctgacagtgattttgcagactaacaaatgtttccattttcgcttttccccattgtga

SEQ ID NO: 538886 - DNA, 464 bp, Homo sapiens
agctggaaccaagacggtcactgtgtggaatgacaataagcacttctctccagtacttgatcctgagagttagaggatattagctgagtctgggaggagtcatgtggtgttgaacygtgatatctgccccagcagcagtcatgtggtgttgaactgtgatatctgccccagcagcatcttgccatcccctccccggcactgtgtctgccaccattccctggcagccagacatggctgctgcttgctccatatgaaattactgacccgcttttcacagtcatctgggccctagagacctggctgtttcttatccccaggcttataagccgagcacgaggcttgaggcagggagaagactcacatgaggtcacatgctgacctttctacagccagccctgctgaaaatagagcccatgacttttacttctgggagttcagacctgatggcatgtgccacgcccctt

SEQ ID NO: 538887 - DNA, 464 bp, Homo sapiens
agctggaaccaagacggtcactgtgtggaatgacaataagcacttctctccagtacttgatcctgagagttagaggatattagctgagtctgggaggagtcatgtggtgttgaaccgtgatatctgccccagcagcagtcatgtggtgttgaactgtgatatctgccccagcagcatcttgccatcccctccccggcactgtgtctgccaccattccctggcagccagacatggctgctgcttgctccatrtgaaattactgacccgcttttcacagtcatctgggccctagagacctggctgtttcttatccccaggcttataagccgagcacgaggcttgaggcagggagaagactcacatgaggtcacatgctgacctttctacagccagccctgctgaaaatagagcccatgacttttacttctgggagttcagacctgatggcatgtgccacgcccctt

SEQ ID NO: 538888 - DNA, 519 bp, Homo sapiens
taggctaagtcatcaaaggtcatacagattctgtgtgatttgtttgggacacctgctcttagaacccagctaccattctgtaaagaaattcaaagagccacatggaagggccatgtataggtgttccagcttacagcttcaggttctagctgacagcatgggtcaaccaccagttatgtgaatgaactggctcatagatgattccaactaagtcatcccagtctttgaatctttccggctgaggctccaggtataagaaagagagacaagccatcctgctgggccttttctaaatttctcgtgctcagaatctgtgaacatagtaaaatgctagttgtcttacactgctatgggtgaggtgatttgttttgggacaagcaaaaccagaattttctccacctgccttgattgttgttgtccaagtgtctcactccctccatagaggtaggatttgggcactaaagctgcagcccaaacccttarggttaccatccgttgagtgtttactgtgagcagtgg

SEQ ID NO: 538889 - DNA, 635 bp, Homo sapiens
tggaatttgaacccagaagagtataactctgaagactccatctttccttccttatcaagagaaatgttgtgagtgcagaagtcacctatagggatttgcttggcttcccttaacatagaaagcagaaaatttaacttgtgagctccttctctgcctttttagactctatttgctctatctcattattgacttggaagtgagagagtgtctctggaccactttgagtgctcagtgccaataatgtatgtgttaatgacactycctcctgcaccctgcataggcaacagcacagctacctgacttaatgagcagttcatcctaatcaaatgactaatggggaattaagaatgataagactggaaattttgttttaagggaaattcatacaggagtttttttcttttttggcaaaaaagacatattaagtctccttaaaataagcagcagtaaggtgtaatcttaatggatattgaatttcaggcactatctggcttaaaagcagagattggaaagggcttctgctttctcagttttgcctgttggcatctatgaaacctcagggtggcaggatagtaagagtagtagagttgaagtgaggggagatagaaaaagaaacagagagcaaaggagggtgt

SEQ ID NO: 538890 - DNA, 593 bp, Homo sapiens
tggaatttgaacccagaagagtataactctgaagactccatctttccttccttatcaagagaaatgttgtgagtgcagaagtcacctatagggatttgcttggcttcccttaacatagaaagcagaaaatttaacttgtgagctccttctctgcctttttagactctatttgctctatctcattattgacttggaagtgagagagtgtctctggaccactttgagtgctcagtgccaataatgtatgtgttaatgacactccytcctgcaccctgcataggcaacagcacagctacctgacttaatgagcagttcatcctaatcaaatgactaatggggaattaagaatgataagactggaaattttgttttaagggaaattcatacaggagtttttttcttttttggcaaaaaagacatattaagtctccttaaaataagcagcagtaaggtgtaatcttaatggatattgaatttcaggcactatctggcttaaaagcagagattggaaagggcttctgctttctcagttttgcctgttggcatctatgaaacctcagggtggcaggatagtaagagtagtagagttgaag

SEQ ID NO: 538891 - DNA, 635 bp, Homo sapiens
tggaatttgaacccagaagagtataactctgaagactccatctttccttccttatcaagagaaatgttgtgagtgcagaagtcacctatagggatttgcttggcttcccttaacatagaaagcagaaaatttaacttgtgagctccttctctgcctttttagactctatttgctctatctcattattgacttggaagtgagagagtgtctctggaccactttgagtgctcagtgccaataatgtatgtgttaatgacactccctcctgcaccctgcataggcaacagcacagctacctgacttaatgagcagttcatcctaatcaaatgactaatggggaattaagaatgataagactggaaattttgttttaagggaaattcatacaggagtttttttcttttttggcraaaaagacatattaagtctccttaaaataagcagcagtaaggtgtaatcttaatggatattgaatttcaggcactatctggcttaaaagcagagattggaaagggcttctgctttctcagttttgcctgttggcatctatgaaacctcagggtggcaggatagtaagagtagtagagttgaagtgaggggagatagaaaaagaaacagagagcaaaggagggtgt

SEQ ID NO: 538892 - DNA, 594 bp, Homo sapiens
aattaaatggcagatggatatgtaacatcttggtatgtgggcagatttaaaatctaagtgttcacatttattaattctaaaaaagcataaatttccattgatttgaatcagtgcaaacacacaatgtctacattattctacttttccaatgtttctaataaggagattttttttctctgatatgagcagaagcatatcaagtttagggctagaaatttgggtctccaaataaaaatctttgcaggagtcatgatactcttttggctatttcttttgcatatgcttttgtttcgtgagccttcctgcttcttgatcygaccttttcagtaatacattaaactgtcagtttctagtgcttatttggattattttcagaccgagcacatagattttatagtaagttgttataacaccattttgactccttagtaactctttctcatcataataatattcgcattatatggaatcatatgtattttgctgggccaggataagatgaaggtgtaatacagagaacgtgttttaaagccatttatgtaaaaatgagaatctggatgaatgccattgccgtccagctattgacctgcagga

SEQ ID NO: 538893 - DNA, 649 bp, Homo sapiens
ggttttgttaaatccatatccttcaaatggccttgcacatataacagtaaggacattcagtagttcaatgaatccttcttgaatacaagaattatagaaagaaaccctttctcccccgcgaagtttgcattgtgataaagcagcttgaatttttcccctgagttgggacaaaggcaggtacattgctcccattgcaggtatagcctcaatttctagtccattgggaccaacaagggctaatggcaaagacagaatcagaagtgtctcctttgtgctgaatagtgatgtgggttaagacaccacagaatgagaaagcagcttccttcccactctagggggcraaaaggaggcactcgctgcagtggaaacatttgcagaagatcaaacaatgctgtaatcctttaagcttgataaaagcttttttcatgtgtgatagattacaattatggtgaaacgtactataaaaatattcttcacatgttaccagacgtcttcatcaggtttgcaaacatcaaagatttatcttagtcttttgttatttcaatctcaaatgctacctccttcttggctactttatgattctccttttgcaaaagaatcaagcaaaggcatacggcaatttacaagtcaaggtatttaagattagcat

SEQ ID NO: 538894 - DNA, 590 bp, Homo sapiens
ctggatatttagatcaataattcttcctgaatgatgaaataattttactcgctaatggtgacttttagaaaaaaatacctataagctaagctgtaagttggtcctcattgcaggttattgcagattctacaaggcccaataatacatacatatatatatatatatatayacacacacacacacacacacacacacacacacatatgcatatatgtgtatatatgtatatatgtatatgtatgtatatatgtatatatatgtgtatgtgtcagagaaaaattaaaatattaagaaagttgaactgagaaatccaatggaggataaagaaaatagctgagggataaacacaaaaatccttttttccctggagcactacaccctgctataaaacgtaatgaaaaatgagccccaaacaagctgtttcagttggcagaaagaaaccaaggcatttgtacagcatcttcagtatgttctagtaactgatttactggaaaaagtgaagcatgattgaaaggcagacataaaatatgtcaatatgtctagaaatgcatttatgcaacaactaggtgaaagcagttatcagatactca

SEQ ID NO: 538895 - DNA, 634 bp, Homo sapiens
gatatttagatcaataattcttcctgaatgatgaaataattttactcgctaatggtgacttttagaaaaaaatacctataagctaagctgtaagttggtcctcattgcaggttattgcagattctacaaggcccaataatacatacatatatatatatatatatatayacacacacacacacacacacacacacacacatatgcatatatgtgtatatatgtatatatgtatatgtatgtatatatgtatatatatgtgtatgtgtcagagaaaaattaaaatattaagaaagttgaactgagaaatccaatggaggataaagaaaatagctgagggataaacacaaaaatccttttttccctggagcactacaccctgctataaaacgtaatgaaaaatgagccccaaacaagctgtttcagttggcagaaagaaaccaaggcatttgtacagcatcttcagtatgttctagtaactgatttactggaaaaagtgaagcatgattgaaaggcagacataaaatatgtcaatatgtctagaaatgcatttatgcaacaactaggtgaaagcagttatcagatactcatgaaagagaaagttacaacgattgagattaaaaaaaaaaaagaatga

SEQ ID NO: 538896 - DNA, 611 bp, Homo sapiens
aagctgtaagtagagaaacaaaatagctatattttacacagattaatctgacagtgatgtgtaaggtagctcagtataaatttagaccaatatccttcttttgcacctcctcatatagcactaatatagcactgtttttaatgctagtctacaatgacagtaatagcctgagccataagtgggagaggaggggaaatgatgttcactgagcattgattttgaacsaagctctgtactggacatttcattctgttttgcagatgaatgtttataatttttagcacacaatcacaataactgtgtaacactaatgatgaaagttttaatgatgtttgctgtgctaaatttactaaggttaagtgtggactaagaggaattaagatatttttaaaaacaagggttgaaataaagagaacttatggaacaacaatactcagtaagaaagtttaattaaccaaataacttaaattcaaataatgcatcttaaacattttttgatttatgtgtactataatagtgtcttacacacacacacacacacacacacacacacactttaacttacccagagactcatgttggggctgagccttcatgatgctctcctgctc

SEQ ID NO: 538897 - DNA, 574 bp, Homo sapiens
ttatgaaatcccacacctgggtaaagttgtcccttgttgttgttgttctttttcttcttyttgctttttttttttttgagacagagtctcgctctgtcacccaggctggagtgcagtggcacgatttcggctcactgcaacttccacctcccaggttcaagtaattctacttgcctcagcctccagagtagctggtattatgggcacctgccaccaggcccagctaatttttgtatttttagtagagaaggggtttcaccatattggtcaggctggtcttgaactcctgacctgagatgttcaaaagtgaaaatcttggtggcgacctctacttcctcccaggacgctgcctcccatttgtacctctcctttccagcagcggcctggggtgagctgcctggcttccttgcttccccacaccacctgctcctctctgccccacactcaccagtgctgccacttctgtgaccatgagggaacctgaagccctggccttccctcagctcctaccctgccagcatgcctcctgggcacaggccattgcagcagccaaatgaatgggcctctgggctct

SEQ ID NO: 538898 - DNA, 574 bp, Homo sapiens
ttatgaaatcccacacctgggtaaagttgtcccttgttgttgttgttctttttcttctttttgctttttttttttttgagacagagtctcgctctgtcacccaggctggagtgcagtggcacgatttcggctcactgcaacttccacctcccaggttcaagtaattctacttgcctcagcctccagagtagctggtattaygggcacctgccaccaggcccagctaatttttgtatttttagtagagaaggggtttcaccatattggtcaggctggtcttgaactcctgacctgagatgttcaaaagtgaaaatcttggtggcgacctctacttcctcccaggacgctgcctcccatttgtacctctcctttccagcagcggcctggggtgagctgcctggcttccttgcttccccacaccacctgctcctctctgccccacactcaccagtgctgccacttctgtgaccatgagggaacctgaagccctggccttccctcagctcctaccctgccagcatgcctcctgggcacaggccattgcagcagccaaatgaatgggcctctgggctct

SEQ ID NO: 538899 - DNA, 574 bp, Homo sapiens
ttatgaaatcccacacctgggtaaagttgtcccttgttgttgttgttctttttcttctttttgctttttttttttttgagacagagtctcgctctgtcacccaggctggagtgcagtggcacgatttcggctcactgcaacttccacctcccaggttcaagtaattctacttgcctcagcctccagagtagctggtattatgggcacctgccaccaggcccagctaatttttgtatttttagtagagaaggggtttcaccatattggtcaggctggtcttgaactcctgacctgagatgttcaaaagtgaaaatcttggtggcgacctctacttcctcccaggacgctgcctcccatttgtacctctcctttccagcagcggcctggggtgagctgcctggcttccttgcttccccacaccacctgctcctctctgccccacactcaccagtgctgccacttctgtgaccatgagggaacctgaagccytggccttccctcagctcctaccctgccagcatgcctcctgggcacaggccattgcagcagccaaatgaatgggcctctgggctct

SEQ ID NO: 538900 - DNA, 630 bp, Homo sapiens
cacctatgattggcatgagatattctccaggagggaacttttctctgcgttttttctttgtgattccttattttccatgactgttcattcactgtcatgatgtgacatgcagactttcatcttcactgtatatgcttcggtgtggctacctatcaaaatctgatacctaattatgtcttctcaaatttgtgaaagggagaaagcataaactttggaggatttagaaaacttaaaacgacttttttttttagctctaattaaagatctaattaaagatacatcaaacttttcactgtcgagcctcagcattttagtaagctgtataaaccaatctctagtatcacgactacatgaggtttctatcatattttatactattgttaccacggtaaattgggttaaaagttcctggctatttgaatagcacaatccctgagacattttattaaaaatgtttgcgggcccatcaacgcagataaaacaatctaccagttattaattatgtgtttaattcagttattrtatagttcccagggacttttattagtaaataaatttatttattcacatacctgttttgaaaaaattgccaaaccacatgcttctctttctgaagttgctttcgagtct

SEQ ID NO: 538901 - DNA, 563 bp, Homo sapiens
tatccactgtgtgttttttttttttttttttttttttgcagcccagaagtcttgtatttattttattttatttttttaacatctactatgccatgagttcatacgttccagcagcaggctccttccccttggttctcacaaagttgcacttctcttggtagagcaggctggcacttcagttgaactctttggctttctttttctgatcattttccttcatgttttttaggaagttatctcagctcttggagtgcttaatgtgctcaatatgcacattaattctcttggcaagaatcttccccttaacttttttgtttacaacagtaccaacggcatgctggggaacactgcagactcttccagtttagccatggtaacacttgtggggcattctttttagagcagtacccattcccttagatgtctacagcatcacctttctcatagattctcatatacgtggccaaataaacaactccatgttttctaamaggcctagagaacatctatcgggtgcctcttctctttccctttgtgtttgtcattttggtgaattactggaa

SEQ ID NO: 538902 - DNA, 633 bp, Homo sapiens
cttgtccccttcatctcctgtattctaagattattctaaaggatggtcactggtactgggcagagctgaggcaaagaaaccattctgctaaagggaattcttcagtgcagtcccttccttgacaaatggtgcctaaaagcattctgctaatttgcctgtccaaacaaccgtgatgttaccactttcagaagccttcccccagagcccctcaaacatagtgttaataatcccttcaactcggytacctctatacagagtatacattgtatttctagaactgcacctgcccaacatctactccagaagattcaaggactgaaacctctccccattcatcattagacctcgacacccagcacagaacctggtgcattaaaggtgctcaatgcatatttgtggaaatgactcatcaccatcatttattcaggtgcttttaattataaaattgttcaggtgctttcaattataaaattgatagatactattattaatgctactaattaccaaaactgtaccaaacatagctgatgctgggttaaaattatgggaaggttgattttatatcaacataaccttttgaacaattagaactgcctccatggaataaactcagcatcactgaaagtatgtgcc

SEQ ID NO: 538903 - DNA, 626 bp, Homo sapiens
aagtgtaaagttgtcttgagaaaaactgttctagctatttaatcatttgcaagagaatcagatcaattgaaaacactgagcccccgttttagtggttaagcctttttaaaagtccaatgcccaatattcatcaagactttgaaatcataccgctgatagaaagcttttttgtcaccttcctgactcccatatgaatgwcagtagcatttcatcctcaaacatggtgttgggcttttgtttgaggtcagtagcatcttttcttttctaggcattttaggtaaagtaagagataccaaatattcacacatgccattttagcaacctttgagatttacattttttaaaaaaatttcttggtttattcatataaatcatgtttatagattttctaatattaaatcatactagctttctgggaaagaaattccttcctgtgggtggcttccctggatattaattaggttccttcctatgcctcatcatgatgaaattcttgaccgtgcacaatcacccagtggttaagctcgggtttctcatgactttcacacccttggccacttgcttccttcaaaagccccaaggccccgctgtgtcctgggggacttcaggttcgcagaagcagcctg

SEQ ID NO: 538904 - DNA, 583 bp, Homo sapiens
ttggggggctaggggagggagagcattaggagaaatacctaatataaattttgggttgatggcacatatatacctatgtaacaaacctccacgttctgcacatatatcccagaacttaaagtacaataaataaataaataaataaataaataaataaataaataaataaaaatctagatgaaggcaaaaggaaagaactaactttttactgagtaccaaacgaggatcacgtcttgtactgagtgcttcaaatacattaactcacttaattcatacaacaaccctttaaaaatagaatcattatcccctttttataaattaggaattggaggatmaaaaagattagcaagatgactttctgaagattatatagccagtcagtgtcatagccaatattcgactccagctaagcctttcaaacccctgctcctagcagctacttcctgagctaaaggtgaagagaacaggaacccaggtgggaagtggtggtaaaggagaggagggtcagaactaagtaatattatatagggactgtccactgagcatccatctgcaggaaatgaaaagcctgttctggtctcta

SEQ ID NO: 538905 - DNA, 565 bp, Homo sapiens
atggacccagcagacacactgtgagccagactccatttattattggcccccagaaacctccgctctaacagaggctccacgatgatatttcgggtcattgaatataatctcaattttgatgctttgtcaatagtacttgaactgtctcattattccctgttcctcagtgtacagtcayccaaatacatggtcatcagtccctttggaagaggactaggggaatcattaacaaatgtatctgctatagtattacggggtcctccctccaagaaacatggccacctcttctattaatggttttcagaaaactgactcaggtccaggaactgagaaaagatagtgacttttggggggaaatcaaccattctccattcttgcctctttcttattgtggatttaatcagcacccttatttgcatccatctggtttgtcgatagggacattgcactctattagacatctccacaagtccctgaaagtcaagccccctttgatggtcctcagaccttgcctacaattaaaataactatggccttctggctcctggttgttaaacacctccag

SEQ ID NO: 538906 - DNA, 643 bp, Homo sapiens
accactgtaatagccttggatcaccatgtatcaatatagctaaataattcaggggtttgtacagtcattctcaagctttatcatcacaaaatgaaataatcttatctgtaaatgtgaggatgccaaaattagaaagtgaaaccttatcacatgagactgcaacatttcgttccacaatgtttcccatagatgaattttaaatgataaacaaggctagcaaaattatcttatcttgcttcttttatcttagaggcatttattatttaacagtggttatatggtcagacgagtaatggttcaactggatttttgttctccattttctgaaaaacttttaaagagagtctcttttttcctattttataattwattttctcttatcttgccactgcctaataagcacatgacatttaacttttcagtgatatcaactattgctgttgctgatgatgctattattgctgctgtacttattgttaccatttttgattacatgctatgtgctagtctttttaaaagcattatttaatttaacactaacaagcaccttgcacaatgaatatggttgtagcttgagaagtaacttctaagccacattgctattgtgatggcatgttgaacccaaaactctttatttccaaat

SEQ ID NO: 538907 - DNA, 643 bp, Homo sapiens
tggaccataaaagaaattctcaatataggatttacatcaaggattcaaatcaagaaacatgttctttaattacagtggaattaaatgagaaatccctaatagaaaaatataagtaaaatgtctaaatatttggaatttaggtatttgtacatatactcaaatgacccatagggcaaagaataattcataaataaaattagtattttgaactaaacagaaataaaaaatagagaatttacgttattaaaaacgtgtagcactcagtacctatattagaaataaggcctcaacttaatgaccttagcttgcatgrtaagaggtagaaagaggagaacattacactcaatgtaagtagaaagatcacagatgaatagatgaaatagaaaacagcaaaagtaatatggaaaattgattaaacacaatcctaattctttgcaaaattatacacagaataatcagtataaaaagagaatacataaattatgaatattgggtatgagaaagatgacaacactatagcctataattatcaaaaaaaattattatgacaatttcatgccaataaattttaaaatttttaggaaataaacagattttctgaacaatacaaactatgaaactcacaaaagaagaaacagataac

SEQ ID NO: 538908 - DNA, 603 bp, Homo sapiens
ctggggtggcctggcgcaccacgcatcgggttcaaacccgcgcgggccctgcggaggcgccggtctgggaccccgggctggggcgcgggagccaccgcagctccggccacttgcggctggtgtcgggaaaggaaccgggcgatgtcgtagttctgatcactggcgcgccactccccgggccacccgcctccccgccatgctctcagcgtaacgggcagccgcgctaacttcccgaaactccgcggagagaaaccctgccccggcccgctcctccccgaggcgcgctccggggacggaagtgggtgggagccgcggccgcgccgcgcctttgttacggctcggggaccccgcgggccgagcgcagcgccccgtcgcagcggcccgggcacccgccggcctccacccccgggaggcgcccccgttcccgcttcggtccccggcagggcctcccgcagccagagcgagactgacccgcgcytcccgccccggagcagagcgcagcggcgcgtcctggcgtctgccggccccggctccgcgcgcccctcggccaccgcgcggagggactttgctcacctacccggctcttccacacctcccggtggc

SEQ ID NO: 538909 - DNA, 640 bp, Homo sapiens
acattcagtctcttagggatcaatacatgtatttgtccattcatttatttatttgtcagttactcccaaaagaatgtgagctccatagagacagggacattggtttatcattgtacctatagtgcctagaacagtactcagcacacatgggcaaccaggagtattgactctagaaaaaaactggaatccttcacattgtttttggtctgggtgtgtaggctgaatcatagtgcagttatgttttttcaatagtacagtaatttgaaaaaatctttctgctccactaaaggtttgccatttgacggtcaagatttatcttagatttggctgggcgcrgtgactcacacctgtaatcccaaccctcagggaggccaaggtgggtggatcacctgaggtcaggagttcaagaccagcctggccaacatggtgaaactccgtctctactaaaaatacaaaaattagccgggtgtggtagcacgtgcctgtagtcccagctacttgggaggctgagacaggagaattgcttgaacccagaagacagtggttgcagtgagctgagatggcgccattgcactccagcctgggcaacagagtgagacttcatctcaaagaaaaaaaaattatcttagattttacttct

SEQ ID NO: 538910 - DNA, 455 bp, Homo sapiens
agctggtgatggaaagagagtctccagccaccacagcacaaagcatgacatgcaaaggcatgatgacctctaaagatggaatggtgtgtgtgtgtgtgtgtgtgtgtgtgtgtgtgtgtgtaygtgtgttgagagagagagaagaatgaggaggaggaggaggagataagaagcataagttcatgatttcattaaattaacatcctcttgactgtctcaaaagtatcagctcacaagaaggaaattttaagtccttgcaactaaaatttcctttccagacaaagaagcttagcatagaagttgtgcaaaagtgtgcctatctctttcctaatgatcacgtcggaaaagcagccaaaaagtaaaacattccctctgggcaccagttactcaaagatggtttcagatcatcagagctgggctggatgctcccaccagcaggacttcctccttgctac

SEQ ID NO: 538911 - DNA, 455 bp, Homo sapiens
agctggtgatggaaagagagtctccagccaccacagcacaaagcatgacatgcaaaggcatgatgacctctaaagatggaatggtgtgtgtgtgtgtgtgtgtgtgtgtgtgtgtgtgtgtatgtgtgttgagagagagagaagaatgaggaggaggaggaggagataagaagcataagttcatgatttcattaaattaacatcctcttgactgtctcaaaagtatcagctcacaagaaggaaattttaagtccttgcaactaaaatttcctttccagacaaagaagcttagcatagaagttgtgcaaaagtgtgcctatctctttcctaatgatcacgtcrgaaaagcagccaaaaagtaaaacattccctctgggcaccagttactcaaagatggtttcagatcatcagagctgggctggatgctcccaccagcaggacttcctccttgctac

SEQ ID NO: 538912 - DNA, 649 bp, Homo sapiens
ctgcagattcagaagatgattccaaggctgcctttgtaccctaacaatcacaaggctcctagcagcttactctccataacgctccatgtagcccgagagccctgcatgctggagctcaccagacatccttataaaaatcccaagggccctttcctttggatgcaattcctcaactgtagaatattaaataactcgccgggtgtggtggctcatgcctgtaatcccagaactttgggaggccgagcgctggtagatcacctgaggtcaggagttcaagaccaacctgggcaacatgatgaaaccctgtctctactaaaaatacaaaaattagctgggcgcagtggcatatgcctgtaatcccagctagtagggaggctgaggcaggagaatcacttcagcccaaraggtggaggttgcagtgagctgagattgtgtcattgcactccagcctgggcaacagagcaagactccatctcaaaaaaaaaaaaaagaaaaaagaaaaaaagaatactatataaccccaggtgttgccaaagatgttcactctgaattgaactccaaagtcttccagaagtctgtttatcacaaaacagtctgtctccaaagtagaagcaaagataaagaactgtttgttgaatggctgactgat

SEQ ID NO: 538913 - DNA, 558 bp, Homo sapiens
tgacctgcctcttttcctctctgtactctgtaattgtcccttttctttttcttccttctttctttaacttattttgaaatagctttagacatacaaaacagttgcaaaaatagcacaaagatctctcatataccctttgtccagcttcgctaaatgtgaacatcttacataaccatagtactatgaccaaaaccaggaaattagtagtaatatgcaatactgttaactaatctacagacttatttgaattgctccagttggctcaggatccagtctatgacttctcattgcatgtgggtgtcatgtctccttaaaatcttctccaacctgaagcagttcctgtctccttgaccatcactgtttatctagttggtctgatytgggttggtctgatgttttttcacatttaagttcaggctacacaatctagggcaagaatatcaccaaagtaacgttgtgttcttctcatgcatcatatcaggaagtgtaggatattaatgtgtctcattactggtgatgttaaattaactttgagcccttggttaggatggtgtctgc

SEQ ID NO: 538914 - DNA, 455 bp, Homo sapiens
tctctgtgcctcagtttcctcatctgttaaatacgatgcctcatacagaatctgcatgggttaaatgaattctgtgaaagcctggggaagagggcctggcacgcataggtttcacgtaagtgctgtggtctgtggctagtctgtcatcgcccctccctcatatcccccccttcaccacatcaccacctaccatcccccagtcccctctttctcccagaccctccctctctrcatttgcccctaatgccgtcagtagcccccactcccaccccatttccttgctgcttgactgtatcagctcaagtcctggtggagaagagatgaaacagtccaaccaggtaaagtgaggagagcttaatgaagagcttatgtacaaaggcatgagtgggcgtgggcacccacagggaaagcacagagcctggggcccgccaccatgagagtgtgtgctcgcagca

SEQ ID NO: 538915 - DNA, 573 bp, Homo sapiens
aaatctatctcaggagccatgtgcaaaaccctgatttattctaaagcctagttccgaaaggaggtatgtttgttttcccccttaattatttgagagcatttctgaaagatactctttcctatgtcttattttcctggtattttgtagtatttgaaataagattatattcagaacattaacagcaatcaaaaagctaagtctgggccaggcgcagtggctcacagytgtaatcccaacccaatgggaagcgaggcaggaggatcatttaatccatgtcaaaaaaaaaaaaaaaaaaaaccaaaacctaagtatgcccaatattggaaagacgccaactgttcctaaattgatctatcgatgtgatgtaattcctgtcaaaatcctaactggttttttttttttcatgaaaatagacagttgattacaagatttgtatgaaaatgcaaagggccaaaaatggcccataccatcctaaggaaaaacaaggtgggaagacctttttcagcagacatcaagacttaatggccagacacagtggctcacacctgtaattccagcactttaggaggccga

SEQ ID NO: 538916 - DNA, 573 bp, Homo sapiens
aaatctatctcaggagccatgtgcaaaaccctgatttattctaaagcctagttccgaaaggaggtatgtttgttttcccccttaattatttgagagcatttctgaaagatactctttcctatgtcttattttcctggtattttgtagtatttgaaataagattatattcagaacattaacagcaatcaaaaagctaagtctgggccaggcgcagtggctcacagctgtaatcccaacmcaatgggaagcgaggcaggaggatcatttaatccatgtcaaaaaaaaaaaaaaaaaaaaccaaaacctaagtatgcccaatattggaaagacgccaactgttcctaaattgatctatcgatgtgatgtaattcctgtcaaaatcctaactggttttttttttttcatgaaaatagacagttgattacaagatttgtatgaaaatgcaaagggccaaaaatggcccataccatcctaaggaaaaacaaggtgggaagacctttttcagcagacatcaagacttaatggccagacacagtggctcacacctgtaattccagcactttaggaggccga

SEQ ID NO: 538917 - DNA, 529 bp, Homo sapiens
atgtaaaattgaagatggtggtgagggtctgaggatagttcacaagactgtttaacccatgcttagcttgaacctctgagccatagtgtcccctaatccctggcttgggctctgctgacaccaactgtaatgcagagaaatggggtggctttggggcctgggatggcctctgcaggctgtcctatcctgcctttccccatacgctcctgttgcaatcaaaagaaaacatagaaacaaatctctaaattaaatgttttatttgggaatcacagaatagcaatttggggcatacacacagactgaggtgggctttggtatgtctgaaaaagggaagcttgggagttttattataaagagaaatgtgggccagggacagtggcttaggcctgtaatcctagcgctttggaaggctaaggtgagaggatcacttgaggccaggagttcgagaccagcctggamaacatagcaagaacctgtctctacaaaaaaaatttaaattagccaggtgtggcagagcacacctgttgtc

SEQ ID NO: 538918 - DNA, 531 bp, Homo sapiens
cagaagcatggccgcctaggagcagagtggataactgttctgtctttcctgtgctcccagagatcttttcacctatggctgtcagcccacttccaaagggcactctgaggaacagtatctgtctgcatgatgctgtgtgagaaaaaagttctggaatcaaataagtttgggaaatactggatttttctatctcttctttgacatcatggtgtacattagaacattaagggttttgagaatttggaaacaaatattttccaaatctgtttggctttagaactctcttttgcacaaaacgtattaatcatccacactttaggagatactcctcttttgggttaattgttcacatttgggtggagatcatgacttcttcatttctgccagatgctgattggarcgtggtaggcattcagtaaatactttctgtaaatgaaatgtaaaatgaaaatggccatagggggttgattgagatgatgctagaagaagctatggtgtcatgaaggtaaagatgaacaggattgggttgga

SEQ ID NO: 538919 - DNA, 500 bp, Homo sapiens
tgctttcattgagctaatattccagaaccagtgcatgttacttttttgtttttgtaatttttaaagtttgtttgtaaaatgtgctaggagctccatttttagatagtctctggaaatgcagacacagtggaatcattttgtgatcacatactgaattattagagacagttcagaaaatgatgtggctttccaaaaaggaagctgacgctgattcccttctgataatcaaggaaaggcctatattaaggcaaaatatcagataaatgtattattttgttgttatcaattccatgactttttatatttaatctttgtgttttattttgcttcttttcagartgactattattattttagaacaaacaaaacactctacagtaaagttaacataaagatataaaattttatttactcattgctctttctttaataagaaaacttaaatttttaattgcaaaagcaatatgtgctcattattagaaaaattggcaacagaaaat

SEQ ID NO: 538920 - DNA, 512 bp, Homo sapiens
gtgctgagtgaatgtcatatccattgactattcagaaaaagtgtaattgtgggagcagaaacttatttgggaattttttttttttgtttgagacagattcttgctctgttgcccaggctggagtgcagtggcatgatctcggctcactgcaacctctgcctcctgggttcaagtgattctccagcctcagcctcctgagtagctgggactacaggtgcatgctactgcattcagttaatttttgtatttttagtagagaaggggtttcaccgtgtcggccaggctggtctcgaactcctgacttcaggtgatctgcctkcagtggcctcccaaagtgctgggattacaggcgtgagccaccatgcctggcctatttgggaaattttttaattgtacctaaaaatcaaaatcctttatcaccattgaaattagtgattatcttattctcatatattttggattcactgcccagtgataaaaagcagtaaatgttcagtatctgttgtagcgaa

SEQ ID NO: 538921 - DNA, 503 bp, Homo sapiens
ctggttctagaagtatttttctatctaaaaagaaattgcttttctcaaattattgtactaccattgtattagtctgttttcacactgctgtaaagacatactcaaaattgggtaatttataaagaggtttagttgactcagagttctgcattgctggggaggcctcrggaaacttacaattgtggcagaagggaaagaggcatgtcttacatggctgcagattagagagaaatgtgtgagaatgcaggaaaaactaccatctataaaaccatcagatctcatgagaattcactcactatcacgagaacagcatgggggaaaccacccccataatccaatcatttcccacaaggtctttcctaaacacctgaagattaccattcaagatgagatttgggtggggatacaaagtctaaccatgttatccgtgataataatttaactacttcgtggttctggaaacacctagaacattgaagttctgagttatcattgaccagaac

SEQ ID NO: 538922 - DNA, 479 bp, Homo sapiens
tgaagttggtagcttttgaaaccatgatttgcccttgcagccagaggatggattaaggggggagaaagggaagtagaaggagcttcttggctttattggaggggtttagttttacctctgctgagctggtaacatttgctctgaaatttcctgttatagattctccactttttttctctcctcctctctccaggaaaaggaaagggatagtcatgatgatcaagcattggggaagagaggaaggacacagaaaacaatctgttgactaacacaaccctttcccaggacaggaatgtaagcacatgtagatgcactcatgtacatgtgcacataaacaygcacacacaggtgcacacacacacacacacacacacacacacacacacacacgacttgctgtattggttttttcatgagctctaatttctaggagtggtgggtcttgattgtgccctaccctgcctttggaaattacagga

SEQ ID NO: 538923 - DNA, 479 bp, Homo sapiens
tgaagttggtagcttttgaaaccatgatttgcccttgcagccagaggatggattaaggggggagaaagggaagtagaaggagcttcttggctttattggaggggtttagttttacctctgctgagctggtaacatttgctctgaaatttcctgttatagattctccactttttttctctcctcctctctccaggaaaaggaaagggatagtcatgatgatcaagcattggggaagagaggaaggacacagaaaacaatctgttgactaacacaaccctttcccaggacaggaatgtaagcacatgtagatgcactcatgtacatgtgcacataaacatgcacacacaggtgcacacacacacacacacacacacacacacacacacacaygacttgctgtattggttttttcatgagctctaatttctaggagtggtgggtcttgattgtgccctaccctgcctttggaaattacagga

SEQ ID NO: 538924 - DNA, 545 bp, Homo sapiens
ggtttcgaattcagtaggtatccagtttataagctttcattttctttttgttttcagttgttgtttaatttataacatgccgagaagaaaactggatcacacaaggcttggcatgctttctctttttcttttcttcctccttgaggctttgtcctccacctcctaagtccctrccaggtgttctgtgtttagaggtaggacgggattgcttgaaagctcccacctttggagagccgggtgtgccacaacctggcaacccccgaagcatcactgaccacaggaaatgctatttgagggcccgacaatagcaaacaaaaccgaacaaaaccctgcctccatccagcgttattgttttagttatatgcaattataggggaggaaaaatacctcttcctctccaattgtagattcatggctgaggcccctataacaagagacagattaacaagagaaaaacatacaaatttatttaatatgagcttcgtgtgacacgagagttttcataaggaaacaacgacccatagaaacagttcaacctgtgtgtt

SEQ ID NO: 538925 - DNA, 334 bp, Homo sapiens
ctgaaaattctctgaacacaccacttctccaaccaaaattttctgcaagtctatgtaccaggtaccacacaaggcactaaagatacaaacatcgtacccttgaactgagtgtkgtagctcacaccagtaatcccaacactttgagaggtcaagatgggatgatcccttgaggccaggagtttgagaccaactggggcaacatattaataacaagaccccatctctataaaaaatgtaaaattagtcaggcgtggtggcacacacctgtagtcccagcgactctggagattgaagtgggaggatcacttgagcccaggagttccagggtgcagca

SEQ ID NO: 538926 - DNA, 480 bp, Homo sapiens
taatatcccttccacttacatagggtgtacatcaagtaaatgactttgtaattttacatcatcctcttcatttacatagggcgtacaccaagtaatcaatggaaacctctagagggtatttaaaccaaaaaaaattctgtattggggctcttgagcccctatgcttgggcccgctcctaccctgtggagcatactttcattttcaataaatttctgcttttgttgcttcattctttccttgcttttcttgggcgtgatgtccaattctttgttcaagatgccaagaacctggacarcctccactggtaacaattttatccccagagtctagttgtcttggcttgggattgcccccgttcctgagaaaatgaattgggtctattcacttctttgagaggtggtcctagatagcacagtaaaggacagaaaaagtcaaacaggaaagggagaaaggccaagacagtatactgaattagtgag

SEQ ID NO: 538927 - DNA, 579 bp, Homo sapiens
tgcctgctcagaccattgctccacataccctagctcataaatcctgccccaacactgcagagtggttacatcatccccaaacctcatgcaacaattcgatttggaaataaaaaggcaggtgttaattgactcactccctctgcccctttgtggtgcccctgaccctcgatagcttttaaccctgcagttaataaaagttttgggcccagccctagcacagttcctcattcattctttcrtaacatcagcaaattcttcctgagtgactgtaatgcacaagtcattggccagagccttagggaagagggttaggtggctaaagatgagcaagaagcattttaagcatttcatgccttaggaaagcctacagaggaggcccacaaataacgcagatttgggcaagagtcctgtgggcctccagagaagccagagttttagaagcatctccggctgttgagttgactgctcttgagtttgcctgttcagcacccatccctcctacaagagcaaccagattctcctttggagaacccacatcttcactaaatctatgtggttccaaatgtggttgaatgtctg

SEQ ID NO: 538928 - DNA, 569 bp, Homo sapiens
aaccctcccccgcaacgccccctcccygcctgctgctccctcttctgggcctctcctccctactgtctgctctcttaggctggtttgttatggcatgaaagatggctccgtggaataaagatgtttcccctctgatgagcacattgcagaaggtatgtcagagatcctagggctggggttgggcggtctttcaagaaagttgtttttcccccttctttccttccctcccttcttctccctcccctctctgcgtccttacccaccccctccttctttgcttacttattggaagagtaataaatattggccagacaggcccttctcacagttacaaagcctacctgtaagcgagctcaataattagcagtcctgaagatgatatatgactttcattaccctttgggactggagactaaatgaggacagagctaattgccgtgcaaagcagtttggcatgaatgagaaaaatgcaggccctgtctcctgccaaaaaagagccctattgctgctctgatctcaaggctggtttctgccgcaggagttcactcggtgtccataaatcacaggct

SEQ ID NO: 538929 - DNA, 637 bp, Homo sapiens
gctgggggacaggtaactgcagactagaaggaaaatacacaggtctcttccccagagccacgagtcatccctggtattgtcagcacagaacagtgtccaggggcataggcagtcccgcctgccacctcagtttccctgttcatgaaatgggcgtgcaggaccaagggcagccaggctcccttcaagctctgcctttctgaactcctgggattctgcttccacctctccccaaagttccactcaggcctccccctgccccagactccccacttccccaagcaggggaagamccactgagaccgaagttgggtccccactctgtcaggcctgaaccccacgaataggcagacgcaacagtttctcggggtgtgtacctcccttgcctgccagtgggcctacggagtcagtatttctcaaaatgtaagtacagagaccacaccaggctgtcggtaaattcattatcccattacgtgggcctgaattattcagtgctcttgaggctgcttcagtaacctgcccaagcacagtcaatgctggtgtgagcagactggatggagtcaggccaggcccggggcaggatgggtgccagtgtgacggatctgggcccagagaggctgccagggctggaaggcacagg

SEQ ID NO: 538930 - DNA, 637 bp, Homo sapiens
gctgggggacaggtaactgcagactagaaggaaaatacacaggtctcttccccagagccacgagtcatccctggtattgtcagcacagaacagtgtccaggggcataggcagtcccgcctgccacctcagtttccctgttcatgaaatgggcgtgcaggaccaagggcagccaggctcccttcaagctctgcctttctgaactcctgggattctgcttccacctctccccaaagttccactcaggcctccccctgccccagactccccacttccccaagcaggggaagaaccactgagaccgaagttgrgtccccactctgtcaggcctgaaccccacgaataggcagacgcaacagtttctcggggtgtgtacctcccttgcctgccagtgggcctacggagtcagtatttctcaaaatgtaagtacagagaccacaccaggctgtcggtaaattcattatcccattacgtgggcctgaattattcagtgctcttgaggctgcttcagtaacctgcccaagcacagtcaatgctggtgtgagcagactggatggagtcaggccaggcccggggcaggatgggtgccagtgtgacggatctgggcccagagaggctgccagggctggaaggcacagg

SEQ ID NO: 538931 - DNA, 517 bp, Homo sapiens
agtgggctatatcctattggggattctgaatccacatctggatgccagggaaagggtgccaagatcaaataattagtgatgtcggccagggatacaggagacaaaagtgtcagcattggctggagagtaaaaaacaccgtctgctcataatagcctggctagaggtagcctgggttcccacrtcccgagcaatggtgtggcaggatggtgattgcctgctaccaaaaggtaggcgacctgacttttcagctctcctccatcaggcgtggggaacttgggtgcttcaccccacttaaccgctctgcctctgtgtccccacatgtaagtgcctcagagggacatccaaggggtactggggaaattgtaggatgtttgaactgtacaaggtcctggaggctgtagcagacacagtgccccaaggcctttgcccttaccatgtctgtgctccgagcctgattccagccaccagcatctgcagttctttgagagctttcttcagcctttggtctgcctttac

SEQ ID NO: 538932 - DNA, 550 bp, Homo sapiens
aatgtataagactaaagacaaacggtcacttaaatgcgttaatgtgaacttgatacacttgacaaagggaaatagagaatctgatctaatctgaggggtcaggggaggcttctccaaagaagtgacgcttgagctgagacccaaggactgggtaagagtgaaccaggcaaaatggggggaaggaggtacttcccaagcctcccctggacaggtgttcagctttgccacctcctgtgtgtgtctcctgggaggaaacagaactgagaaggcatgctcactgaatgtatcctgttatctgttgctgaaatgtatcctttgtctgtatcacagccttatcttrtacaagattcatgtgttggtgagctcatttccaccagaactcagcccaggctgctgtgggatggaatcacctgcacccggatgttctttctgggctggtacatacaggcaaggcatcacggctggaggtggagggggcctaacccggggttgcccaggaaggggtttgcacatggattcggtgtgttgtggaggaaccgagggtggaaac

SEQ ID NO: 538933 - DNA, 648 bp, Homo sapiens
atagcccagtcaacatggtgaaaccccgtctctactaaaaatccaaaagttagctgcagtcccagctacttgggaggctgagacaggagaattacttgaactcgggaggcggaggttgcagtgagctgagatcacaccactgcactccagcctgggtgacagagcaagactccatctaaaaataataatartaataataattgttaccatggtaaatgttatgtgtactttaccacaataaaaacaattgaaaaagtgaatgaagacgtttccagaagattccagccccagtcttcgagttggccctgatgaagtctcagagacaaaccattttcagtgtgccctatccaaattcctgaccacagaaactgacataataaaatgattttgagtggtttattatgcagcagtagtaaccgaacaataggggcaagatggtcaggacatgcccagaggcctgtgggcaggcggcaaatctagggctgggactggtccatgactcagttatcaccctctattatgccctggcccttcctctcccccagcatggccctctgtcccaccagattttattacgattcaaaaccaagccttgcccctaacataaacagtctttgctcccactccttctcaccttggaaatctgct

SEQ ID NO: 538934 - DNA, 560 bp, Homo sapiens
atctacttatgcaattactttgctcttgtttctgctaagggaatygtgggtgttcctcacaactatctccaagaacttttggcattattagaactactcaaagccaaccgtatggatgatgaaagtatcattttctaagtaatgaaagcctactctacttttactctattttttgctctactttctcctttcataatagcaacaaatcatctcccaaacttatgtatctttcacttgaaaatttaaattcagcaaaaatctctaagagttactttggctggtagtatgtcaaattgttgctgttaccaaagatttaggttttctgaatgagcaaagcatattgcttatgaaaatatctgggagatagaacttggctaaaattctctctctctctttctgttttttgtctgaagagccttgaataatttcagaggaacatttcctctaagaaaggaatgttttacatttgggatggtagacaaaatgccttgtgaaaagagttcaaactacagggttgtcagaagaatcttattgttctgactccagttccttgacaccag

SEQ ID NO: 538935 - DNA, 584 bp, Homo sapiens
aagaaggaaaagaagggggaggggagcagtgctttagatgggcaaggcatttcactgaccattatcaatcctggcgtatttcctcactcctccatcccccattccccacagtgacagaaccaagcgagaccagagccagtgacccttgtgatttttcagacatttgttcccaaaagggattggcatgaatctctttctcactgtgttccactttggcattatgtgctgtgctatgaacactgaaaattagcccatcaacagtgcatatcttgaccatctcagtactctctagaaaagcaaagtytcaccttactttttaagtgttgttgccacgaaaggaagctgggtatcatccactcacctcctccccacagcaggtagagcagcaggatgcaggagcagcagcatttggagaatttgtcttttaagattcttcttcattagattaacactactcacatgactgatttgcagacaatccagtcaacattcttcaacttttaaggacaattaaacattagctattgtagatggtggacacttagaggctatgtgtcttcgtcttgacacgctcagtgctgaac

SEQ ID NO: 538936 - DNA, 580 bp, Homo sapiens
tgaagaacattaaatacagcacacggtgtgcaggctgccgtcgcaaagcattccatttgccctgcatgcttagagatgcatagtgagccgcctaactttacaaggaacagaactgtgtcacccttttcctgtctgtcatatgccctttatctttgccattggtatgtctcactgccttacagctacctgcttttttgccattgctgagccgtttgcttaagaaatgattccagggcccagaaggcarttggaacacagggagctcattcattgcaacaaaagttgaacacctactatgtgctcattacaagaggaacttcaatgaagaagggagaggtctgccttcctgggcctggggtctggtgggggagattgtcagtgataaacctaaggtgcactgtgactggggacatgacatactaaagtggtggcatttcacatgcgtccggaaaaacaggtagaattctgagaggggacaccagaggaggtggatattccaggtagaggaaaaaactcagttggtttctccctaatagaggaaaggtctttccgataacatgagctgtccctagacaaggtg

SEQ ID NO: 538937 - DNA, 600 bp, Homo sapiens
ctgatctgcagacctgtgaatgtcacactaaatgtccgctgttgcatgtcatagagttttgtggtggtttatgatacagcactattgcagaaatagatgaataattcatatgcagataaatactatgacctcttagatctgtgacctccttgcctctcgtgatcttttattctaccttaccttagccacccatttccatggtcatattctagactatgtcaccatcaataattacaccatgttgatatactgatttcaagagtctcactctctggctaccttctttcagctcacttgtttcgttaccccctaytcacataacaacaccttatgtgacctccaatcccctggtcccaccactttctcactttctagtatccttatcctttccttacttcccacctaactcagcttaagatttatggcccatcacaatcatcattcccttgcaaaaataataatagctagcacttacatagtgcatacaatgttccaagcgccgttctaagcactttacatgtggtcttaacttgagctcccccgaaaactgagcatgagtcaaaggcattcacataagtagtttatttgggaaatgatccc

SEQ ID NO: 538938 - DNA, 535 bp, Homo sapiens
aggggaagccccaaaacgacttggagagatgctataagatggtggagacatgcacatactcattcagtcctcacagcaaccccattaactaggtaccattgttaaccccatttttcagatgggaaaagtgaaacacagaggtgttcaatagctggctccaggtaacayaaccagtacaaagcaaagctggatccaactccaggcagccagactccagagtctatgtccttaacctccactctgtatgtctctcaatgtgtgcaaaccattgacttctttgcccttttttctctcccttctcacttgtcagtaaaatgaccttacaagttttaacacaaagtcagataaagccatttgaggcatgcaaaattcagtgggatatcattttaaatattgataagatgtttaatatcatcaaaagaatatgaaagtttgcaagattctatcaagttagaaagaaagtatatttatgtaacttaaggttccctgcaaattcaagtctgtacagttaaaagaaaaataaatatatatatct

SEQ ID NO: 538939 - DNA, 535 bp, Homo sapiens
aggggaagccccaaaacgacttggagagatgctataagatggtggagacatgcacatactcattcagtcctcacagcaaccccattaactaggtaccattgttaaccccatttttcagatgggaaaagtgaaacacagaggtgttcaatagctggctccaggtaacacaaccagtacaaagcaaagctggatccaactccaggcagccagactccagagtctatgtccttaacctccactctgtatgtctctcaatgtgtgcaaaccattgacttctttgcccttttttctctcccttctcacttgtcagtaaaatgaccttacaagttttaacayaaagtcagataaagccatttgaggcatgcaaaattcagtgggatatcattttaaatattgataagatgtttaatatcatcaaaagaatatgaaagtttgcaagattctatcaagttagaaagaaagtatatttatgtaacttaaggttccctgcaaattcaagtctgtacagttaaaagaaaaataaatatatatatct

SEQ ID NO: 538940 - DNA, 585 bp, Homo sapiens
gaatctggccgggtgtggtggctcatgtctgtaatcccatcactttgggaggccgaggagggtggatcacctgaggtcaggagttcaagaccagcctggccaacatttgatttcttttgtttgctatcctgtcttccctcaatactctaatctcagtgatgtctgtctctgttaagcatctatagagtctaagctacctatttttcatttgctgggttattatattaactttctcaatctctccctactacattattatgccattcatatccccaccacaamacagagtttgccctgtgtagcccctgttgacagtgtgcattgctcagtcatcttcaacatgatttccctgcagtggtataagattcagaagcctccaaagagagttacagctctcaaaagccggatgtggattgcattccaagttagaaacttttcaggtgctgaaatgccagatggaggaagccaagtggaacattggtggtgtcagaaagaaataataagcactcccaggatgacacttgggtttgtctctgtagcaggacgcttatctctcggcagtggtgactcacctggccataattg

SEQ ID NO: 538941 - DNA, 585 bp, Homo sapiens
gaatctggccgggtgtggtggctcatgtctgtaatcccatcactttgggaggccgaggagggtggatcacctgaggtcaggagttcaagaccagcctggccaacatttgatttcttttgtttgctatcctgtcttccctcaatactctaatctcagtgatgtctgtctctgttaagcatctatagagtctaagctacctatttttcatttgctgggttattatattaactttctcaatctctccctactacattattatgccattcatatccccaccacaaaacagagtttgccytgtgtagcccctgttgacagtgtgcattgctcagtcatcttcaacatgatttccctgcagtggtataagattcagaagcctccaaagagagttacagctctcaaaagccggatgtggattgcattccaagttagaaacttttcaggtgctgaaatgccagatggaggaagccaagtggaacattggtggtgtcagaaagaaataataagcactcccaggatgacacttgggtttgtctctgtagcaggacgcttatctctcggcagtggtgactcacctggccataattg

SEQ ID NO: 538942 - DNA, 585 bp, Homo sapiens
gaatctggccgggtgtggtggctcatgtctgtaatcccatcactttgggaggccgaggagggtggatcacctgaggtcaggagttcaagaccagcctggccaacatttgatttcttttgtttgctatcctgtcttccctcaatactctaatctcagtgatgtctgtctctgttaagcatctatagagtctaagctacctatttttcatttgctgggttattatattaactttctcaatctctccctactacattattatgccattcatatccccaccacaaaacagagtttgccctgtgtagcccctgttgacagtgtgcattgctcagtcatcttcaacatgatttccctgcagtggtataagattcagaagcctccaaagagagttacagctctcaaaarccggatgtggattgcattccaagttagaaacttttcaggtgctgaaatgccagatggaggaagccaagtggaacattggtggtgtcagaaagaaataataagcactcccaggatgacacttgggtttgtctctgtagcaggacgcttatctctcggcagtggtgactcacctggccataattg

SEQ ID NO: 538943 - DNA, 585 bp, Homo sapiens
gaatctggccgggtgtggtggctcatgtctgtaatcccatcactttgggaggccgaggagggtggatcacctgaggtcaggagttcaagaccagcctggccaacatttgatttcttttgtttgctatcctgtcttccctcaatactctaatctcagtgatgtctgtctctgttaagcatctatagagtctaagctacctatttttcatttgctgggttattatattaactttctcaatctctccctactacattattatgccattcatatccccaccacaaaacagagtttgccctgtgtagcccctgttgacagtgtgcattgctcagtcatcttcaacatgatttccctgcagtggtataagattcagaagcctccaaagagagttacagctctcaaaagccggatgtggattgcattccaagttagaaacttttcaggtgctgaaatgccagatggaggaagccaagtggaacattggtggtgtsagaaagaaataataagcactcccaggatgacacttgggtttgtctctgtagcaggacgcttatctctcggcagtggtgactcacctggccataattg

SEQ ID NO: 538944 - DNA, 483 bp, Homo sapiens
tgttccttaagccctggggcttttcaacatcccagagaccttaagttaaacagttaatagtcttttcttagaggagaaaaatggaaatgaaagatacattatgttatatgatgtatatatctggatcatagaattttagaactggaaggggtattagagagaatctaatttgaatgtttcawtttgcaatagaggccttgagaggtggaaataaattgcccaacatagattgtcaatggtagaattagacctagatttattaattcctgatgaaatgctcttcctattgaccttactctaggtgtttgttttaatttcaataggattttatggaacaggtagtgtttggttacatgaagaagttatttagtgatgatttctgagattctggtgcacccaccacccaagcagtgtacactgtacccaatgtgtagtcttttatccctcatccccctcccatcctttcctcgagtccccgaagtc

SEQ ID NO: 538945 - DNA, 661 bp, Homo sapiens
tgaagaaaattgttccttaagccctggggcttttcaacatcccagagaccttaagttaaacagttaatagtcttttcttagaggagaaaaatggaaatgaaagatacattatgttatatgatgtatatatctggatcatagaattttagaactggaaggggtattagagagaatctaatttgaatgtttcattttgcaatagaggccttgagaggtggaaataaattgcccaacatagattgtcaatggtagaattagacctagatttattaattcctgatgaaatgctcttcctattgaccttactctaggtgtttgttttaatttcaataggattttatggaacagktagtgtttggttacatgaagaagttatttagtgatgatttctgagattctggtgcacccaccacccaagcagtgtacactgtacccaatgtgtagtcttttatccctcatccccctcccatcctttcctcgagtccccgaagtccactgtataattcttatgccttggcatccttgtagcttagctcccaaatctaagttttttaatattatatttttaaattgttcccttatttaaagggtaatatcaggaaatcactatttttttaatttctagattaaacccagggagacctgagagctgctcttagtt

SEQ ID NO: 538946 - DNA, 512 bp, Homo sapiens
atttaattcaagattttaattagttgggttccagctagtttaaatttggtgctctggggcagggggcgtggcttggagccagtctcattctgttgcccaggctggagtacagtggctcgatctcagctcactgtaacctttgtctcctgggttcaagtgattctcctgcgtcagcctcccaattagttgggattacaggcatgcactaccacacccagctaattttttttttttgtatttttagtagatatggggtctcaccatgttgccccggctggtctcgaacacctgagcttaggcaatccacacacctcagcctcccaaagtgctaggattacaggcgtgtgccacygtgcccagccaaattttttttctataatttatgtattacagagtaatcccagatacagatccatgtgaagtaaaataaatacatgtgaaatttggagtagaaagaacagagattttggagtcagacagccggggctttgaataccagcttcacactgtct

SEQ ID NO: 538947 - DNA, 512 bp, Homo sapiens
atttaattcaagattttaattagttgggttccagctagtttaaatttggtgctctggggcagggggcgtggcttggagccagtctcattctgttgcccaggctggagtacagtggctcgatctcagctcactgtaacctttgtctcctgggttcaagtgattctcctgcgtcagcctcccaattagttgggattacaggcatgcactaccacacccagctaattttttttttttgtatttttagtagatatggggtctcaccatgttgccccggctggtctcgaacacctgagcttaggcaatccacacacctcagcctcccaaagtgctaggattacaggcgtgtgccactgtgccmagccaaattttttttctataatttatgtattacagagtaatcccagatacagatccatgtgaagtaaaataaatacatgtgaaatttggagtagaaagaacagagattttggagtcagacagccggggctttgaataccagcttcacactgtct

SEQ ID NO: 538948 - DNA, 573 bp, Homo sapiens
gcctggatgatgaaagatggcagctgtaatgatgagagaggagccagcttctgggaggcaggggcaggcttctctcttactccttccacctctatccaaataccatttgtgtgaatcagctgccacttggctttaagggacgtcactgccagatgctcccgttcccccttcttgaagcaacagccaccgcccttctgacccctccacatgcagtagaagtcttctagggccacttaatggtcatggggtgcaagcatagcagcaggcttttttcttccacagaatgtgtacaggagtttcatagtgacaatgaaggaattkgagcagtccctggttgcgtcagtgagcatctttgctggcactctctctaactttgttgagcacttcatgtgcgtgggactctgtgctaaatgcgttatgtgcaacatctcatttatcctcacagcaaccctgtgaaatggctactgggcatctctgggcttcgcagctgtggcaaaggggaaaggaattcaaactccaggtccactgtgctgtatgactttccctttataaacaattactccagaatgggag

SEQ ID NO: 538949 - DNA, 573 bp, Homo sapiens
gcctggatgatgaaagatggcagctgtaatgatgagagaggagccagcttctgggaggcaggggcaggcttctctcttactccttccacctctatccaaataccatttgtgtgaatcagctgccacttggctttaagggacgtcactgccagatgctcccgttcccccttcttgaagcaacagccaccgcccttctgacccctccacatgcagtagaagtcttctagggccacttaatggtcatggggtgcaagcatagcagcaggcttttttcttccacagaatgtgtacaggagtttcatagtgacaatgaaggaattggagcagtccctggttgcgtcagtgagcatctttgctggcactctctctaactttgttgagcacttcatgtgcgtgggactctgtgctaaatgcgttatgtgcaacatctcatttatcctcacagcaaccctgtgaaatggctactgggcatctctgggcttcgcagctgtggcaaaggggaaaggaattcaaactccaggtccactgtgctrtatgactttccctttataaacaattactccagaatgggag

SEQ ID NO: 538950 - DNA, 674 bp, Homo sapiens
acaaggcagctctgtgtgcaattgccagcatctgctcctctgttctcagggaatctttgttagaaaaatgctgccatatttgtttctcacctattagtcttgtctcccagtcaagagaataaatttatgcaagcagagattgtactttacagtattttgtctttgagcttggcattakgttgcatttgtaaaaatgtggcatggcttcctcatcccccaataggaactttgccagcccttttgttctcatggaacttccttttttgaaaagagcaccaaaggagtaaaaatactgtggagggagcaaccctcctttgccatatgctctcattgggagacatgtggagcagtctgaagtcatttaggccactctctgggagagcacatcctatgatgttctcccagcctagccccttccactgtgctcaagtccaagctgaccagctttctgaccacagtgtaaacaaagatgattgtcagtgggccccagaatcctatacccagacactaagccacagccactaaccccaggccacttcagcatttattccaccagcattcactcactcatttgttcttgcagtgtgcatttagtaggcacctgttatggcttggctttatccccatccaaatcccatcttgaattgtaactcccacaattcccacatgtcatg

SEQ ID NO: 538951 - DNA, 486 bp, Homo sapiens
atccaggcagcagagggaagcagatgcagtggccacaggagggaggaacctgcaggaggcccgtgtggctgcaggagaggaagcccagggaggcagcaatccaggaagcagaggggactctgagggagccacatcatcattcatttctccatttcttgctttctagttctgcaatagcagcagtttcttgggggtattccctaaataagattcaaatgtctctcctcggggggtgggggacacttggggtagtatcactggaaatgatggaaaatacctcagtttctgggaactgtyatgtccatcacagacagaatagcttactgctacctggacacgtgggcccattctccaggtagcatgtctattggcttctctgtgcctctcctcctccagggagaattgtaatttttaaaaagagaattaacttagaaaccttaaaatctttctagatattttctgagaattacagaggattttaatctt

SEQ ID NO: 538952 - DNA, 556 bp, Homo sapiens
tgtgccagtgtcctcgataaggcatctgttcatcttgtctaagatgaagtagacagaattgcttcatggactgtggtgtaatatgctcttgggtgagtcctaaagcaattttaggactctatcttccctttgtgtttgtgaaagcagctatttcaccttttgcctgtgatttgttctgccatctcccagtaatattacatcgatgctggtaatatatttgtaccctaagggcctgttattagtccatactcagagaagaactccataaacacattgttgactctcagctgtgtgtacttgtactttggcagcaggaagtttaattctgatgaatgtattgagtttcaatcctggatagaatagttggcaaaggcagagcrtggctcctaacctctggagctaggttagggtgtaaaataaagagcttgaaggagatgtgtcaacagatgcctgctcgtgaactcagatttaggagtttgccaaggacatgaatgaatattcagaaatattccccacagagtttccaggaggtctggggtgacagggttcctgtagg

SEQ ID NO: 538953 - DNA, 217 bp, Homo sapiens
aacatatgaacttcgggggaactaattcagcccctgacactagggctaatagttccaacggtgcagtgtacaagacgacttacatgggttcaaaagctgtgatgggaacaacagatcctgaggcccatgctgcccagtcttcagcccctgcccctaacgctcccacagtgcccatccaygacctcatttattcaggctttctgtggctgaaatggca

SEQ ID NO: 538954 - DNA, 217 bp, Homo sapiens
aacatatgaacttcgggggaactaattcagcccctgacactagggctaatagttccaacggtgcagtgtacaagacgacttacatgggttcaaaagctgtgatgggaacaacagatcctgaggcccatgctgcccagtcttcagcccctgcccctaacgctcccacagtgcccatccatgayctcatttattcaggctttctgtggctgaaatggca

SEQ ID NO: 538955 - DNA, 217 bp, Homo sapiens
aacatatgaacttcgggggaactaattcagcccctgacactagggctaatagttccaacggtgcagtgtacaagacgacttacatgggttcaaaagctgtgatgggaacaacagatcctgaggcccatgctgcccagtcttcagcccctgcccctaacgctcccacagtgcccatccatgacctcatttatwcaggctttctgtggctgaaatggca

SEQ ID NO: 538956 - DNA, 569 bp, Homo sapiens
gcatctggcaagtgcattgagtggacaaggcactggccagcctgtgtggatgacagagcaggagctgagaaagtggccccacaggtgactgctgagccaggtacccaggttagaggtctgaggcctatcagggctgtcatagaaccctggcatccccagagagctcacacagcctcaacttcccaccctggggcgagaagccccctcctgctgagctgacccttcctttccgcagctctggtccctgtctacataggttctatcattcgcgttccctgtgggccttrgccacatgtaaacacatttccacaaggacagtgctcttagcccagattcccaatttcagatctaaaaaggctgctaaggacttaactgaagagccagttgaactttataaatttcctctagatttcaaagtactgagaagaaacgggcagcaagcttgtgaggccaagacataagcatttgcccttgaactggagaagtctcattgctaacggcctgtccttgtgagtgtccgcacctgcaaagtctgaacctaagaatatcttcgcctgtcggtgtccaca

SEQ ID NO: 538957 - DNA, 517 bp, Homo sapiens
gaatataactacaggcacatatgctgtgcagggcactgtcgtgggcaccaggatacagcagggagaaaggacaaggctactgcttccatgaacttgccttcttgcagggggagacaatcaccacaagcaaatagacaaaacaaccaaaaaaagcaacaggtaatgatgagtactgctggggtctgacacatagacccaggctgcacgatggatgaataacgtactcagacactgatattcagtgaaagagcagctagggggctggcccactcacagaaaaagttgtggcagctatgaaccctgactagctggccctgcaggcatttattcagcacagatttaaggacaaaggctttgagtcaacacacctgtgggtaattaatctgatcgccctcccccagagagaacagtcctacaaatgatcaaaggttggtcttaggaccacaygagtaaacaaaatatttagataagctcctctacattcctatgtatctacaccctaagcttttaagagaat

SEQ ID NO: 538958 - DNA, 667 bp, Homo sapiens
tttcccatttacctctcagtccaccaggtatttccaccgtgggggtctcttctgtcagaaacatagatcaccacctttgacaaaaaggcaaagacagtgaaggagaggaagggagagtggaattcactctgckttccagccacgggccaggtacttaatcaacacatacacggaattaaccactatcatcccctctttacagactaggaggctgaggcttagcaggttaaatttcttaccagggtcacataaccagcgaatggaagagctgaagtgagaatgtgggtctctgcggctctttccacatggcccattgtgcctttggataatttaattcatgacagcacttcattttctaaacaaattcctgatgaatgggaaagaggaggttttgaagggaaaggaagaatattagaaatatgaggaacaaaaaccttagaacacagagaaatatctcaaggaggagaatgagtagacatagctggggtgtgtctatgggacaaagaacaacttgctcattgagaggacttgggaggttgagagagagaaaactcaccaggccaactctgctgttgtcctgattttctcgagttcccactggaaacatcagtaatacctgctgatttatttaggtgcttatataaagtttcacaagtttaaagtagtg

SEQ ID NO: 538959 - DNA, 556 bp, Homo sapiens
atccattgtgtttttaatgggatctccatgtgatgcacaaagcctggatttttatccgcagtagcagcttaactgatgcactggtccaaacataatgctgtagcttgctcacataaaagccagggagcccctcacagggataggaatgaggttcccctttatcagcagtgccttggatcagaagtgtagtgccccagactatgtgactcttacgcaggagaattgggggattaaattacggcaagctttttattccaatactatatcacagcatgaaataaagtctcaaaaatgacaacaggctttgatttttaatgaaaatctcagacagttgttttccagacatacatctgctgccgaaggaaaaaacacatctcctcagttatttactcccattctgagagtaacattgaattcctaggagccaatgaccagaagcgaggaggaactcaagccttcccyactccggcagcacatacaccagctcacctgggatgctgcagagacagaaacagccgactcggagacctcagggagcccagagctcctggcaaca

SEQ ID NO: 538960 - DNA, 611 bp, Homo sapiens
ctattctcaacagtccagcacacacaagtcaaggatataataaaacttcaccaagtgtgatggttgttttgtgtgtcaacttgactgggtcacagggtgcccagatagctggttaaacgtggtttcttgtgtatctgtgaagctgtttccagaagagaccagcatttgaattggtggactgagtaaagccgatggctctcccccccgtgtggatgggcatcattcaatctgttgagagccagaataaaacaaaaaggcagaggaagggcaaacgctttctcttctgaaactgggccatccatcttctcccatcctcagacattgaagctcttkgttctcgggtctccagtctcagccaggtcttagcacattggcttctgagttcttgggtggaagaactgcctgactgcttgagttgggacatggatcttctgccctctgcgcttctagtcctcaggctttcagactggactggaatccacaccattggctctccagttcttgggcctttgaactacagcactaggcttcctgaatccccagcttgcagatggcaaattgtaggacttcttgacccccataatcatgtgagccaatggcttataataaat

SEQ ID NO: 538961 - DNA, 611 bp, Homo sapiens
ctattctcaacagtccagcacacacaagtcaaggatataataaaacttcaccaagtgtgatggttgttttgtgtgtcaacttgactgggtcacagggtgcccagatagctggttaaacgtggtttcttgtgtatctgtgaagctgtttccagaagagaccagcatttgaattggtggactgagtaaagccgatggctctcccccccgtgtggatgggcatcattcaatctgttgagagccagaataaaacaaaaaggcagaggaagggcaaacgctttctcttctgaaactgggccatccatcttctcccatcctcagacattgaagctcttggttctcgggtctccagkctcagccaggtcttagcacattggcttctgagttcttgggtggaagaactgcctgactgcttgagttgggacatggatcttctgccctctgcgcttctagtcctcaggctttcagactggactggaatccacaccattggctctccagttcttgggcctttgaactacagcactaggcttcctgaatccccagcttgcagatggcaaattgtaggacttcttgacccccataatcatgtgagccaatggcttataataaat

SEQ ID NO: 538962 - DNA, 444 bp, Homo sapiens
tccatttttcttgtcctattttctctgctaaatgagcccccaaaactcgttccagagaagtgaataaaatgcatgactcaggattcccatctcatttatctcctgcctcatggaaccagaagccccttttgtcctccmtcaatccctgtttaaataatattcccacctgcaataaactctttcttcagtctccaccaaagggccagcccgttgcatgcaccaaccttcactgaggggttcggggtctgagaagtgactggctttgcccttctatgcatgcttgctttattacttaaggttatgacttaatgctacttaatgaaaaccctggctggcgggtctgcagagcaatgcttcagaaagggctctggatagataatcaccatttgccagagcccctcagcattcccagtgcctcctttctttcttttttttttttttttt

SEQ ID NO: 538963 - DNA, 540 bp, Homo sapiens
caatatgatggctgtgttccttacccaaagcctctgttccccatgggcaggaatgcccttggaagaggagcaccagcgggggacaggccagacacagggcagcaacctcattaaatctcatccttagggtctttgctttctctcatttggcacttctacccaaatctagtcccactgctagatcctgagaagacacccatttttacatgccacagagcactttccagcacattattcttcctctgagccccctggggtagcttgggtttggcatgctgacccagcaccccatcctttatctgggatctgagttgwctccactagtcacagaggtagttgcaagaatgggcctcaccaattaaattacttcatgcactgtcacagcttagtgcttgctgccaactctggctgcataataaatatgcatttgaaaagggcacagcagagcctgctgaaggctcatccattgcacatctgacaactgatgtttgctgtcactggggcctcactcagctcctccccaaataggcctgtccatgt

SEQ ID NO: 538964 - DNA, 660 bp, Homo sapiens
ctggtaagtggcagagccagcatttgaactgaggatkctcagctccagaggtttctatggacttgagtttgttctcataaattttgagaggtaattgcattccttatatataaaaaggaacaaggcaaaaagtacaatagaagaacagaatactagaaaaaaggaccagtcaggaacatgagatcatgaaagtaagcttagaaaataaagatataattggccagataaggcaaataataagtcaatagaaaggatacacaataaagttatttgtttgtttttaattcccagggcacaggcaaaaaaaaaaaaaaaaaaaaaaaaagaaagcaagcaagcaagagagaggccaaaattgcaaaaacaagagaaagaggagagaaagtaaatgggggaaagccataaaaaaaatagaataacttttccagaggatgaaggaaacccatacagactggaaaggtccaaggatcattagggagtgactccaggggtaaagggcttttcaagcaatgaggggtgctctggaaaggctggcccatgagatgaagggattaaggcacattattttgtcaacagcaaaagcaacaaagacaaaaacaattaggaattccaagaaaaacaagatcctgttccataaagatatagccgaatagaaagtaa

SEQ ID NO: 538965 - DNA, 491 bp, Homo sapiens
tgttcaaaagcatgttatttaatttccatgtatatgtgaaattttccagttttccttctgtagatttttagtttcttactattgtgctcagaaaaaatacttgatgtgatttcaatcatcataaatgtgttcatgatctacttttcattcatattttaattgatgtatagtagttgtacatcttttgggggtatgtgtgataatttgataaatgtgtataatgtgtaatgaccaaatcagggtaattaggatatctatcacctcaaacttttatcttttctttgtgttacacacactccaattattatagctatttttaaaaatatacaacaaattattgttaacagtagtctccctgctaccctattgaatactagaacttactmcttcaacctaactgtatttttgtacccattaaccaacttctaccctctccccactctcattcccagcctctggtacacactaatttttatatatggagtgacaca

SEQ ID NO: 538966 - DNA, 410 bp, Homo sapiens
cagtaagttctatagattcacaatgatgaaygtgatgaatgatcacctgtgttctgagaaactgaacggtcttttcatcgaaattaatttcatccttcccatacttctaggaaaatagaagtggatgttttaacctcattttgttaaacatggaaaacagaggcacaaagtatttagcaacttttccacattggcagtctggtgtgaggtgggactagacttaaaatcctacttattgtcttctgacacaggcacagaaccacctgttttcctcagtaagaggctaaatcatgtttatgagaatcctctctgtaccatataagattctacagacaagtaacatctagtctgttggtctaaatgtctgggactaatgaacttccattcagttcaagcttctttgaggccca

SEQ ID NO: 538967 - DNA, 410 bp, Homo sapiens
cagtaagttctatagattcacaatgatgaacgtgatgaatgatcacctgtgttctgagaaactgaacggtcttttcatcgaaattaatttcatccttcccatacttctaggaaaatagaagtggatgttttaacctcattttgttaaacatggaaaacagaggcacaaagtatttagcaacttttccacattggcagtctggtgtgaggtgggactagasttaaaatcctacttattgtcttctgacacaggcacagaaccacctgttttcctcagtaagaggctaaatcatgtttatgagaatcctctctgtaccatataagattctacagacaagtaacatctagtctgttggtctaaatgtctgggactaatgaacttccattcagttcaagcttctttgaggccca

SEQ ID NO: 538968 - DNA, 410 bp, Homo sapiens
cagtaagttctatagattcacaatgatgaacgtgatgaatgatcacctgtgttctgagaaactgaacggtcttttcatcgaaattaatttcatccttcccatacttctaggaaaatagaagtggatgttttaacctcattttgttaaacatggaaaacagaggcacaaagtatttagcaacttttccacattggcagtctggtgtgaggtgggactagacttaaaatcctacttattgtcttctgacacaggcacagaaccacctgttttcctyagtaagaggctaaatcatgtttatgagaatcctctctgtaccatataagattctacagacaagtaacatctagtctgttggtctaaatgtctgggactaatgaacttccattcagttcaagcttctttgaggccca

SEQ ID NO: 538969 - DNA, 410 bp, Homo sapiens
cagtaagttctatagattcacaatgatgaacgtgatgaatgatcacctgtgttctgagaaactgaacggtcttttcatcgaaattaatttcatccttcccatacttctaggaaaatagaagtggatgttttaacctcattttgttaaacatggaaaacagaggcacaaagtatttagcaacttttccacattggcagtctggtgtgaggtgggactagacttaaaatcctacttattgtcttctgacacaggcacagaaccacctgttttcctcagtaagaggctaaatcatgtttatgagaatcctctctgtaccatrtaagattctacagacaagtaacatctagtctgttggtctaaatgtctgggactaatgaacttccattcagttcaagcttctttgaggccca

SEQ ID NO: 538970 - DNA, 561 bp, Homo sapiens
tgcgctatgtgaattttcacatagagatgcccatggccaaagtgaggaactgaaaggacatccttgtggaactgatttaagaagacgctaacttttgtttacagaagaaaaagatgagtggaacatctgtgaggatcttacagaagcactctctcatatatcagaaggctgtgtgtgtgtgtgtgtgtgtgtatgtttgtttgtgtgtgtgtgtgtgtgtgtgtgtgtgtatatatatatatattcttctttctcttggccacagacatttccccaaacatgttctgaccttctgcttggaggtctccttgaggacattctcasagaaacctctgttgcggtattagaactgatcactcatccctttccattattaaatgttctctactatctcaccttaggcagtataaagccctggttcactctcaggcaaaagagctgacccagttacgggagaagttacgggaagggagagatgcctcccgctggctgaacaagcatctgaaaaccctcctcactcctgatgaccctgacaagtcccagggtcaggacctccgagag

SEQ ID NO: 538971 - DNA, 562 bp, Homo sapiens
agtcttcctcctcctcagctcctatctgcccagtgcaatgatcactagctgctgtcttcctctctggttcccatggcagccacgctctgttgcagacagaaaaggattgcctgttccctcttaaaaggaacctctcctttgcattctgggaccactctcttaagcctcctttcaaaaccacctaggacttcttggggtgcaatgccttttggattaatcttctgtcatctctatcccactgggctcatcagagaggtgcagaagactgaagaaaaggaagtccctcaggactcactggaggaatgtgctgtcacttgttcaaatagtcacaacccttctaactccaaccagcctcacaggagcaccaaaatcacatttaaggaacacgaagtygactctgctctggttgtagagagtgaacaccctcatgatgaagaggaggaagctctaaacattcccccaggtagcctctctattctttgtccctcctagctctgtctaggctgaggaagatcaattctgaggacagactgtatacatacatattggtttgaatcacaaa

SEQ ID NO: 538972 - DNA, 612 bp, Homo sapiens
ctcacagacacaggatgatttgcatcagcatcaaaaatcaagttggaagcacagacaggggtgggtcagtgagctttgctctcttcctcatctcagaccatgcctgtgtcaccctgcgcccactgtcacgacattgacaaattcacaccaacctatgcagcacgtgcccaacaggtgtctgtcaggcctcttaatctgaataagatttgtcttgccagctatcgtgttccttacaagttcctttccccaaccatgtcctgtgagattctatgcctgcccaacgcctgtggcatttttgtctacttttcattaaagatattacccaggtttcaaagaacctagcctcattctstatgtctttgatgttatcctgttttagctgagcagtccattaccttttgttatgtttctagaaacaagattgggccttgtcactcctagatgtcacgaatagccaatgtctctttgtattgaaccaaagattcattttcattcaagggtctgtagattccctcctacattctagtttcagtgtctaaaatccttgtaaccatgaacaacgtgagtatttgatgattgaaagctgaatattgcagttttccttctagaaag

SEQ ID NO: 538973 - DNA, 682 bp, Homo sapiens
tatattttttttctttaaattaatgtgtacagatacatgcatktgtatcatttgtcctattacgtgtgactatgtatatctggtgtgtatgctatatagggtgtatatatatatgcagtagatcatataatgatgcaacttttgtaaattctctaggtttagtcttcctggttctttcctctcatcagttgctgtcacctatgtctggtctcacctctgtgccacatgggctgccaccctgccaggcccttccattcccatctcctgtttgaacccagttcttatttaactttgatttttgtaatctcttctctccccaaagcatagcctacatacagtgttatttccttgcctttgccttatctacctggaagctatttgtgtttctgaatcctatgtttctggaatatttttgtgacttggcagtgcctttggatcctggcaatcttgtcgttactgagtaatgtaggaaagatcaacaaaaaagaaagtattaaagtgactctatcggcttcccctcgccctttggactttcttgtccaaggctctttcctgatttgatgtcctctgggtggaagagaaagttacggtaagatcatggatggcagcggatcccattggctgtggttttcttttcagagctggttttagagccctctctggggatgaagaaccctcccca

SEQ ID NO: 538974 - DNA, 396 bp, Homo sapiens
cagccatcaggtggacctgacaaaaatgctcatttgattttttttctctctctcccctacagataccaaatactgctgaaaggatgcaaaggatgataggatgaaagaatgtcacaaaaagcagcttttccacttgataaaaacaactaaaacagcaaagcaagtttaagtccaaacacaatactgcaggggtccttcactgaggattgaatttcagacacagaatactcttgatgacttcaagccactatgctcctttgatttgagaagccacattccatccccctccaattgtgatcaayacctagggagaccaatgcccagatggacaaatagcattgactggcgttagccctgtttctcaattcccatcatgtagagaacaggagtccgcag

SEQ ID NO: 538975 - DNA, 642 bp, Homo sapiens
ctgctggcaggagacagcatgtcagccgggactctgccagggcagagtatgagcaatgccatgttcttgctgaaaacgtttagcctgagtttcwtaggaggtaaccctcagataactgcagaatgtagaacattgaacaggacaactgacatgtctccttcaaacagtccatgtcaccaccaagaaaacaacaaaaaggagaagagacattttgagttcaaaaagagtaaaaagcctatgcagcttatgcttttttagtcattttgaacccaaaacatctccttatctttttgttgttgtcatcgatggtggtgacatggacttgtttgtggaggacgggtcagctctctggctcaatggtctacattctgaagttatctgaaaatgtcgtcatgattaaattcagcctaaacattttgccaggaactctgcagagtccatgctgtgagcttcctacctcagcccatctgcaggcagagaaggcccagtgtgtccatccccagtgcggtgatactaggatgttcacttggtcaaggaggggtctaggagctctgtcccttgtaaagacaccttatttataattaaattggaaagtggtttgaaatagtataaatatcctgtattctaacaatcttcttctga

SEQ ID NO: 538976 - DNA, 614 bp, Homo sapiens
tctaatttctcatcctgatattacagttgataaactaaggtcaggcttacaaggtttcaaatactcatatacattaatggaagaataataagaaatctagagggcttctttttccttggtgacatatatgcttttctttaaaccccacgagtggaaggccctagcttatttcattttgttttggttgtttttctttttatcctctagccatattctccatccctctccccaaagctctcactgtaatgggtgtgatattaggttggtgcaaaagtaattgcagttttgctattgctgactactggttattgccagactgactgaagtactggacctcttgggtgccagctgaggagcatggaaaaaagaactataggtataaaaatatgtagcaagataccctaattctccataggawtatttgtggcaggaaatgggatgggtgtattggaaaaataggtcagcagattctcattttcacccatggtgccaaaatccaaaaatgaatgggcctagggttattggtattctgccaaattaccctttgtttgttctaggagaggggaaaggcagcttgcagatagcttgatgctctttgacctagaatgaacaca

SEQ ID NO: 538977 - DNA, 393 bp, Homo sapiens
caccaaaccgagaaattcaatttagttcaaacctaggcctgggtttgggtacaaacccagaccaaaggggcatctaatcccgtttaaggcaatttaagaagtatttccctaggccactagataaatgtattctttaaagtattaataatgactgtgataataagtattgactrtataccaaccactattgctaagagcttgatacacattacctcgtatgcacacatcacaagaaccctattatgaggttgacacacctagcaccttcattttacagatgaagaaacaggttgaaagagaccaagtaagctgcctaggactaaacctgggcaacttctgtgtctttcatcagaaatggggcccactttgtgatgaaacatagctgctgttgta

SEQ ID NO: 538978 - DNA, 465 bp, Homo sapiens
ttagggctcagggaggctggaaggagggcttccggaaacttcactccggaaaggaccaagttgttttccaattagttcgtattcatgaccgatttcctgccgtctggtggaacatactgtttagtctcccagacagccgcagacctgcctccactagggactgggccacttaactggatggagatagattaggaatgttctctagctcagcagctccctgttaaagttccttctgattagagaaacaggaaatttatccgaaggactctgccttctctgttctccaaaccagggcaaagtgctcacaaaactgctttcatttcctcttgccttttaagtcatccctctcggccttggcatgccaccccyagcaatggtaatccggtaatccgatgacaaaaaggcctgtgccctgtgggctagtggaagcctgagtaattgtttttttttgaggaccataagcag

SEQ ID NO: 538979 - DNA, 609 bp, Homo sapiens
aaaggcagatcacctttgttctcttcactgggagatcaggatgtgaacagatacccaatgtatcctcagacacagacatggcccactgaagcccgtgtcacctggtcatgttgcagaggaatagctacagcttagggcacaagacagaacaagttctcctacccttgaggtctagatacttaccctcagcgtctcatcatatagtggattaayagtgtcccgcttgatgctggtttttctttttccttggcgggacttgtcaggcagaaggtaagtcttcacatatctagaaaccaaagacagcactgagtaatttgctggcctttctcaagcctgcttttcactttcctcctctccatatagatatgccatggtgacatgtgatgtcaaaaatgtcacctcaagccctcttagacatgccattcttgctttttcccaatcctggttcttttcctacattacacctccctgctcccccagaaacagataagctctgttcaagagtgcccggacagatgccggggtctggtctctggtctcagagcatcagtcaggttccagaagcactcacgggttagagcgcttcttggcttcatcagcataggccag

SEQ ID NO: 538980 - DNA, 609 bp, Homo sapiens
aaaggcagatcacctttgttctcttcactgggagatcaggatgtgaacagatacccaatgtatcctcagacacagacatggcccactgaagcccgtgtcacctggtcatgttgcagaggaatagctacagcttagggcacaagacagaacaagttctcctacccttgaggtctagatacttaccctcagcgtctcatcatatagtggattaatagtgtcccgcttgatgctggtttttctttttccttggcgggacttgtcaggcagaaggtaagtcttcacatatctagaaaccaaagacagcactgagtaatttgctggcctttctcaagcctgcttttcactttcctcctctccatatagatatgccatggtgacatgtgatgtcaaaaatgtcacctcaagccctcttagacatgccattcttgctttttcccaatcctggttcttttcctacattacacctccctgctcccccagaaacagayaagctctgttcaagagtgcccggacagatgccggggtctggtctctggtctcagagcatcagtcaggttccagaagcactcacgggttagagcgcttcttggcttcatcagcataggccag

SEQ ID NO: 538981 - DNA, 369 bp, Homo sapiens
tgtagtaagacctctactcatcctccatgttggccctccccacccaatccctgcatgctcaccactcaatccctttacatactggcttggtttaagtagcataatatccatagcctaggaatggccatatatgaaagatataaaagaacaagctgtgtattacacaaacttgtcgtggcttttggaaaccatgctagtgcccaaaagacaaacaayataattgaagacgtcagcctagacaaaagaggtgttctttttacggttgtcataataaatctctctctcaactttacttggcatttaggtatattaggccttcaagtgcagacctttaatttcttccctgtctttttaaacctcacattaaat

SEQ ID NO: 538982 - DNA, 629 bp, Homo sapiens
tgctgtgggtcaccttttactaaatgagtggccttgggctcacttatctcatttccaagataggaatatgaacagtctatacctcatagggttgttgtgaaatggggtgatcattacatatacatctgtttagaatagtggctggcatatttatccaataatcaatatttaccatgtgccaggcactgctctaattgctaaaaatagagcaatgaatgaaaacaacaagtaaaattccaygtcctcatggagctaataatctagtcaccctaaacaaatatcagtggtccttataattattttatttttattattgctatagcatcaggatttgtctcctccactggcctgtatctcccgggctggcaaagttccaggctcactatgggcattcagtaaacagcttttgaataggcaacaaatagatgaatccgtaattgtaacattgccatttttcctgtcaatctcaaaattatattaagcaatgtgtattggtctaggaggttgaatgttcagactcaattaatcttcacaataagcccacaggcaggtactagtattatccccatcatgcagatgaggaaactaagacaggcagaagttagagaccttgctcaggaccacttggc

SEQ ID NO: 538983 - DNA, 582 bp, Homo sapiens
tttcatattctagcacctaaagcttcattaaaaatacagtctttctcatggcaatgtgaagactaaaggcgattatgtaaatatgccactttgtcctgtgttcatttattagattggttaaatgaagagttcctgccttacccatgtttagttcatttcctttatttttattccatcatatcaaaggcatttcaagtgacatgtaattgattaccttaaactagctaatgtttatcaaaccacctagaacctatattcagatgtgtggagcaataataatatgtaaataaaaataaaagtcatgtctggtgatgatcagtgtgtgattggtggttgtgcatctgttgatattgcagtcctctcgccagtggtggaatatggtacttatcaaaatgctgtcrgttgtaagtgacagattcccaagtcagattagctttgactgaaagggaatatactgtttcatgtaactaggaagtcaaagtagaatttgctgcctgcaggcattgtgggaaccaggagctcaaatgtggccacaagggttttttccctttctctatctccctgctctccgtgctttgcctg

SEQ ID NO: 538984 - DNA, 607 bp, Homo sapiens
tagaacctatattcagatgtgtggagcaataataatatgtaaataaaaataaaagtcatgtctggtgatgatcagtgtgtgattggtggttgtgcatctgttgatattgcagtcctctcgccagtggtggaatatggtacttatcaaaatgctgtcagttgtaagtgacagattcccaagtcagattagctttgactgaaagggaatatactgyttcatgtaactaggaagtcaaagtagaatttgctgcctgcaggcattgtgggaaccaggagctcaaatgtggccacaagggttttttccctttctctatctccctgctctccgtgctttgcctggcttcactctgggggctggaatctcccatagaagatgaaaaggaccctggccgagccagacctttatttttctaggaagagcagttctttcttccagtgactatgtattaatccctgtaaaggacttggcttctctctgtttgaactatattccttcattgaaactatgattttgtctgaaataatgtagaacaataactggcctagcctcaatgatatcctctcccctatgactgttggcaggtttcaatgattatagcccaaccaga

SEQ ID NO: 538985 - DNA, 656 bp, Homo sapiens
gaagaggtgaagtcttcaggaggtatatcatggagagagccctcatgaataggcttggtgcccttaaaaagaagcatgagggagcttgtttgcttcttctgtcttgtgggaatgcaacaagatgagaccttcaatgaaccagaagatgattctcaccagacaacaattctcctgtcaccttgatcttggacttctcagtcttcggaactctcagaaatgaatttatgttgtttataagctacccactctataatattttgttgttgcagcccaaatgaactaagacactcaccttgatmaagtctgagatactctcctaactctctgtggagatggtagatggaaataagagtcaagaccaggtgaaaatggccttatctttcttaccccttcactataatggttctgaagcaccataaaccaggatgctgagggtctgtaatctccaagttccagttgatcttgaggaaattgtgcagttggccatggcagagagaagataaagacggccagagaagtagcaggaagcaggcagtccaactaagagaatacatgagacagcacactctgcttgcttccctcttcaaaaatactagagggagataaccacatgaggagaaatcggattttatatcactaaagaaggaattatgtaa

SEQ ID NO: 538986 - DNA, 554 bp, Homo sapiens
tgatcacagcagagcctggggcttcacctatactctttcatagagtgttagaaggtaataaaaagcatcacagtgtagtggaaagaccattaagtttgtatccgagtgtttttaggttctagttctagttctgccacttactgtgcaaacatgggcaagaaaattaaattgagattgtatgaagtttcatttttttcctacaaatccttcagtccatggtatgaattgatttataaagagtattgactttgggcttctccttctcttcttaacaggtcacctagcatttgctttctaatcatccataattactacttttttcctggaaaggagagagaaagtagaatgagaagaattcctgtaacttcagctttcctcctccttttacttactttacacaaatataatactgtggcctgaaatatatccataaggttcattatgagagatcccagtyaccaactgggaaaagaagaaaagtggaaggaaaatctggggaaccttgagggggatgaggatagcgttcctatgtatgcaggtatcatattttcatt

SEQ ID NO: 538987 - DNA, 584 bp, Homo sapiens
gggcactactcatgatatgctaggtgtggtactakaattaatagccttttgtagaaggaagtaaattttcttgaataatcacccacgtaaaattaaaatctatgataaaggcagcacagaacattgtataatattttgataaaataatactttatcaggaattttgactaagatcaggttatccaggtgtgcttcccatggaaatgacagtaaggactgagctaagatctgagaatgaacagaagttaagcaggcaaataggggtgaagtaccctctagaagtaaagaatgagagccagtgatggaagggggagtggtaagcctgaagcactggaaggaagccagtcttgtggaagaggaaaaagtctgcaaaaggcaggagtgtggtttgagaagaatttggagaggtaggcagaaactagacatggtagggcccaccaggtcatgttttagagttttttctttattttaagagccaaagggttttgaagagagatatgatataatcttattagcatttttaaaagatcattctggctgaagtatcaagagcagattagatgaagtcctggggcatgtatgtg

SEQ ID NO: 538988 - DNA, 626 bp, Homo sapiens
ctggcagtttgaaatgccagctagcatctaggtaaagttgtctagtaggcaatttaaaatttaagactggcacttgggagtcatcaggatactgcttatggtgaaagtcatgagaatggataagcaagccatggaaagggtgagtagaagagagaagtaaataatgtcagtgatgcaacttcatagcctatttacattatggaaggagaatgacgtggagtagccagagattgaggtagatacggggcggtgagagccagctaaagagtaagccctgaagactgtaatgttactgaatccaagagaaaaatgagaatgttttaaagaatgaaaggctgttcaatggtatcagaaaatccaaagaggttaagaacgagaactcaaaatatgttgctggattttgatcctttgcaattgatggatgatagccaaacaacataagtaacaacaagcaccacaactctgacttcaactccaagcttcaactctgactatcatgaccaacaaaacaacaatattttgccaccaggggaagaaacagacaatmaaaacaccataaacatgagaatatactcaaatgtacaactgtctggggccagttaatataagattcaaagagtgcaact

SEQ ID NO: 538989 - DNA, 479 bp, Homo sapiens
ctcaaggcactcatgttccatttgtaatgttctacagtttccgcagataggtttctatatttaaaacagtttctaaacagttcacaacttctttagagttcaactcctaattaaccttaataggctagcatgtgatagattcatgaggggcattaatatttaataacaagcaaaaaatcatgcagtgctctttgtttgattgaaaggygttagaattctcatttagaattctgatcctacaactgtcttatgtagtgcggattttcttcaggatacaaggtggttagatgggagcactgtctttctcagtctccttaagccatattaaatggaaaggggcatgcgtcactgtcatctccaccctgtggtaaagacatgcctgttgataatggttacagggcaagttccacacctcagcatgctgcctaatactatacctctttttgtgacttttcttttttttttttgagacagagttt

SEQ ID NO: 538990 - DNA, 638 bp, Homo sapiens
gtctggatcacagtaaccttgggacaaccttgagtggctatgaaaaatcggtgctacagcatacactagaagttaactaaatgaatgagaacaaatggaagccaagaacaggaatgtaaactagatgcctcacctgccacctatgtgcaacctatggccacaaattctaaaatggggcatcaggaaataatggaaaaacaaaaactgatattttgttttgctttgtttttgtccttgtattcttcccagggttctgtcttactgaatttggtcctttacttagcccattaaataattctgaaggagaggcaatagcgcctcttagattatcttatgaccaatcttatttacattgtcaaaccttgtattttaccctatttcttgatcatcaatttaaatatgaatatttcaagtatagcaaaaataatgaacaagcaaaataaagaggctgaatgaacaagtcaaaaaaagggatttcaatwgtgggtactcttaaggaatgacagagttaagagaaaaattcaggttgagaaaatgagacaaaaagagaacattatagttgttgaaggatgcttgctacttaattcaaatgttttatagggtttgacacacctaggatttgaagggaaagttataaa

SEQ ID NO: 538991 - DNA, 621 bp, Homo sapiens
ctgattctgttttatagcagtgctaggaattcttccctatttcagggctctctaacctttgcttcttaaaaataggaaatataaatgagcttctcctaatatgtctactgtttttctgtgaagctgtatggctttcttaggaaaagaagttttgagttgcctccaaatatctcctttcttcctgattccacttgtactatacaaagcagacattgcttgagctttatgcccyatgggtgtcagcttacctagttttcggtgccattggaacttttttaaaaaaatagttattactatgtttgtactattttggttatttctgttagttataaccaaaggaggtcagatatttgtgctcatcctgccatatttttcaaaagactaaatagagattttaaaaccattaactaccacctttttattttgtatgaattttcaaactaacttgacaggttgtgaccaccagtgagtgacatttgtttttatataattcttcatggaaatgagtaagatacttcactatgtgaactctacaaaaaggaaagattcatttgataaagaatatatcagattgcattcacacagttttaaaaataaatttagtctatattacctattgtt

SEQ ID NO: 538992 - DNA, 628 bp, Homo sapiens
tgcattccttaggcacttttgcaattttgtctgcaaaactgtcccaaacactcccagatggcaaagcttaagctgcgattcctaacaaatctaaactgaattcaaatggagaatacrggtaacattttcctacaaaaacaaaagggttcatatctgccatcaacactcagtaatacttttagaaacaatgaactattttatcatattggtctgcaagccccatgatcttcaattaaagtctctttcctcatggagacttgatcatgagtagaattttttctagaatataagaagtaactactggctgggtacggtggctcacgcctgtaatcccagcactttgggaggccgagacagggggaccgcttgaggccaggagttcaagatcagcccggccaacatggcaaaaccccatctctactaaagatacaaaaattagccgggcatggtggcacactcctgtaatcccagctacttgggaggctgaggcaggaaaatcgcttgaacccaggaggcaatagttgcaatgagccaagattccaccactgcattcctgcctgagtgacagagcgagactctgtctccacaaacaaacaaacaaaaagaagttgctatcatttgcagaaaa

SEQ ID NO: 538993 - DNA, 628 bp, Homo sapiens
tgcattccttaggcacttttgcaattttgtctgcaaaactgtcccaaacactcccagatggcaaagcttaagctgcgattcctaacaaatctaaactgaattcaaatggagaatacgggtaacattttcctacaaaaacaaaagggttcatatctgccatcaacactcagtaatacttttagaaacaatgaactattttatcatattggtctgcaagccccatgatcttcaattaaagtctctttcctcatggagacttgatcatgagtagaattttttctagaatataagaagtaactactggctgggtacggtggctcacgcctgtaatcccagcactttgggaggccgagacagggggaccgcttgaggccaggagttcaagatcagcccggcyaacatggcaaaaccccatctctactaaagatacaaaaattagccgggcatggtggcacactcctgtaatcccagctacttgggaggctgaggcaggaaaatcgcttgaacccaggaggcaatagttgcaatgagccaagattccaccactgcattcctgcctgagtgacagagcgagactctgtctccacaaacaaacaaacaaaaagaagttgctatcatttgcagaaaa

SEQ ID NO: 538994 - DNA, 626 bp, Homo sapiens
tgttgatttatggatggtctgctttcttacatgcacttaatatttttgtataaacaaacctgaaaggtatcaaaatcccctttaacagattaacaggctgagatgggttaaagtgagcaagccgggaagtggtggagctgggatccacaccctggtctgtcttgagtccaagggtaatcgtcttgcattcactatggmatgtttcccttacgttaagagttgctgacatagacagtgcatgtcattccttttggtgtggccttcctcctttctagcttttttctgcctggaaaatccaggcacgcaagataatggagcttccatgtaaatttccagaatccctagaataaaagcggagaggatctaccctgaaaccaacaagtctaggatacacatttctgcctttttttcagaattaggaaggggcaggcagatgggcaattgacaggaatagtagaagcatcctcagggaagttgggtgctttacttagtgagaaagccatgccggctgacatttctaactgagtcttaagtggagtacagtcctaagagaggagctctccagaaacagctattacctggggtcaggaatgttaaagaccttctcagaggttgactctactcac

SEQ ID NO: 538995 - DNA, 546 bp, Homo sapiens
tcttaatgtattagtttgttcaaatatataatcccacaggtatgtattatawtccaataacctaaccagtctctctcctagaaatccattggttttgattccacaaaaatgtcaatcctttagctgtaacttttcatccacccctaacttttccaggatgaacaggaaagaggtgttgaataattgtatatgttagcacccccacttcctgtcaccactaaccatttgttcccagcaaaaacacgattcctttaagatctctggacctcacacttctgtgcagtggggatttggggcctcagggttgggaagggcagacaaggaccctgatttcaggggtttcatcatcttctgggggaggcatacaacaagtaaagaatcttcaaccctgatgaatgtgcagtgtgatagaattcagtgggctctaatggcatgtggcaggaaactataaccttgtttaggggggacattctccccaagtgagtggccagtaatttcaggtgtgaaggctgagtggcagttagctgagtagaaggtggttggcag

SEQ ID NO: 538996 - DNA, 546 bp, Homo sapiens
tcttaatgtattagtttgttcaaatatataatcccacaggtatgtattataatccaataacctaaccagtctctctcctagaaatccattggttttgattccacaaaaatgtcaatcctttagctgtaacttttcatccacccctaacttttccaggatgaacaggaaagaggtgttgaataattgtatatgttagcacccccacttcctgtcaccactaaccatttgttcccagcaaaaacacgattcctttaagatctctggacctcacacttctgtgcagtggggatttggggcctcagggttgggaagggcagacaaggaccctgatttcaggggtttcatcatcttctgggggaggcatacaacaagtmaagaatcttcaaccctgatgaatgtgcagtgtgatagaattcagtgggctctaatggcatgtggcaggaaactataaccttgtttaggggggacattctccccaagtgagtggccagtaatttcaggtgtgaaggctgagtggcagttagctgagtagaaggtggttggcag

SEQ ID NO: 538997 - DNA, 434 bp, Homo sapiens
gacccccgcgtgtacggcgtcgccccgcactgcctggacgagggcaccgtgcgcagcgtggtcatcgaggaggtcggcggtggcgacccgggggaggaggccgccgaggagcacaaggccatccacaagacgtcctcccagtcagcccctgcctgtccccgcgaacaggagcagtgattggggccgcaagcccgcctgaaaccggcccgggcggccctgcggggagcgtccgagtacctgcacagatcccatgctgtraaagaggtgtttctggcctggtcacaccggggattcccttccagtatttgcccttcccctccgctagttttcagtgaactcgcttacgatccaaatcttgaacacacctttgtctgcgtagtacaacgttaatcttgcaattcgataaggaagaagagtgtctctgatttttcaaa

SEQ ID NO: 538998 - DNA, 435 bp, Homo sapiens
actaccatagctccactgcctctcaaaaaatctttggatcctttcacagttcataagagtgatgactgsgttttcactttcatgtgtaagatgtgcctccctgaaaccttgttacaacattggcacattacccatctgatgtggaaaaaaatgaaacttcaatatcccacttgaaccacaatcctcccagctctattctcttcctcccactttaccactccttggcctcgctgagttccagccctttaatcccttcgtggcctcacagtttatctttactttcccctcaattcccaggcttcagtcttttaaaacccaagctagacctctggccaacaacttgaattatttcccgccagctccctcaatacccgtgctcccttttccctccactcaaaagtgctggaaaaccctgactacagaacccagttctac

SEQ ID NO: 538999 - DNA, 493 bp, Homo sapiens
catttcaaataaccttctgctctacttacacttttcaaggccacaattagaccattactaccatagctccactgcctctcaaaaaatctttggatcctttcacagttcataagagtgatgactgggttttcactttcatgtgtaagatgtgcctccctgaaaccttgttacaacattggcacattacccatctgatgtggaaaaaaatgaaacttcaatatcccacttgaaccacaatcctcccagctctattctcttcctcccactttaccactccttggcctcgctgagttccagccctttaatcccttcgtggcctcacagtttatctttactttcccctcaattcccaggcttcagtcttttaaaacccaagctagacctctggccaacaacttgaattatttcccgccagctccctcaatacccgtgctcccttttccctccactcawaagtgctggaaaaccctgactacagaacccagttctacag

SEQ ID NO: 539000 - DNA, 631 bp, Homo sapiens
agctggcaagcatagggtggaaaaacctgccacacaaatttgcaattatttgacttccgcctggaaggcaggtcggctgggtttatgtcccccaaagttagtatcctcttctgtacaaaatgtggttgagagaagggtgatctccaggtgtttcatctttgcacccttgcttccagcaccacgcccacaggcgcttccagaaaaaagaaaaaaaaaagggagcaaggaagccaggtttttcaacaacgaattcattctaatgcagacaccaaagcccacttcatttattaacattctggataaaatcccaatcgattaggccaccagagccctccattcctaaactccscgtacagtcaggtaaaagcacgaagcactagtcacggtcctgcccagacttttcacgcagaggtggaaagttgcagaccccgagccgggaggggcgcgagcccaccctgaagcccaggacccaggagggcgcttcctcccggaagtgacgcgagctcaatcccggccttgctcttcccaaacaaaagggatcttggggccccgggaggagcctgaatgactttggagaagccccgcctccagccggcgcggattggggccgaggctggagaagcaaggaggc

SEQ ID NO: 539001 - DNA, 641 bp, Homo sapiens
gagatatgcttctagaggaaatttgttcagtctatgctggttggccccaggagtggcttattagcatgttttctaaaggccattttaaaatttctgaatatttggccgagcatggtggctcacacctgtaatcccagcacgttgggacattgaggcaggcagatcacctgagatcaggagtttgagaccagcctggccaacatggtgaaaccccttctctactaaaaatacaaaaactagccaggcatggtgatggtcacctgtaatcccagctactcrggagcctgaggcaggagaatggcttaaacccgggaggcggaggttgcagtgagccgagatcacgccattgcactccagcctgggcaagaagagagaaacttcatctcaaaaaataaaaaattaacaaaattaaagtttctgaatatttgctgctaataactaaaatttaaatcttccaaagttcaatttaaagccttttagtgagaaaatggcttacttatcatgagcctggagaatgtaattatttacaacacagactttaaaggcaaacctaggttcaaatcccaactgtgctactgttcactgtgtgatccagggcaagagaaaaattttctgtcttcaccgtagctcagtctgtttcc

SEQ ID NO: 539002 - DNA, 313 bp, Homo sapiens
gtagggaaactaatgacccggttatggctgcacygtcatttctaggcaatttcctggtaaatggccctttggaacagtctggtgctggatgcttctgtgccctcatttcctgcttcatgctcctgctgggctcctgcaggaccagtctgccctgaacaaagtgaccaggtgacccgctttcttgggaggagtttatacatttcccatccccttttctttcttccacttgcctttttcttgtcctccttttattcctaaaaataatcattgaatgcctgttaacattgcagtgataactaacacaggctttgga

SEQ ID NO: 539003 - DNA, 603 bp, Homo sapiens
tggaggtcagaggagttgtaattgtttcgatactgcttatctccaggccagtgcttgtttcgctgctagagaaaaaaataaacaaacaaaatcccttgtggcagttagagcataatttattctttaaatgtaggggttcaccacttaacccttgcctggcatggtcttgtttataatttggtatcttattgccacaaagactccattctgtcagtcttatgatctctattttaccattaatgctggtcagtygtgtttaatccacaaaagggaggggctgtaatgaggcatgtgacgctaccatcccatcatggtgaggtaccccgtttttaagggttctgtggggtcctcttgcccaagggaggaatctgatcagtcaggttgcggggagggtatttttatttcttatcccttagtaggaagccaggtctgagggaggggtggggaatctggggtgaggaggaaggggccaaaattttgcaggcagagctcccagatggaacagcatgacctgtgcaaatgtgtgctgaggttcacagagaaacgcaggcttgggacaggccgtctagaaggaagggctatggagatgaggtggggcaggaa

SEQ ID NO: 539004 - DNA, 603 bp, Homo sapiens
tggaggtcagaggagttgtaattgtttcgatactgcttatctccaggccagtgcttgtttcgctgctagagaaaaaaataaacaaacaaaatcccttgtggcagttagagcataatttattctttaaatgtaggggttcaccacttaacccttgcctggcatggtcttgtttataatttggtatcttattgccacaaagactccattctgtcagtcttatgatctctattttaccattaatgctggtcagtcgtgtttaatccacaaaagggaggggctgtaatgaggcatgtgacgctaccatcccatcatggtgaggtaccccgtttttaagggttctgtggggtcctcttgcccaagggaggaatctgatcagtcaggttgcggggagggtatttttatttcttatcccttagtaggaagccaggtctgagggaggggtggggaatctggggtgaggaggaaggggccaaaattttgcaggcagagctcccagatggaacagcatgacctgtgcaaatgtgtgctgaggttcacagagaaacgcaggcttgggrcaggccgtctagaaggaagggctatggagatgaggtggggcaggaa

SEQ ID NO: 539005 - DNA, 629 bp, Homo sapiens
tcatacttagaatggttattcgactagagattggttctattataagaatttgtttcctctgcataagaaaagtttgaatacattaaattataagtgagagttctagatgcctgggcacataatgaaaatttaaaaaataactaattacactgttttccaagtgggttcaaagatttttggcaaaataaaaagaagcttttgttttgaaaataaagtaccccaaaggaataatatacttctgtattttggatggccaaagcatagaaatatgaacccctgagtttcatttgtgccatttatttattcacttatttactcactcattgaatgtctattacgtgctgggcattgtgctaggtgctagagaaacagggaaaaggaaracatctcacccacaaggatgtcaaattgtgggagaaagacaatgttcttaaatatgctacatgttttaatgggaatctaaacttatcttgggcttaaggcaatactgagtaatagatgccaggtttcattaaatacctagaggaactgtgtgaggcagttagaagtatacacgtaaagactgtggtttctggaaatcaagaataaactacaaggtaagacatccagggtgtccaaaatatcctgga

SEQ ID NO: 539006 - DNA, 483 bp, Homo sapiens
tgcattatgcaaagcagctttctctcacccctgaagcctaagtcagccacattcaggttctttttttttttgagacagagtctggctctgtcacccaggctggagtgcagtggtgcgatcctggctcactgcaacctccgcctccggggttcaagtgattctcctgcctcagccttccaagtaactgggactacaggcatgcaccaccatgcctggctaatttttgtatttttggtaaagatggggtttcaccacgttggccaggctggtttcaagcccctgatctcaagcgatacacccgcctcggcctcccaaagtgctgggatgacaggcatgagccactatgcccggcctcacattcaggttctyatagggcttactctctacctcaaacacatagtatgtaaaccaaagccattctcttgctaagaggattttcagccaattgttaagatacagagcttgttatatttatatcttcag

SEQ ID NO: 539007 - DNA, 556 bp, Homo sapiens
actgtaagacccttctttgccaagaaaactcacttgaaagaagctctctcccagcactgcttgtgagctatgtgtgagcacaaccaccctccccagcagtgcaaccatccttgcattctgggtatgactctcccttagaggaaccaaggtggagtgtgcacccatgctgcagacaaggagcctgctgaaaagggccactccctgtccactattacagggtctccaagcagccatctgcaccctgctctgtgacacatgctatgtgacaagaggacagcaccaggggcaacatgacaaagtttagaggggaatggaaataaaaaagaataaagcaagaggtgggtcaacagcaagaaacaagagggagaaaacgttctgactttgtgtttactttaatgygcttctaggtggggcacagtggcttatgcctgtaaccctagtgctttgggagggaaggcaggaggactgcttgagggcagtagtttgagaacagcctgggcaacatagcatgacccctatctctacaaaaaaaatttaaaaattagccaagcatggt

SEQ ID NO: 539008 - DNA, 570 bp, Homo sapiens
ggtggtcacccagggcttgtgagcctcacagcgcaagccggcttctcacacgtgccgctccagccactgtagagctgggactgacttttaaccacaaacaagttgattttgaaacaagtgaacccctttagatttgtggctgggatggggtggctcattgtaagtttcaagctctgggtgactgagcggtatttggaaagcacggtagacaccccgcccctcacccttcagtgaaacccagttgggtggctytgcatgccagggagtgtgtacctcttgtctgcatggggaccgccagggcgagctcctgccctcgttgccctctaaggctgtgtgacccactcagtggctcctggcccccagggctggtggctggaagaatgccagaggggcagagtcctcagttgagaggcgtgtgttggcttcggatccatgagagtgcacaccagcttcctgccctgtgccgcgcggagctctccacgtcatcttctgcatgcatggaggcactatcaaagaagtacctgtcgtgaggaataaatgagttaatatggaaagtgccttggagctgtc

SEQ ID NO: 539009 - DNA, 612 bp, Homo sapiens
gtggcttttgctcatggtgcctgtcctacctggttcttcttccctcccccgtcaccccagtgtgctttggccactcactgggcccctcacagacctcagcggtgctctagctccctgcctcgtgtcactgtcagcctcactgctgggggagccccccaggtagctgagaccacagccacacaccacccagctcattttcacttcttttctagagacgggggtctccctatgttgcccaggctacttttgaactcctggccccaagtgatcctcctgccttgacctcccagaatgctgggattacaggcatgagccactacgcctggccacccgtgtcccctttctggtctcagggctggctttctctctcattcttgtgtttcccacagccgtgaggccctgcttcctttgtctggaacgcgtgtccccactctgcttctcatgaggtcctgggactgtggcctggccccgtactgaggaccctgaagtggtcactgtgcctccttgtgagtgtgctgttgggacaccttcctctggactgtccccgaggggcggggcctgccggtccacttccgcctccccaccttgagggkatgaatgagtgaagagcag

SEQ ID NO: 539010 - DNA, 267 bp, Homo sapiens
tccacaaactgagtggcttaaacaacagaaaagtaccaagttccggtgaccagaagtccttataaggtatcgtgtccctggatttcccaacaggtttcttcttcttattcctcwgcagaaaggtgtaatttggggacccttccttttatcacctctcctgccaggcaacacgggctgggcttctgtgagcttttcttgcctgccactggtcctttctttcttccttgaacaaactattcaggcctcagaagtctctcattcttatct

SEQ ID NO: 539011 - DNA, 553 bp, Homo sapiens
cctgacaccttgtctgtaatacccacagtccctgtctctccctatactctctactggaatgctacctgcttggcatcaggagcaggggcctgggcccgcttcccagcaccctggctcctggagtcaagctgcccctcagctcctgtccctgctcagcctatgacatggctcagaggctaggggctggaatggtactggggaggggagcctgagtcatctccaggccaggaagcacaatgtttggcagggttcctgrgcccagctaaggaaggagcaggagcattgagttacagagccaccttaggccagggaagaggtggtgaggaagggggtgttggttgagtccatggagatgggaaactaacagcaaaccagggtccacaggctctaggcagggggaaggacccaggcagcctcagggcacctgggtgggggaggggaacacagagatgccagtaggacctttattctctccagtcttccttcccaagccagcaccccctcgcccccactcctgtcccagccaaggccctctctccctgcagagctgtgt

SEQ ID NO: 539012 - DNA, 468 bp, Homo sapiens
tatacagtttacctcttcacagaggttatacttgcaggcaaatgcccacatgtgtaccaaatcattttaacgaagcccatcataaccctctggatgaaaatgcaacagaaaaactacaatgcctggtgccagttcacatgtagcagataggtacttaaggggwgatagctacctctgccacgaaaacaaggagacacactctcatctgctgattacaactaatttcctctaagacattttaagccatctgttctaaaagttggtatgtgggaagataaaaattcttttaaaaaaattatgtggtaacacccaaaatcaaaactgaagctaacgtggcattgctcatctatgctctaattttttggaaaacagtttcaggcaagttaggacggcggcaggcccaggagctgaacaaattcaggggccatcttagggcaagctggggtgggattagatgttccagtctgc

SEQ ID NO: 539013 - DNA, 581 bp, Homo sapiens
tgtacactgttgaaaatccccttttccactgagtacatctcaatccaattccccaacattttgaacattttcagctttcaacagtcctcttccccaccagggcaggtcaggtaggaggctgtgtgtgggtttgtgtgtgaaggcatgatctgctttcttgaatccacacttccawccttctatttactgttccagtgtctgaaaaagcaggcagggagggaagaatttgtcttcttatgcactgtccaggttgctgtcccaaacaagtaaatgatcttgtctcttttcatacgctcaggatgaccaggtggttaccataataagttccattgacaaagatgtcagtcctaagcagttcctgaaaacattgatggtcctttggaagacttcatctgttggcagaattctatccctcccacacccacttcctatcccaaggactgcttcagtggtccatatcataccttctttcttattggttattgcaacccaactctggagtcaaaggtacaggtgagattcattttctgtacctcccaggaatcagggacttgagataaggtgtccttgtcttggcctcg

SEQ ID NO: 539014 - DNA, 581 bp, Homo sapiens
tgtacactgttgaaaatccccttttccactgagtacatctcaatccaattccccaacattttgaacattttcagctttcaacagtcctcttccccaccagggcaggtcaggtaggaggctgtgtgtgggtttgtgtgtgaaggcatgatctgctttcttgaatccacacttccaaccttctayttactgttccagtgtctgaaaaagcaggcagggagggaagaatttgtcttcttatgcactgtccaggttgctgtcccaaacaagtaaatgatcttgtctcttttcatacgctcaggatgaccaggtggttaccataataagttccattgacaaagatgtcagtcctaagcagttcctgaaaacattgatggtcctttggaagacttcatctgttggcagaattctatccctcccacacccacttcctatcccaaggactgcttcagtggtccatatcataccttctttcttattggttattgcaacccaactctggagtcaaaggtacaggtgagattcattttctgtacctcccaggaatcagggacttgagataaggtgtccttgtcttggcctcg

SEQ ID NO: 539015 - DNA, 581 bp, Homo sapiens
tgtacactgttgaaaatccccttttccactgagtacatctcaatccaattccccaacattttgaacattttcagctttcaacagtcctcttccccaccagggcaggtcaggtaggaggctgtgtgtgggtttgtgtgtgaaggcatgatctgctttcttgaatccacacttccaaccttctatttactgttccagtgtctgaaaaagcaggcagggagggaagaatttgtcttcttatgcactgtccaggttgctgtcccaaacaagtaaatgatcttgtctcttttcatacgctcaggatgaccaggtggttaccataataagttccattgacaaagatgtcagtcctaagcagttcctgaaaacattgatggtcctttggaagacttyatctgttggcagaattctatccctcccacacccacttcctatcccaaggactgcttcagtggtccatatcataccttctttcttattggttattgcaacccaactctggagtcaaaggtacaggtgagattcattttctgtacctcccaggaatcagggacttgagataaggtgtccttgtcttggcctcg

SEQ ID NO: 539016 - DNA, 588 bp, Homo sapiens
gggccaaagaaatggaaaggaggctccaacgtacctgctacatcaaacagatagatgtgaggaccaaatctggcccatgatttgtcagtattagacttgtggtcagttggcttaggaattcacaaactgataagactgcaaaaggtttattcgaaaataaatagataaataaaaatataaatttacaaactgaatacattgcatgatcaaactgacttctcagaaattctagggataaagtatagaactgtaagaagaggtccaatttctgcttttcatttctgcattaatttaacaaatttaatgaacatttaccatatgctaggtgctggagatacatcartgaaaaagataaacaaagtacctgccccactgagcttgcattctgtttgggagacagcaagcaataagtttcagacttttcagttaaaaataaaacagaggactggacactgtggctcatgtttgtaatcccagcactttgggagaccgaggcatgtgggtcacctgaggtcaggagttcaagaccagcctggccaacatggtgaaaactgtctctactaaaaatacaaaaattagccgggtgtg

SEQ ID NO: 539017 - DNA, 588 bp, Homo sapiens
gggccaaagaaatggaaaggaggctccaacgtacctgctacatcaaacagatagatgtgaggaccaaatctggcccatgatttgtcagtattagacttgtggtcagttggcttaggaattcacaaactgataagactgcaaaaggtttattcgaaaataaatagataaataaaaatataaatttacaaactgaatacattgcatgatcaaactgacttctcagaaattctagggataaagtatagaactgtaagaagaggtccaatttctgcttttcatttctgcattaatttaacaaatttaatgaacatttaccatatgctaggtgctggagatacatcagtgaaaaagataaacaaagtacctgccccactgagcttgcattctgtttgggagacagcaagcaataagtttcagacttttcagttaaaaataaaacagaggactggacactgtggctcaygtttgtaatcccagcactttgggagaccgaggcatgtgggtcacctgaggtcaggagttcaagaccagcctggccaacatggtgaaaactgtctctactaaaaatacaaaaattagccgggtgtg

SEQ ID NO: 539018 - DNA, 536 bp, Homo sapiens
atctacagatggacattgatctgttacctatgttgacaagaacattatggtctttgtcaaaccacactgygaatgcactaggatgctgcactgattttccatcattactgctggagttgggaaaggagaaggaagattcgttgtagtttgccatagggaatgttaccctcctttccctctaggccaaatgactccttacaatgcagccaataaaaagcaaaaagaataagtttttatataaaaatgtttatggttcatatctttccatataaacattcaatgtgggggaagaaaacctcaccagcttggcaaaaaagagattagattctcccccaaagattggtttggaagtctccccaaaagaaagctgtctgatgaaatcactgccatcttaagtggtaaaaacacaatgcactacattaaaacatagttattaggtttttataatcatagtataagagccctcaaaattatcttgtctggaatctctagaaaaatacacacctttgtgatttaggaccaactgctacttagag

SEQ ID NO: 539019 - DNA, 602 bp, Homo sapiens
ctattatctcatggcacagaagatgagtctctgcaactgcccaaaacatcaaaccctaaaatartgataatcatgctagcaagcacttacgcagcactatgccgatgctgccctaagccttcgttttgtgctgacttacaagctccccataatggctatgtgaagtagttaccgtcttactccattttacagatgaggaaatggaaacccagagaggttaagcaacttattcaaaatcacacgcagcctgtaaatgatatgctaggatttgaacccaggctctagaatctttgctttcagcgactacactaggaaagctatgggctctcctttctgtgggaccttttccttgaggaagacagagtctgctctcagggggaactctacaggttttttagggggtgggtgggagactccttccacatcctgttggtttcatttgtttattttgggtgtatgaaggccatgtgaaacgttactgagcttttcagaatcaaaacagtacaagaaggtattatcagaagtgtcccaccctcctcatctcttctcccagttcccattcctccttccttctcacctctttcccacctacctcttgtaga

SEQ ID NO: 539020 - DNA, 621 bp, Homo sapiens
gcccatttccaagttattgaaattcactgggaagtatggttaatatgcaaatatagattagcccccttgccactgatgcagagctgcctgtttggcagcctgtggtactcaagattcataaaatatctggcacaagcaggggagaacggagaatgattggacggggttggggatgggggtaggtttaattcytgggctactaatgaatctgattgcagccaacactcgattatacccaggtggattacacactgggcgagtcatctgtagaaatgttaaatcctgtgaggttttacccattgctccacatactcagaaagcttccaagcagcctgacccagccattaattgctgcgcactcacagatgggcagctcatttccatactggttgaagcaaaacataattggtaaggcaaacatactgtcagaaatatacaatatctatgtatcccactacacattggaagtcaaacaacactgagctttgtgattttccactgttttaaacgaatcaccccactgctccccctcttgcatggaccgctgaggagttgcaacccatggggctgttttaacaaacatctgagaacatacacattcaaatacgctgttctttcaaa

SEQ ID NO: 539021 - DNA, 652 bp, Homo sapiens
tgggctgctgggcctgtgtcccctgcacaagccagacatctgaagaaacagggaacttatgtcagtatcagttttctggcaataactttcaggctcctaaagcagatctttataccagcaataggggtttctttggtaataaggtctctgctttaagcatttgttaaaaccagattaatctgaataagaaaataagatgacagaggcacatcagttactcatcgctcagttaatccctggcagtgcatgtatctaccgagcacccagcaaggtatacgcagagctcgtgctaagttatgtcgacacagtycaggcctcaggatacacccaggtcttgttcacaggtgtgttacttatagtggattctcaatatacgctgtttcctcttctcacggcgtagaatccacagtgctttcacagatgtccccaagattggcagccgcctcctccaggccccatgctagattgctgtgcatgttacagagctccccgtgctgccttgtgatttctccgtttatttgttgggctcctccatgagcctgccctttcctaggataagcaccacgatcagtgtttcacctttctggacccggtgtctgatgcaatgcccggcacgtagcatatgtgaataaacatctattcatgtcagaca

SEQ ID NO: 539022 - DNA, 665 bp, Homo sapiens
ttgatttgtaagagcacatttttaaggaaactagctcttatgtgctatgaatatttttcactttgttatgtctttcgatttttgcataaaatttttttctaaaatttccacatggaaattttatataatattatataattgggtcaatcagtcttcattcatttagcatttattgctcgcttaaaaaggttcaggtactgtaggtgtgagaataaagagatgaataaaagacagggagtttcttcgaagggctacactactgggttaaaaagatgagaaagttgcctattaccagatggtgtcatgtaaggctttacagatgcaatttgaaaaacctccaaaataatgagttgaagttccttagataaaaagggagcccgggaatttacttgagcacagaagtgtctgtaggtatgatttctatgttgtcataacagaattttcagaatgatgacaggtagttcatgactaaaaaacaaaaaaggtaagaactctcaaagcctcttctaaggattttcaagcccttgattacaaaagataacacgataacttagatatgttagcagttcaatgtcttaaaagtattgagataactaaaagctatygttagaagccagacaaatgagtcaaatatacccagcttcaagctgtatctagcacagagc

SEQ ID NO: 539023 - DNA, 535 bp, Homo sapiens
cttggcatggaatgtatagttccatcatcaaatgctttacagacagcaagaattacatttaccatatattaactgttttaagaaagataaatgtgtattcaaaagcatcacataaaaaaggtgaggtagataatatattartgctggaagctcttgtgtttgaagctactgtggtctacatataaacaaagatgtaactgagtgcatataatcaagcctgattactatttaccaggctgactttattactcactctcaattctttgcaaatcagagactttataaaactacagctttgaaaaataacaagaagacatttacatttttaaaaatggagagcccaaatattcttgaggattaacagtcatatatatcacaatgacaataattttttaattgaaaatctatgttatcagaaagcaacaacagtggctcacaatagagactccactaaacatttagctggtattttccacacgttgctctgatgaaaaagggtaagcagtaaaaatgtgcttctgagagttttaaacca

SEQ ID NO: 539024 - DNA, 573 bp, Homo sapiens
tgctcggttgggagtgtgatttatatgtactagactcacataaatcaggtgtttcccttactgcctttcrtcagttatttgtgctcatgccctatctctacaacgaggctacagaagcttccttgagggcagagaggaacgtatatatctacatgtacatagcaaaatatatttagttttatttaaacaactaaaatagtcttaatttatcttataccatcttggcactctataatgtttttcatatattatttcccattctttcctgtataaaatatgtggtcattattaacctacttaccactacaatgcaatttcactgaaagtcattaaattagattcacaaaggcgcaagaaacataggatgtcatatttattaatgtgaataaaattggggaaaatgcaattttagtatgaataaaatctgggcaaacgcaaagttttgagcctattttgtgaggtttatgttttgttggatccttcgtagctctcagtgctatactttgcacgcagcaggtgctcattaaatattaagctattaaagatattggatgaagttattttaataagact

SEQ ID NO: 539025 - DNA, 573 bp, Homo sapiens
tgctcggttgggagtgtgatttatatgtactagactcacataaatcaggtgtttcccttactgcctttcgtcagttatttgtgctcatgccctatctctayaacgaggctacagaagcttccttgagggcagagaggaacgtatatatctacatgtacatagcaaaatatatttagttttatttaaacaactaaaatagtcttaatttatcttataccatcttggcactctataatgtttttcatatattatttcccattctttcctgtataaaatatgtggtcattattaacctacttaccactacaatgcaatttcactgaaagtcattaaattagattcacaaaggcgcaagaaacataggatgtcatatttattaatgtgaataaaattggggaaaatgcaattttagtatgaataaaatctgggcaaacgcaaagttttgagcctattttgtgaggtttatgttttgttggatccttcgtagctctcagtgctatactttgcacgcagcaggtgctcattaaatattaagctattaaagatattggatgaagttattttaataagact

SEQ ID NO: 539026 - DNA, 573 bp, Homo sapiens
tgctcggttgggagtgtgatttatatgtactagactcacataaatcaggtgtttcccttactgcctttcgtcagttatttgtgctcatgccctatctctacaacgaggctacagaagcttccttgagggcagagaggaacgtatatatctacatgtacatagcaaaatatatttagttttatttaaacaactaaaatagtcttaatttatcttataccatcttggcactctataatgtttttcatatattatttcccattctttcctgtataaaatatgtggtcattattaacctacttaccactacaatgcaatttcactgaaagtcattaaattagattcacaaaggcgcaagaaacataggatgtcatatttattaatgtgaataaaattkgggaaaatgcaattttagtatgaataaaatctgggcaaacgcaaagttttgagcctattttgtgaggtttatgttttgttggatccttcgtagctctcagtgctatactttgcacgcagcaggtgctcattaaatattaagctattaaagatattggatgaagttattttaataagact

SEQ ID NO: 539027 - DNA, 637 bp, Homo sapiens
ctattaatgggttgaggaggtaagaaaggaacaatgaaagtgttattttagataaatctttactttgtgtgtagcagcacaaagctttgctcaaggggcacagcaacagttctctagcgatatcccacgcatggaactgctgattagcagaattctattgtctcttctttttagaaacaggtcattttctttaaacagtracataatatggctaaatataaatatatcttgatggtatggacaaagtggagcaaaatgctattctacgtaacacaattctgaaaatactatagtgaactctgttttcctgaataacaggtaactggtctttgcaaagcctctaactattctcctaaaaattagtttccatttcctatgataatattttacagaaccaacaattatgttttcaaaaaaaaaaaaaaaagaagagccaggaaagagcacgaggagtgagaacatgaacctagatagttgtcatctcatcaaaaataatgaatgctcaagaggtttcaacttcatgtcttcccagtcgtttgtccaatcacaacagactaccagaagagaaaagagtaggcaaaaaacactcttctttatcagccccagctagcacctgtaacctccaaacaactatata

SEQ ID NO: 539028 - DNA, 660 bp, Homo sapiens
attaaaaaaaggatccacaatggggaccagaatacactatgtcctatctttattatattgactctctagataaaaggcttctgaatcattcatccaggtaatctattcttgcaataccttgtgtgctgacaaggaacatcctggtaagtgctgtatttctgaccatttaacattgtgtaaataagyctttatttagaagagagttgttttattacttttctatgatacataaatcagtaagtttagttatagaatttatgtccacatgttctagtttaatgttattttaaataatattaaataaaatccaagtggtgtatttcagcatttgtttttttcctttggaaaatgtttagctttagtttgttggttaaatatgacaaactcaatgtaatataccaatctgacttgaaggaatttaaaaatgatattcaatgacacagaatttgatttggaacttatttgaaccgcaataaataacctgtggagttattttgctgagaatggctcagttcagtggagcttaatggaaaactctactaagtacttgggggaatgggagaaagtgaaaaacagatgggaaaggcagtacaagggcttggaggcactccccgagctcctatcctcactcagatcacaatgttcattgctgactttttc

SEQ ID NO: 539029 - DNA, 183 bp, Homo sapiens
ctgagtcctcccgcgctggctgcccccgccgcccccggccgcgcgctgctctacagcctcagccagccgctggcctctctcggcaggtcaggggccaggggccaggggccrggggctgggcgggtgggcagggcgaccacccccaccggggtttccttctacacagcggcggcggcctgccct

SEQ ID NO: 539030 - DNA, 518 bp, Homo sapiens
agatggtacaacctttattcttttccaaaataaaacaaagggcacagcatctgtagtcagccgacaactatttcggccttttgggggtgggtctggccgtacttgtgatttcgatggtacgtgaccctctgctgaagacttgccccctgcccgtgtacatagtgcattgtttctgtgggcgggcccagcactttccgtcaacgttgtactgtatgtgatgaattgcgttggtctctgcatttttctgcagaagaggagtaaccgctccaggtaccttgacctttgtacagcccagaggccaacactgtgggtgtgtgactctttagcaaaaaaaacccatgtggtgatgatgtgtmtatatatgtgaggatgtatcgggaagatttctaaataaaagttttacaaaggggccttaggactctgtgcttgcattgcacccctaggcctgagacgggatattgaaagaaaagtcatggcaagaacctgtttctcctgacatggggagcctccaagactca

SEQ ID NO: 539031 - DNA, 516 bp, Homo sapiens
cgaggagacaaattacaaactgatcttccattctccatcgctgcagcacctgaataaagccttcttccctggcaatactcagtgattggctttctgtgcagcgagcaacaggacctagaccaaatccctggcgtttcagtaactactccatagagggcaaaggaaatgactgagtgacataatgaagcttccccctgcctttgagaacagagaaactctaggcagtcgttcttaaagtttagcacacgtcagaatcacccagtgttttaaacactgatagccaagccccattccagagtttctgattctgtagatctgggtgcagcttgagaatctgcatttctaacaagttcccaggtgatgctgatgctgatgcttaaggggccacactgtgagaatgactgctccrtggtaggtaaaggaaatcctctcatcaacatattttttgcgtgggcaatggcctcattacctttctgatggagaaaaactaggaatgttgatgggatggatgctggg

SEQ ID NO: 539032 - DNA, 618 bp, Homo sapiens
taccttgagctttgttttcttaactgcttttcctttctctgttccaccaataaaatctaaataacaaaataattggatgcattatttccagctaccttttttcattttctggtcttgtaytgagaccaggatgcaacccaaggaattaaaagcacacagctagctatcaccttcttcctgatctcttaaaaaaataaaggcaacctcattcacaagagttttcatttgatattataataatgaggatcaaattattgaggcactccttctgtcacttgggaaagaaaacagaaacactctttgctagttagatttacgtgacttcctttggaagcaagataataatttatatttaaatgaaatgatgattagcataagggtttatcatggcagccagcccacagcaagctttatttgtacttacctgatgcaacagagataagaaatgtaagtgcagtcctagctccttccccacaattaaagcattttgaggctttactccccaaatgacaggttaaccaaaatgattttaaaagaaatgttaatctacaatttttgtaatgttcttatagaaaataatgatgtcattaaaaacaacactagctcagagacttatgg

SEQ ID NO: 539033 - DNA, 641 bp, Homo sapiens
actccctatttttaagtttactgtaaaactatagtaataaagacaatgtagtatccacaaaaaatagatatgcagatagataagtagatatctatctgcatagtagatatctatagatatctatctacttatgcagatagataatacttatctagatagatagatagatagatagatagatagatagatagatagatagatagatagaaagaacagaaaatagaatgcaaaagtagacctacggaaattttgtcggtctagatagatagatagatagatagatagatagatagaacagaaaatagaatgcaaaagtagacctacaaaaattttgtcaaygtgatacattttgacaacgcaatgaagaaacaacagccttttgaggaaactgtgctgaaatttttggttatcaatgtataagaaaataaatcttggtggctacctcatactttattaagaaaaaaaatagatcatagaatataaaattgaaaattgtaaactttaataaatagaaaaatatatatgacttagagttaggcatagagttcttagatacaataccaaaagcatgatccatagaagaaaaaacttgaaaactatatctcacctaaattaaaaatattttcacatgaaagtcactg

SEQ ID NO: 539034 - DNA, 627 bp, Homo sapiens
cccattgcactctctctttggaacatacatatttactttacttattgtttgaaatggcagttgaagttgcccaatgtttaaattgttatttctgtagcgttcatgctctcacttgctctctctccctctcctacttattcttttacttttggctaagtatatgtatttgaatgtgtgtaggttaaatatgtctatacatatgtctgtttctctttatcttcctggccccttaatctatgccaccatcatttctgaacgcatcaaattggttgcctaaatggactccttcccttccmgattttactcctcatatttattctctatactgttaccagagtgaattttctaaagtacaaatagattcatgttgcttcctgcgctcaacacccttcaaagtctctgtcttattccttggataaaatatacttttgcatgattaaaaagtttgaaaataatctggcaacagcttgattttctaacctccattccaactatctcccaaagcatcaaacaatcgcatgtaccatcccattctcaagcatattctatgcttaggtttactgggtctcttttatgtccttcaattttcagcattcatacattctgcttttgctgcctgaaacgact

SEQ ID NO: 539035 - DNA, 605 bp, Homo sapiens
atggatactataatctcattgtagtatcacctggtttttcatactttcttctcataatctctggtttaatttttttaatgtgcttcttccattctttagtatattccgaacttaccaccccattgaattattttttctacttcaaacttatgcatataggtaataaaaaatatggtgttttgatttacataaatacatgcatatgcacacaaactgtatatttcttcatttaacttctttggcattcttatttatttctaatgtaaatgtcacataataaacaaattggtatttactgtcaatgacatttgacttttgttgaacaggttgcaaattaacataaacacattacaattttgctcgctttctacgttaatcagaagaytgtaaaattaatttgtaacagggaatttatttcaacaattattcctttcttttattttccctatttgttcacaagatgcctaacataatttacctaatccaaattcacctccttcttttattttccctatttgttcacaagatgcctaacataatttacctaacccatattcacctccttcttttatttaaaatgttataactcttgtgtccctgtaaat

SEQ ID NO: 539036 - DNA, 605 bp, Homo sapiens
atggatactataatctcattgtagtatcacctggtttttcatactttcttctcataatctctggtttaatttttttaatgtgcttcttccattctttagtatattccgaacttaccaccccattgaattattttttctacttcaaacttatgcatataggtaataaaaaatatggtgttttgatttacataaatacatgcatatgcacacaaactgtatatttcttcatttaacttctttggcattcttatttatttctaatgtaaatgtcacataataaacaaattggtatttactgtcaatgacatttgacttttgttgaacaggttgcaaattaacataaacacattacaattttgctcgctttctacgttaatcagaagactgtaaaattaatttgtaacagggaatttatttcaacaattattcctttcttttattttccctatttgttcacaagatgcctaacataatttacctaatccaaattcacctccttcttttattttccctatttgttcacaagatgcctaacataatttacctaayccatattcacctccttcttttatttaaaatgttataactcttgtgtccctgtaaat

SEQ ID NO: 539037 - DNA, 287 bp, Homo sapiens
tcttaacctgtcttctccaagatcaccatatcatctttgttgacaaatcaaatgagcacttcacctcctggaagaatttsacattttttattatctctcaatcttaaaatgatccatctcttgacttctgtaagaagttctctctcaatttttggtcaatgctataactcctttatttctttttggaaatctgtgtccactgagctatacattccagtttctcttagtttttaatccttgccatttttgtaccccttgaaccgtctaatttttgtaaaaattctctt

SEQ ID NO: 539038 - DNA, 287 bp, Homo sapiens
tcttaacctgtcttctccaagatcaccatatcatctttgttgacaaatcaaatgagcacttcacctcctggaagaatttcacattttttattatctctcaatcttaaaatgatccatctcttgacttctgtaagaagttctctctcaatttttggtcaatgctataactcctttatttctttttggaaatctgtgtccactgagctatacattccagtttctcttagtttttaatccttgccatttttgtaccccttgaaccgtmtaatttttgtaaaaattctctt

SEQ ID NO: 539039 - DNA, 665 bp, Homo sapiens
aagtttacactttttcagtaatcctgcacctgttggaaaaataatattcattgaagaaaaatgtttgaaatatttatttatgatcagtaaaacataaggtttattgttatcacgtttctaactattattatttcagaagacttaggtaacataattagacaaaaataaaatgcaaatatacaacatcttaaatgtgaaaactgcactgaaatctgcactgtcaatatatgcaccataccctgattgctaaaatataaaacaaatttattttgtaaccatttgaaatatttaatatatttaacaagatcaaggtaataaaatgtcaacctgtaaaacagaataaaatattcccaaatcatatatctgataaagaattaatatccataatatataaaaaactatgactcaataacaggaaaacaaacaatacaattttaaaaatgggtaaagtaattgaatacacatttctccataagaagatatatcaaggccacaagcatattaaaacatgctcaacattattaatcactaggaaaatggaaatcaaaatcataatgacrtacttcctacccattatgatgactaatatccaagcaaaacaaaacacaataaaacagaaaataagtattgaaaaggacatagaaaaattagaactctaaatagtt

SEQ ID NO: 539040 - DNA, 654 bp, Homo sapiens
ctcaataccatgcatttctcattcactgatcttccgccaatggacacaagtagaaacattccattctgtctgttttcttacattagtaaagttggcaaaaggttaaaatatgaccatacattgcctctggaacctcttaaattgtaacacagttcttttcttcttgatgatgaaacttcccatggttacattgggaaccaaagaaccacgtggataagcaaacrggatgctgttgcaactttcacgtactaagatatagtctttttttttttgcagtgcttccacaggcacatatgcaaaattactgtccattaaaactggaattcttttctcagtcagcctgccaaagactgttaaacaacacttttaatggggctagccagtttgtaaacacagaaggtagaataaataaatcaattctttgtggtaaaaatgtaaaatttcattcaatgttatttctcttaaaatgacacacagaaagaatcaaatgtaaagatatgttcttttcattttcttagaaatctttgttgatatgcatatcaacatgcaggaaaatccctataaaccacacttattttaacagaactgttaaaattcaaagaaataattatcatcctgctattctgtatttagaagtatctgtcagtgccatat

SEQ ID NO: 539041 - DNA, 496 bp, Homo sapiens
atgtgcctggcacaattctaagtactgagaattagcagtacagaacaggcaaaatttcctcctctcatgaaacttatattccagcattggaaaacacaagataaattataccatatattagaaaattaaaaatgttatgacagaacataaaagaggagggagaaagggagtacccttctgggataggagtaggttgtagctttaagtaagcatggtcaggtaaggcctcactgggaaggtgacctttcagcagaggctggaaggagaggtaaacaaggcagaatgaactgcagaagatagttagaaagatgggcattgtctgtatgtgtataaatagttttttggtttttttttttttttgccacgagagtggatgagttcytaacaagagtaaattcagacatggaatagaagaacgctgatgaatgagtcctgaggtactccacagttagagggcaaggagacaaggagttgtcagcaagggaaggtgagagag

SEQ ID NO: 539042 - DNA, 514 bp, Homo sapiens
tgttcttagagatcttgtttccttttttctctctaggtttcaaggacgtagaagagctccttttgaaaactatgttgcagcctggaggagaaaggtggtacacttggtataggccggttggtcccctgaacttctcctagagactcttcctggcagagcctgaatgtaaggaaactgtcagccatcaaaaaaggcagtgaagtcaattaaaaatcaagtgtaaactcatgccttctctggttcttctcatgcatgctatttacatcttaccacctgsactgtaaactccaagtgggcagggatgggccctacatttgttcggtgtcacaggctgcctctctttcacttctctgtgttcaatatgtatttagtattttattcaatgaatggaaagatgaaattatttttatattttctgtagtacgaactcaggagtataccttctcctaggtctgaaaagcagacagacaaaatgtggcttaaataataaaacctattcctagctggtctagtc

SEQ ID NO: 539043 - DNA, 533 bp, Homo sapiens
tggcttggcaagtgcagtgtgggctggattcagcccccatcacccaacgcatttgtgcagggagccctgagtgaggaggcggggatggtgccgcctcctaggggacatttggaaatgtgtctacggaggtgttttcatcgccactatgtctggtgtttgtgggagtgggggagtgtggggcaaggggaggggtcttggcatttagtgtctgaaatccagggatgctaggtgtcctgtcaaggtggctggtcctgccaagggtgatgaaatattctctgtactcccaaatccaggcctgagacccctctgctgtccagttacatcgtggagaggaccataacaactgtgaccttgtgaaattcttcccagtgtgctaagtcggtttttttgtttgtttttgtttttgtttgagatggagccacggctggagtccagtggtgcgatctcagctcattgcaacctccacttcccgggttcaagtgattctcrtgcctcagcctcccgagtaactgggatgacaggtgcatgccact

SEQ ID NO: 539044 - DNA, 653 bp, Homo sapiens
caggccccagaggagcatccccacgcctgtccacaggtgctcctcataccccttctctcagtcacgtccagggccgaggctggactgggaacccagggtgctctgctgtggctcgtgcacattggcaggtgccccccacgggcctggacacctgccctgggcctgagaacccaccaccaatgttcccctcagcgtccagcctggtgttggaccttgagatatgcaggaagagcctgtggtcaagcccttcccccaagatgtccgcagtgtcaaccacycagccccgccccatcagacaggtcacaaccactggggcagggctgaggacaggacccagcccagatcccatgtcctccatcagccagcgcgggccaagccaaaatggcagatgtcaggcgagtcaccaagttcaggcgaggctctgaggcttcatcacgatggccaagaaagggtttatgttgctctcactcattcattcagcaatcctggccactgggtactcaggagagagtaccctaatgagggaggcagattgtcaacaaaaactacaattactaggagccccaactgggagaagcacaggaggtcacaggagcccaggaaggtgactgaccaagcctgcagggtcacggaagcctcccagagggaggtag

SEQ ID NO: 539045 - DNA, 541 bp, Homo sapiens
tcgtgcacattggcaggtgccccccacgggcctggacacctgccctgggcctgagaacccaccaccaatgttcccctcagcgtccagcctggtgttggaccttgagatatgcaggaagagcctgtggtcaagcccttcccccaagatgtccgcagtgtcaaccactcagccccgccccatcagacaggtcacaaccactggggcagggctgaggacaggacccagcccagatcccatgtcctccatcagccagcgcgggccaagccaaaatggcagatgtcaggcgagtcaccaagttcaggcgaggctctgaggcttcatcacgatggccaagaaagggtttatgytgctctcactcattcattcagcaatcctggccactgggtactcaggagagagtaccctaatgagggaggcagattgtcaacaaaaactacaattactaggagccccaactgggagaagcacaggaggtcacaggagcccaggaaggtgactgaccaagcctgcagggtcacggaagcctcccagagggaggtag

SEQ ID NO: 539046 - DNA, 653 bp, Homo sapiens
caggccccagaggagcatccccacgcctgtccacaggtgctcctcataccccttctctcagtcacgtccagggccgaggctggactgggaacccagggtgctctgctgtggctcgtgcacattggcaggtgccccccacgggcctggacacctgccctgggcctgagaacccaccaccaatgttcccctcagcgtccagcctggtgttggaccttgagatatgcaggaagagcctgtggtcaagcccttcccccaagatgtccgcagtgtcaaccactcagccccgccccatcagacaggtcacaaccactggggcagggctgaggacaggacccagcccagatcccatgtcctccatcagccagcgcgggccaagccaaaatggcagatgtcaggcgagtcaccaagttcaggcgaggctctgaggcttcatcacgatggccaagaaagggtttatgttgcyctcactcattcattcagcaatcctggccactgggtactcaggagagagtaccctaatgagggaggcagattgtcaacaaaaactacaattactaggagccccaactgggagaagcacaggaggtcacaggagcccaggaaggtgactgaccaagcctgcagggtcacggaagcctcccagagggaggtag

SEQ ID NO: 539047 - DNA, 541 bp, Homo sapiens
tcgtgcacattggcaggtgccccccacgggcctggacacctgccctgggcctgagaacccaccaccaatgttcccctcagcgtccagcctggtgttggaccttgagatatgcaggaagagcctgtggtcaagcccttcccccaagatgtccgcagtgtcaaccactcagccccgccccatcagacaggtcacaaccactggggcagggctgaggacaggacccagcccagatcccatgtcctccatcagccagcgcgggccaagccaaaatggcagatgtcaggcgagtcaccaagttcaggcgaggctctgaggcttcatcacgatggccaagaaagggtttatgttgctctcactcattcattcagcaatcctggccactgggtactcaggagagagtaccctaatgagggaggcagattgtcaacaaaaactacaattactaggagccccaactgggagaagcacaggaggtcacaggagcccaggaaggtgactgaccaagcctgcagggtcacrgaagcctcccagagggaggtag

SEQ ID NO: 539048 - DNA, 574 bp, Homo sapiens
ctgtgaccctcatccctaagtccctatgacaccaccaacccctggtcagaggaatgagcttcatgtccggcaatgtggaattgaaattaaagagggaaattaaaaaggtaaattggtccaaaaaaagaaagaaagaaagaaagaaagaaaaatagagaaagaaaaaaaccatgcaaaaatgcaaaattcagtgtgctgaacatgatgcaggagtactcccatagcctgacgctcacttcagccccagccccagccccactccacaggcggtgaccaccaagccgtgtaggtgggcttgcccaaggatagcttgaaggtcagcagccggcctgcggggggtggggggtatcttgtcacatgagggagggtctawgaggaggaccgcctcctcctgggccgaggtcacttttcagcaggcgtcaggaccacggtggctcacagctccccctgccctcttctgggggaaatactatatgcccctgagacgcctctgtctgtctgagctgtaggagcgctggggcctgcgccggctgcttttcccagtggggaagtcctgcctggagcagggacagca

SEQ ID NO: 539049 - DNA, 637 bp, Homo sapiens
tcccctgaatctcagcctcttcagtgtctacaaagcacaggcactaagaggactgccctcggggtgttgtgtggaccctggaggggcacaggccaacccagagccagggcagaaagaagaactgttattgtcatatcattaacaacagtggcagggtcacagcccaggaccagttatctcgctggatcttacatatccttgagaatgaaattgaaggagggaaaaattccttttgctgtattttgtccctccccacatgcctccctccccctgtggacacttaagccacactttggcctccacagccgaaatctgaagggaaacccaagaaggtagtgcttgacccttgaacctgggggctctgaycttgtgttgtttgtgctttacagagtttaaaacctaacccaagagtggggtggatgtgacttattacccactctaagaaatgggtctgcacggatgctggactcaggttttgggctgaggagaacacagccagaaagaaggctgctcccacccccgccggcttgctggtcaccttgggacaggctggccttctctgggcctgagcctgacctcagagctgatgccaagggatcagttctctgacatcctctggtggagggcaaccacagag

SEQ ID NO: 539050 - DNA, 506 bp, Homo sapiens
ccagagtgttctccatgccagtgtcacagagcaggggggctgtggtcggtcgaggttctcaggggtgcggtacgtttgggtgttggctttcagaagtcttcrttgatgtttcttgctccacttctccttcctgatgaattaacctgagagatgagggtccagaaagattggaccccaagcatgtcaccttttaatctcatgacccaccagctgagggaccagggaggtgctgttccagtcaccctttgctggttcccattgcgtggcgtgaaacatgggacagagaactgccatgagcactgatgagagatgccactgggcaccctgaccatttatgtcctggccaccaatactgggacagatggagctccttcgagaggttccatcactgccattgataacaccagcccacatttgcccaggctctgtgggtttattcatttcattgaatccttatgacaccttgcaagatgggggatcgtaaagttgctgggttttttttgttt

SEQ ID NO: 539051 - DNA, 506 bp, Homo sapiens
ccagagtgttctccatgccagtgtcacagagcaggggggctgtggtcggtcgaggttctcaggggtgcggtacgtttgggtgttggctttcagaagtcttcattgatgtttcttgctccacttctccttcctgatgaattaacctgagagatgagggtccagaaagattggaccccaagcatgtcaccttttaatctcatgacccaccagctgagggaccagggaggtgctgttccagtcaccctttgctggttcccattgcgtggcgtgaaacatgggacagagaactgccatgagcactgatgagagatgccactgggcaccctgaccatttatgtcctggccaccaatactgggacagatggagctccttcgagaggttccatcactgccattgataacaccagcccacatttgcccaggctctgtgggtttattcatttcattgaatccttatgacaccytgcaagatgggggatcgtaaagttgctgggttttttttgttt

SEQ ID NO: 539052 - DNA, 503 bp, Homo sapiens
ggaggaaggtgaagtgatgaaagtcaatatctacccagggaccttttgtggtttagtcaattaattgttggctatggggagaaggggagtggaagaagagtgaagaggaaaggaagaaatgaaaaaaaaagaaatcamctaatttcccatacctgtcagggttcttctcagcttttcctatgaagatgtcccctgtggcccatttagagccatttaccaaaacttttttgagatttctttgattttaacatctgctttcctctttcttccctgcatagtcctatgcttccgggaggcatggcagttagcctttgatcttggtgcctcttgttagctgcatgctgtaagttatccccctcctcaagctaattcttggcaatgatgaaatctacatccttccttcttcactctctttatcacagcttcctatcaagtttgacatgagtcagaccagctatccccacagagattcacagaactcactaatactttaataggaacag

SEQ ID NO: 539053 - DNA, 652 bp, Homo sapiens
tgctcaattaagcacttgattgaatggaaggagaaatgatggctttgaagccttcccttggtgtctcgttcctgtgaatactggatggcttggctgcaggtgcccagcataactgcacagttataggtccatctcttgctctggatcacaaatacacagtggtacacaaatctagtgtgaactcttactcctacttctcaggagagaaaactagatctcagaacccaggatttgccagacttagtacccactgcctgctactgctttttggacatttcaattttcaaaagayggggctgtgggacaatgtgtgcgctccacatgcagagcacagctactttggatgctcacagctaaaggcaggtgacttgtgctcttcagttcacctttgggaatccctatgttgtttattaagatgctagaacatatgaatcacaagactggcctcagaaaagtccgaggattctaatatctcctgctactaagcaacaatccacctcatcaaacttggttttgaacaagacaagctctgctcctgcagggctatgcttctgaggcttgaccatgggcggcaccaccttgccagtgaatatggcttaacttacactggcaaggcagagttctggtctaagacctaagagtaagatggtat

SEQ ID NO: 539054 - DNA, 412 bp, Homo sapiens
tctataactttctgattttaaaacaccaggtaaattctaaaacctctaacttcattttattttctcaaaaatgaaaaactccattgcatactttaaaccgccattgtatactttaaagtttgcagttactctgtactaaaagtgctaagagcctcttcaaaatatgttcatggctggaggatgaaacttagctttactgactagttaactcacggcttattctcttgtggatacaaatgagaccacttcaactttataatataaatttcactggcacctctttgtggaggactttatgctaagtaaccacacaagcacatatgcacatgcaagtgcactcatgcacatgcrtacacatatttctggccgcccactagagagagctcacatgcatccaggagtaaatccccag

SEQ ID NO: 539055 - DNA, 550 bp, Homo sapiens
aacagaacaagagaataatggcttaaccrtagaatgaggggcttaagctagatatgaggaagtggttcctggcggcgtgctggataggttgtcatgggagtttacagaatccttttctttagaagcctttaaaaatagcttagataatctgttcatggaatggcagatgtatattctgctttgcctgtgtccactgcacatttaatacactcttgtatgtacagccatgtctttactagactctgaaagcaaaggctactgagcagggctcttgtccaccagtaccagacatatatcatgggctctggaaatgtgaaggaatgagtaaagctgagagtttggatacaatgatttagcaatgatcaattatagcctactagtttgtggctagttaaatattggccctatggttattgtcctacaatcatttaataaaacaaaatttaaccagatgacactatttggctgaaactctctttgaagagttcattgaatccaactcccttcttctaggttgttgactttgtccgtttgatgattctacactagc

SEQ ID NO: 539056 - DNA, 660 bp, Homo sapiens
cagtgttaaaaaaaagagtcactgagctagtaagcagcagaatgaagattcaaattcagttttgggcaacaccragcctatccattgtctttctgtactacgttttctccagtgatgcctagatgtcttggaaaagtggtggcctagcgggacaaacttagggagggcctgagtatgaggagtatgaaatggggatgggagggattctaaaaggctgggctgtggtgggaatgggattgtattgctgtgagttgtggagcctgggaaaatctgaaaggcagagtctggagcaaaactgagattagaactaaaacacaagtccacacgggctaggcaaaaatactgagattaggtttaaggcagtaggatgaaactggggtcagggacacaccaaagcaaagaaagtaagtcccaagcacaggccaccaattccttgagatgaattgcccctgctggctatggaggggactgtggccgtgcttacatggccacagagggtggctaggggtgtggttttggttcatcaggctaacaagtcaatggttaaactaggactatagcctgtctcccttgactcccatttccgtgctctagtcacacttgttttcaccacctattaactctagagttagatagcaacagacaaaagtgagtgaacca

SEQ ID NO: 539057 - DNA, 577 bp, Homo sapiens
ccattcatcttctgccttttattctcttgtttctggggaacctggaagagtgaagttgtctgccaccaagcattgcctacctgagtgttcactaaggttcacgcaggactatggaatatgctgggtgccttcagaaagcttccacgtggagggcagggttcttttatgaaaaggccttagaagcacaaaggttctgttttaaaagagctcctgaaacccaaagttcctgctctacagttctgttgtcactagacaatacaaatcagaaatttattgggcccagtcctgttctaagaactgagggagattcagaaaaaaaggataagatggtgaatctgagcttctggttgagtagtggtagtagtacctaggggaggtctcagggaagggctttagttatcccccactaatctctrccctcctcttgaactactaaataagcctgagatttatttttttaaaggaagatttgcctggttaacatggttcaacaactccatatggatgtttaaaagaaatcacgcacgtaacatctccaaagctaaactcttttccggcctgcacatccccagtcttc

SEQ ID NO: 539058 - DNA, 643 bp, Homo sapiens
ctgagctgtttctgcagaagaactgcttgcaaatagcatctggcttgcagccccatgcctttggatgacaacwttccactaaaatagttacaagctcaccaaaatcaaagcctgatggaccacacaatgacaggatttttgaggaatctttattgacgaaaagtaaaaggagctggatggagaaatacctacatgaacttcccttcatgtaaaagacagcccctgagaaaagagagggagatgctttatctctctgagtcaggggcttcacttgagtgctgaagtcctcttcatggttttcttgttttttcttcttccttttggagccagactccttggaagagttgtattcatgtgctgttttctttcttcaacgccccattcttcaaaccatcatgacatggcctctgccttcactgctctgcccgaactattcttgtgaagatcactagtgacatcatccctgttaccaaatctcctctgttctcatcttacttaaactcttagcgacatttgacccagtcaaaaacaccctctgtcttgaaaaacatattccctggtaacttccatgacacatttttctctctcaaattttcccctacctcactggttgttatttctcagtctcctttctgtgatctcc

SEQ ID NO: 539059 - DNA, 643 bp, Homo sapiens
ctgagctgtttctgcagaagaactgcttgcaaatagcatctggcttgcagccccatgcctttggatgacaactttccactaaaatagttacaagckcaccaaaatcaaagcctgatggaccacacaatgacaggatttttgaggaatctttattgacgaaaagtaaaaggagctggatggagaaatacctacatgaacttcccttcatgtaaaagacagcccctgagaaaagagagggagatgctttatctctctgagtcaggggcttcacttgagtgctgaagtcctcttcatggttttcttgttttttcttcttccttttggagccagactccttggaagagttgtattcatgtgctgttttctttcttcaacgccccattcttcaaaccatcatgacatggcctctgccttcactgctctgcccgaactattcttgtgaagatcactagtgacatcatccctgttaccaaatctcctctgttctcatcttacttaaactcttagcgacatttgacccagtcaaaaacaccctctgtcttgaaaaacatattccctggtaacttccatgacacatttttctctctcaaattttcccctacctcactggttgttatttctcagtctcctttctgtgatctcc

SEQ ID NO: 539060 - DNA, 501 bp, Homo sapiens
tctcagcctctggagcagactcatggtgccccctgcttcctagcccttcctgagataagagtcagcgggggcagaggttaaatacacggtttaccaggcttttttcctggaaattctagaggcctggatcaaactcggggaatccatacctttaagtgctcctggtgactcttatcttcagggaagcttgggagtcactgcccagggcttgcccatgtttttaattctccacagattctcatggtttcctccagcccagtatgcgtctcatggctttgacaacagacagatctkgttttgttaccttgtgttgctatctaactctcaacaatctataccttttctcttcaaacaatataaacttctggagagtaggtatcaagttttttcttacgtagtaggccttcaataaatatttggttgaagttttacattttcctctcattatattgcatttgaggtgaacattgaaattctttcacttaagcaccatcaaaaggg

SEQ ID NO: 539061 - DNA, 554 bp, Homo sapiens
ttgctgctgtctaaaagtaatgagtcatggacagagcgggcagggatgtgttacctgaagaacttcaccaattcttggctccaccatgaattgtatgtgtgaccttaagtgagatgtgtctgcaaactaagcctcaayttcctcattctaaaaaagttaaattccgacatcattgagtgcttgaagtcgaatgagatactgtgtgcagaatcattttataatctgtacagtgccatacagagggtaggaattacccttagtcatccttacagttagttttccagctcacctgcctttctgcattccctcatggctttcctatctgagtcatgtaactaaatttaaatgctatgctagggagcctaggaaatctacttcccagcaagagctataaaacctcacatcctaattgacggagacaaggaggaacagtgattcagaggcaactctaggggagcagccagctcaggcctgaaaacgtctccttggatgggtctgctggggaatgggaacagatccattctaagctttggtttatttcagagaggaattta

SEQ ID NO: 539062 - DNA, 655 bp, Homo sapiens
ggaaacagtccaatagtgtgggagcagttttccattttttccaggtaaaaagacaatggctctacagaaacgaaaggaaatcgtccagagacttgtgaaataattcttatctcatctgttcttgtgataataattctttttcacaaaataagtcctaagagccaaaattttccatcatctacataatatcaacattgtaattctcagtattaacaaagattaagttgttttcaaggctggttgactcaaaaaaacccagaaacatgctggcagataacactgggaaataaatgctttttaaaattttaacattttatttagagtgtattattgttatttgcaggaaggttaatacaatgcaagctactctaccattactagaagcacactctttcatactgcttttaaactacattaatcaaatgaaacaatattttaaaagtacacacctgaaaaaatgaccacaaacaatatgtgtgmtgactgacaaactagaaaatctagaggaaattgataaattcttgtaaacacaatccccctactttgaatcaggaaaaaatagaaatcatgaagaaatcagtaagaagtagtgagattgaatcagtaatgaaaagtctgccaagaacaacataaagcctaggaccagatagattta

SEQ ID NO: 539063 - DNA, 505 bp, Homo sapiens
gactatgaagaaagggcaagacaattgcagaccttccagctaggacattgtggaactgctgaaccaataccagcagctacctaactccacatttcttattatataggaaaaataaccctctttttgtttgactttgtgttgttacatgtagctaaagatattcctgactggtagagggaagacaatacattcatttttggatctgctgagttttagatatggtgggaaatccagatgatgtggaaatatgattggattctggagaaaggtttggatggtaagtttagggtaaagattcttcagcaaatggtgataaatagaagccagtggtcttaaaactgttgcccacacatgccctaaaatagttacaaaaatattttstcttgcattttttcccaatattttattatgaatattttcaaacgtacaaaaaatttgaaatagttgggcaaggagcaccatatactcaccatctagatgctacaataaacattttgctttggtt

SEQ ID NO: 539064 - DNA, 548 bp, Homo sapiens
tgcatgccacccaggtaatcaagatcctggatccagctctgtggcacttcccatggaactactcaaaattgacttgtctttactagcattagacaattagacttaatccccaaatttcatctttttggaacaattgttttgatttccattagctacagttttagtgtttgctcatggatatggttgtcaaatagagaggaaagtctcttctttaatgatcaytcatggagctcccatctccacatgataccaaacatttgtgtatttagaaatatctggatgattggccacatttttctgcttctttctccttctcctctttctccaagcacattctcttctccttctcttccatcctctcctcctcctcctcctgtttcttcacctctagataaatggcttgcttattcatggacttgggttttcctggaccttgctaagtgtcctctttctgtttctttcttcatgagtcaaacaaacaaacaaaacataccatcctctgtaaaggaagctagtgctattggctaatgctcaaaaggatggatggg

SEQ ID NO: 539065 - DNA, 545 bp, Homo sapiens
tggataaaaaggtaaagggactaaattccatggcttgttctgagtgacagctgagatgagtggtggataattacagacatacacaaatctggttgagcaggatttgaagaacaatgtaagctatcctcctcaacatctcaagaaagaatgatagaaatgtaaacctagagccctatggccatatttcatttgaatcctaaaagtcaggagcctcccatttgtgtctggattcyataaaatggggaacataagacccaaattgttcaagtggcttacctaaggttggcggcaccattcaagttcactgattcttgtggttttctccccatgataagaaactaatttctaacttcacattggtcaattgcagcctctggagtatggctacctgcctatggctcacagaaatttgaaatgctacctgaaaatgctgttagggctttagaatggagacaatgccagagggtgctagaatgcttttgtcctcaaccatgagccacaacaatcagagatcggtaagtaattggcattttaaataaccaagg

SEQ ID NO: 539066 - DNA, 611 bp, Homo sapiens
aaaaccagaggtggtaatttacgaatgccttgagtgtatttctactgacttattgattaaaagggcaatgtgggtttttcacatagaacatatgctgaggtggtcctttcattaatttttgctgctgtttgagttttgtctcttatatggcttatattggacattgattgtggcagaaagagttatgtgagaaactctacaagctttcatccctttgtagtagcccttttaagaaattgttgaaagttagtaaatatttcccagtagtatttccgagtgcccaaatacagcacctgctttttggctttacatcattttctattccrtttgcttatctctcttcagcaaaatagcattgctattaaggatgacattacaatggaacattttattagcccttaaaactctgttcttctttttatggggatacaaacaatgacgttatgatcatgtgacagtctcatttgtctctccattctaaccaagggcaccctctggtgagtcaggctggccccgggggcagcaccacatcggggctcagggctcttagaggcccaagagtgtgacctgagggagcaagtttgggaaactgcctgcaggaaggaacagga

SEQ ID NO: 539067 - DNA, 583 bp, Homo sapiens
cacgccacacaaaaaagctgctataaacacccgtgtgaatgtttttgtgtagagatgttttcaaatcctttgggaaaataccaagaatttggattgctggatggtgtggtaagcgtatgtttagttttataagaaactgcccaactgtctgtttttcaaagtggctataccattttgcattcccaccagcaaagaatgagcattcctatagtttcacatcctcaccagcatttggygttgtcagtgttctggactttgccattctagaaggtgtgtggtggtattttattgatgttttaattttcattttcctgatgacatatgacaagatgtggagcatctttttcatatgcttatttgacatctgtgtatctgctttcctatgcttatttgacatttgatgatgtgtctgtcgttgctccattttttcttatcactctcatctcaattgttcatttactcacctgtttgttttatcagactgtgaagtcctcatgggcagggaatatatcgttagtaatcatacttcctaatgtataagggcaaattggatggaaagaagaagaggaaaaataatacaaga

SEQ ID NO: 539068 - DNA, 464 bp, Homo sapiens
ttggtcccccgatccctgtcctgcttgtcctctccatcagtggccaacctcacatctttaagatagttttactctttcagtaattctctttgccctgattctcatgccctcaagttcccatcaccactgccttgaatactgaaacagaaataatactaatattatttgttgttttcactaaaagtaatttatgtggcctctcagccttttgcctatgaatttgtgttttcaaggtttttatttatatgcactggacttttctttgaattttgagatcatccatggcaatttcataggtactcagccaggtgagcctctgccaggtaggcttgcccasctcccatccatttcctcaggtgaacaacctcttgtttggcctcattctcttctttttccgttcaaacagtagactctctgaaggcaggaccaggtttagatttgcctaccatttacccacagtgcct

SEQ ID NO: 539069 - DNA, 539 bp, Homo sapiens
gtgtgtgcttgcatgtgcatgtggtatgtggctgtgtatttgtgcacacattggtgtgtgttgtgtgtatggtgtatgtgtgttgtatgtatggtgtgtatgtatggttgtgcatgtatttrtgcacacattggtgtgtgggatgtatggtgtgtggtggcatgtggtatatgtgtgcagtgtgtggttcctgcctacctgtacatatctgagtcaacagcagggctatttaaaccaagcatggactcctgcagtcatacgcattttctctgtgttagcatgaacccctgatgctgatgggaatgtgtcctccctgtggcgtgttttggagggcagggcatctgtgagccctctaattccacataaagagtggctaacatgaaattagtaattgggttgggtttgtgcagagccatgtgaactctttccctgcctttcttttgccaagttgggctaaagctttttcatgagccataaaacaaaccagagagcttcaagctgtttcctgtttctttactaggatccgggaagttgagttc

SEQ ID NO: 539070 - DNA, 539 bp, Homo sapiens
gtgtgtgcttgcatgtgcatgtggtatgtggctgtgtatttgtgcacacattggtgtgtgttgtgtgtatggtgtatgtgtgttgtatgtatggtgtgtatgtatggttgtgcatgtatttgtgcacacattggtstgtgggatgtatggtgtgtggtggcatgtggtatatgtgtgcagtgtgtggttcctgcctacctgtacatatctgagtcaacagcagggctatttaaaccaagcatggactcctgcagtcatacgcattttctctgtgttagcatgaacccctgatgctgatgggaatgtgtcctccctgtggcgtgttttggagggcagggcatctgtgagccctctaattccacataaagagtggctaacatgaaattagtaattgggttgggtttgtgcagagccatgtgaactctttccctgcctttcttttgccaagttgggctaaagctttttcatgagccataaaacaaaccagagagcttcaagctgtttcctgtttctttactaggatccgggaagttgagttc

SEQ ID NO: 539071 - DNA, 539 bp, Homo sapiens
gtgtgtgcttgcatgtgcatgtggtatgtggctgtgtatttgtgcacacattggtgtgtgttgtgtgtatggtgtatgtgtgttgtatgtatggtgtgtatgtatggttgtgcatgtatttgtgcacacattggtgtgtgggatgtatggtgtgtggtggcatgtggtatatgtgtgcagtgtgtggttcctgcctacctgtacatatctgagtcaacagcagggctatttaaaccaagcatggactcctgcagtcatacgcattttctctgtgttagcatgaacccctgatgctgatgggaatgtgtcctccctgtggcgtgttttggagggcagggcatctgtgagccctctmattccacataaagagtggctaacatgaaattagtaattgggttgggtttgtgcagagccatgtgaactctttccctgcctttcttttgccaagttgggctaaagctttttcatgagccataaaacaaaccagagagcttcaagctgtttcctgtttctttactaggatccgggaagttgagttc

SEQ ID NO: 539072 - DNA, 539 bp, Homo sapiens
gtgtgtgcttgcatgtgcatgtggtatgtggctgtgtatttgtgcacacattggtgtgtgttgtgtgtatggtgtatgtgtgttgtatgtatggtgtgtatgtatggttgtgcatgtatttgtgcacacattggtgtgtgggatgtatggtgtgtggtggcatgtggtatatgtgtgcagtgtgtggttcctgcctacctgtacatatctgagtcaacagcagggctatttaaaccaagcatggactcctgcagtcatacgcattttctctgtgttagcatgaacccctgatgctgatgggaatgtgtcctccctgtggcgtgttttggagggcagggcatctgtgagccctctaattccacataaagagtggctaacatgaaattagtaattgggttgggtttgtgcagagccatrtgaactctttccctgcctttcttttgccaagttgggctaaagctttttcatgagccataaaacaaaccagagagcttcaagctgtttcctgtttctttactaggatccgggaagttgagttc

SEQ ID NO: 539073 - DNA, 517 bp, Homo sapiens
tgttaaattgaggtaagaccctctaccagcaaaaagattatgattcaccaaaggctcagatgattagcattttttagcaataaaatattttaaaattaaagtatatcattttttagacataatgctattgcacacttaatagactacagttttatataaacataacttttatatgcactgggaaccaaaacttacttgtgtcactgggtttattgcactacttgctttattatggtggcctgtgtggtctaactctcaatatctcagaggtatttctgtatttatgggtagagggaaatgatgcctcaaattactttcaaatggttcaagtaaatagatagagaatgaggttaatatagcaaatacagcaaatgttattaattgatgaatttggttgaagggtataccagagtcttccttgtactatcttgtaattatttcagaaaaaaaayttaaaggttgcctaaactttctgtatgtttgtatacttataatatcctatgacaaagataaaggt

SEQ ID NO: 539074 - DNA, 517 bp, Homo sapiens
tgttaaattgaggtaagaccctctaccagcaaaaagattatgattcaccaaaggctcagatgattagcattttttagcaataaaatattttaaaattaaagtatatcattttttagacataatgctattgcacacttaatagactacagttttatataaacataacttttatatgcactgggaaccaaaacttacttgtgtcactgggtttattgcactacttgctttattatggtggcctgtgtggtctaactctcaatatctcagaggtatttctgtatttatgggtagagggaaatgatgcctcaaattactttcaaatggttcaagtaaatagatagagaatgaggttaatatagcaaatacagcaaatgttattaattgatgaatttggttgaagggtataccagagtcttccttgtactatcttgtaattatttcagaaaaaaaatttaaaggttgcctaaactttctgtatstttgtatacttataatatcctatgacaaagataaaggt

SEQ ID NO: 539075 - DNA, 568 bp, Homo sapiens
aacattcagaccagaacagttggtctgttgtataatacagaatttttctggtctttggtcctggttcctgagagataacctttaaatccttggaatttcctgagttataccagtgtctttgttcctcttggtgggcccctcaaccacacctgaatttacgctaatgagatgactcatgatggacccctgtatagttttagtatagggattggccatgctggaatgamcgactacgtgattagagggttggaactttcagctcaactttcagggagcaaggagtttggaggttgagtttaatcacagcacatgacctacatcaatcatgcctacataatgaaatgccagtaaaaactctggacactgaagtttgtggtcttttcatcaggaaataatatattctgacttgaaaatgtcaccagcggctgggcatggaggctcacacctgtaattccagcactttaggaggccaaggtaggtggatcacctgaggtcaggaatttgagaccagcctggccaacatagtgaaaccctgtctctactaaaaatacaaaaattagccgagtgt

SEQ ID NO: 539076 - DNA, 568 bp, Homo sapiens
aacattcagaccagaacagttggtctgttgtataatacagaatttttctggtctttggtcctggttcctgagagataacctttaaatccttggaatttcctgagttataccagtgtctttgttcctcttggtgggcccctcaaccacacctgaatttacgctaatgagatgactcatgatggacccctgtatagttttagtatagggattggccatgctggaatgaacgactaygtgattagagggttggaactttcagctcaactttcagggagcaaggagtttggaggttgagtttaatcacagcacatgacctacatcaatcatgcctacataatgaaatgccagtaaaaactctggacactgaagtttgtggtcttttcatcaggaaataatatattctgacttgaaaatgtcaccagcggctgggcatggaggctcacacctgtaattccagcactttaggaggccaaggtaggtggatcacctgaggtcaggaatttgagaccagcctggccaacatagtgaaaccctgtctctactaaaaatacaaaaattagccgagtgt

SEQ ID NO: 539077 - DNA, 207 bp, Homo sapiens
ctggggaacgatagactcccgacctcactcacacagttgatgagattcagtttctccagcatcactgacygaggcttccctcaataccttgccatttgcttcatcaaagccagttaaagagttgttctactagcaagacaaaagttacattattttgggacctaatgttgtttaataaaaagttagtctcgtctttgctcctggttc

SEQ ID NO: 539078 - DNA, 207 bp, Homo sapiens
ctggggaacgatagactcccgacctcactcacacagttgatgagattcagtttctccagcatcactgactgaggcttccctcaataccttgccatttgcttcatcaaagccagttaaagagttgttctactagcaagacaaaagtyacattattttgggacctaatgttgtttaataaaaagttagtctcgtctttgctcctggttc

SEQ ID NO: 539079 - DNA, 509 bp, Homo sapiens
agagctgagactggactcccagggcctttttgtcaaaggtaaatcaagggaaaactgtgaagcaaataccatgattccctgaggatcaatatgtagttgagtctccctgtaacttctaatgtgtgcaagccataaaatcagagttctgatggtagcccaaagaatgggcaagccaaccctaatcttttccttctgttactattgtttggctccactcactcttgacttttccatatctgtttaagtagtttatggagatatttcagactatattctatcctcaagaaagatttgaatggctcagttggtgctgggtagtaagaaatataatatgaacaaaatataagattctgaacatagaaagaagcagcttgccactgcagatgccacgagacarcgaaaaaactccaaagacaaaagacataaacttttgggagctctatggcccggcccatcacctgagaaacccgaatactcatcctggccaatgtagggcaagactgtatctc

SEQ ID NO: 539080 - DNA, 482 bp, Homo sapiens
acttaaaacctctctgggcatctactagaatctggtcacattcaacacacatcaaatttctgcatcatattgaaaccctttccakgacacagcccctgaatgttctgattaattgaagttttgcagtcttgtggtgcaggagaaagagcttgaaatcctgaagtcaggtcagccggagtcttattcccagttttcctgtgtatgagcagtgtggccttggcccagtcacctcagctctctaagccatgttcctaatttgtaaaacaaagagaataaggttcatgttagcatttgggataatgtgtacaaatcatttacacaacatctggtatataacaagctcttaacaggcagtagctgacttcttactccacatttagctagtggtcagctttctccattcagcatttatctcatttatgacaatattatttggtattacattgctaattatagtcctttggaactacatagcaaggagc

SEQ ID NO: 539081 - DNA, 482 bp, Homo sapiens
acttaaaacctctctgggcatctactagaatctggtcacattcaacacacatcaaatttctgcatcatattgaaaccctttccaggacacagcccctgaatgttctgattaattgaagttttgcagtcttgtggtgcaggagaaagagcttgaaatcctgaagtcaggtcagccggagtcttattcccagttttcctgtgtatgagcagtgtggccttggcccagtcacctcagctctctaagccatgttcctaatttgtaaaacaaagagaataaggttcatgttagcatttgggataatgtgtacaaatcatttacacaacatctgktatataacaagctcttaacaggcagtagctgacttcttactccacatttagctagtggtcagctttctccattcagcatttatctcatttatgacaatattatttggtattacattgctaattatagtcctttggaactacatagcaaggagc

SEQ ID NO: 539082 - DNA, 562 bp, Homo sapiens
attttgcattttggagaaagggtgatattccataaataaagcaataaataaggaaaaatactgtgacgtctcaaagtaacctcagccagccaaagtaaatkcttcatagggtaattgtgaacaacccatgagataatttgtatgaagtgtctagcacagccccaggcatttagcaggtgctcagtaaagacttgttgaataattaagtctcaggaaaatttgataagcaaagacttgactctattttcaccatgacaaaggagacccaagctcttaatcacagggaaagtcacaacaagactctccttggtcactctttcattaaattttagatttattttttcttctggaatagctttcttcctgtaagaagcacatttagtgttattccattatgccaagaaatttgagccagcaattttcagagtaaactgtgactcaggactaactgcaactcgtgaattttgaccccaggttcttcctgagactaggacccaacagtatggccaccgacgatgtgatgcatttcaatgattcaaaatgcgtgcttgcaagtcatgat

SEQ ID NO: 539083 - DNA, 651 bp, Homo sapiens
tgcaaaattgtgtttcttatttccatcaatgaccaaaagggctgtacattctccaagtcccacccaagtttcatgtccttgagagtttttggtaagtgtttgttttggagaaacttccagttattacatttcagatatcactttctgtagaaggaagacaaagacaacagcaacaagaaagccaaggtccatttaattcctgcccttgggagccacatttttaaacttttttgtggacaygtgagtctagcagcagttgaacaaagcccattcaaacctctagttctttaataactaccatattactgctttcctgtcccgtgatcaacctcaaagtcctttgaaataccaacaagaggaatgaagtgtgcattttaagttatcttcgcatccacggggtttaaagttgcagtcaatatcttaatgctggcctagagtattagatcagaaggagaaggtaaagttttactcctctcttctctgggaaagactatttttccatccattgagctgaggaccacaaagatcaagagccattcacttgaggccctttaaggggaaagcagtttgcactgattttcttacagatcacaagagggtcagcaacaacacttctccatcctgtcttggaattgagagagacaggtgtgt

SEQ ID NO: 539084 - DNA, 651 bp, Homo sapiens
tgcaaaattgtgtttcttatttccatcaatgaccaaaagggctgtacattctccaagtcccacccaagtttcatgtccttgagagtttttggtaagtgtttgttttggagaaacttccagttattacatttcagatatcactttctgtagaaggaagacaaagacaacagcaacaagaaagccaaggtccatttaattcctgcccttgggagccacatttttaaacttttttgtggacacgtgagtctagcagcagttgaacaaagcccattcaaacctctagttctttaataactaccatattactgctttcctgtcccgtgatcaacctcaaagtcctttgaaataccaacaagaggaatgaagtgtgcattttaagttatcttcgcatccayggggtttaaagttgcagtcaatatcttaatgctggcctagagtattagatcagaaggagaaggtaaagttttactcctctcttctctgggaaagactatttttccatccattgagctgaggaccacaaagatcaagagccattcacttgaggccctttaaggggaaagcagtttgcactgattttcttacagatcacaagagggtcagcaacaacacttctccatcctgtcttggaattgagagagacaggtgtgt

SEQ ID NO: 539085 - DNA, 541 bp, Homo sapiens
gtgaaactccatcttgggggggaaaaaaaagaatgcatgatttagatcagacttctcagttctatggccaaatgcatcctacactttacctcctgtcctggcctcttcatacagacttcagaacccaagtgacccatgcccaagaggtgaatgggtctgtacaagtcctttcctgttgttagaaattaaactcacaaggccaagtgcatgtcccacattataagagcccacttattttcataatataaagataaccaacttctggggctgtgggctgggccagggcaagtcttggagaagcccgtcctcatgaatggaaaccaagaccaactttaataataacttgtttaggagtcagggctggcttcggcaaagttgtgagattggaattttggcctttggttatcattccttcaaccaactgagcactartgagtgcccagtgctctaaatatttacgtcatggttcctggaagtgtcaggtctccaatttatgatatccatgccctccatcaaagctcccatggctccaatgctttac

SEQ ID NO: 539086 - DNA, 627 bp, Homo sapiens
ctggatttctgggatttcacagtgcatcactaagtgggttcaaatggtggaaaccatcatgttctgacaaagaaaggggttaatgaatttaacctgaagacaggtagaaaggcagagaaacatatcttcatggacacatttctcagttgccaaggagacattgctgagggtgagagttgtattggaagagagagatatatgggatatagcgcagcatcaccactttgaggctcaggcacactcagtcctttctytttctgctggaaagctgtgatttgggcaattaaaggcagcatgcaaaagaagggggcccagtgacaccacccccgatgtcacagtctcacccatcctctggaatccccaggggtgtttctcatgattgcacataggtctcttcttcagagaagcatggctgtcagtcggcaggtcctatatggttggggtcctaaaggcagaaagcttctaccagagcccagtgaatctttctacttgcaaaggctctgtgtatgctgagatgaattgagaaggatgcacccctggtggaatcaagaaaaatttaaccttcagaaaatagtcaaaattaaacactctttaatgcactgagacatatttcagtagagagttaaa

SEQ ID NO: 539087 - DNA, 648 bp, Homo sapiens
ctctgcatattgcttgacaagagacaaaaatgtcctctgtgtattacacagcaagaggtggggatgtgtgtgactaactctcctcggtagcccttgtaagcaaaccaactcccccagaatttctcatctgtttccagaaagcccatacttataatcaaatgtcatataggtttccaaggacctaactgagcatatgcaagaaaggaatgtaaacaagaggtagcaagagccctttgaccattgaaatctaggcaggcaactctgaaaacgtgtcctccctagaaaacatatctaacattccgtggcttgtgggagtccacatccctccttactatttctgagaatacctagggagccgttgttcttgtggcctcccttgcctcttgggctccagattagattcctcattcaaggttcctgtttgatatggtttggctctgtgtccccactcaaatctcatcttgaatggtactcgcataattcctatgtgtcctgggaaggacctggtaggagataatttgaatcatagggcggtttcacctatgctgttctcatggtagcraataagtctcacgagatctaatggttttaccaggggtttccgcttttgtatcttcctcattttctcttgcctccgccatgtaagaa

SEQ ID NO: 539088 - DNA, 559 bp, Homo sapiens
aaaatggatggatagatgacttgcagatttttgtacccaaggtgtcacctgtaattaaaaaataattagatgctccatgtacttcctgtcatgcacccctctattttttcagtatccatggtacttaagaatagttggcatttttaaatattaattactcactaacaaaaactttgtagagcaattcattggcattgcaatgcaattttgtcaacacttaacacattgttggttttaaaaatacatttaagtctatgatgaactctcttattaatagtttccattttatcccaatattgtagagatttmtttttatttgtattttatagacactactgaaataatatgtaataggagaaacaataatctactttattatgcctatggtaattcctgataagacaaaaatcacacacaggtttcatctctgagctggtattattcagaggcaaaggttgaaatagacaataacctctggaaccaattaaacatgattgtaccaatttcccccgacaagttgtaattatctcaacatgagatagcacatgtcattgcaaag

SEQ ID NO: 539089 - DNA, 645 bp, Homo sapiens
taaaatggatggatagatgacttgcagatttttgtacccaaggtgtcacctgtaattaaaaaataattagatgctccatgtacttcctgtcatgcacccctctattttttcagtatccatggtacttaagaatagttggcatttttaaatattaattactcactaacaaaaactttgtagagcaattcattggcattgcaatgcaattttgtcaacacttaacacattgttggttttaaaaatacatttaagtctatgatgaactctcttattaatagtttccattttatcccaatattgtagagatttatttttatttgtattttatagacactactgaaataatatgtaataggagaaacaataatctactttattatgcctatggtaattcctgataagacaaaaatcacacacaggtttcatctctgagctggtattattcagaggcaaaggttgaaatagacaataacctctggaaccaattaaacatgattgtaccaatttcccccsacaagttgtaattatctcaacatgagatagcacatgtcattgcaaagaaaagctgaattgttttcattttcaagaatttttattttaactctttcctgctcaggaaactttagcatttatttccttcatcca

SEQ ID NO: 539090 - DNA, 591 bp, Homo sapiens
ttagctattccacttgcaaaataagaggaaaggcaggatcgagagtgaagcaaaaacaggagagcaagtgaaagacagatgcaaccaaagaagaaaaaagaaggcaaatatttactaatcaaagaagcaaagggagtgagaggaagttgcctaaaatcataatgtgtctgtaattgctcatcacatcagctaacttggcccaaatctaatgtcattcttattttcaaatgctcatgagctctaagggatacctgtttcctctctcctgtgagttctgaaaatagaaacgcccagacatttcatgtcacactggtttgagctcctgctagttcttcttaccacacagaggcagctctgagtccactgtttcctgacccmcaggttctatctgtgagttccttgccctctggagcaactggaagacatttagttctcctgctcccactgaggcattcctacaagggcttctgtggatgaaattgagaagtagccccaagaatttttgtgtctttccctcagggctctcaaaagagaaagcatctttcctcctgccaccccactttcgatctactcacaaagacatcatttata

SEQ ID NO: 539091 - DNA, 627 bp, Homo sapiens
aaattttatgattcatttcagagaattcccaaatcccggaagtccttagattctgtgttaaagagcttccctcacctgagaatcatttcccagtctcctaacttcatgtagtttatggcaccagttggagctattaaaattgaggtattttgtaaatgcatttgaaggtcattcacaaaatgaatgaggaatgtctttagatgactgacatgcttatgctcttaatctaaaatatctagaaagtaaacctaggatgtggattaaaagttctctgttgctgaagatttgggccagagcaggcctttgacaagatttctgaaattatttctttcccatatttttggtaacttttggtaatgaatatttacggagtttgttttaaaggaaatggtggtattgagaatccaggtgttgagtagttagcagtccagtctctggtaccatattcctgggctcaaagcctagccctaccacccaccagccaggttagatcaaagcaggcaatgtgcttagcctttgtgagcttctctgttttattatgtgtaaaacaggaatgttaatagtacctatatcgtaagtgttgtatagattgactataaggagtcatkcatagatggcgattagaag

SEQ ID NO: 539092 - DNA, 599 bp, Homo sapiens
gctggggcgcatggtcatgtccgccgtgtgcacatgctacatccaatgaccatgcagggcaggagtgtatcgcagccactgcccaggccccagggtggtctcaggggccagaggccccacgcagcttactggcagtgtttcccggtcrccaccgcctcctgccacgcacccgtggagtctttcctaacctagtccagctcattctgaactagaaaaagggcacagtaattaagaactcctcttcctgttggaggaaccaatttggacagtgcaagagagtttcttccccaggcaccttacccgtcctgcacttaagctgttttttttgtttttttccttctccaccatgtcgagagttaacacagccctgcaaatacagggagcttttctatgtgagagtttttttttttcttttgaacggtgttttactaggccagggccccaattcatgggactctcttttttctctttcgtttgaggaggaccggcctccacagctttacattagcatttgaattatgataaggaagcagggaaggagcagccctgccggctgctggatgcaatctggcaagggtcacctgggacttaatgagttc

SEQ ID NO: 539093 - DNA, 502 bp, Homo sapiens
ccttattagccatctagataaccttttacttagtgaaatatttgaaaatgaagactgtaaaatcccttttaataaaggaataacttatcgactaattattttaatagctttgtgtgttggggttgtctatggtggtgtgaggaggcaggcttgaatagaacttagtgaggtttatagagcgggacagaagaattatttttataacataaatgaaaacaatttaggggaataaaatttgagagtgtatcataacgcatattaaaatgacaacttgtaactccaaaattaaactgctattgttatctgtcattgaaaaatgcagaaagagctatgaaaagctgttgaatgtttgcatagaggccacrtttggaggtagtacctcgcaccatgtaagtagttgcacaccctaggccagagtttctatttggaaagcagagatataaactccttgacacagattagaatggaatattttgaggcctcactatcatgaattgctatt

SEQ ID NO: 539094 - DNA, 491 bp, Homo sapiens
aaaaaaatgtaaaaaatcatttatggagtcaaatgtgtttacaactaaccttttgcttttctctcattttataaatacacagcatacagagtacatgaggccatatggaataatggaaagtaactgtaataaaattccttttatatgaaaaatttctgttgagatatttytgttcttttttgcaaaaatcaataacatatcttgaataaaaatatttaataattgcttccttactattatggctttagaatgcaattaaaatgaatagcttcttttttttgtttgtttgttttccagaaatgtaataattgatactcccactagcaatgataaggactctcttctcacaccacattccccagtgtggagtattatttataaaacaaaggtacactttgtcaatttgattggcaaaaagtcttatttttaaaaatttgcctatctgtaattactagttggttaaaatttttatgtatatattttatatgaat

SEQ ID NO: 539095 - DNA, 491 bp, Homo sapiens
aaaaaaatgtaaaaaatcatttatggagtcaaatgtgtttacaactaaccttttgcttttctctcattttataaatacacagcatacagagtacatgaggccatatggaataatggaaagtaactgtaataaaattccttttatatgaaaaatttctgttgagatatttttgttcttttttgcaaaaatyaataacatatcttgaataaaaatatttaataattgcttccttactattatggctttagaatgcaattaaaatgaatagcttcttttttttgtttgtttgttttccagaaatgtaataattgatactcccactagcaatgataaggactctcttctcacaccacattccccagtgtggagtattatttataaaacaaaggtacactttgtcaatttgattggcaaaaagtcttatttttaaaaatttgcctatctgtaattactagttggttaaaatttttatgtatatattttatatgaat

SEQ ID NO: 539096 - DNA, 632 bp, Homo sapiens
agtagctatccaaaccaacttctaaattaaaagtaaatatttcctccacctttatgtgactctttgatgaagcatcctatatagagaagccaaatctttattgacattattacgcagcttcaaattttagtttttagagtgcatgcataagaatatgcacatgagagtaaaggctttcttgggtttagttcctggctaccattaactctgtggtgatggagaagctacctaggtatttgtttctatatttgtaaaaagagagactgaggaatactttaacctattagactgctgttttaaaagaaccattgcatataracaatttacccgtatgcatgttacatacaaaaaactcaataatattagctgatgtgaaaaatcattattgttcttagtgttcagctatagatcagaatagatccagcaataaagtgggctgaagtttgtgtaatttgaggccatgcattaaaacattgcaaaatatactaaactcaataaaaagattatgtcagtaaaaatggaaaggacctccaaatattcttcccacataaaagtgataagagtggcaaaaattttcagaatcttttttagaactctggaagttaaccaaagccttgccaaaatctgtaaaa

SEQ ID NO: 539097 - DNA, 543 bp, Homo sapiens
atcattggatattttaacacatcattcattcagtagacatgcagaatatcttttgtataatacttgtgataaatgctataagaaccagaaaataatagaaaaactggtctttcccctcaaataagttacagtatarttggatcagaagtacagagttgaaatacctgaagaatgctagtacagctccaaatagtaataaatataaatatttcttatcgaactcaaatgtgtggacaacttgttggcttgaggaacaaagtcaatcagtaaagctttaagaatggaggaatgattggaaacggtaaattggcacctgaatttgagaagaaattagagttataaattggcaaagatgtgggaagcaaatacattaattatagtattgttgtattcaaaggcaagaaagttgttgaaagaacaattttgtagagaacagaagggatattcacctgattaaatgagaatgagtttagcaaaaaaaaaaaaaaaaaaaaaatgagaagggagttgactaagcagcaatccaatgagggctgagaccac

SEQ ID NO: 539098 - DNA, 543 bp, Homo sapiens
atcattggatattttaacacatcattcattcagtagacatgcagaatatcttttgtataatacttgtgataaatgctataagaaccagaaaataatagaaaaactggtctttcccctcaaataagttacagtataattggatcagaagtacagagttgaaatacctgaagaatgctagtacagctccaaatagtaataaatataaatatttcttatcgaactcaaatgtgtggacaacttgttggcttgaggaacaaagtcaatcagtaaagctttaagaatggaggaatgattggaaacggtaaattggcacctgaatttgagaagaaattagagttataaattggcaaagatgtgggaagcaaatacattaattatagtattgttgtattcaaaggcaagaaagttgttgaaagaacaattttgtagagaacagaagggatattcacctgattaaatgagaatgagkttagcaaaaaaaaaaaaaaaaaaaaaatgagaagggagttgactaagcagcaatccaatgagggctgagaccac

SEQ ID NO: 539099 - DNA, 691 bp, Homo sapiens
tactactggttcaaagatagcccagatccaactagaagagccagctcccaattaagatctaatcacatatttcctggctgaagacgtaggtcttcaaaaaaaaattctattttacagctactrttaagtaatgtaagtaaggttacatagagtatggtgtgctgaattttttttttcttggacagagtgagatttggcaatgagaaatatctgaatgaaaaaacaatgccaataaatccaccaaacttagaaacaacttgcttttttaagttggcagtgtaattaagcagctctgttcaagatgaagtctctcttgaaaaaccaaaccaaacaatttgatggtgaagttatctttcagcctaagtgacgaagcaatagaaatgcaaagtctttattttcaaacaaataaagaaaagtcaaaacacttattttgccgaagaaaagcaaaattcttaatttcaaacaggaaaaatgacatcactctctggtgctttattgcttctttacctgtcattcatgaataagaatcattatcctttattgaacacaatatactaagccatatgctatgtattctacatacattcttacacttatttcttataacactgagagttgtcattatcattctcattttcgggataaagaagttgaggcttagagaattgaagtaattttgccaatgtcagac

SEQ ID NO: 539100 - DNA, 507 bp, Homo sapiens
ggtgagaacaagattgaagagaaaactgttcatgccaggagcaaaagcaaccttttgcagagttcagagaactcagttttagaatgcctataagattgctattatggctgagcatgagttttgttttgttttgttttgttttgttaaagagggagatttaaagttctgattacagttcttttgggctaatgttattggaaactttcatctaattaaagaaagaaattgtagacaatgcaaggaggatagccatgtctgtgatgagaaaatttctggaccagggcttgttgcaatgacctgtattctctgctctgctgagacatacacagagaaacagctctaagcaaggagttcctaaagtacttagagtagaccaggaattgtaaaacagagtggcacagccattcatggcaaaaggcaatttctccatctgagaaagggacatgttattcttagmgattatgtcaggaataaggatcccttttttccatagacatttattgaaaa

SEQ ID NO: 539101 - DNA, 636 bp, Homo sapiens
tactcctagtcaaagccagaacacattggtagtctgtaagggagccctcttggatggtccagcttcaagagcctccagttgactgcaggcccaactaataccacagagaatgtaatctgactccattacatactagccatgtttctggagccgattatttaatcctctgtgtttcagtttcctcatttctaaattgtagcaataataataccttccttactgatttgttggtgataaaaggaaataaaacatctgagacatctatgtgacagagtaggtttcatcaaatgaataaataaatttgtaatttttaaatggtttttactttaataaacctgtcaacaatctagtgtaagctggggagcaccctcatacccaagagcttactcgaggatctctctccactactcattctttatttttatttctaggaaatgtaacacacagtgcttaaagggactgactcatacctgttacttgatggggacactggcaacaattcaatggaagtttcttaacwgacttttcttcaagggagcatgttctgattatcaccatcaacatcatcattgctgtcacctgctcatttggcatgacttctgtaagttttctatgaaaactatccattcaaactat

SEQ ID NO: 539102 - DNA, 631 bp, Homo sapiens
tgtgtaatatctgggacatagtttcttcatctgcaagacaggaataataaagttctttctaaaatacaataatgagtttttaaaatttgtattgagcattcttactgtattataaccttttggcagaggtggaggctcataaaagaggaggagagggatgaagaatgaagataaagaacattggtgactgcatgagcagcttgaagccaaaaataacaagcacttcaaatagatgcattttttacaacaacaatattttgatattttccaaataattatgatgtcagccatgtcctaagtctggaaagattactactattcacatggtttgaaccaatacagatgttgctgaggtgtacatgcccacacataatctgtagatggttgtggtgatagtgtgatcaaggcacaaccatcagatcacacaaatgaacacacagaaaggaatgagagggacaagcccttctagttggagcctatgtttcatagtcaccccacagaagtgggatggatctcccacscaaatttgggtccactgtcaagactaatgatggcacaaatatatcaagtgggtgttaagagattcattactcatgaatggacattttttgaggagagcagggcagacact

SEQ ID NO: 539103 - DNA, 617 bp, Homo sapiens
agcctgggcaacagagcaagaccctgtctcaaaaaacaaagtatccctgaggtcctctcccattcccactccccgtgtcccctgccrttcctatgctgggtttctgctgaaaaagataaaaaggaaaaatacataatagtgtagggagtgtgggtggggtgttccacctgtggtcagggaactgtgggggatgatgaggtaagccaaggagaccagaggagtaaacaggcattgcatgtagcactatccacacagcagcttgaaaggcaggtcactctgcctttactttgctttctttttcttctgaatgtttaaaatgatgggagattcatgatttattgtctggcttccccacatacctggttaagtctcattcattttgtcactccatacccagggcctagaagaatgcctgatctagaagatgcccagtggattcttattgaaggaatgtccagtgggtgttaagggtgaggctcagggaattaagcaccttgttctgggtcacgggtaagtgaggaagtgggattagacacatacccatacacacacaaaatttggtgcaaaaggactctagtgccatgttttaaaaaacacttgtgtaattttaaaatgca

SEQ ID NO: 539104 - DNA, 595 bp, Homo sapiens
ctgccaggaacgctctcatgtcacctaatgaccaagattttagcaggataagtaacgtattctaactaaactagaaattggttttgctgtcttctatacccgccctactcctttgtgaccttcccttgggaccttatgacatgtagcttccacagcctgaatccgagtagatgacatacccaagaataaattttgttcaataaaacagtaaagcatgttgtttacagtcggtttcccagatacctagtttttgctgccatatgataacaatcagagaaatcattcattgattcagtaaatatttatgttgcctaaaaacataaccaaggatacaagaatgagtatggctaattacctgccctcatggagctcacagtctaggaatgggaggcaccttaagagtattggtttagagtgagggctccacagccagtacagggtccctggcccctccacttactggctgtgtgacctcaatttcctcatctataaaatggcgataatagtgcattgtggcttttgagaattaagagacaattgctgtgaaactcaaaaacagttcttggtacatagygtgtgcttagtaaatttagca

SEQ ID NO: 539105 - DNA, 624 bp, Homo sapiens
tttttaaaaaaccatattggaaaatgtagctttttcctaagagtcaaatgatagtaatttaggtttttatttatttacatttacttgatagatatttattgagttcttcctgtgtagatattctgatcaaggcagagtgctgaaaatatagtggagaacaaaaagcttctgccttcatggagtcttattttctagccagcctttgggagaagcacagaaaataaataattgaacagatgcaaatgtcaacaggtaataaatgccagatagaaaaataaactagtattaaaaagattgcaggccaggcgcattggctcatgcctataatctcagcactttgggaggccaaggcgggaggatcacttgagcccaggaatttgagaccagcctgggcaacatagaccccctttctacaaaattgcaggaggagggagtcactgtttttatagggcattcaagaaatgtctctaatatgatatttgagcagasacctgaaagaactaatagtgcaaagtatgtggatttttggggaaataagttccaggctgagggaagaacagttgcaaatgccctaaacctggaagtttgcttgatacagtcaaggaaaagtaagaaggcccatac

SEQ ID NO: 539106 - DNA, 608 bp, Homo sapiens
aagggaaggctttgaaaaggaaggaagggctcttggagccgggagggataacactgagtggaggagagaagaagcagcggagaagaaggcagaagaaaaatcggggacgcgtctttaaagacggatagtattgagacaagcgtggaggaagaaagcagccaagcgccgcgtctctgccaagctttctctaggccctggggaagagagaaggctctaggtgagtggtttcaaagtgtatatcccacagaagggtacggctcgtgttgcccaagattttgtgactctgagagtgcctcactgcactgcactctccatcgcaggaaacaggctgagcattttcgagggcgtgtggttgagtattcgtggagcagtagcccctggtattggaggtttgaggaaagtracgttgtgtcagttctcatgtggaagcagcctgcagctttgatgcaggcagcaactgtttagtttgtgtttctttttgtttgtttgtttattttcgcgtgtttgggtttaaaatacaagagaaagaatgaggaagaaaggttaagtagtgactgaacgttttgggttagagtagatacccactaaaaccatcgtacttctggcta

SEQ ID NO: 539107 - DNA, 301 bp, Homo sapiens
acgtctgccaatgaagaaatcacattttacgaatccaatgattacactctaaagagttcagaagaacatattgctagatgtgttattctacatttatgctattaaatttcaaatagtaaatttaacttgactgaaaaagttaacctagccaggcgctgtgactcatgcctgtaatcctagcactttgggaggccaacgcaggtggatcacctgaggtcaggagttcaaraccaggctggccaacatggcgaaaccctgtccctactaaaaatacaaaaaaaataggcaggcatggggtgca

SEQ ID NO: 539108 - DNA, 509 bp, Homo sapiens
agattgtgggctccttatgagaatctaatgcttgataatccgtcactgttttccatcagtgccagatgggactgtctagttgcaggaaaacaaactcaaggcttccagtgattctacattatggtgagttggatacttatttcattatatattacaatataataacaatattaaaaaagtgcacaataaatctaatgtgcttgaatcatcccaaaatcatcccccccaacccctgctccctcatccatggaaaaaactgtctttcatgaaacggtctctggtgccaaaaaggtgsggaactgccgcccaagatagtttataccaattaagcacaggaagaagttcagatacttgtttgtacagtgactaaaactttgctactttatgctttacaaatgtggaatgatttacatcatgaaattaccagccctaagggattgccttagtgaagttgttttccaaacaccagaatacagaaatctaaactattttagagactgttgacctgg

SEQ ID NO: 539109 - DNA, 509 bp, Homo sapiens
tgattgagatcttttcctcatttgtcattatatttgtcatttgtccttatgtttgtagttaaatagcttggattaagtttcagaatttgtcggtctctaatggaaaaagtgaccaccagcacatcaccagcaatcatcagccacttgtagtggaatcttttagtgaaagcttrcaggacttttgcaacctgggtgaggaagcagttagaagaaagtaagaaacgcaaaagaacttgagccttaaccttctgatctgaaatcagacttaggtcacagaattcaatggtttctgactattttatttaaactggaaatcggcgggatggcaaggaatactacttgcttctatagtgtgtgatccacattagtgatttgtggaactaattaggacagggggataattctaagcaacaaagaactgtaagtgaatgaacacgaattatctccctgtatgagagagaaatgcagaggccaacacaattcccttgaataggtggggaatatcatgg

SEQ ID NO: 539110 - DNA, 623 bp, Homo sapiens
ttgaactttttaaaaaacatttgctgcagtgctgaatatcttgttataggcagggtaattatcaaatgcctgcccacaatgacaaaaatccatcttaaatcacacacacaaaagacagccaaccagatatgtgactcctgttggatgaatacggcatcatccgagaagcagtcttgaccagaaattaaacttgaactttggatgattggtgaaactaagaattattgttagatttttgatgtgatatgttaaaattatataaacatgttttttcttttttaccttttagagattcatactgaaatatttacagattacattatacaatacttgaaattggcttcaaaataatatrgaagaggagaattggacaggcatatagatgaagcagggtggccatgagttgatggctgttgaagatgggtgacaggtacatggggattcattatgctatactctctacttttgcatgtattcaaaattttccataataaaaagtttaaaagaagtgggggtcattttctggctgtaataagacatgtgtcacaatttatgaaagtcaaatccttggaggtcagatgtccagaggcctcaaagcagcaatttcaagacccctacatcca

SEQ ID NO: 539111 - DNA, 539 bp, Homo sapiens
caccacctgaagagccgaagttaaaactgctggtaacacaaagtgttggcaaaggatgaggacttatgaaaactctcacaacggtgctagcagaagtgcagattggtacaaccactttggaaaacagtacggcatttgggcacatacacatatcctgtgtcccaacaattctgtgcctagggctcattcccaatgaaaatatatgcctgaggtcattttataaataattaaagcagtatatccacacatagtatactttcctatatacgtcttatayttcaccaaaaaagaggtgttaaaaaaagtaaaatgaaagagaaacaaaaagtccaaccaagttatacatgcatcttcaagtgggagacaatggagcatcagcgactccttgtaggtggccctaacatgtccccaccccgtacaccagcccctgcctggccctcacttccaccttgccagagtccccaaggaaattgccctaagcttagcactttcgtagaagatgcaggttcaaaagaggaggaggcagaatcgtcagtgca

SEQ ID NO: 539112 - DNA, 539 bp, Homo sapiens
caccacctgaagagccgaagttaaaactgctggtaacacaaagtgttggcaaaggatgaggacttatgaaaactctcacaacggtgctagcagaagtgcagattggtacaaccactttggaaaacagtacggcatttgggcacatacacatatcctgtgtcccaacaattctgtgcctagggctcattcccaatgaaaatatatgcctgaggtcattttataaataattaaagcagtatatccacacatagtatactttcctatatacgtcttatacttcaccaaaaaagaggtgttaaaaaaagtaaaatgaaagagaaacaaaaagtccaaccaagttatacatgcatcttcaagtgggagacaatggagcatcagcgactccttgtaggtggccctaacatgtccccaccccrtacaccagcccctgcctggccctcacttccaccttgccagagtccccaaggaaattgccctaagcttagcactttcgtagaagatgcaggttcaaaagaggaggaggcagaatcgtcagtgca

SEQ ID NO: 539113 - DNA, 500 bp, Homo sapiens
attcttttgtccttttagaaagattaagtcgttttcgtctcattgtatttaccaaaatccttatcaccaagggctttgtaagtgaggcctgctataccttagcttccaggtataattagtgcccattataatcatccaactgaccaatcatgggaggctcccaagaggaccaggactgggagagagactattaacaaaatcatacttcatagagtcttatcttgccaggggtaaaaaaaagccatcygtctggcattgcacaatccagcactatacaggtactccagccctccttgaggtgcaactctcaccaaagggtgcagcaaacaagcttcaaaaggaaaaaaaccacacacaggaaatgcctgcactgcaacgtttatgaacattgccaaagagaagttgccaagtgctgtaagtggacaaatgcacctcccagaacagaaaacagaaaaggatggaaagaggaagaaggaccggctcttttgcatctctttgcc

SEQ ID NO: 539114 - DNA, 532 bp, Homo sapiens
caatggcagctttaagatctcagcttgccacgacctccccagctagtgacccagaaaacagaaaagagagaagcacacggaaaggagtggtcagcagttttctgactgcttttccttcccctaaacccattagagaagttcaatcgcaggtctgtagggaagacacctccattgcagacgccctgccagctcaggggcctggcggaggtacggcaggagagcatcttctcccacctccgaaaacaagaggaaaccaaagcyggcctcccccacgccagcttcttcaggctgcgtttgcacatcgcctcccccgcccccgccccaacacacaatattgaataaatatgcctggccctggcccatgtgggaatgctggagagctacgattgttatttccaggaatgcacagacaccagcaaaaattcatttcccaaacgcatggctattttgagaaccaaatctcctgctctgtagcaatcaaattgggggcttttcaagtgttgctttgcaatagaaacctgttctgccttca

SEQ ID NO: 539115 - DNA, 682 bp, Homo sapiens
cacttccctccacgaagtaagatggttgctagagcagcccgaatacagcttttctctaggggtaaaattagcccctaggagtcctattcctgatgctttattccactgcctcatgttatgcccacaagagttcactggcagcagacacagtgagtatggtagaatgaatgagcatgggccagaagtcaggcacgagggctctaatttctgctctacatctagctagctgtgtgaccttgatcaaatgcccccactctctgggttccctttctctaactgggttgggtctcatgtgccctgagatcctccctgctctcccatttgaggacaacatggctctgttgcagttagactaaactctaagcacaaagtcctgagtttgggatatatcttggttagagtccagcccttatcccctctcagcctcaatcttcccatctggagaatggatgtactagttccatctcacagtgcaggggtgaggatccagtgagaggctgcctgggaccctgcagaggaatacactatgcatgatacagtattgcagttataatcctttccatggcatygcgcagtgctttctcacacagaaaggactgcctcttgtttaactcagagggaagagtggactagtgatgacggactcacctttctgacacttattcccagagaaaggagccag

SEQ ID NO: 539116 - DNA, 651 bp, Homo sapiens
ggcctggctgagcatgtgacgtcccctctcaatgtgactttgtgcttctgagttaatatgacctcatttcaccctcagagtcacctgaagagccagatgttatttccctatcttacagatgaacagatatgtactagaggggcattctgcaaatttggagattctcagagcaggtctgaagatgtatcttcatggacatcaaagacctatactagatagtatgctttacttttgcttagttgcacataatagtagaatttaaaattgcaagggactgtgtaaggcacagtgaggaatttattttgcataaatgtagtggyttaagagccaacataccttatgtcccagttattaatagcaaagtggccaattttgggcagttgtttaagctccctgagccactctgcccaactctaaaatggggatgataatagttccttccccctcatagagtacttgtgaagattaactcagataagtagaatcatatctgatatatagtcataagtagtattctgtttaaacactagcagtaccgagaaatgcaatggcctcccaggttaggtgattttaataccccaaatttcctatttatgacctcttgtcatcctgttttggtcttctctttatttgataagtggcatttgacac

SEQ ID NO: 539117 - DNA, 618 bp, Homo sapiens
aatatcttcataaaattgaggagccagcattttaataagctccctgggtgatggttacatgactaaaattaagaaccagtactctaatgcccaatgttttctgaggttactctaatttgtattgtgtggtaggtttataaagactttatctcagtcactttaattgcactgcttcaaagagcttcacacacagcaggtgctctatatgtgccacctggttggaggtgcagattaaaccacagggagactgacagcacagtgtgccttgcagcacagtgaagatgctttgcagttgagacttagcaaaatcccccaattttagctaggaattgtttgtctatgtttttttctcttttctgatggaaacattactgacaacatcttccttgagcagatccatgaccaagaagatggtgaacagtgtaaatcagtttttcaytgggacatgaaatccaaggataaggaaggtgcacctaacaggcagccactggcaaatgaggtgagagaaaagtgacaagtgggtttggaaaaagaaagaatgacatactatgtcaattgagtgtattattattattacttctagagaaaaccaagtaggtttcctttcacccagtttgt

SEQ ID NO: 539118 - DNA, 316 bp, Homo sapiens
agtggtagctgttagtcatgaaagcatccatagttccaacttccccttctctgtatcttctggggaaagtgttttcttggctctccctgcttagctcccaggtctttgggttcctcatctgagaaatagatggggaggagaattgggaggagaaacagaggttaaattgattcacatgcagaaagggaaaggaggcttccagaagaaagatctygacatttggagataggagcaggagagagaacaggaggcgcaaggaaaagacccaggtggactagagaggctgggggaaggcgggaggaaagagaaagaggtg

SEQ ID NO: 539119 - DNA, 550 bp, Homo sapiens
agtgcagcagttaacaaaagagtcaaaaaattcctgtgctcaggaaactcctgttatactagagggagataagccatggtgaatacatgaaatatgtaatatgtcaatggttgtacatgctatggagacatatagagcagggaagtggggcaggaggtgtgagtgtgcgtgtgtgtgtgtgcgtgcacgtacacrtgtgccatttaaaatagggcattagggtagttctcattgaaaagttgatatttgagcaagagccttaaggaaaagacagaaggggatagggaactccaggcaaactgaatagcaagttcaaaggccaaggacttgagtaggagcagccttgacctgtttgaggctgaagtgaaggagcagccttggcctgtttgaggccgagtgagtggggatggaatcacagggtctgagcagggcctaggctctgcggagtaaggacgagggtggtgatgtgataagactgtaaccaccgccgactctcactgactgctcgcctttgcttttaaacttgcgaaagcagtctgacgtgggggca

SEQ ID NO: 539120 - DNA, 550 bp, Homo sapiens
agtgcagcagttaacaaaagagtcaaaaaattcctgtgctcaggaaactcctgttatactagagggagataagccatggtgaatacatgaaatatgtaatatgtcaatggttgtacatgctatggagacatatagagcagggaagtggggcaggaggtgtgagtgtgcgtgtgtgtgtgtgcgtgcacgtacacgtgtgccatttaaaatagggcattagggtagttctcattgaaaagttgatatttgagcaagagccttaaggaaaagacagaaggggatagggaactccaggcaaactgaatagcaagttcaaaggccaaggacttgagtaggagcagccttgacctgtttgaggctgaagtgaaggagcagccttggcctgtttgaggccgagtgagtggggatggaatcacagggtctgagcagggcctaggctctgcggagtaaggacgagggtggtgatgtgataagactgtaaccaccgcygactctcactgactgctcgcctttgcttttaaacttgcgaaagcagtctgacgtgggggca

SEQ ID NO: 539121 - DNA, 560 bp, Homo sapiens
gtggggccgcctcataagcacaagcccccatgtttccctttttggtcagtcagccccagcaaatagcccagggcttcaggaaggtaactcccccgctaggcatcagcaccacctctgctgaagctgtgctcactcctgcgctttccgtggcatcagatgtgagccactgcgggtatctgagttgattgagatggtgcctagccaggaygtgaagtaacagcattagaataaaacagaaaacacagcgtgagaaagtctttcttttctcaggttgactgtcaagccttccaatcccaccagggggaaggactggcgggtgctggtgtctctatcctctgcctcctgctgatctttcctctaaggaggataaagccgcttcaggctcagacctttagcatgtcaacagcagccagctagaattcaatgacatcacttcgctttctttgtagtaatgacaatttcctttagaactaaatcaatttaggtagagaaaaggtgagtctttaacaaaagtattaagaaactaatttgggctttggcagaatttctgaagatggctt

SEQ ID NO: 539122 - DNA, 560 bp, Homo sapiens
gtggggccgcctcataagcacaagcccccatgtttccctttttggtcagtcagccccagcaaatagcccagggcttcaggaaggtaactcccccgctaggcatcagcaccacctctgctgaagctgtgctcactcctgcgctttccgtggcatcagatgtgagccactgcgggtatctgagttgattgagatggtgcctagccaggatgtgaagtaacagcattagaataaaacagaaaacacagcgtgagaaagtctttcttttctcaggttgactgtcaagccttccaatcccaccagggggaaggactggsgggtgctggtgtctctatcctctgcctcctgctgatctttcctctaaggaggataaagccgcttcaggctcagacctttagcatgtcaacagcagccagctagaattcaatgacatcacttcgctttctttgtagtaatgacaatttcctttagaactaaatcaatttaggtagagaaaaggtgagtctttaacaaaagtattaagaaactaatttgggctttggcagaatttctgaagatggctt

SEQ ID NO: 539123 - DNA, 560 bp, Homo sapiens
gtggggccgcctcataagcacaagcccccatgtttccctttttggtcagtcagccccagcaaatagcccagggcttcaggaaggtaactcccccgctaggcatcagcaccacctctgctgaagctgtgctcactcctgcgctttccgtggcatcagatgtgagccactgcgggtatctgagttgattgagatggtgcctagccaggatgtgaagtaacagcattagaataaaacagaaaacacagcgtgagaaagtctttcttttctcaggttgactgtcaagccttccaatcccaccagggggaaggactggcgggtgctggtgtctctatcctctgcctcctgctgatctttcctctaaggaggataaagccgcttcaggctcagasctttagcatgtcaacagcagccagctagaattcaatgacatcacttcgctttctttgtagtaatgacaatttcctttagaactaaatcaatttaggtagagaaaaggtgagtctttaacaaaagtattaagaaactaatttgggctttggcagaatttctgaagatggctt

SEQ ID NO: 539124 - DNA, 528 bp, Homo sapiens
atagcaatcctcatgggcgggacgatgggaggtggttaccatgacatggtggccacrgtgacatggtggctaaacaggacatcggtgcagtgctgaggattttgttggtggttacttgatcccagagcaagggccaaggaggcagcacacatgaggactttgctggagtcttcacagtgtttgtacagacggtaaaaaacaaaaacggaaatgttcagacaagtcaaaccatgaaatcactcatgtgactcaggcgtctcttttcccctccactgcctcgcatgaattactgaccttctgactttgtggagagattcccagaaaacaagccagaagcttttcttcctgtgtcaacaggaagtgacctggtgagtttgctgttcatctttgtaatgagattaatttccctgacatgtaatcttctctttatttcaaacaaaaagggaacacttttgctctttttgtaataactgcaggccttccacatattgtctcttatttccctaaagtgttgttatcatgacaaag

SEQ ID NO: 539125 - DNA, 528 bp, Homo sapiens
atagcaatcctcatgggcgggacgatgggaggtggttaccatgacatggtggccacggtgacatggtggctaaacaggacatcggtgcagtgctgaggattttgttggtggttacttgatcccagagcaagggccaaggaggcagcacacatgaggactttgctggagtcttcacagtgtttgtacagacggtaaaaaacaaaaacggaaatgttcagacaagtcaaaccatgaaatcactcatgtgactcaggcgtctcttttcccctccactgcctcgcatgaattactgaccttctgactttgtggagagattcccagaaaacaagccagaagcttttcttcctgtgtcaacaggaagtgacctggtgagtttgctgttcatctttgtaatgagattaatttccctgacatgtaatcttctctttatttcaaacaaaaagggaacacttttgctctttttgtaataactkcaggccttccacatattgtctcttatttccctaaagtgttgttatcatgacaaag

SEQ ID NO: 539126 - DNA, 522 bp, Homo sapiens
cagccacacttctcccttgcagctggcatgatggcagcagccgctgccaycaaaatcatagcttattgtagcctcaaactcctgggcccaagtgatctttttacctcagtctccccaatagctggggccacaggcatgtgccacaatgcccatctaattgtcttttattttttggtagagaaggtggtctggctatattgcccaggttaatctctaattcctggacttaagcagtcttcctgcctcatcctcctacatggctgggattacaggcatgagcgactgtgcccagctcctgataaatcctttcttaatcaaagtcttcatcagcaaccttacttaccactatcttaccagatgatctcaagtatccaaagaaattaaaagtagctactgctgacaaaactgttgggttccctgatattgtgcaagaataaaattatgctaggtcttccgttagctagctgttcttctgtaacagtctctttctatgtattattcaaaactgatgcaactttttaa

SEQ ID NO: 539127 - DNA, 402 bp, Homo sapiens
gaatacaggatagctctgtcctatagcaacctaaaacactacctcccttgatgtgcatatagaaaatctatgtcttgtggccaggcatggtagctcatgcctgtaatcgcagtaccttgggaggccaaggtgggcggatcacaaggtcaggagatcaagaccatcctagctaacacagtgaaaccatgtaagactctacccttggatcatagccactgtttcagtactttttttttggaatcatcaggaaggactcttgctttttctastactgtggtctgcgaggacaaagtaagtgtgttatttgtagcactatctcttgctacagagagagaagagagtcatcttcagaaggaaaaaatgaggctaaaacaaaaggaaaagtggcaagagaaagaagga

SEQ ID NO: 539128 - DNA, 402 bp, Homo sapiens
gaatacaggatagctctgtcctatagcaacctaaaacactacctcccttgatgtgcatatagaaaatctatgtcttgtggccaggcatggtagctcatgcctgtaatcgcagtaccttgggaggccaaggtgggcggatcacaaggtcaggagatcaagaccatcctagctaacacagtgaaaccatgtaagactctacccttggatcatagccactgtttcagtactttttttttggaatcatcaggaaggactcttgctttttctacyactgtggtctgcgaggacaaagtaagtgtgttatttgtagcactatctcttgctacagagagagaagagagtcatcttcagaaggaaaaaatgaggctaaaacaaaaggaaaagtggcaagagaaagaagga

SEQ ID NO: 539129 - DNA, 402 bp, Homo sapiens
gaatacaggatagctctgtcctatagcaacctaaaacactacctcccttgatgtgcatatagaaaatctatgtcttgtggccaggcatggtagctcatgcctgtaatcgcagtaccttgggaggccaaggtgggcggatcacaaggtcaggagatcaagaccatcctagctaacacagtgaaaccatgtaagactctacccttggatcatagccactgtttcagtactttttttttggaatcatcaggaaggactcttgctttttctactactgtggtctgygaggacaaagtaagtgtgttatttgtagcactatctcttgctacagagagagaagagagtcatcttcagaaggaaaaaatgaggctaaaacaaaaggaaaagtggcaagagaaagaagga

SEQ ID NO: 539130 - DNA, 402 bp, Homo sapiens
gaatacaggatagctctgtcctatagcaacctaaaacactacctcccttgatgtgcatatagaaaatctatgtcttgtggccaggcatggtagctcatgcctgtaatcgcagtaccttgggaggccaaggtgggcggatcacaaggtcaggagatcaagaccatcctagctaacacagtgaaaccatgtaagactctacccttggatcatagccactgtttcagtactttttttttggaatcatcaggaaggactcttgctttttctactactgtggtctgcgaggacaaagtaagtgtgttatttgtagcactatctcttgctacagagagrgaagagagtcatcttcagaaggaaaaaatgaggctaaaacaaaaggaaaagtggcaagagaaagaagga

SEQ ID NO: 539131 - DNA, 658 bp, Homo sapiens
ctgtgtgacctcgggcaagttacttgtctgtgctcagtgtccyctgcatagtgggtatagcaatacctgcctcatggagtcccttaagtgagttaatagctgtaacatgcttagaatggtgccatgtgcatcgtcaccatccagtacatatgggccatcatgcctgaatcccagatggacacatatccttgaagggtctaaaatctaggatcttgaaatgcctgacagtgggatcctgaaatcctctggcagcattctaacatattttggctgcagaattttaccctgcttcccagggctagaaggtgtgggatcaactgcttactcagttcagccccaagtaggcaaagaaggttttgtcacaggcctgcctggggcccagcccctgtaaccaccccttgtccctcccttgcctgctccctcacccagattcacacatgcactccaggccttctgggccccaagggaaggagagagggtggggagtgggttcactggtccaccaaagcatgctgcctccagccctgctgaactggtgggtccagggaatgggcctggagctgaaggggtcttgccctccctttacctttaagccttgatttgcagtgatccaagagcttcatctcttcctgtgagcctgtctggatgtttatgctgt

SEQ ID NO: 539132 - DNA, 658 bp, Homo sapiens
ctgtgtgacctcgggcaagttacttgtctgtgctcagtgtcctctgcatagtgggtatagcaatacctgcctcatggagtcccttaagtgagttaatagctgtaacatgcttagaatggtgccatgtgcatcgtcaccatccagtacatatgggccatcatgcctgaatcccagatggacacatatccttgaagggtctaaaatctaggatcttgaaatgcctgacagtgggatcctgaaatcctctggcagcattctaacatattttggctgcagaattttaccctgcttcccagggctagaaggtgtgggatcaactgcttactcagttcagccccaagtaggcaaagaaggttttgtcacaggcytgcctggggcccagcccctgtaaccaccccttgtccctcccttgcctgctccctcacccagattcacacatgcactccaggccttctgggccccaagggaaggagagagggtggggagtgggttcactggtccaccaaagcatgctgcctccagccctgctgaactggtgggtccagggaatgggcctggagctgaaggggtcttgccctccctttacctttaagccttgatttgcagtgatccaagagcttcatctcttcctgtgagcctgtctggatgtttatgctgt

SEQ ID NO: 539133 - DNA, 658 bp, Homo sapiens
ctgtgtgacctcgggcaagttacttgtctgtgctcagtgtcctctgcatagtgggtatagcaatacctgcctcatggagtcccttaagtgagttaatagctgtaacatgcttagaatggtgccatgtgcatcgtcaccatccagtacatatgggccatcatgcctgaatcccagatggacacatatccttgaagggtctaaaatctaggatcttgaaatgcctgacagtgggatcctgaaatcctctggcagcattctaacatattttggctgcagaattttaccctgcttcccagggctagaaggtgtgggatcaactgcttactcagttcagccccaagtaggcaaagaaggttttgtcacaggcctgcctggggcccagcccctgtaaccwccccttgtccctcccttgcctgctccctcacccagattcacacatgcactccaggccttctgggccccaagggaaggagagagggtggggagtgggttcactggtccaccaaagcatgctgcctccagccctgctgaactggtgggtccagggaatgggcctggagctgaaggggtcttgccctccctttacctttaagccttgatttgcagtgatccaagagcttcatctcttcctgtgagcctgtctggatgtttatgctgt

SEQ ID NO: 539134 - DNA, 562 bp, Homo sapiens
agtgggagaaaccagaggggtcttgtgttgtcaaggacctggcatcatgcctggcacagagcacttgcaaaatcttcattctcaagattggcatttgtagctctgggggatacacacagaggtctctctatgtatgggcaaggtacctgtggatagatgtgggtctgtttgtgtgtgkgggagtgcatgtttcagggacacaggctatcaaaaccagcacaaggtgactccaataagggaagggaagaaagcgcatggtaaaccaggaagacactctagagatgaggcttcttgcactccacatggcctcttggtgcctgtgccattgtagccttcagtactcatgcttgtcctaccctccgggtcctcccctggatctcagtgcctgacccatggaaagcttcagtaaatggggaaacacaaatataagggaatataactagctaattagggtaatgaagtgaggagtagccatttccaacatgcattaagctgtccctgatttttaggggctggaggtctagtgagagagacaatttgcggcatgatggggaggaagtag

SEQ ID NO: 539135 - DNA, 562 bp, Homo sapiens
agtgggagaaaccagaggggtcttgtgttgtcaaggacctggcatcatgcctggcacagagcacttgcaaaatcttcattctcaagattggcatttgtagctctgggggatacacacagaggtctctctatgtatgggcaaggtacctgtggatagatgtgggtctgtttgtgtgtgtgggagtgcatgtttcagggacacaggctatcaaaaccagcacaaggtgactccaataagggaagrgaagaaagcgcatggtaaaccaggaagacactctagagatgaggcttcttgcactccacatggcctcttggtgcctgtgccattgtagccttcagtactcatgcttgtcctaccctccgggtcctcccctggatctcagtgcctgacccatggaaagcttcagtaaatggggaaacacaaatataagggaatataactagctaattagggtaatgaagtgaggagtagccatttccaacatgcattaagctgtccctgatttttaggggctggaggtctagtgagagagacaatttgcggcatgatggggaggaagtag

SEQ ID NO: 539136 - DNA, 562 bp, Homo sapiens
agtgggagaaaccagaggggtcttgtgttgtcaaggacctggcatcatgcctggcacagagcacttgcaaaatcttcattctcaagattggcatttgtagctctgggggatacacacagaggtctctctatgtatgggcaaggtacctgtggatagatgtgggtctgtttgtgtgtgtgggagtgcatgtttcagggacacaggctatcaaaaccagcacaaggtgactccaataagggaagggaagaaagcgcatggtaaaccaggaagacactctagagatgaggcttcttgcactccacatggcctcttggtgcctgtgccattgtagccttcagtactcatgcttgtcctaccctccgggtcctcccctggatctcagtgcctgrcccatggaaagcttcagtaaatggggaaacacaaatataagggaatataactagctaattagggtaatgaagtgaggagtagccatttccaacatgcattaagctgtccctgatttttaggggctggaggtctagtgagagagacaatttgcggcatgatggggaggaagtag

SEQ ID NO: 539137 - DNA, 562 bp, Homo sapiens
agtgggagaaaccagaggggtcttgtgttgtcaaggacctggcatcatgcctggcacagagcacttgcaaaatcttcattctcaagattggcatttgtagctctgggggatacacacagaggtctctctatgtatgggcaaggtacctgtggatagatgtgggtctgtttgtgtgtgtgggagtgcatgtttcagggacacaggctatcaaaaccagcacaaggtgactccaataagggaagggaagaaagcgcatggtaaaccaggaagacactctagagatgaggcttcttgcactccacatggcctcttggtgcctgtgccattgtagccttcagtactcatgcttgtcctaccctccgggtcctcccctggatctcagtgcctgacccrtggaaagcttcagtaaatggggaaacacaaatataagggaatataactagctaattagggtaatgaagtgaggagtagccatttccaacatgcattaagctgtccctgatttttaggggctggaggtctagtgagagagacaatttgcggcatgatggggaggaagtag

SEQ ID NO: 539138 - DNA, 602 bp, Homo sapiens
ccagcctctgcttcctgagtagtgatgcgtcagggctgtctgactgcaaagttgtgtgaggtttgggctgagctgaacttagcctgtccctcaggtggtgcccatgagaggagagggaaattgcacccatgaaagatcagacaggtcctaaatggctgagcgctttctctttatgcaaggcctcaatttccctgtctgtcatgagagagggttgaggcagaaggttcccaagcctcagtgcccatgctgtctcctctggagcccagaggctaacacaggtctcagttctgcttggtgcacaacccctgaccctcatagccttggcagtagcacagcatgagggcaggtgaggagtggggctagccatgggccggagtgcctttctgatgaaccttggctgtctgccttccagggatattaggtcagcactcaaaagaggaagatgagcaattggggccctcactttgggggatattgggaatgtggaagtcagagaccctcctgggcaggacgccycctggctccaccctctgcctcttagatttactgggagggttggatgcacagagaaggaagaaacccatcccagtggagggtgtggg

SEQ ID NO: 539139 - DNA, 394 bp, Homo sapiens
ggccctaggtgaacactaggtcttaggtggacattaggccccaagtggacaaccaggtcccaggtggacacccagccttaacatggacatcgggccctaggtagacagcaggttcaaggtgcatatgaggctcccgataaacactggtccccaggragacccttgtccccaggtgaacaccagcacccaggaagacatccacctccacctgcacatcattctccaggtttatacctaggccctgtgggagcaccaggccccaagtgagtacatagatccctggtggccattaggcaccaggttgacacccagggcttaagtggacatgaggccccagatgaatgctagtccccaggtggataaataggccccaggcatacatcagatctgaggt

SEQ ID NO: 539140 - DNA, 555 bp, Homo sapiens
gtcagcaactgaacatcaggccacagggggatgcccaggctctagctgaataccaggcctcacatggacattaggccccaggtgaacagcaagccccaagtgaatacctaggttcctggtgaacatcaggaagcaggtggcactcaggccctacactcaggccaaaagagaaatcagaacatatgtggacactcagggcccaggtggctatcaggccccaggtttatatcactttcctggtagacatcagtacccacgtagacactggacttcaggtatacatcaggttcctaggtggacacccaggccccaggtggacaccagcctacaagtggacatcagaccacaggaggacacccgggccccagatagatatcagactccagaggaacacccacgtctcaggtggacatcaggtcccaggttaattccaggccccaggtggaattcaggccccacctggacacaagtccctaggtagatacataggctctgtaggccctggggaacatcaggccttaggtgaagttytaggctacaggtggacatcttgct

SEQ ID NO: 539141 - DNA, 543 bp, Homo sapiens
cccacaggggctctttgtcctgcaggagagcagcggacccacgtcagagaagatgctggtatcttttcacggctcttttctgagaaatgaagccacaccaccatacggtctgcaagaggaagccgggaatgggagatggcaacagtccctgtcactggaacgctggcctctctggacaagccwtccctttggaacccctccccttatgaccgtggcggtggcacggtgctttaccctgcctgggctccggcctctgctctgtcttccctcttgctctgcctcccctgtttctcagggacctggatgcatctcgctctggccaaatgtcttcaacaaagatgacttcccagtccgtcagggtgacatttcctggagatccgtgtcctgaatgtttctctctccaaacgtgtttctcctggattccgcaggtctcatgaccctggagctcttggcttccatatgtgtctcaggcagggaagcttccttcttctccacgttttccctcatgggtgggtggattgcctagaaggagcgctaggcgac

SEQ ID NO: 539142 - DNA, 474 bp, Homo sapiens
cctgccgtccagcaccggagctttagtcggcccagccagtgtgcctccacgtggctctagctgattgtctcatcacagtgatttccactgttgtcttaatatccagtcccttaattttggcatagcaggagttctccatgactgtgctttggtgaaggggcttaatgcctccgctgtcttgcaggagttttaatacccctcccatcctgtgctgtctccttgctaggatcaagacgactgcaaaccagccaaggacaaaggcctcacaggtgctcattgtccacccacaggcgtgtgcccacagaccttcaagaagatggttctcactcctctcrccctttgccctcattgagaaagctacccacagctatacactgggacggagaaggaagctggctacaagatggggcaagcatgtctgtcactcaaacgctggccttcctcgccaagtcacccatttggcacattttcccg

SEQ ID NO: 539143 - DNA, 554 bp, Homo sapiens
ccaattaataataaaacattttaaatgcacacacactttaaccgttatatttacaattctctatttagtggagataatttttaaaacagaggtacaaagaaatacagttgccactcacaaatccctcattcataaatctcccactgcaggcatttggacttatctccttgtatgtcaacacataggcaaataatagggatcataatacatacttaatttttatcctgccttttgcccttaaagtttattctaagaagtttttcaagttagtaaatgctctttaaaaagaattttaaatgccgcataatattctattgaatggctgaaccaaaatatatttatattgaaacagttcttgttatggaaagtgatagtttggatacttgaccccacctaaatctcacgttgaaatgtaatctccaatgttggaggtgggctgggtgggaagtgattggatatgggggtggatccctcatgaatgatttagcactatccctttggggctgcctttgtgatagctagtgaattcttgygagatctgtttgtttaaaagt

SEQ ID NO: 539144 - DNA, 575 bp, Homo sapiens
atagcaataggagaaatatcgaatgtaaatgcgagttgatgggtgcagcaaaccaacatggcacatgtatacctacatatcaaacctgcactttgtgcacatgtatcctggaacttaaagtatattaaaaaaaaattcctcaccttccacccttttgtcctttcttttctyaagccacatgtttccgtgaacaagggcctttccagcaaatcccacttctctgacaccaattgtttagggaaaaactatctccaaccatgtttttctctacttttgtaactgcccaatgagttccccttacttgctgcctagacagagctgatttatcaagacaggggaattgcaatagagaaagagtttaattcatgcagacctggctgtacgggagaccagagttttattattactgaaatcagcctcccagagacttggggataatttggtgggtaggagatcagcgagttggaagtgctgattggttgggtcagagatgaaatcataaggagttgaagctgtcatcttgtgctgagtcagttcctgggtgggggccacaaggccagatgagacagtttatt

SEQ ID NO: 539145 - DNA, 369 bp, Homo sapiens
tcactcaaggggaccattctctcctagtctaactccagagcccctyggcttccaactcaatgaggcttttcaagctctcctttgaaagacccggcttgttaactcccaacaaggcatctgccttttgagtctgcacagaaagggaggagaatggcttaaaaaacacccctcacaacgcctcgtgagtggggagggcagtgcgtgcctgtccgcgaagcccgcttctgcttctaaatcactcctggctccttgagttctagaccggggtagggcgatttccttccaggtttgtgtcttctttttatgtttaccgtggagaaagtggtaggcagagagctcttgatgagggcacctggctgtgaggttgcg

SEQ ID NO: 539146 - DNA, 369 bp, Homo sapiens
tcactcaaggggaccattctctcctagtctaactccagagccccttggcttccaactcaatgaggcttttcaagctctcctttgaaagacccggcttgttaactcccaacaaggcatctgccttttgagtctgcrcagaaagggaggagaatggcttaaaaaacacccctcacaacgcctcgtgagtggggagggcagtgcgtgcctgtccgcgaagcccgcttctgcttctaaatcactcctggctccttgagttctagaccggggtagggcgatttccttccaggtttgtgtcttctttttatgtttaccgtggagaaagtggtaggcagagagctcttgatgagggcacctggctgtgaggttgcg

SEQ ID NO: 539147 - DNA, 369 bp, Homo sapiens
tcactcaaggggaccattctctcctagtctaactccagagccccttggcttccaactcaatgaggcttttcaagctctcctttgaaagacccggcttgttaactcccaacaaggcatctgccttttgagtctgcacagaaagggaggagaatggcttaaaaaacacccctcacaaygcctcgtgagtggggagggcagtgcgtgcctgtccgcgaagcccgcttctgcttctaaatcactcctggctccttgagttctagaccggggtagggcgatttccttccaggtttgtgtcttctttttatgtttaccgtggagaaagtggtaggcagagagctcttgatgagggcacctggctgtgaggttgcg

SEQ ID NO: 539148 - DNA, 369 bp, Homo sapiens
tcactcaaggggaccattctctcctagtctaactccagagccccttggcttccaactcaatgaggcttttcaagctctcctttgaaagacccggcttgttaactcccaacaaggcatctgccttttgagtctgcacagaaagggaggagaatggcttaaaaaacacccctcacaacgcctcgtgagtggggagggcagtgcgtgcctgtccgcgaagcccgcttctgcttctaaatcactcctggctccttgagttctagacyggggtagggcgatttccttccaggtttgtgtcttctttttatgtttaccgtggagaaagtggtaggcagagagctcttgatgagggcacctggctgtgaggttgcg

SEQ ID NO: 539149 - DNA, 367 bp, Homo sapiens
gatccctgcagaaggagaggacagcaacaccgcaaggcctcagcctccggccckgtcccgtgccctcccacatcaggtgcctgcagacagctggctgggagctcttccaggctctcagcctccgatcacggcggtgagcctgtgatttgctattttaccacctttaaaaaagtgtattaaatatggaatgcatattacgagttgcatagtcatggaaaccagcaaattgcacagtgttttttctttgcctcctctagcaaaccatcctcctgccccgtgtggtcgttcctgccccgataccctccccaatgcaaagcgaagccacagtgtcccatctgcatgagacatgacaagaaaaaatggaaca

SEQ ID NO: 539150 - DNA, 343 bp, Homo sapiens
ctgctgtgtgccaggcggcatgcccaggcataaygggcatgagacaggcagtactgtcaccccagttttgcagatgaggctagcaaggagctgtctctgacctgaggtcacacaaccaggactcgaacccaggcttgctggccccagatcctaagctctttccctaagactgacaagaaaaccagagggtggaaagggggcttggtgtcccctggaccctgcagctcagcactttagccccacccagaccaggacaagcccaccgtggaagagggatcccacgcccaagcctccccaacccagcctcaagccaggggctcaggaggccggagacagggctggg

SEQ ID NO: 539151 - DNA, 477 bp, Homo sapiens
tcagccccctgcaggctctgggtccctgcttccttccccttagggttatctttccccctaaacttgatcctgtagctttctctaatccacatgccccacccccactaagcacacattctcacagggttatctgctgagctcgtgttatattttatcattgttttagcaaaaatctattcatgcatttattcaaccgaggtgcccccagcacccaatacctccaaggctgtggccaggtaccctgctgtccactggagacagcagcggatgtgacaggggctctcccactccatggagtgggctttctagtgggagaaagcagccacaggtcaattgttaaacasgcagaactgttagggcgagaagagctaggaaggaaatgcatgcggtctgggatgagcagaaagggcagggattctagtttgtgaggttgtctgagaggcttctctgagggagaccttctcaatattgatctgc

SEQ ID NO: 539152 - DNA, 606 bp, Homo sapiens
gagaattctatacccagtaaaatagtcttaaattttacggcaaaataaagatattttcagatcaataaactattgatctgaaaatttgatcagaaaatttgatctgaaaattattaatctgagaatttattagtggcagataacactataagaaataggaatttcttcagaataaaggaaaacaactgcagacagaatcctagaactcaagaatgaagagcaccagaaatggtaaatatgtgagtaaccataaaaggaaattgactgctgaaagaaataataatracaatgtcttataggaagacataacatatgtagaaataaaatatataataataacataaacatgggagggatgtaagattcttgtacaggaagcagcactaggtcaagaatacatataatctctaaggtaatcactaaaagaataatacaaaagataccatttaaagagcagaggacataaaacaacaattttttaaatatttgattaatccaaaagaaataagaaaaggaagaaaaaagaaaccaaggataggataaacagaaaaaataaatagctagatgattgacttcaacccaggtacataatgttgatatttaaat

SEQ ID NO: 539153 - DNA, 606 bp, Homo sapiens
gagaattctatacccagtaaaatagtcttaaattttacggcaaaataaagatattttcagatcaataaactattgatctgaaaatttgatcagaaaatttgatctgaaaattattaatctgagaatttattagtggcagataacactataagaaataggaatttcttcagaataaaggaaaacaactgcagacagaatcctagaactcaagaatgaagagcaccagaaatggtaaatatgtgagtaaccataaaaggaaattgactgctgaaagaaataataatgacaatgtcttataggaagacataacatatgtagaaataaaatatataataataacataaacatgggagggatgtaagattcttgtacaggaagcagcactaggtcaagaatacatataatctctaaggtaatcactaaaagaataatacaaaagataccatttaaagagcagaggacataaaacaacaatttttwaaatatttgattaatccaaaagaaataagaaaaggaagaaaaaagaaaccaaggataggataaacagaaaaaataaatagctagatgattgacttcaacccaggtacataatgttgatatttaaat

SEQ ID NO: 539154 - DNA, 641 bp, Homo sapiens
cttttcctgcaggttacagggggaagtctgtttcctcatcttttcagcttttaggagctgccttgccccactccgacctctccatcgtcaagtgtcctctcactaggactgtcccctgcctctctcttataagggtccctgagattacacttcatgctcacccaggcaacccaggatcatctctgcatctcraactccttaacttcatcatacctgcaaagtctgtaaaagctctggaggttagggcgtgggcatctcaggggagccattgtcttcctgccccaggaacagatggtgatgcggtttaacttggggggtggtgttgcctgggaatggatgaggggagtgttctgggggctggccatgctctagatctggacctcagacttggacacaggcacatgcatgagtaaaagttgaccagaccgtaaccgtagactcagtgcacatcactgtgtgtttgttacacttgggcacaaatctaaaacagaagagaagggtaaagctaccctcctccagatgttgcattgcctgtgtgtagtgcccctgtgctcagagggtgaacaaagcaataaccaggccctgtgttagtgagcgtcatggagacagtgtggggtgcgtggaggtgaggcgtggagcag

SEQ ID NO: 539155 - DNA, 609 bp, Homo sapiens
tggaaggcgggaacatctcttctgcaggactgtatgagtcagacagtcactggccagtccaggttcaagggcygggcataagcccctccctctgatgggcagtccagcatgcaaatacagaggggtaggattcgaggcgcctctttggagaccatcaccctcagcactagaggggactagcggggagggctgcccacatcctaactctttgtatcgccctagttacatggtgatattggggaaaaaaggcattcttgtacagaccactcctaaattgaattcccactctaacatgcctcactgctcatcactgagatccatctctgcctaatacactcaggtcatcacggcttgatcttagctgattgttttatattgcaactgtcctatccataaagcctcagtgcaatggagttggttgcaaagtgaaagtgcaagaaatgcaaacatgcaggatttcatgaagatgcctgcgctatcttcatcatgaagatgaaactgctatcaagaaagtgcaggaattgcagccacaattattgagaaaggaggtggagttcaaccagataaccactgaggaggcagagatccagttagcccatgagagtagaa

SEQ ID NO: 539156 - DNA, 526 bp, Homo sapiens
ccagctatgcttcaccgggttctcactctgtggaggagaatcctagctggaccctgggtcatcccacccaataaaagagctcgtgggtattacagaaaaggcttaaatttgacagttaaagatagaaattgccagtgaagaaaattcatctcttataatatacaaataaagcatgtgtttattgaaatagtacctctatgaagaatattttaagaatgtgaatggggttttgtttttgtaaactttcaattaccttcccctccctgaccctgcccaggtattcatctgcccrgatcccagggtggccttcctcaaacgtacgccccatctgaattttcttctctcctgtctctcaagacaatgctcagtctcctaaccacatctcagactgccctacacttcagcctctgtctctgctgccacttccctgcaccttcattggctcttgcacccccaggcatgttcaacctcttgcaattcctgcattccccatagttcatgacccagcctttgtccccaccaccag

SEQ ID NO: 539157 - DNA, 526 bp, Homo sapiens
ccagctatgcttcaccgggttctcactctgtggaggagaatcctagctggaccctgggtcatcccacccaataaaagagctcgtgggtattacagaaaaggcttaaatttgacagttaaagatagaaattgccagtgaagaaaattcatctcttataatatacaaataaagcatgtgtttattgaaatagtacctctatgaagaatattttaagaatgtgaatggggttttgtttttgtaaactttcaattaccttcccctccctgaccctgcccaggtattcatctgcccggatcccagggtggccttcctcaaacgtacgccccatctgaattttcttctctcctgtctctcaagacaatgctcagtctcctaaccacatctcagactgccctacacttcagcctctgtctctgctgccacttccctgcaccttcattggctctkgcacccccaggcatgttcaacctcttgcaattcctgcattccccatagttcatgacccagcctttgtccccaccaccag

SEQ ID NO: 539158 - DNA, 601 bp, Homo sapiens
tggccaagttccctgcagaaagtaaaaagttcctcttcaaagtttccctccttgttaaaaaataagccataagtgttagaaataatagtttcttttaaagactaacttcctttaagcttccttactttatgctagtgactctttgttgggccctatcctatgtacctgttaaacatgctgacaggcacgtagtacgttccatgtccttgtaccttcaccaagatttttgtgccggacatgctcacaggcacgctccagctcgtggcctatgccccttccctatttggcataagcaacttcctcttttcctttgtctttcccttacttttacctatttagaaaagttttaaactgttagccaatcgggttttagtttaaattgtgtggtctgactccagccaatggagacaggacccagtagcagggacaaagtgtataaggaataaagattgcttccctcctttgttcgggtgtgctctgaccattattccatctgtgattagcaccctttccatagaaagtaaagattgccttgccgagacgattcaatttatgtttgagtgctatttctttgyggcaccagggaacaagcatttacata

SEQ ID NO: 539159 - DNA, 515 bp, Homo sapiens
cttgacagactgaaatggcaccagtggatttctcagcagcaaacccacggggaaaccgtgtggacttttcagaagaggccgctgctggaatccccaccacatctctccttggtctaattacaggagatgttcaagggatctaatgggagctttctttgtaaatcaggttgcagctccagagatgctgagctgagtgtgctgcgtggttaattgtggctaacaggaagagggtggacatatgccaatatttatgcaaatagcagagctgctcggggactgtgccctgggggacttcagctcagcctggccaacatccaaagacttcaggccctgctttcacagggcaatttggattgctctgcagattggatggaaataaattttgcatatcaatgctaatggtgtcaagggtccataatcagccctcgtgctcctaattttagacccagcagcgcrtctgtgtgaaagagcaggctgggagtgccggtggaactcatcctgctgggaggctaata

SEQ ID NO: 539160 - DNA, 515 bp, Homo sapiens
cttgacagactgaaatggcaccagtggatttctcagcagcaaacccacggggaaaccgtgtggacttttcagaagaggccgctgctggaatccccaccacatctctccttggtctaattacaggagatgttcaagggatctaatgggagctttctttgtaaatcaggttgcagctccagagatgctgagctgagtgtgctgcgtggttaattgtggctaacaggaagagggtggacatatgccaatatttatgcaaatagcagagctgctcggggactgtgccctgggggacttcagctcagcctggccaacatccaaagacttcaggccctgctttcacagggcaatttggattgctctgcagattggatggaaataaattttgcatatcaatgctaatggtgtcaagggtccataatcagccctcgtgctcctaattttagacccagcagcgcatctgtgtgaaagagcaggctgggagtgccrgtggaactcatcctgctgggaggctaata

SEQ ID NO: 539161 - DNA, 512 bp, Homo sapiens
gaaagcaaaatgatggcctacaaaatgtagtcatttgtctttattaaagatattcatgcctattgcaataaagcacaattttatgcatgttgctatgagtatgactaggtagattctcatttttctcacaatctctgaggtccattataaaaaaaaaaaagtgaagaaccactgcacttctagcgttttataacttttattatcaaaatttccaaaaggaagtatttgcagagcacattttagactatctaaatactatgcactttgaaacaaaagatgacaaagttgccgytgtcctcagagaacgaaggagtgatgcactgggtttggagtgaatttatgcaagaggcccaggagtccttgattaaaagtgccgctcagccagcactgccctaagtactcatcacctttcctagtgagcgtgttcagctcttcaagactgacaccagactctacttaaaaatggctcgctataaaatatcaaaaatggaaagctttaactctggtaataa

SEQ ID NO: 539162 - DNA, 438 bp, Homo sapiens
tgcctattgcaataaagcacaattttatgcatgttgctatgagtatgactaggtagattctcatttttctcacaatctctgaggtccattataaaaaaaaaaaagtgaagaaccactgcacttctagcgttttataacttttattatcaaaatttccaaaaggaagtatttgcagagcacattttagactatctaaatactatgcactttgaaacaaaagatgacaaagttgccgctgtcctcagagaacgaaggagtgatgcaytgggtttggagtgaatttatgcaagaggcccaggagtccttgattaaaagtgccgctcagccagcactgccctaagtactcatcacctttcctagtgagcgtgttcagctcttcaagactgacaccagactctacttaaaaatggctcgctataaaatatcaaaaatggaaag

SEQ ID NO: 539163 - DNA, 502 bp, Homo sapiens
  misc_feature (1)...(502): n = A,T,C or G
cctgcctcccaggtccatggtacaaaccacagccgtggaagccctgactcctgtgcccagccccagtgccctccttcttcctgctgagacagggtcaagggccacggcaagtccccgaggcatcccaggcagaggaggggcacggaggcccagcagaagggtttcagaagaggggcagacccaggggctcagctccaatctcccaccacggcagccccagctcccacaagcctgggcctcctcrcagggctcagggacttagtggcaagagctggcccttcaggagatggcactcaaggcccttctgcaagaggcacctttctctaggtgtaacacaggggccgccagacccaaagacccctcactctgtgcaggacagactttgcaaccagggcccatcatccctcatgcaaggcacgtgttgcaggcagaactggatgtacagacttggtgggcacaggatggcctcattttgttctctgctggaatcnacaaggccacc

SEQ ID NO: 539164 - DNA, 428 bp, Homo sapiens
gtggactcacctgaggcctcaaggaggagaagttttagagggtgtgagttgagggaggtgacacggcagggaggagggtggttaggagacagttgtgtctgtctcagaaccagatgaccatgaccaaatgctttgcccgcgtggtctgcatcttgccacttgatctrgaaaacacttttgggttctccagaccacgtccttgtcactgagaggatgttgaaaaccgctgtgaaagggacagtccagttcccttggctgtgaagaaggtgcagtttcccttcctgaacctcagactcccggtgcctgtccactctccagcgagatgcctgcgggctgggacggtgccacacgcgacctgcagtcaaggacacctgctgccagccggccactatctgcagagtgatgcttgggcgatgtccattttgatg

SEQ ID NO: 539165 - DNA, 530 bp, Homo sapiens
aattgtggactcacctgaggcctcaaggaggagaagttttagagggtgtgagttgagggaggtgacacggcagggaggagggtggttaggagacagttgtgtctgtctcagaaccagatgaccatgaccaaatgctttgcccgcgtggtctgcatcttgccacttgatctggaaaacacttttgggttctccagaccacgtccttgtcactgagaggatgttgaaaaccgctgtgaaagggacagtccasttcccttggctgtgaagaaggtgcagtttcccttcctgaacctcagactcccggtgcctgtccactctccagcgagatgcctgcgggctgggacggtgccacacgcgacctgcagtcaaggacacctgctgccagccggccactatctgcagagtgatgcttgggcgatgtccattttgatgaggcatctgccgagtttggaaactgccgccctggcctgcatccacaccgcctcctctgcagctccttctggcgcctgcgtttctaacaaccagctctg

SEQ ID NO: 539166 - DNA, 637 bp, Homo sapiens
ctggagccttgcaaagcaacttcataaagcctgtggactgttaacctgctgacttcaattgaaaactcttcagatgttaaaaacaaacctgttttgggcttaatgtccagcaaatgtcatgttttgctaaaagacagcatggcaggcagaccccggggtgacccacagccccctgcctggggttcacccctgcgcgctttctcccctgaggtgaggactggtgactggctcctaaccaatggaatgcagcaagacggtggcgtgtgcatgctcacataatggcgatatccatctcactcacaggctgtcccctagcaggctttggagaaacaagcctgcatgttgtgggcttccctaggggagggccacagggcaaggagctgagggtgacctccaaccaccagtcaataaaaaactgaagctctcagcccattggccccaaggaactgaatactgctgacaaatacacgagctcygtgtcagatccttcccaagatgagcctcagatgagaccccagtccctgcagaaacctggattgcagacatgcagttgccacactcaagctgtgcttggattcctggtccacagaaactgagatcacaatatgagttgtttaaagcactgagtgtgtggaaa

SEQ ID NO: 539167 - DNA, 484 bp, Homo sapiens
gagaaggggagagagagacacatgagagagagagaatgcaacaggagctcaactctctgttataacaaacccaccctcatgataaagaacacactctatgatgacaacactaatccattcacaaggacagaatgtacctcattccttagtcatcttttactcggccccacckcccaacactgttgggttggggattaagttttcgacacttgaactctgggaacacactcagatcatagcggcatcctaacagcctcggttggttggacaggcgcatgggtcacaccggaatgttttcctgctggaaagacacatcaaataaaccgatttcagagtctggtgccttacgactgagaatctgtaggcacaaacagcaatttggaacgattaacgtatttctacttttacatttttagggcagcaaaatgtaagaaagtggtttcagggtgccaacgtggagcagcctgtcctggcagggccctgc

SEQ ID NO: 539168 - DNA, 451 bp, Homo sapiens
gaatgcaacaggagctcaactctctgttataacaaacccaccctcatgataaagaacacactctatgatgacaacactaatccattcacaaggacagaatgtacctcattccttagtcatcttttactcggccccaccgcccaacactgttgggttggggattaagttttcgacacttgaactctgggaacacactcagatcatagcggcatcctaacagcctcggttggttggacaggcgcatgggtcacaccggaatgttttcctgctggaaagacacatcaaataaaccgatttcagagtctggtgccttacgaytgagaatctgtaggcacaaacagcaatttggaacgattaacgtatttctacttttacatttttagggcagcaaaatgtaagaaagtggtttcagggtgccaacgtggagcagcctgtcctggcagggccctgc

SEQ ID NO: 539169 - DNA, 453 bp, Homo sapiens
cgtgtatctaagcagagaggcaccaatgagaacaggaagagggagctttgaaaaataagggagaaaatattttaattgtccacagtgctgactgaactgctgattggggaagagaactggctcaacggccctgaggacatgggctcgtgggaagggccacccrcacggtagagacgaacgtcccagacttcagcttcctctgcgatgactggagactcacaggaggtgttgtctctgctctgagctctgcttgccaaagagcctctgggtgggccttgtcttctcgtggggatctgcccctagacgcctgagcagccgtcggtcagggcaaaccctctgcttcccaggccaccggcctcgtcatcggaaaggaagcagtcagattgtacattggctctgagtgcagtgtggtgggacatatccccggagagccagagccactctcaggaggca

SEQ ID NO: 539170 - DNA, 453 bp, Homo sapiens
cgtgtatctaagcagagaggcaccaatgagaacaggaagagggagctttgaaaaataagggagaaaatattttaattgtccacagtgctgactgaactgctgattggggaagagaactggctcaacggccctgaggacatgggctcgtgggaagggccacccacacggtagagacgaacgtcccagacttcagcttcctctgcgatgactggagactcacaggaggtgttgtctctgctctgagctctgcttgccaaagagcctctgggtgggccttgtcttctcgtggggatctgcccctagacgcctgagcagccgtyggtcagggcaaaccctctgcttcccaggccaccggcctcgtcatcggaaaggaagcagtcagattgtacattggctctgagtgcagtgtggtgggacatatccccggagagccagagccactctcaggaggca

SEQ ID NO: 539171 - DNA, 453 bp, Homo sapiens
cgtgtatctaagcagagaggcaccaatgagaacaggaagagggagctttgaaaaataagggagaaaatattttaattgtccacagtgctgactgaactgctgattggggaagagaactggctcaacggccctgaggacatgggctcgtgggaagggccacccacacggtagagacgaacgtcccagacttcagcttcctctgcgatgactggagactcacaggaggtgttgtctctgctctgagctctgcttgccaaagagcctctgggtgggccttgtcttctcgtggggatctgcccctagacgcctgagcagccgtcggtcagggcaaaccctctgcttcccaggccaccggcctcgtcatcggaaaggaagcagtcagattgtacatyggctctgagtgcagtgtggtgggacatatccccggagagccagagccactctcaggaggca

SEQ ID NO: 539172 - DNA, 453 bp, Homo sapiens
cgtgtatctaagcagagaggcaccaatgagaacaggaagagggagctttgaaaaataagggagaaaatattttaattgtccacagtgctgactgaactgctgattggggaagagaactggctcaacggccctgaggacatgggctcgtgggaagggccacccacacggtagagacgaacgtcccagacttcagcttcctctgcgatgactggagactcacaggaggtgttgtctctgctctgagctctgcttgccaaagagcctctgggtgggccttgtcttctcgtggggatctgcccctagacgcctgagcagccgtcggtcagggcaaaccctctgcttcccaggccaccggcctcgtcatcggaaaggaagcagtcagattgtacattggctctgagtgcagtgtggtgggacatatccccrgagagccagagccactctcaggaggca

SEQ ID NO: 539173 - DNA, 484 bp, Homo sapiens
tgttcagcatgggtcccgtgcctttcagaggcagagcaccaaagatgcagccgaccagacgcaccctgagggaatggcygctgctggcagttccctgggcagatcttgttactgtcctcagagcctcagtgtgagcggccccttctgcctggaaggctctgctcctgagttcccccagctcaacctcaggacttgtctgtccccctcactctccccacttgctcccctcccacagtccccctgcacactcccaggcagcatgtgccaccctgtgtgtcagtggcttgatgatctctgagctgcttgaagaccaggcttccgaggctcccttccagcagtgcccagcccaggagacgcagagcacacgtcaaaggaataaaggaatgagcgcctgcaggaagggacgttacttctcacaaagccacagccccaagtgccctgggagaggcccagggtccagtgcagggtgtggtttgcgcatctg

SEQ ID NO: 539174 - DNA, 484 bp, Homo sapiens
tgttcagcatgggtcccgtgcctttcagaggcagagcaccaaagatgcagccgaccagacgcaccctgagggaatggccgctgctggcagttccctgggcagatcttgttactgtcctcagagcctcagtgtgagcggccccttctgcctggaaggctctgctcctgagttcccccagctcaacctcaggacttgtctgtccccctcactctccccacttgctcccctcccrcagtccccctgcacactcccaggcagcatgtgccaccctgtgtgtcagtggcttgatgatctctgagctgcttgaagaccaggcttccgaggctcccttccagcagtgcccagcccaggagacgcagagcacacgtcaaaggaataaaggaatgagcgcctgcaggaagggacgttacttctcacaaagccacagccccaagtgccctgggagaggcccagggtccagtgcagggtgtggtttgcgcatctg

SEQ ID NO: 539175 - DNA, 670 bp, Homo sapiens
aggcaccggctgtgtccatccacagccatcagtcctctcctccagcgtttatgatgctctgggggccgttcatatgccccgctgaggcttagacaggagaagcgactcacccagaaccacctatgtaaacctcagttttcccccagagcccacggatgagtcagagttgtttagaagtgsaggctgtggggtcagagagcactggtggttctcaggggtgctggggtaagttctttaaacttttggaagctcagattcttctcccactgggaagggtgcccatgttaaggaggctgcaggagcagggtgaggagtttcctgtggagatggctggcacagaatgggctctgcggtgctgtgcaccacgtggaaatcttgtcccccaagggtcatcatcattacctgagaagggaaccaggctctgggcagtgctggtcaccacttggaaagcttgtccttcgaggcatcaccatcacctgggaaaggacccgggctctggacagtgctgggcaccgcgtggaaaactcgtcccccaagggggtcatcgtctttacctgggatgggacctgggctctgggcagtgctggggactacatggaaatcttgtcccccagcatgtcatcatcattcaggaagggaccgggactctggttccacagtctaggtgcag

SEQ ID NO: 539176 - DNA, 670 bp, Homo sapiens
aggcaccggctgtgtccatccacagccatcagtcctctcctccagcgtttatgatgctctgggggccgttcatatgccccgctgaggcttagacaggagaagcgactcacccagaaccacctatgtaaacctcagttttcccccagagcccacggatgagtcagagttgtttagaagtggaggctgtggggtcagagagcactggtggttctcaggggtgctggggtaagttctttaaacttttggaagctcagattcttctcccactgggaagggtgcccatgttaagraggctgcaggagcagggtgaggagtttcctgtggagatggctggcacagaatgggctctgcggtgctgtgcaccacgtggaaatcttgtcccccaagggtcatcatcattacctgagaagggaaccaggctctgggcagtgctggtcaccacttggaaagcttgtccttcgaggcatcaccatcacctgggaaaggacccgggctctggacagtgctgggcaccgcgtggaaaactcgtcccccaagggggtcatcgtctttacctgggatgggacctgggctctgggcagtgctggggactacatggaaatcttgtcccccagcatgtcatcatcattcaggaagggaccgggactctggttccacagtctaggtgcag

SEQ ID NO: 539177 - DNA, 670 bp, Homo sapiens
aggcaccggctgtgtccatccacagccatcagtcctctcctccagcgtttatgatgctctgggggccgttcatatgccccgctgaggcttagacaggagaagcgactcacccagaaccacctatgtaaacctcagttttcccccagagcccacggatgagtcagagttgtttagaagtggaggctgtggggtcagagagcactggtggttctcaggggtgctggggtaagttctttaaacttttggaagctcagattcttctcccactgggaagggtgcccatgttaaggaggctgcaggagcagggtgaggagtttcctgtggagatggctggcacagaatgggctctgcggtgctgtgcaccacgtggaaatcttgtcccccaagggtcatcatcattacctgagaagggaaccaggctctgggcagtgctggtcaccacttggaaagcttgtccttcgaggcatcaccatcacctgggaaaggacccgggctctggacagtgctgggcaccgcgtggaaaactcgtcccccaagggggtcatcrtctttacctgggatgggacctgggctctgggcagtgctggggactacatggaaatcttgtcccccagcatgtcatcatcattcaggaagggaccgggactctggttccacagtctaggtgcag

SEQ ID NO: 539178 - DNA, 609 bp, Homo sapiens
aaccctaaattgcttttgtaaaactaatgaaaggccacgaggttgggatgatgagaagggtgtgaattctgataagctgtgcatagtgtctataatcccttactgctcaggggccatgtggacagaagccacaagcttcatgactctccccactgctccatacataacttcacgcttttagaacctaagattgttttttttccagagttgcttttcagacttgaccctacctggactcatgacttagctgatcctgtggtcccacccaagggtggactcagcacatgaagactktttttctcaccccattgtttcatctctaatcaatcagcagcaccccttccctagccccctgcccaaaaaattgttcatagaacccaaacctgtgagcctgctgggagactgatttgggtgataacaccagttctcccacatgggctggcctggcatcaattacactctcctgcaatgccgccttcttggttgattgacttttcctgtgcagtgggcaggaagtacctgctgggccattacaattgtgctgctgcagggcccatgcccgagtcatttactagagctgtaaagactcagaacaagtccactcaagcc

SEQ ID NO: 539179 - DNA, 493 bp, Homo sapiens
acgtcgagcagaggcctcactggcatcggcagggctgtgttcttcctaggggatccaggggagatttccttgactcctggccccctcgtccatcttgcctctctctcttctctctctggctctggcccttctgcctcccgctyccactctgaagggtccctgtggtctatggggccacctggatgacaggatggtctctcacctcaaggggagctgtttagcaacctccatcctttctgccaggtagtccagtgtatgcacaccttccaggattcagatgtggacattgcttgggaatggtggggggcatgaatctgtggcccgtgcctgctttacagaagagggaatttaaaaaggagcttatctgacttgcccagggccacacctctactgaaggggaatggggatttgcaccccggcgggtctgatgccagacctgagggcagcctgtgatggacacaggtgactcttggtgcgagctcaccaggcagca

SEQ ID NO: 539180 - DNA, 493 bp, Homo sapiens
acgtcgagcagaggcctcactggcatcggcagggctgtgttcttcctaggggatccaggggagatttccttgactcctggccccctcgtccatcttgcctctctctcttctctctctggctctggcccttctgcctcccgctcccactctgaagggtccctgtggtctatggggccacctggatgacaggatggtctctcacctcaaggggagctgtttagcaacctccatcctttctgccaggtagtccagtgtatgcacaccttccaggattcagatgtggacattgcttgggaatggtggggggcatgaatctgtggcccrtgcctgctttacagaagagggaatttaaaaaggagcttatctgacttgcccagggccacacctctactgaaggggaatggggatttgcaccccggcgggtctgatgccagacctgagggcagcctgtgatggacacaggtgactcttggtgcgagctcaccaggcagca

SEQ ID NO: 539181 - DNA, 466 bp, Homo sapiens
gggagggaggagaggaagttccttttcttctgaaccartcctttatttagggactggtgactggccaagcactgggctagacacaggacgccaaagatgagcagatgttgggcagggagcgctatgccttgtgggttggggaagagaagcaagcaacaatggatgggtggagtggggtgaccccgcgcagcagccaggggcttctccctgaggcacggtcactcacactggaccccaggaggcagggaggggaggtaaagggtgtgttttgagctctaaggcaggaggaagaaggtgcgcttgagtctgagctgagagggatggaggatggctgtctggggacagtgagcctcaaagagtggaaggctcggggaagccctgcagagatcacagcacccgtggtgtggcatttccaagtggccacggagaggttccccattatgattattgaccaaatctagaactt

SEQ ID NO: 539182 - DNA, 463 bp, Homo sapiens
cacacccatgctggtgatgagctgtgaggcccaggtgtgggcacagtgagagagatgccccctcagccctggcctgcctctcgtatagtcttgtctcagcctgcaggtaccacaccaccatcaggggtccccgctgacagacagtctgtggagggttccagaggctgtgccagccctcactccagttttgttttatcataaatgatgtctcttgcagcctcacttctaacaagtgaccgcaccrtgccacacactgccagcctccccaagggcgctttggcagaatggtttgctgggaagagtggattcggaacctaaaatgttaggcctatgatataataaataattaatctggtctttactcccagttcttggcagagagctccaaaagattcttggaacgtcctaagcactagaaatgacctttggtattcataaggaaacctctccaccataccacacc

SEQ ID NO: 539183 - DNA, 486 bp, Homo sapiens
tgagctgagggcacggtcgcgggcggtcagccctgttcgcagctacggcgaggaggggcgcgattgttccttgttgccgctccgcttagtggccgcgtccattccgcgcggtgtcccgattttaggggtagggagaagtgtcagcttcaggcatcgcgaggcgtggcggccccatggccccgctgggaggcgccccgcggctggtactgctgttcagcggcaagaggaaatccgggaaggacttcgtgaccgaggcgctgcagagcaggtgtccgtgaggcgggaarggtggaagggggagctctccgcatcacgtgacacgaggagtgcttttgggtgtcacggagtgagctttggagtacgggtcgtccgtttgcaaggcaggaggagcactgggctggggaaggtggaatgccaccattacataaaacagtagtctacacaggcgagcctcaaagaagcaggtgaccacctctccaaagacct

SEQ ID NO: 539184 - DNA, 514 bp, Homo sapiens
caggtctctctgagaagcattaataatggttcctacgaaggcactttctatataccaggcgttggataccagcctgggcaacatggcgagaccccgcctctacgaaaaatccaaaaagtagctgggcgtggtgacgcgtgcytgtggtcccagctattcaggagcctgaggtagaagaatcgcttgagcccgggaggcggaggttgcagtgaggcgagattggccactgcactccagcctgggcgacagagcgagaccctgtcttaaaaaaacaaaacaaaaaaccctcttcacctctttgttaggtactgtgtgccattattagcatctccatttcacaggtgaagaaactgaggctcttaaaaagttaaacaggccgggtgtggtggtcatgtctgtcaccccagcactttgggagacagaggtgcgaggatggcttgagagcccagtagtggagaccagcctgggcaacacagtaagaccctagtctctacaaaaaaatggaaaagttagc

SEQ ID NO: 539185 - DNA, 501 bp, Homo sapiens
tgagtgagagggtggtgtgaggaggcacaggcaggtccttactaatcacacagcatcagagctgccaactcgagtgtcgacagcctttcctgggcacaccttcctgaactcactctgaagggagggaggctattaggaaagaaatataagctgaaaatgcccccgaaaggtccactcacagaaaaccaagagctggccaccaccctgccagcagtggtgacgggaatcatgccagtgactcaggcagcagccacagctccaaagtcctggagccggccccgcccaacacaccggatgccacaaagcaccacctacctgagcatactgytccttgagtggaccagagagccggaggacagcacagacatcagctccaagtctgcaggacagggagatcagaatccagttagcctagaatttccaggagcttccatgtcccagaaagggagtcaagaggcctgtgttgaagtcccatttctactactggtattatgtaacttt

SEQ ID NO: 539186 - DNA, 557 bp, Homo sapiens
agctgtgttgctccgtagaggccctgttagcacagggcactgaaaatacagaaggagctcctgatttgggtttggggagttcaggggaagcttctcagaaagaagacctttgagccatgtcttgaaaggcaaagagaaatgtgttagatggaaatctgggggaagggcatgccaggcagagggcatggagatgtgaaatagcatgacttacgggagagctacaataggtcggtgatgctggsgcttaaggaggaaggtggtgaggaatgagcctggaaaggagggcagaaaccgagtgccagtacacttgatgtggagccagtatggccaaagccacccctactttccttgtctgctcttcctgtctctctgaggtaagaagctcctccacacccccgtttgcagactaaagaggcctaatttgtcagcctgtcatcttagggcagcataaggagttgctcaccattccttaaggtgtggcttaagtcccaccacctccaggaagccacccttgacaaccctctgccttcaatgaactctactgtctcgcccacact

SEQ ID NO: 539187 - DNA, 514 bp, Homo sapiens
ctgctgcagggggtctttgaaacactctctccctgttcccacccagcatgcacagtggcttcaccctctgcctgagacaatgattgtcctgatccctctaacccaaagccccacactgatttcccatcaggatgaggcctgaaggcctcagccaggctcttccggtctcttccaggggttcccaggctctgtccccaacctcactccaacactggctccaacccacgtctccacatcacccatgggtgtcccacagtctcccccagcatggcgttccccactatcgcctcaggacctttgttcacattggtctctccattcgaaatccatccctacttgtctcagcttacccaactggtcccttccttcatggcatggtccaagtgccaacacctgacccctggggcctgayctacttcttcctgctactggaattcctctaacagccagcaggaagtgatgtaggtgaccatcaggactaaggaaaaggacccaccaagaaagaagcccagca

SEQ ID NO: 539188 - DNA, 323 bp, Homo sapiens
gggcaggggagggaggcagggacggcagaggagctactggagagagaagccaggaagcacaggagcagagaggggtcctggcaggagaagtaccctgatggtccctcctgctagggattaggtgggggaggtgagccccgtggcctccactgcagcctttcagtcccagggcagcttagagaaaccgagaagtgtggttaagrgcatgacctccggggccagactgctgggtcccagccctgcgacagccatttagggctacctgaccttggaacgcccactccacctctctgcaccagcatgcctcctgtgtcagatggaga

SEQ ID NO: 539189 - DNA, 645 bp, Homo sapiens
cccttatttatttcttttggcagcaatgaattgacatcagaatccaagtctatttccatcattttaaaggaagcagtgaagggaaaggggccagatgctctctcctttgggcctcttccttttgtcctaaagctcaaaacctttacatgaacaggcaactcccacctgcttcttggttttggccagtacaacctccctggccagctccagcccygtgggatgaccaagctgtgtgctggatcaacagggactctcgatatcttacagatttctttgcattctccatcgcatgtcaataaaaaaaattaaccaaccgcttttaatagctggaaaacatgtcaaagaagtctggctgaactaggaatgttttctatttggtaaaatgttgaattagcatcttctctttgctgcctgaacatcagtgaagcttgaaattgatatggttccttgggggatggcagtgacaccgggctgccatacatcccaggatagggtacctgccacacgcattgcccccactcactcctatctgaggaccaataaggggcttgtagaacagagggaatccagcggtcaactggtcaacccttctgccccgtgactcagaacttttcaacacagagtaacaatccttaacacacagga

SEQ ID NO: 539190 - DNA, 653 bp, Homo sapiens
tgcattttctagttagttctgaggtcaggcaaacaggcccctgacactgcctctcagatgggttgtcccaccttcacacacctctgtagcaggcacaggtatacaggcttgctctgaggcgccttctgccgagtgctggccatgttggaagcaccatacaaagtggttgagtggccaaatgtttgaaaaatgcttctcagagattcatcaggctcattagcatattaaagcttctgagacttctaaagaaaagaaaacaagtcggctttgaaatgcagtttctcaaacttatttgaccttgactcttgttttgaagtaacagctattaatatttcaaggaacactgggaaatgcagggtgtgaggcattcagtgtaacagacaatggagggttcattccttcaagcatccatggttcattttcatgragattaccatagtcttcctgagaggcaccaaatactcccctgccttcctgaactgactccacggagcacagcccacgccgccaaacccgtcagcatccactcgcatcaccccacagcctcctgtgagccagccaccttcacgtgctttttagttattttatttaacaaatacttaacacagcgtttactaggttccgggtgctagtctcaatgacttacacatact

SEQ ID NO: 539191 - DNA, 650 bp, Homo sapiens
gatgctcaataatcatcagctctcttctcttcaggtatgcttatcttccagttattattattattattttttgagacagagtctcactctgtcgcccaggctggagtgcagtggcatgatctcggctcactgcaaattccacctcacaggttcaagcagttctcctgcctcagcctcctgagtagctgggattacaggcgcctaccaccatgcccggctaatttttgtatttttagtagagatggggttttaccacgttggccaggctggtctggaagtcctgacctcaggtgatccacctgccttggcctcccaaagtgctgggattacaggcatgaaccgccacaacaggcctcttccagttacttttaatgggacyaagaggtgccaggtacggagagctatttaatgacatttcagtgctggggaaattttacacagagaccattctaagtcctttacccacagttgctccaagtacaaatcacgtctctaatgccagcaccagtgttgagggggaggcaaatacacccaattctcaattctccatggtgatgaagaatgtggataattgaaaacagcagataatccccgaacctgctttgagtcactgacttccaccgcctcccccatcatcacttttctggtgc

SEQ ID NO: 539192 - DNA, 517 bp, Homo sapiens
taaaattgtacatacttatgaaatactcaaatattattaggcagtgtctaaagaagaccagagcattagaataaacaaataatcagtccaagagcaagtggagattactacattttcaaagtattcttttcaatggaaagagttgacttgtgcagtgcatgcactgcataatgacattttggtcactaagtctgaatatatgacagtggtctcataagattataatactgtatttttactgtaccattttatgtttayatatgtttagatacacaagtatttccattatgttacagttgcctacaggattcagtattcagtaccgtgacatgccttataggtttgcagccttggagcaataggctataccatatacttacttgtgtagtaggcaataggctataccatatacttacctgtgtagtaggcaataggctataccatatacttacttgtgtagtaggcaataggctataccatgtacttacttgtgtagtaggcaataggctataccata

SEQ ID NO: 539193 - DNA, 628 bp, Homo sapiens
gcggcgcgcagccccggttcccgctcgcgcctctccttccacaccyccctgcaagctgagggagccggctccggccttggccagcccagaaaggggctcccacagtgcagaggtgggctgaagggctcctcaagtgccgccaaattgggagcccaggcagaggaggcgcctagagtgagagagggctctgaggactgccagcacgctgtcacctctcaacagtattcatgaaatcataggtttgatgtactagctttgtatattgctttatatatttgcattacttagtaagataagtaccaaagtattgaaatttaaattgctgtatcctggtaccacccaacatctgtagtgccaacattggcaaaaaactgtcctggtgtaacaatggggcatttaaagtattttaaatttttctctctctcctcttctttctctcccttttagaatgtggaaatggtgcaataacttgtaaagttaccattcaagtgtttctcaatctgtttttcttcatatagaaattatggctatatttctgtccagcgcaaatctctgagccaacttgggcttttggttattctagacaggttttccgtaactccaccactttctctcctgctaaagaaag

SEQ ID NO: 539194 - DNA, 625 bp, Homo sapiens
tacctctttgcctataggaagccatgcaactcatcaaaatctacttgttatctaagttagtttttttctaacaataccctaaatatatagttcttctacaactttgatgatatatccacaattaatggatacaacacaacaagaaactcagcaatactaaatttttcagtccaccagtgtctttgaagagaatatttgtattagcattttgttgctcatttatttcattctgcaaagtttaagaaacaacagataccttcctcacagtgcagcattcttgagaagggtgcagagtgactgggttttctcctgggtttacccaggcactttwttattcactcatctgtttcagaaatagtcactatcctgttgtcttcagctcccagcttgggaaacccacagagtctttccctccaggtcaccattgagtttggcatgctgttgaccctcagtacatcatacagcaactacaaaacagtaattttgttctcagtgcacccacagggccatttactttgcagcatcattcagaactttcagcaataactttcctacttcaaaaaagataaagagaagcagcatgaggaatccttgatggaaacaaagctgaaacaaatataatctc

SEQ ID NO: 539195 - DNA, 514 bp, Homo sapiens
aagaaaatgtggaacatataaaccatggaatactacatagccataaaaaatcatgttctttgcagcaacatggataacattggatgacattagggtaacattaattatcctatgcaaatracttcaggaacaaaacaccaaatactgcatattctcactcataagtgggagctaaacattgggtacttatggacataaagatgcactaataaatagatactggggacgtctagaggcagagggaggaaaggagtcaaaggttgaaaaactattgggcattatgctcagtacctgggtgatgagagcattgctaaaccaaacaccagcatcaggtgatatacccatgtaacaaacctgcacgtgtaccccttaaatctaaaataaaagttgaaagggaaaaatattttgatactgccaaattgcctccaaaaagtttttatctatgttatagctgtagcagtaaagatgtagttatgaaagtataaaaacacaaagattttctgtttttgaaaat

SEQ ID NO: 539196 - DNA, 542 bp, Homo sapiens
caattaccatacgaactcaaccattacaagatgccaggtctgcttcttattagaattttaaaatagcagagaactttggaaaacctgaatcttttcaggaaagcaaaaattcacaggaagcaataatgccttcattctcccttcacccttcttgctgctgtttccaggttgcaagtcaattattttggcaaggaaactcagcaggaaacaatttgaccttctaagaacaccactagaattatgttatcagcagatttctttcccaggacaccatctttggtttgtacaaactacatacaataagcaggtcttttccagaatctttcttatgctcaaactgcaaactggattgaactctacaccctgtcccattcagtaaatcttcatggggatatattgcaaggtcaacagccaaaactsttttggtccatctaagccaccaaaccagccacagagaaaggaaaccgactaactagatgcaagttaacactgaagagacttagactgcaaataaaatgttgggaggtatgtacatttttcag

SEQ ID NO: 539197 - DNA, 653 bp, Homo sapiens
tactgatctatgtaggtgaaaaatcaacagctaggaatggagtccacaattttcatgaatgtgagttttatgttgttttagtcagctcaggcttctgaaacaaataccacagacagggtgacttaaataacaaaaatttattttctcttagttctggaagctagaagtctgagattagggtgccagcatggtcagtttctggtgaaggccctcttcctggcttgcagacagaactttcttcctgagggcttacacgggttttcctcagtgagtgcatgtggagagagatctctcatttcctctttttgtaaggccaccaatcctatctgattaaaacaatgcctccccaaaccccccttggcttcatttaactatagttgtctcttaaaagccctgtctccaaaatatagtcacactgagggttaggggttcaacatgaattggggcagggttgggagggatacaatttagaccacagcatatgtaggcacatctttcatcctcttctccttggcatggtcacaaagccctcaatatctgtttgaagggaagagaataagtagaataagtctgaagaaaataggtagaaaccaaaggtggaaagtgaagacaarttcaatcaatcatcagaaatgacagagacaggattgcag

SEQ ID NO: 539198 - DNA, 577 bp, Homo sapiens
aattcataacctgggataggaggatgaggggactctagtcactccccagtgggggactgagcctctaggagtgggggtttactatattccagcctagccacctctgaagattttgtgggattgagtggaaatatttgtttgtgataacttaaacccttcttggagatggcaggctttcctcggtccctttctctctcactgccctgcctctttacctcatgcagtgtgataactctctccccccaggccccctacttcctgtgacctcacattctgagacgcccagcctctgatgaccatgtgtrgagtctgctggaaacaaccctctcctcaaccctcctctgctgcaccagggaaagggataggctggcattgctgcaggaggttgctgagcctgctgggaagcaaggaccctaagaacaatgtgctagaaaagccaaggtgggccaggtgtcatggttcacacctgtaatcccaacatttgagaggccgaggcaggaggatcatttgagcccagaagtttgtccaacatagtgagaccctatctccacaaaaaacaaacaaacaaacaaacaaa

SEQ ID NO: 539199 - DNA, 533 bp, Homo sapiens
gagaacagggtctggatcctgtggcctaggtgtttgcagggaggtaaatgggaacttgggcagccagggcctatacctgagagcaacatggggtctttgtccagggacttcttgacatggtcagattcccctgtcagagagctctcatcaatcttcagatcattcccttggatcaggattccatctgcaggcagcagatcacctagagcacaaaggggaaggagggacagtgaaggagatagtaagagactggctgagggtagggtcctccaactccttcaaccctatctcatggctgttcccatgggccctatctagacagcaatggccgagagtacatggagactctttacaagtcttcagctctgtacaatctgggagaaggttgctttccaggcattataaattcaaactcttattcatccccaacaccttwccatggcctgaatgttatacacttttaaccctaagacacacagggtacaagtctgacaatcttgcgacagagtttcagctactcctttctgaaatgg

SEQ ID NO: 539200 - DNA, 533 bp, Homo sapiens
gagaacagggtctggatcctgtggcctaggtgtttgcagggaggtaaatgggaacttgggcagccagggcctatacctgagagcaacatggggtctttgtccagggacttcttgacatggtcagattcccctgtcagagagctctcatcaatcttcagatcattcccttggatcaggattccatctgcaggcagcagatcacctagagcacaaaggggaaggagggacagtgaaggagatagtaagagactggctgagggtagggtcctccaactccttcaaccctatctcatggctgttcccatgggccctatctagacagcaatggccgagagtacatggagactctttacaagtcttcagctctgtacaatctgggagaaggttgctttccaggcattataaattcaaactcttattcatccccaacacctttycatggcctgaatgttatacacttttaaccctaagacacacagggtacaagtctgacaatcttgcgacagagtttcagctactcctttctgaaatgg

SEQ ID NO: 539201 - DNA, 479 bp, Homo sapiens
gtgcagtgcctagcatgtagtagacatgtaataaatgtttgattaactgaggtaggcattcactatttattcacccctctctgcctcctttccctggcagcagcaagctcaatcccatgccctctgtttccccatcagtagttacattccaggcctcagctccttggttgtagacccctgtccaacgggtttggctcctatgtggtctttctcctggcacttctctccctcatcttctcttctgcttcttcccttctattttgatcagctcttgctaccctcctgtatctttccagatgcttctctcccactcttctcccctgtgggggccactcagggcagwtccagcccactcctggcccaggtgtctgcatcaggactttatataattaccttcacaatggggcctaatgactggaaagcgttttcatctcaacccacacaattccagatttacagccaccaaggcctccgggtta

SEQ ID NO: 539202 - DNA, 556 bp, Homo sapiens
gctggatgcataccccaccaggtccctctctagagtatcttttggaagatgtaccttacagctctttaagaaagaggatcacttgctaacagcttttctgtctagtacttttaaacataagcacttagcttcgttccttagttctctgcgccccaactctgtagtgaggatcgcattcatcatactccaccaggcacgtaagatgctctaagctgatcttctttcatgtgaggaccctcagggatgaacatattcattctgtcattcgctcacacatttactgagctcccactaccactgcccatggggatggggrcagaggataccgacaaggggtcacagatgagtatgtccccctctaagacccaaaggaactcacggtctggtgaggaagacaaatctgaaaaccactttgctaaaataagaaggccttggtggaggtaaatatcaggtactatgaaaacatagaggggtcactgaagcgtgcttaggtaggaggaaggtttttgattttttttgtttttttgtgtttgtttgttagcttgcttgttttttg

SEQ ID NO: 539203 - DNA, 624 bp, Homo sapiens
gctgcagtctaattatttcctatggttgttggtgacagcgtccccttttggagcagggttggccggaggcaggatgagaacagtgtgggcttgttggggaggtgttgtaaggcacccagcacagagaattgaaaagccttctttagaagcttctctctggggcagggtgggggtgggagagctaacggtaaagacccacagtggcttgggctcttctctccagcaagatgcaacaggacagggaaggagggcccccagkaggcccctggggtggcctggaacttgagaatgaactgatgctggcaggcacagccttcttcacttcttcacaagggtgggccccgccttagactgatgggtgacacctgtgcataagcgctccaccccccagcgagagaaagcgggccgttaggactgcctgtcctttattgtgtctctctccccagcgtcttgtctgtcccttcctacctgtcactgcacttggtagtcacatatttatttgtaccttggtgtatttattcctgtctcccccacaagactgcaggcaccacctgagcaaccaggctgttttgctcatgctctgccgccaggactagccgggccgggtacccctggggtactccc

SEQ ID NO: 539204 - DNA, 569 bp, Homo sapiens
ccaggagccctttcattttgcagcaccgcccgcagcacctgcccggtggtgtcctccatcacttcgcgagtgaatgaggacccacctcaagggggaaaagatctacttcatctgccagagaaacatgtctggaatggaacaagcctgccagtagtcagagagtatatccagggaatggcccctgagcagcacagctcgtggtcaagcctccaggattaacagtcttatgaaacaaacagcatctggtatttagtagagagcagcatcattgtgttatgacggctaccgacaacttccccctccttacacctggctccgggcggggctgcggggctgygggtcacaggccatctctgatgcagcccaggggaattgcaaatgcctacatgtcccggtttgggtgagtcttggccctatggggagccctggggtccctcctgagcttctcaccttgaaggctctccagtaggaactgagaacatgtgtcagcctctcaagggctcagtgttggtggctggttttataccccctccctctgcctccctcccacccgatcatgagatgccagg

SEQ ID NO: 539205 - DNA, 558 bp, Homo sapiens
tgtaaacctactcctttttttgtgtgtgttccttttctctattaaataacattatcccaagctcccatattagtaagcttgtcatcctctgtgtagctactcagccactaattccgttttattttgcctgtgatatgcctctcaagtacatagccttttctccattgccgctgtcttagcataggcccctgtcagctcttgctggcacagggacagcagcctcctaattgtgtttatgcttccaggttatcacatggccccagaattgtctttctactcacacacttttctgcatgttgttttttgcttactttcagtgtagcacataacccttcccgacgcggtcctaactcttctttcatcctccatcactttctcttgtgcccttgtgcccaggcaacactgaactaygcagaattccctgcacaatcccatgtctttccatgcctcagtgcctctgatgacccatgggcctggatgccctttctccccatctttgcttgataaacttcaatggtcaagggctagttcaggtccttcttcggtgaagctgtctcc

SEQ ID NO: 539206 - DNA, 549 bp, Homo sapiens
atgccaacttgccccttcactgggcttcttaagagaggtaataattctggtactttttaaacctacttgattccagtttactgatacttcaccttagtgatacatgtggtaattccaaactatagttacacctatatatttgatagcacagacataaacatttatcattaactgcaataacccaatctgggttcaactttgcgtaataaagtgggaagttatttctcggttgccatggaccccaaggtggcaagttatgtaacctgagcatacccagatgaaccaagcatgcaatcatgggcagaacctaagtgctcagaccaaggaatggtgactgaatgaagaagcaawcaccacatggcatgatccaggtccaatcagaccaagccctgtgatcacctcatggcatagtccaatcaatgcacacctcccggcaccaccccatcacaagatccaatcagatcacacttcattaccctctgactataaaatttgcccaatctccatcttggaaagacagatttgacatgaccctgactcatgtctcct

SEQ ID NO: 539207 - DNA, 672 bp, Homo sapiens
ttataataggcttaaatcaggagtttgactagtataataaatacaattaattaattgtggtcaattctacattgtttgtgttacctcagacttatgtaattaaaataattgaatcagaaaagcatattttttgtgttaatttgataagcatggccgccaagtactcatctctgtttgcctttttttctttttctttttttccctcccttgtttctttgtgttatgaaccaaatcataacttcctcttacagatccagagagctgttcgtctttgagtaggaacatacagaaaagacgtaaggcatttcttttctcacattttaaaataaagagcctcagcatttccagagtgaattttatggtttatggctctgaaaattgcaagttaaaaagcacattagcaattattttgaattgcactagaaattatggaccaattcaaaacagattgctgatgttctaaagtgaacygcaggtgcaacaaaaatcttttgcaatagagatttttgttatgattttatccatatcctatacccttttttcctgcaacattactgcattttcttttaaacaatgctattacagataattcccaaagatataatgtaatcttctgctcagaacaggataaaaatggaaaattccaggttctatttctgagctttgcttata

SEQ ID NO: 539208 - DNA, 626 bp, Homo sapiens
tgctcaaagtattttaccaacacgtgagttaataaaatagtttacagatcattaacctaacaagcggcagaaagaagagatatggtagaaaacatcaagtaacccacaaataaagtatatataccattgggatgtgttttcttgttttcataattattctgaatacaagtgtggtttatgctttgggagtatacacaaagcaaaaattaataacaaaatcccatattgaagatttgatttagagaaaacttagaagttcttaaataccctttttatctttccttctttaacacatttcttcattgttaagttcagactgaattaggaactgctcctgagagctagaaaaaaacagcaatttgagttgtaatacaatgaagttcttctatctgtttctggtttaagggaagccagggctatttattccaaattaaaatatgccctgagaaaccagggacataacggaaggaaaatatctckgcactaattttactagccatgcttggaatcacagctctgcccacagtgcctggggtggggtgaaagagttttcactaacattagcacctcaaaggaagattcaactgatagttgccatcacctgtgagcagaaaagagcgaacttt

SEQ ID NO: 539209 - DNA, 626 bp, Homo sapiens
tgctcaaagtattttaccaacacgtgagttaataaaatagtttacagatcattaacctaacaagcggcagaaagaagagatatggtagaaaacatcaagtaacccacaaataaagtatatataccattgggatgtgttttcttgttttcataattattctgaatacaagtgtggtttatgctttgggagtatacacaaagcaaaaattaataacaaaatcccatattgaagatttgatttagagaaaacttagaagttcttaaataccctttttatctttccttctttaacacatttcttcattgttaagttcagactgaattaggaactgctcctgagagctagaaaaaaacagcaatttgagttgtaatacaatgaagttcttctatctgtttctggtttaagggaagccagggctatttattccaaattaaaatatgccctgagaaaccagggacataacggaaggaaaatatctctgcactaattttactagccatgcttgraatcacagctctgcccacagtgcctggggtggggtgaaagagttttcactaacattagcacctcaaaggaagattcaactgatagttgccatcacctgtgagcagaaaagagcgaacttt

SEQ ID NO: 539210 - DNA, 501 bp, Homo sapiens
ctggcaaagagagaatcaggaagacggaaaagcggaaaccactgataaaaccatcagatctcgcgagatttatttactaccacgagaacagtatagkggaacccgctcccatgattcagttatctcccaccaggtttctccctcaacatgtgagaattaaggaagtacaattcaagatgcgatctacgtggggacacacagccaaaccatatcaggtagctattcatgtggactgtccagtggccaggtggatggataagccaagaaggcagaggaggggtggggcacaagatagaaatgtagacgtatcattattatatcactctgtctcactgcactgatgcagcttgaaatttgtctcaaacagtgcatgtgtgatccaaatagctgaacaatcaacatagttatttcagtcacttagaaggtcagtttaaatcaactcaactaatgtagcctgtgtggctgaaagtatcaaattgataatgctacacttgaccaagc

SEQ ID NO: 539211 - DNA, 501 bp, Homo sapiens
ctggcaaagagagaatcaggaagacggaaaagcggaaaccactgataaaaccatcagatctcgcgagatttatttactaccacgagaacagtataggggaayccgctcccatgattcagttatctcccaccaggtttctccctcaacatgtgagaattaaggaagtacaattcaagatgcgatctacgtggggacacacagccaaaccatatcaggtagctattcatgtggactgtccagtggccaggtggatggataagccaagaaggcagaggaggggtggggcacaagatagaaatgtagacgtatcattattatatcactctgtctcactgcactgatgcagcttgaaatttgtctcaaacagtgcatgtgtgatccaaatagctgaacaatcaacatagttatttcagtcacttagaaggtcagtttaaatcaactcaactaatgtagcctgtgtggctgaaagtatcaaattgataatgctacacttgaccaagc

SEQ ID NO: 539212 - DNA, 501 bp, Homo sapiens
ctggcaaagagagaatcaggaagacggaaaagcggaaaccactgataaaaccatcagatctcgcgagatttatttactaccacgagaacagtataggggaacccgctcccatgattcagttatctcccaccaggtttctccctcaacaygtgagaattaaggaagtacaattcaagatgcgatctacgtggggacacacagccaaaccatatcaggtagctattcatgtggactgtccagtggccaggtggatggataagccaagaaggcagaggaggggtggggcacaagatagaaatgtagacgtatcattattatatcactctgtctcactgcactgatgcagcttgaaatttgtctcaaacagtgcatgtgtgatccaaatagctgaacaatcaacatagttatttcagtcacttagaaggtcagtttaaatcaactcaactaatgtagcctgtgtggctgaaagtatcaaattgataatgctacacttgaccaagc

SEQ ID NO: 539213 - DNA, 501 bp, Homo sapiens
ctggcaaagagagaatcaggaagacggaaaagcggaaaccactgataaaaccatcagatctcgcgagatttatttactaccacgagaacagtataggggaacccgctcccatgattcagttatctcccaccaggtttctccctcaacatgtgagaattaaggaagtacaattcaagatgcgatctacgtggggacacacagccaaaccatatcaggtagctattcatgtggactgtccagtggccaggtggatggataagccaagaaggcagaggagggktggggcacaagatagaaatgtagacgtatcattattatatcactctgtctcactgcactgatgcagcttgaaatttgtctcaaacagtgcatgtgtgatccaaatagctgaacaatcaacatagttatttcagtcacttagaaggtcagtttaaatcaactcaactaatgtagcctgtgtggctgaaagtatcaaattgataatgctacacttgaccaagc

SEQ ID NO: 539214 - DNA, 513 bp, Homo sapiens
tgggactacaggcacgcccgccaccacgcccagctaatattttgtattttttttttttttttttttttgagatggagtctcgctctgttgcccaggctggagtggagcggcgctatctcaactcactgcaagctccgcctcccgggttccaccattctcctggctcagccttccgagtagctgggattacaggcgcctgccaccatgcccggctaattttttttgtatttttagtagagacggggtttagtagagaccatcctgttagccaggatggtctcaatctcctgacctcgtgatccgcccacctctgcctyccaaagtgctggggttacaggcatgagctactgtgctcgcccaggacagcttctgattgtaatttagcttcctatctcatgcctcaaaagaatacactggcctgcaggagagttataatcgtcactgaaaattattacactgatcttctgaaatacaataaataaataaataaccagacttttcacatgagaagcc

SEQ ID NO: 539215 - DNA, 513 bp, Homo sapiens
tgggactacaggcacgcccgccaccacgcccagctaatattttgtattttttttttttttttttttttgagatggagtctcgctctgttgcccaggctggagtggagcggcgctatctcaactcactgcaagctccgcctcccgggttccaccattctcctggctcagccttccgagtagctgggattacaggcgcctgccaccatgcccggctaattttttttgtatttttagtagagacggggtttagtagagaccatcctgttagccaggatggtctcaatctcctgacctcgtgatccgcccacctctgcctcccaaagtgctggggttacaggcatgagctactgtgctcgcccaggacagcttctgattgtaatttagcttcctatctcatgcctcaaaagaatacactggcctgcaggagagttataatcgtcactgaaaattattacactgatcttctgaaatayaataaataaataaataaccagacttttcacatgagaagcc

SEQ ID NO: 539216 - DNA, 420 bp, Homo sapiens
gccttgttgggttttgacagtatcagggtatcagaaaaagggaaaaacaagtggcatagtaaagtagtaaaagaggctcagagagaagttgctatacacaacacagattagtgacaagctaggctattaacgatccaatattggacccatgacaattttttgtgatatgtagtatatggtaggtactttacggtaggtagctaagtgctttacamacatttcctcattcctcctcagtcttatgagataagtaccaccacacccttttaggttaattttctaaatggtgtagaaaaagagcacacaacagagctacttttaggtaccaatcataggcaaaaccaacttgaacaaacatgaagggaaaagaaagtacatttgattcatacaaggaacctgtgttcacacagggtgatggtg

SEQ ID NO: 539217 - DNA, 511 bp, Homo sapiens
agttccagaacatccataagagattaatctgttctatgtgataccagaacccagaaaataaaacagttcagattttgatttatcttcacctgtgaagcagtgcctccatgcataaaacaatccttttccccaaatattaggaaatataaggtagaggttttaacctttggggtcccagttctctttaagaatttgaatgggccactgggccagtgattgaactattatctctgaactttaaaacccctagccttgtgatgttgcaaatcacacttctgcttcactagctgtcacctgttagagttcatcaagaggtggcgctttggggtaatggcaagactggaggaggaagaagggtcctgtttcttcctgtaggcgaactgtctgctgtggctcctgtacttccatcctsaaaatgccagtctgttttggaggcttcagttgagtccagtgtgaagagattccggcactcagaacaagcaccatcacgtcccctcagagaccctcgcac

SEQ ID NO: 539218 - DNA, 499 bp, Homo sapiens
cagtatactcctaatgctatatttctataaaatgagatttctgagaaatctagaatttgttcccacctagatgaacattgtgaaaaatcaaggcttagttttcttctgaccagttaccgaatataatcaaatgtgaaaatgatataattttctgtgacttatttttctttttcctgatagtgacatgaagcagccttcatttttaaaggggaatcacaaagtctgatgggtatttcaaaaagaaaaacaataacaattgattcactmtctcaaagcctgtcatgaaacggctgagtcctggcaccaccaccaacaaacgacaaatgtgccaaagacagcaagatgcatttgggagataaagcacagcttccttcatgccaaagcacccacttaaacagatgaagagagggcatgacggatgctgagaagaagtagtgatgcgctagcactgggcagtaattgagaatgttggtttcgttccaggccctctgagacaggg

SEQ ID NO: 539219 - DNA, 531 bp, Homo sapiens
tttggtgcgggaatggctacagtggagcatagccattgcttatcccccaaagttcaccatacttctctagttggctttagctttcattagctgccagacctggagagagcagggctgtcttgcccagtggacacagtcagtctgatctgaatgccccctctatctgccggcctctcccagggtccctgtctggatgcacctgcttacagtayggcctcaggtgccctgccaaaatgcttgcctgtggtcaccaccatagctcttttgccagcatcccccatcatcccatcagagtacttttgcagatggaaccctgctggtgcacactcactagcaacctcccctcatcaccttgttggtgtgtgcacacatgcatacagaaacaccactgccccactggctaacacacacacagggccccctgctactccaccagcgtgcacacgtctgggtctcatttaccactctgttggtgtgcattcatccatactctacccaccccattgctgcactagtgcacagttgcctgca

SEQ ID NO: 539220 - DNA, 501 bp, Homo sapiens
atagccattgcttatcccccaaagttcaccatacttctctagttggctttagctttcattagctgccagacctggagagagcagggctgtcttgcccagtggacacagtcagtctgatctgaatgccccctctatctgccggcctctcccagggtccctgtctggatgcacctgcttacagtatggcctcaggtgccctgccaaaatgcttgcctgtggtcaccaccatagctcttttgccagcatcccccatcatcccatcagagtacttttgcagatggaaccctgctggtgcacactcactagcaacctcccctcatcaccttgttggtgtgtgcacacatgcatacagaaacaccactgccccactggctaacayacacacagggccccctgctactccaccagcgtgcacacgtctgggtctcatttaccactctgttggtgtgcattcatccatactctacccaccccattgctgcactagtgcacagttgcctg

SEQ ID NO: 539221 - DNA, 511 bp, Homo sapiens
gtgaaaatcacctttcctctgcaaaattttgattaatgagagaaaaaaaattgtgtaactagtcggtgtagcgattctgatgtactttgtggtactttgcaacgttamtatttgtattgtttgatccttttcctcccagaaatactcattgtatttgtttttccgtgttgttctgtcataaagagaggtaccaaatgaggctctctctcattgtattttacattttgagagcttgacttgtgaccttgtgggagcactctctcttgatcttgccatccaagcagtgtcattttcaggtcacgttaggtggccagtctgagaatggcccagaaaccgagactttttgttccaagtgtgtcaagctcttaggagagtttgtctatcttagcctatttgggggaatctttgaaattgcttcttcactgaagaggctattggattgagtcattattggaataagcacactgttggaaattctaattaatcagtggacaaaagatggatcctttaa

SEQ ID NO: 539222 - DNA, 511 bp, Homo sapiens
gtgaaaatcacctttcctctgcaaaattttgattaatgagagaaaaaaaattgtgtaactagtcggtgtagcgattctgatgtactttgtggtactttgcaacgttactatttgtattgtttgatccttttcctcccagaaatactcattgtatttgtttttccgtgttgttctgtcataaagagaggtaccaaatgaggctctctctcattgtattttacattttgagagcttgacttgtgaccttgtgggagcactctctcttgatcttgccatccaagcagtgtcattttcaggtcacgttaggtggccagtctgagaatggcccagaaaccgagactttttgttccaagtgtgtcaagctcttaggagagtttgtctatcttagcctatttgggggaatctttgaaattgcttcttcactgaagaggctattggattgagtcattattggaataagcrcactgttggaaattctaattaatcagtggacaaaagatggatcctttaa

SEQ ID NO: 539223 - DNA, 565 bp, Homo sapiens
gttctttctccttgaattctgtttttggaaattttattttcagtggactaaaatcttttttttctttcttaattatgtgcttgktccctctgtttgcttcctttcttaaaaattgttcttcctcctccttactcctcctttctctttgccacctttggtacaaatgaaaagatccagagaagaattctaatgactcagactccttaaggagctcagaaaaaagcaccacccagcccctttcaagggctcttctactttccttatagagttttagaagtcatggacagtctcctgtcaggtctaaaactctgctcggttgcactgcattatctgatctcttttactatggagagtatcagaaaattactttgttctgtgaaaaaaaataaaccttgacctttgtgtatgtggtggctggcaggtcactggtaagagctgcagttgtttatagtcaatagtttctactactggggttactcttatctttgcatgcttagataagaaaggatgcagtttaaacacttagagaaatgtctttgtagccaagtacactgtgaaagccttg

SEQ ID NO: 539224 - DNA, 565 bp, Homo sapiens
gttctttctccttgaattctgtttttggaaattttattttcagtggactaaaatcttttttttctttcttaattatgtgcttggtccctctgtttgcttcctttcttaaaaattgttcttcctcctccttactcctcctttctctttgccacctttggtacaaatgaaaagatccagagaagaattctaatgactcagactccttaaggagctcagaaaaaagcaccacccagcccctttcaagggctcttctactttccttatagagttttagaagtcatggacagtctcctgtcaggtctaaaactctgctckgttgcactgcattatctgatctcttttactatggagagtatcagaaaattactttgttctgtgaaaaaaaataaaccttgacctttgtgtatgtggtggctggcaggtcactggtaagagctgcagttgtttatagtcaatagtttctactactggggttactcttatctttgcatgcttagataagaaaggatgcagtttaaacacttagagaaatgtctttgtagccaagtacactgtgaaagccttg

SEQ ID NO: 539225 - DNA, 565 bp, Homo sapiens
gttctttctccttgaattctgtttttggaaattttattttcagtggactaaaatcttttttttctttcttaattatgtgcttggtccctctgtttgcttcctttcttaaaaattgttcttcctcctccttactcctcctttctctttgccacctttggtacaaatgaaaagatccagagaagaattctaatgactcagactccttaaggagctcagaaaaaagcaccacccagcccctttcaagggctcttctactttccttatagagttttagaagtcatggacagtctcctgtcaggtctaaaactctgctcgkttgcactgcattatctgatctcttttactatggagagtatcagaaaattactttgttctgtgaaaaaaaataaaccttgacctttgtgtatgtggtggctggcaggtcactggtaagagctgcagttgtttatagtcaatagtttctactactggggttactcttatctttgcatgcttagataagaaaggatgcagtttaaacacttagagaaatgtctttgtagccaagtacactgtgaaagccttg

SEQ ID NO: 539226 - DNA, 565 bp, Homo sapiens
gttctttctccttgaattctgtttttggaaattttattttcagtggactaaaatcttttttttctttcttaattatgtgcttggtccctctgtttgcttcctttcttaaaaattgttcttcctcctccttactcctcctttctctttgccacctttggtacaaatgaaaagatccagagaagaattctaatgactcagactccttaaggagctcagaaaaaagcaccacccagcccctttcaagggctcttctactttccttatagagttttagaagtcatggacagtctcctgtcaggtctaaaactctgctcggttgcactgcattatctgatctcttttactatggagagtatcagaaaattactttgttctgtgaaaaaaaataaaccttgacctttgtgtrtgtggtggctggcaggtcactggtaagagctgcagttgtttatagtcaatagtttctactactggggttactcttatctttgcatgcttagataagaaaggatgcagtttaaacacttagagaaatgtctttgtagccaagtacactgtgaaagccttg

SEQ ID NO: 539227 - DNA, 525 bp, Homo sapiens
aattaaaaacactttttcctgaagtgtttttggaatcacttggaatcactaaaattaaaaacactttttcctgaagccccggaagctgaagccagaaaatttgatacaaacttggaaaaaaatcatcacagcaacttaatatatgaacagactctgtgcctgttgataaatagactgctcagaaagctcactggaacacctgaggcaaactacaaaccaggaaaaatgtgtcaggttgccactatctgctctcacttcctgaagatgcttcaagcccaacatctaaaaaccttcatgattggctgccatgtggactcaaaaaaaatgagtttatagtttgttctaaccactaacatttgtttttcttttatttccatagaaacatctcttaataaayatctggttgctcagatcatatagaggccttactttggtggacggccatctacaacatcactgcctgaaatgaaacacagatgttaactgtttaattggactggcctattcatgggattgaaaagattg

SEQ ID NO: 539228 - DNA, 655 bp, Homo sapiens
tgttgaaaattagaattagcaatgctgaaaacttgctattattttactggagtttgatatgcatcatattctaaagcagtggttctcaaactgagcatgcatcagaattacttggagcatttgttaaaatacaaattcctgccttcccacattccctagctactaattccaaggactaagaatttgccagtccagttcccaatgctgatatgatggtccaggaacactttgagaatcggtgttctagagggcatttctgttggcttattaagaagacagatatagaatattatcttttccatgtaactaattaattgtaccccattaattggaattttagatrtaccttagatctgtgaaaaacaacgtaatggtataaactagttgtgagggtattctggtcatcacatccattaccctttaactcatggcactgattctattggactaactggatttcccatcttcctcactgctcgccaccaaccactacgtctcctaaggctagtcagttcctctttaaagcatgctgtaccatcattatggaaagcacaagtgaaatgtttacattgttcttgagcataaactgttacaaaaccctgtgaaaatgcaacattaattaattctgaatcatggtcattgccccacacccttt

SEQ ID NO: 539229 - DNA, 533 bp, Homo sapiens
agcttccagctgagaacccgtgggatatcaacactgtcagtttttccttcaagtgacrggcataatttattcattttgagaaaatatcaccaaatactcaaattcaaatagctatagtttgggatatggtaggtgcatggatatataaggttttatttcttatttcttcttatgagctacaaaatctggcacaaatgataataaaaccactttttagaaaatggcctaggctggcaaatctaagaccatctagaaaaattcagaaataatatcaaatgcctcatgaaaatattttatttcctctgtcttcacctccactagagctatgcctttaatacccatgtaaatccccaaggtgcagtcttttcagtagtcatttacaaatattaatagtgcaagtggtttatatagcactattctatatgctctggaggacacaaatgctactgcttgatccacaaatgctacttcaggaagttttcactgtagttggaaagacagaacataacacataacacatttaaaaagcatat

SEQ ID NO: 539230 - DNA, 426 bp, Homo sapiens
tagagtatttaactctcttattttgtgaaagagtgcatagcgtttcttgggggagcatatgttagttttgaactggtcttgaaccagttcaccttttcaaaatatgtgaatgatttgattttggtcagcaaatcactagtaaatctttagcatattgcttagcatattggtgagcatatgatttgcatattgaaatattttgaaaagatgacttttcaaagccattttgcccaactaatagaaatatgtgaaaactctcctctaggttctaaatcctgagtgcatccatttctttctgggttcaggtctgtaaactcttccttgctacagtaaaagttgaygatggtgagtgcttaccgtgtacctggcagttgagtaagcattatctcacttaatcctcccagtaaaaggtactatgattacccc

SEQ ID NO: 539231 - DNA, 583 bp, Homo sapiens
atgggatgtgaaacaaaaacagttgtcaggccagaagcctcattatgttcactagtaaacaccccacacagcagtaacctgcatagctttacccatttctaccaggacttgtcccttgaagccaagccactgacttccggacagaagcctggaggcctctcctttctgcccttgcttggaatttcccagcaaaccacacaacttccccacccaaacaagccccaaatgcactgtgttcacctaataaaccaagaactttatgtaacatattttaaaggattttcactccacacaatgactgaagcgggtgaacacacaacctaaaaattaatgtctttaagagaaattgtggctagttttttcaagaggccagaaatttaagcccctactttctgggttaattttggttttatttatttatcttaataaatacatwtttaactcaggaacataaatctgattatctattgactctaaaactggtggtttggggattcccaatatgttttccaggggttgagatatcacagtagtagaaatcatcctcatcattagagcactcactcaaaaattctgattatgt

SEQ ID NO: 539232 - DNA, 530 bp, Homo sapiens
cgacaccactgacctgtaataatccactcttctccaacaggctcagcacagccatccttagcaatcatgtcaattaagcaacagtaaaagagatgtctatcctacacagtaactatcctaaattattcctttgtttgactctccttatttctctgagttgccactggctatgtggtataaatttgttttttcattttagcgtgtactaaaaaaaaagtctttgttacttagggaaccaattcagtattgaccatggatgggaaacaggcactctaacacaaatgtagtccactgtttcacttttatatagatttctctgtcacaagaaaagggaacaattttcctctagtttcacagcctgcttttctatgacaggttgatacaatgtagtaattaaccattaaaatattgcatatgattctcaggagygttacagacaaactaatttaaaccaaggtcaggtccccaaatcagcaaaataactctgaagggaggggagagagaatataaatgagaagaagtaagcaaca

SEQ ID NO: 539233 - DNA, 559 bp, Homo sapiens
ttttccaaggcatgaatgttccataaagtcacatcatacagtcatggtggctaaagttggtgcttagttatgccctgggtttgtgccaaaagtgaacagttacagacccgccagagtcctcacctgtattcgtttatttctccagagatgtgtgctagaggactactgccaaatttaagatccattaaattgctgaatcatcacattggggattgtrtgcgtgcacatttgtatttgtgtgcgtgtgtgtttctgggaaccagctggcaatgaggtttcagccactgattaccaggcatgcttagatcaagaccacactttacccaaatggcctttcacttttatttgtgtaaggccttgacaggagccacaagacaaagagagaaagaaaagcgactgttcttagcctaggactaagtgaaaaactaatatcccaggtttttaaaatttaaacaaactctctccttcctattggtagtttcatttgacctttaataaagaatagttgcttgctattttagtagcctggattaacagcttcaaaaagatccttttaagg

SEQ ID NO: 539234 - DNA, 559 bp, Homo sapiens
ttttccaaggcatgaatgttccataaagtcacatcatacagtcatggtggctaaagttggtgcttagttatgccctgggtttgtgccaaaagtgaacagttacagacccgccagagtcctcacctgtattcgtttatttctccagagatgtgtgctagaggactactgccaaatttaagatccattaaattgctgaatcatcacattggggattgtatgcgtgcacatttgtatttgtgtgcgtgtgtgtttctgggaaccagctggcaatgaggtttcagccactgattaccaggcatgcttagatcaagaccacactttacccaaatggcctttyacttttatttgtgtaaggccttgacaggagccacaagacaaagagagaaagaaaagcgactgttcttagcctaggactaagtgaaaaactaatatcccaggtttttaaaatttaaacaaactctctccttcctattggtagtttcatttgacctttaataaagaatagttgcttgctattttagtagcctggattaacagcttcaaaaagatccttttaagg

SEQ ID NO: 539235 - DNA, 599 bp, Homo sapiens
tagttccctgaagaaacctgaagacagatacctggttaactagatcaactacactgccaacttgtttgatgctgagagacaatggacttattccatgggggaagggaaaaaagaagtcaatcaccaaatctgaagaagttaacctagatctttgaggtttgatttgcaactttatatgcagagtattatgtgggtattttcccttaaaatattcaaagggatttacatatgrgattagctaatgagcctagccaagaccttccctggaggacaggctggtcattgcggaggtcccttctgtgcttcagtgggttcatatcctctagtccgtatgattttcctacgctaatatgtcaagggcaggagaggcagctctgttctcctagcctttgttgacttgtctgcaaagcaggaatctgcccatttgtttccaaggagcaaatgagctcatgagaatgaaagatgttaacttcatgcattctgtgccatctgagcatttcggtattatatgactggtgacccttggcccgtattataaatgcttcctatcctgggagacctcatggatgagtctgagaggaaatttggcaccaaaatca

SEQ ID NO: 539236 - DNA, 545 bp, Homo sapiens
atcctcaagcattatctttgaacactacgttactcaaagagtagcctttgaaacagcagcatccacctcacatgggagcttattagaaatgaagtctccggtaccattccagatctattgagtcaaaatctgcatgttaggaagatctccaggtgatttacaggtacatcaacatttgagaaacactagtctaatatgaagttttcttatttatttattttttgcctgcctcccaccctccctcaacctcaatgagattttattttctcatcagaatgacaatggaagtcattgttgatactgagtgccaccatttgaaagtgcctagtctgcttttgtgaagatcaactagcaaggagagacagacatggactatgtgtttgtaaattttacagtcaatgccatttgtatctaagttcatttgaatagggtttctgtctcctgtagtccggagtatttccaaatggcaaggtcagagccatctacaaatcgcacacagcawctctcactttgtctccagcaagatgctgactgaaatttcccag

SEQ ID NO: 539237 - DNA, 633 bp, Homo sapiens
atggtaacgagcccactcccctggagtcagacaccaccagcaaactgacttgggggaaaacrtccaggaaaaaagcctagatgaccagtgttacacatcaactaatctgtgattcatacatattcagaaggaaagtgagtgaaaaaccggcgtttcaggcagctttacattttcaaattaagttaataaaataagatttccaatgtaatgacaaattaattcttcttttcataagtttattaaaataagcgtctcctatcttctaactagtgctgacatatgcttacatagatacatcctacccagtaacctaatctcccagcaatcttgaagcaattaactccttctaatcttgagctaacaaagcccaccacgccaaagacccctgagagcgccccacagcagcctccctctcctgctccgagccaccctagctgggtccgatgaagtggcccagagtggtgattcggctcaaacaaccagatgagtcatcacagatcataagatcttcattaactccttctttctctgctaattaacacaaaaagaatgagttgaacgtctgacaggcaatgactgacccactgcttggtggttaatggaatgcaaatgacatctaatgagggtctctcc

SEQ ID NO: 539238 - DNA, 572 bp, Homo sapiens
ggacctattccaaggacaggatcaaaatgtggtattttttgtggtttccaaagtgctttcttcaggcggactttacttaacactaaggaataaaaagtctaacttctaaaaaaagtgtgccttagtacattttaaaattttgggcataaagaaaattctccagttttaataatwtacattattcaaccagagggtaacaatatggttcctaggtaccagcaatcacaagtgagccagttcactcaccaagaagaaaatgcagttccatggctatgtattttacccttaaccttgttcagcattctcacaaacactggccacaagagtccaggaaactgtaaataggtctatttagcactcctgaaaaaaattcacagcacgtgtcttaataatgtgagcccatagctccaaaagtgcattcggttaggatgttaatgtgagaaatttaaaatgtcccagatagctgagggttgatactgggaggaaaaatagaactatactgttacgtaaagacaacactaccttggcaatatcctcccaaattccactcaagataaagctgcttgccaaaa

SEQ ID NO: 539239 - DNA, 576 bp, Homo sapiens
tgaactgtctggctgcgttgggacaaagactgagcttggctgggcattaagttctcctgcctcctcttgtcccatccctggcctgattagaactgggagagtcacctacctatcatcagtgatcttctccatgtaatctgccagccagaccagcccactggggcctccgatgcaatgctgatcatttgcgggccatgtcttagatctagtataccctagagggtcacctcagccacccaatttaggctgtgatttgaatattggtaaagggcatgatcctcaggaatgtttcttctctcatcccagggcttctaagactggtttgagcatcactggtcaagagatagagagagtatgtaggaagctatatkgccttggaaaatgatttttccaacatgtcaagtgacaacataacagcaatatgcacagagctaatatttattgccaattttccatatgccaggcactgttctaagttctttcatgagcttaactcatttcgttctgaaaacaacctttcaaggttgttactgttactatccccagtttacagatgaaaaaattgagccacagatt

SEQ ID NO: 539240 - DNA, 625 bp, Homo sapiens
ttgtggaaatggaaccagcctctccttggaggtccttggtccagtgagagtgggaaggtggaggatgtagaaggggcactgaggatggctgactgtgagttccrggggtgaaatagagcagcgtcgggggctgaagaggggagggagggggatggtgtcagccagggcaggtacgggaccactaggcagatgcatgagggagagttgggctccagtggcagctcccttttgcttcctgccaatgcaagtgtggaggccaagggaggggtgatcatcaaagaagtgtttttctgaaattaaaaagtacagcccccacagtgctaccatcttaagaggctaatttcttgttttggtaaaacctttcacagatacacattttgcatgttccaggatggtattcatattgttctaacagattgaacttatttgacataccactgaaggacttttcccacacttccacggggttttcaaaattctcatcaaaatggctctgtgagactccctcctatttgatgggccatgctgattgcctgagccatccccccggatgctggacacttagctggccttaacatgtttggcattatgcgatggcactgcccgaaccccgctgagcacacag

SEQ ID NO: 539241 - DNA, 606 bp, Homo sapiens
tgccatttattaagcacatagtatgtgccaagcmcaatactaagagccttacgtcatggtcattaggtcgaatggcaggacaattatattatattatatattatattataggcaaaaactgttgttataaacttttttttatgacagagtctcactctgtcaccaggctggagtgcagtgatgcaatctcagctcactgcaacctccacctcccgggttcaagcaattctcctaccttagcctcccgagtagctgggactacaggcacatgccaccacgcccagctaatttttgtatttttttttagtagagatggagtttcaccatgttggccaggacagtcttaatctcttcaccttgtgatccgcccgccttgtcctcccaaagtgctgggattacaggcgtgagccaccgcaccaggccatcaacattttacagatgagaaagccaagttcatggaggttaagtaaagaacacacagaaagagagggagctggggattcaaatcataccatcagttcctttgaacggtttagtctgagaacagtcattctcttgcagcctacaccaggcttggcttcaccaaccagaaacttccagaagagg

SEQ ID NO: 539242 - DNA, 606 bp, Homo sapiens
tgccatttattaagcacatagtatgtgccaagcacaatactaagagccttacgtcatggtcattaggtcgaatggcaggacaattatattatattatatattatattataggcaaaaactgttgttataaacttttttttatgacagagtctcactctgtcaccaggctggagtgcagtgatgcaatctcagctcactgcaacctccacctcccgggttcaagcaattctcctaccttagcctcccgagtagctgggactacaggcacatgccaccacgcccagctaatttttgtatttttttttagtagagatggagtttcaccatgttggccaggacagtcttaatctcttcaccttgtgatcygcccgccttgtcctcccaaagtgctgggattacaggcgtgagccaccgcaccaggccatcaacattttacagatgagaaagccaagttcatggaggttaagtaaagaacacacagaaagagagggagctggggattcaaatcataccatcagttcctttgaacggtttagtctgagaacagtcattctcttgcagcctacaccaggcttggcttcaccaaccagaaacttccagaagagg

SEQ ID NO: 539243 - DNA, 606 bp, Homo sapiens
tgccatttattaagcacatagtatgtgccaagcacaatactaagagccttacgtcatggtcattaggtcgaatggcaggacaattatattatattatatattatattataggcaaaaactgttgttataaacttttttttatgacagagtctcactctgtcaccaggctggagtgcagtgatgcaatctcagctcactgcaacctccacctcccgggttcaagcaattctcctaccttagcctcccgagtagctgggactacaggcacatgccaccacgcccagctaatttttgtatttttttttagtagagatggagtttcaccatgttggccaggacagtcttaatctcttcaccttgtgatccgcccgccttgtcctcccaaagtgctgggattacaggcgtgagccaccgcaccrggccatcaacattttacagatgagaaagccaagttcatggaggttaagtaaagaacacacagaaagagagggagctggggattcaaatcataccatcagttcctttgaacggtttagtctgagaacagtcattctcttgcagcctacaccaggcttggcttcaccaaccagaaacttccagaagagg

SEQ ID NO: 539244 - DNA, 546 bp, Homo sapiens
ctggataactctcagttttcctgaccgtctgccaaatgtcccatcctccagcaacatgtcacctcctccaaaacattgaattccctttcttgcttccttctctgtgccacctgtaatagacaagaaacatatgtctcagcgcactagaataaccacactatggtgtggtatggttgttataacttgcctgtccagggagtagcactttgaagatgtttaataaataaatgtctaattgaataaataaatcaatatttatatgtttgtctctccacactatttggctgtgrcttcctcagaagcagggactatgtttagccaattgtgtatccccagcactctgcatgggtttgggcagaaaatatgtctccataaatgaatgagttctctgaagatagtagccagcgtcctcaaataatgttcctccttagtttgtttggactaagtgatttatttttaggggagggaggtgaaaaacaccaattttcttctaagaattttgtttcaaggactctgcaaaccaagcgacagtgacaccagaacttt

SEQ ID NO: 539245 - DNA, 622 bp, Homo sapiens
gctccctacagagaaagaacactggctccagtgctccagtrcttataccagttgaaagaagaaagagcccctcatgctgagatggatgattgagagaaaaagagagaaagagaaagaaagaaagagagagagcaagaatgagaacctgagaatgacaaagagagagaggcagatttaaaaaaaaaaaaaaaaggtaaaaaagcaacaggggaaaagaaagggagaataagacccagctttctaagacttacttgactgggtgctggaaggcccctggagatcatctagtccaggggtggcaaactgcacactagccaaatctggtctgtttcctgttttgtttagctcacagctaaatatgatttatatatttttaaatgattcaaaacagacaagaaaataatattttgtgacatgtggaaattatgtgaaattccaactgcaatgtccataaatatttattggaacacagttacgctcattcattcatataccatctatgcccacttttgtaccacaaaggtggaggtgagtagttgtggcagagattgtttgacctgcaaagtttaaaatatttactctatttccctataagaaaaagtttgctgatctactaatctag

SEQ ID NO: 539246 - DNA, 622 bp, Homo sapiens
gctccctacagagaaagaacactggctccagtgctccagtgcttataccagttgaaagaagaaagagcccctcatgctgagatggatgattgagagaaaaagagagaaagagaaagaaagaaagaragagagcaagaatgagaacctgagaatgacaaagagagagaggcagatttaaaaaaaaaaaaaaaaggtaaaaaagcaacaggggaaaagaaagggagaataagacccagctttctaagacttacttgactgggtgctggaaggcccctggagatcatctagtccaggggtggcaaactgcacactagccaaatctggtctgtttcctgttttgtttagctcacagctaaatatgatttatatatttttaaatgattcaaaacagacaagaaaataatattttgtgacatgtggaaattatgtgaaattccaactgcaatgtccataaatatttattggaacacagttacgctcattcattcatataccatctatgcccacttttgtaccacaaaggtggaggtgagtagttgtggcagagattgtttgacctgcaaagtttaaaatatttactctatttccctataagaaaaagtttgctgatctactaatctag

SEQ ID NO: 539247 - DNA, 622 bp, Homo sapiens
gctccctacagagaaagaacactggctccagtgctccagtgcttataccagttgaaagaagaaagagcccctcatgctgagatggatgattgagagaaaaagagagaaagagaaagaaagaaagagagagagcaagaatgagaacctgagaatgacaaagagagagaggcagatttaaaaaaaaaaaaaaaaggtaaaaaagcaacaggggaaaagaaagggagaataagacccagctttctaagacttacttgactgggtgctggaaggcccctggagatcatctagtccaggggtggcaaactgcacactagccaaatctggtctgtttcctgttttgtttagctcacagctaaatatgatttatatatttttaaatgattcaaaacagacaagaaaataatattttgtgacatgtggaaattatgtgaaattccaactgcaatgtccataaatatttattggracacagttacgctcattcattcatataccatctatgcccacttttgtaccacaaaggtggaggtgagtagttgtggcagagattgtttgacctgcaaagtttaaaatatttactctatttccctataagaaaaagtttgctgatctactaatctag

SEQ ID NO: 539248 - DNA, 622 bp, Homo sapiens
gctccctacagagaaagaacactggctccagtgctccagtgcttataccagttgaaagaagaaagagcccctcatgctgagatggatgattgagagaaaaagagagaaagagaaagaaagaaagagagagagcaagaatgagaacctgagaatgacaaagagagagaggcagatttaaaaaaaaaaaaaaaaggtaaaaaagcaacaggggaaaagaaagggagaataagacccagctttctaagacttacttgactgggtgctggaaggcccctggagatcatctagtccaggggtggcaaactgcacactagccaaatctggtctgtttcctgttttgtttagctcacagctaaatatgatttatatatttttaaatgattcaaaacagacaagaaaataatattttgtgacatgtggaaattatgtgaaattccaactgcaatgtccataaatatttattggaacacagttacrctcattcattcatataccatctatgcccacttttgtaccacaaaggtggaggtgagtagttgtggcagagattgtttgacctgcaaagtttaaaatatttactctatttccctataagaaaaagtttgctgatctactaatctag

SEQ ID NO: 539249 - DNA, 513 bp, Homo sapiens
tgagtgctctaccctgatgacctaattacctcccaaaggccctgcttcataatgccatcacattggaggttaggatttcaacataaatttcggaggaacacaaacattcagcccattgcagcaacacaccaggctgcctctttggagggcagttgtttccgtcatctgtgacacttgrtccacaaagcagaaaggtcactgacatcatcctatcaaatctcaacattgtcataggagaatgagtaaaaacaaacacacacaaacaaacgaatgaacaaacaaataaaggaacaaggcattcctagctttcatatgaaggaactggatctccctaggagctgggggataatgaggcccccacccctgcagtggacctgcttaactctaggcttgtcagcacgaccagcaatccaataaggcagtgccccggctgcgccattagctcattaggtggaggtgagtgtccgcattgatctgtttatctcccaggcctggctgctggagaaaggccag

SEQ ID NO: 539250 - DNA, 536 bp, Homo sapiens
gggagggaggatggaggtgaaggttgaaaaattaccttttagatacaatgttcaatatttgcgtgatgagtacactagaagctcaatccccaccattatgcaatatacccatgtaacagacatgcacatgtaccttcaaatctaaaactttaaaaataaaaaatggtatccactagaattatgaaatgcaggactctgacacaccactggaaatctattgcttaatagtattagctacatagacaacatttgtctttcttactaaaaaaaactgyttcccagaccaaattctgcccaaggatgattcctcaaagagctgttctcatggccgatgatcagaggaaggaggaggtgctgctgctgacaatgagaaagcaagaagagcccaaaaataaaaagatactccccaagtatcattttactgccaactccaatcccattttgccaggcctgtcaccagtgcattcagaatcaaaggaatatactttcaactttttctctccactctggccctgttcctcacgaaggaaaaacag

SEQ ID NO: 539251 - DNA, 560 bp, Homo sapiens
ttggagcagcatattctggtcctcagcactgccatcagaaatttgtttgtaaacaaacatccagtatgagtgttttgacttttaagtgttgaccttaggaggaagtacatttattgtaatgtagcttaaaaagggtaagtaagctgtttmatgttacatcactaataaactggcttactagctaatatgtctcatccttcaaaggctggcaagtattttaaaatctaacctaccttacgcatgccctcagcagaaaccaatatcttaattagaaacaacaaatcaaaaaacctaaatggtgttaaagagcacccgcttcccagacatttgttcttaatttcctccccagtaggagacgttagctcttattattttaaatttgcttttatttttttaagagatagaagtcacagctcaagaagagagagaaaatttgccttcctcaatccttttgtatgtttgcttttaatgaaaagtgaggggtttatgtaaatcggctgtgactcctcaggtacaagtagaggctaaggatagctactcctgttcttcagtagaaagat

SEQ ID NO: 539252 - DNA, 663 bp, Homo sapiens
ttggagtagtttcttttgctgaaagagatagtaagcactaccttccattttctttctaaaatttttttttaaatgaaaagaaaatgtttttagagactccagcctgggcgacagcctgtgcacttcacagtgctgcccactgcagctttgaactcctgggcttaggctgtcctctcagcctcctgagtagctaagactgcaggtgtatgccactacatacgtccaattttttatttttttgtagagatgggctattgctatgttgcccaggctagtctagaagttctgggctcaagtgatcctcctgcctcagcctcccaaaacactgggattacaggtgtgaggcactgtacccagcctgctttccattttcttagtgagtagcgtctttgacatgaagttaaagccaggtactatgagtgctcacctgatttttggttcttacgaaagtgctttttttctgtagacagttgttaaattggtttccttgcaggggcgatgaccagtggagccttatattctgccatcttgctctgccccttaatgagtagggtctgaatcatgctttgtattktatatgaaaatgtacttgtattcttttcaactgttctcctttactctggaactttcatccccattgaggacagaaaagcacattaagtg

SEQ ID NO: 539253 - DNA, 183 bp, Homo sapiens
aaacaggattgagcactgaggccaaagcactagcaaagacaaatactggaaacaaggatcaacgttggtggttgggaaatttgaaaccaacataggctaagtagtgaacacamggttgaaaagagtggaccagaagtgagttatttaggtggaagtggggtaagggttgtagattagctattg

SEQ ID NO: 539254 - DNA, 459 bp, Homo sapiens
tctatactgcacagtacacttaacatcttgtgggtatgaaataacacttgagtttatttggaatcattttagaaatactgtctaatctctctttccctcagtttcctcctctgtaaagtgggatagtaacaccagtagaggtgttatcagaattaarggagatgttcattcatttattcaactagtagtgacttaattttgatgtgaatagttgaggaattgattaaccagtttaaagatttccccacccttttgtctctcactttccccccctcctgtctggcttttgataacttcaatccctttcatttccccgcctcagtgtgcagataggggtataaaaggaaaatcagtccattttgttttctatttcagcagcttctggttagaaagtgctattgaacaaataagggctttaattgaccagtcttcagtttcattatccatgctctcctggtc

SEQ ID NO: 539255 - DNA, 447 bp, Homo sapiens
tgtctatactgcacagtacacttaacatcttgtgggtatgaaataacacttgagtttatttggaatcattttagaaatactgtctaatctctctttccctcagtttcctcctctgtaaagtgggatagtaacaccagtagaggtgttatcagaattaaaggagatgttcattcatttattcaactagtagtgacttaattttgatgtgaatagttgaggaattgattaaccagtttaaagatttccccacccttttgtctctcactttycccccctcctgtctggcttttgataacttcaatccctttcatttccccgcctcagtgtgcagataggggtataaaaggaaaatcagtccattttgttttctatttcagcagcttctggttagaaagtgctattgaacaaataagggctttaattgaccagtcttcagtttcattatcc

SEQ ID NO: 539256 - DNA, 495 bp, Homo sapiens
ctggcttcaccgaaagtgagcattccaaaagagtcaggtggaggctgaaaggtttcatatgacctagcctcagagtcacacagcaccactttctccatattctccatttctctacattctgttggtcaatgtagacataggctagctcagattcaagtagcaagagaaatagaccttacctttcaagggcctgtgcatacagagaagaaaggaattgatggccgttatcttggagacaagctacctcagtgggtatcaagctcattatattaaactaaaatattataaktttcaaaatagcaactaattcagactggtgtccacctccccccctcccacccctaaaaaaggctcatgtgaatccccttcctgaaacccatttaaaagatgcaccagttaggcctacattttgaaacggataacacctgctccactgaacatgacttgggaaggaataatttgcttggtggctggaaaataagtgcattaaattag

SEQ ID NO: 539257 - DNA, 495 bp, Homo sapiens
ctggcttcaccgaaagtgagcattccaaaagagtcaggtggaggctgaaaggtttcatatgacctagcctcagagtcacacagcaccactttctccatattctccatttctctacattctgttggtcaatgtagacataggctagctcagattcaagtagcaagagaaatagaccttacctttcaagggcctgtgcatacagagaagaaaggaattgatggccgttatcttggagacaagctacctcagtgggtatcaagctcattatattaaactaaaatattataagtttcaaaatagcaactaattcagactggtgtccacctccccccctcccaccccwaaaaaaggctcatgtgaatccccttcctgaaacccatttaaaagatgcaccagttaggcctacattttgaaacggataacacctgctccactgaacatgacttgggaaggaataatttgcttggtggctggaaaataagtgcattaaattag

SEQ ID NO: 539258 - DNA, 530 bp, Homo sapiens
catgacttgggaaggaataatttgcttggtggctggaaaataagtgcattaaattagcattgaacttgctttcgacccatttagtcttaaagagaacaaatcactggattatcagtagttcacagacaaggcaaaaagatacatttttgcaaagatctccattgtgggtaaacccaagatggcttaatttcagcctgatacagagtgcaaactcataaaagcaaattgcctgccacatagtaagtacacagtaaaaattagctgcaagtattcaattaaagagtaaagaattacagtctgagcataaaagtacttagtaattcattagaaaaaaatatgttataggcaggagtctgaggcccaacaaggggcagggatctgtccagggtcacacagcttgtaggagcagggccaggtttgaagttcatctggactcagatttctcacttatgacggggggaggggggagcacatctcaamgtgcttaataacctgggaattttaccgcaaaatgaatgacattatatttc

SEQ ID NO: 539259 - DNA, 636 bp, Homo sapiens
atcttctataatcactcaatacatcattgctactattaaacagttcttttatatcaattaagattagaagtaagaaaaataaaattttatccttccttattccttctgttacactcttcttaatataggtatgagtttctgacctatataatttccttttccctgaaggatttattttaayatctgcagagtggtcttctggtcatgaaatccctcagcttttgctggtctgaaaaactaattctcttttgaggttgagtttcactggatattctatatttgtggactttttccctttcaacagtttaaatattttttatttcattctgttcttgcttgcataactcttctttttctctctccttccttcctttccttcattttgatatttatcctgctggtgtttgctgaacttcttggattctgtggtttagtatctgtcattaattttgggaaattttcgtcattattacttacatttcttctgttttctcttctcctttctcttttaattatgtttatgatataccttttgaaattgtcctacaactctggatgttctctgctgattttttgttttgttttgtttttcagtttgggaggcttctattgtgacatatcttaaaagctcattgt

SEQ ID NO: 539260 - DNA, 636 bp, Homo sapiens
atcttctataatcactcaatacatcattgctactattaaacagttcttttatatcaattaagattagaagtaagaaaaataaaattttatccttccttattccttctgttacactcttcttaatataggtatgagtttctgacctatataatttccttttccctgaaggatttattttaatatctgcagagtggtcttctggtcatgaaatccctcagcttttgctggtctgaaaaactaattctcttttgaggttgagtttcactggatattctatatttgtggactttttccctttcaacagtttaaatattttttatttcattctgttcttgcttgcataactcttctttttctctctccttccttcctttccttcattttgatatttatcctgctggtgtttgctgaacttcttggattctgtggtttagtatctgtcattaattttgggaaattttcgtcattattacttacatttcttctgttttctcttctcctttctcttttaattatgtttatgatataccttttgaaattgtcctacaactctggatgttctctgctgattttttgttttgttttgtttttcagtttgggaggcttctattgtgacwtatcttaaaagctcattgt

SEQ ID NO: 539261 - DNA, 530 bp, Homo sapiens
attaattgtcaacttgtataaaacagcaaaatctgacaaattttggaaaaagatgaaaaagtcactggtatatgctgggagtttgaggatgagctatgtctttgactgtcatatgaatatttttaatggcatactgttttgagttttgtagagaagctatagaagaggaagtgttataaccaaagtccaccatctttcatcttgaacctcttattagcatgtctaggatatgaaagaaaggtacaaattcaagaggatatttttccctactctaattctcatcatgtgtcttatggaaaaattcatatattcaatctatttttcagtctccatttcagactcccactataatcaagataatgtacttgcttcattcatgttctgcaatcaatatcatcttatattctttattcttcccctctcccccatatatgttatctttgcytattttcttccttcttccctttaacaaatgttattatacaaataagagttctgattaatatcgagagtgaaagttattaatgaaa

SEQ ID NO: 539262 - DNA, 544 bp, Homo sapiens
tgttttctttggaactgattgggttactttctttgtctttttttttttttttttgtggcaagtaagttaaatactatgcattagtaatatatataggtaaagtaataaggtgtttccagaattccttagtaagtttatcctctaagagaaaagcaataaaaccatacacacgaaattagttgtatgtcatgtttccttaaagtaagtatttttaagtagagaaaaaaaattagtaaaggattttgttactgctagatctggatttgaatcctagttgcaagttatgtagcaatgggtragattctgatgtcacttttctataaaaacttcataggattttttgttgttgttcaggattaaataacatatttcatgtccatagcaaagggtctggctcagaaaaaaaatggtagataattgttttcaaagaaattaattacctcattaattgtatttacatatctgaagaaagactaggttaactaatgaaaagattgaaagagaatctcagtgtatattagtaattggctatcattgacttaag

SEQ ID NO: 539263 - DNA, 629 bp, Homo sapiens
ctgttcacacctcttattttaatataaacatactacccatgcacattgttcgtgtaagtgaaaccttacttgtttcacataatgatttatcttagagatttcatgtcagtacatagagaactacctcattttatttatagacactcacgaattcaagtatcataccgcccagtaaaatacctcaccagcgtccctttctttgcctcccttcatgtgttaaccacacactattcttgaggatttccattttcatgttaaagattttatctgtctcagatgggtcctgcaatcttgatcactctcaagaggtaatgagatgcctaccctcctttccatgcctcattctctgggatcgctggaatatttctatattatagggatattctgccttagcttttccagtgaggtctgagaatggccagsagtggttccaataaggcagtccatttggtccactttgcttctcactttcaaacccaagtgtttattttctgatacaccagacatgcatttcatcagtgataaacaattactctgcttgctttctcacgttaaagccagctctagtagtaccctagaggccctcagaaaagaaaccaagatgtaggacagatccattaaaggttata

SEQ ID NO: 539264 - DNA, 468 bp, Homo sapiens
tcataatcagctaataagctcatcttgaggagaataatgatccgcggacctgttggctcgtttatcactgtgttttacaacattggcaaagaaactaattaaatccccgcatcattacagagaatccyttttaatagagatacaatgatgcactagaggctacagattacgctgcaaattgtaccaggagattttggacagcgggctttaattaacatgtgagccaggagcagctcgtttaaataataaccagcgctggaaccatctgcaagtaaagccaggcagcaggaggaggtgggactgaggccttggaggcaagcagggcgtaggctgtggctagggagtgttttggagtcagggctctggggagattggagaaactgaggcagggctcagctccagagggcaagggagaaacaagaactggggcatgttggggtcgagaatcagaccaggtgaagaaatgca

SEQ ID NO: 539265 - DNA, 349 bp, Homo sapiens
gcctctttgggatttttcagcaaaaccagcacaattgtttcctatctggtctctacttcccaacccaccctttccacgagaccctccagctcctgctctgaagctatcagaacctccagcatggcttaggtagtgagtcaggtccaaggacttcaaatatgkgagggacgggtccaacctgctcattttgataaagaaggaaattgaggctctgggaggttggggagtggtggtggatggatgaccctgaccactggtccaacttttgggaagagtaacaaaatagtcccagaaacagacgttatgacattattgcaaaagctgctgctgcctttgatcaacagacagg

SEQ ID NO: 539266 - DNA, 599 bp, Homo sapiens
gacttccagcctccagaactgtgagaaatagattgatgttgtttaagccaccagtatgttgtactgtgttactgcagcctgagcagacagatacacacaggaatagtaatcaggacatcagctcacccttacgggtcccactccaagccaggccctgggctgggggctggggatgctgccctgacctcaaggagctctcagtggagagcagggaaagagacacataaatgagcaattaaagggcatgaggctggaggatggtgtctggttgccaagaggatgaagggrctaaggaatgcttcagggaggggtggtgttcgagctggactttaaaaggatagtggaggttccccacacagagaaggggaaaggggatcccaggcagggggctggctgagcaacagcacaggagtgcaaaagggtctagaggtgaaagccaagataaaacaataagctcccggtggttcgtggcagagtccagggggatgctattgaccacaggtgagggctggctcacaaagagccttgaacgccatgattaggggtcttctgggtgtgtttgctgggtccccaaagctggagagggcggcataaagcca

SEQ ID NO: 539267 - DNA, 491 bp, Homo sapiens
ctgtattccagcccctgttggccaccttgacttgtgcccttgtgtagtgtacaaccagcacaaccatacataccttgttctcaaattccttactccaggggccgagtcactgacttactggttatttttttctggtaaggacctgaccaagctctaggtagtcctggccagcagaataactgatttagtgtgcaggagaccagttagctggaatcataaatttccttatggcaaagcagaagcaccgagtgtaacactcacctctagctgacctcaaagccggacaaggcccatctagaaatggycaggcaggtggaagagcaagcgcagaagccctgagatgagaaacacaccagcgtgtctgaggaacagtgatcaggctagagcagaccagagtagcaggaaagcagtgaacgaggggcaaatcagtcagcaggagagtgggagcgaggttgtgtggggctttactggccactgcaaagacttttttg

SEQ ID NO: 539268 - DNA, 528 bp, Homo sapiens
aagccacctaaggtcacatagaccagacatagtggatccrgaacttgaacccaggacattggacaccaaaaaccactccagccagtctctccacatcttccactatgttgaaggcacagtggttggtctgagatcatggaaggaacagtcttggctgtttccaaagagaataagaatgaagaggaagaaaaagcaagactaggaaagggatgcatgagagggaaagagctgtctcttaggttcagggtggagtgtgtgagggtgagatggagagcacagggaccagcctggagactgagggaatgaagaaaaaatgtaatataaaatatctatgctctttaccatggcctacaagttggagatccatacaattatgttggaacaacaagcttcaaccagaactgtcccaggcaaaccgggacatctggtcacctggcctaaaggctcatgatctgcttccttcctacctctctgaccctttctccattctctctacccctcatttattaagcccaagccatactgctc

SEQ ID NO: 539269 - DNA, 578 bp, Homo sapiens
caatgcagctatattcatggtatctagagatggaatagtgaagggctagaggagctagaggctggctggtcatcccgttctctctgtgtatgtagtcccaagggcctttccatgtggtcccttggagaagactaatttggtcttccttacaatatggcaacctcaggacagttggctggctctcatgacactcagagctccaaggcaaatgttttaccacacaaggcagaagcatcatcatcttttatgaccaacttcagaagttatacagcttcctttctgccatatccttttgattgcaagtcacaagccttcccagactcaaggggaggaaattaattagactctaattcttcatttctttatgggggccttaattatgtcttttaaactttatgtttgtcatctgtactttctcctccagcctcacctactagaaaataaaatccatggagagaaagacttattttggtctgtttcacctctgtatttctaatgcttgccttatagaaggcacawaaaaattccattgaaatgatgaatgagatgttctgcggtatatgtgatgcctgagatgg

SEQ ID NO: 539270 - DNA, 533 bp, Homo sapiens
ttgtctgctgcaggctctctcagcctctgggaacaagtccttgctccctgaaggggctctgggaagcacagccyttcatgcacctgctgagccttggggacacagcggtgaatgacacagaccccgtccttgcctgcttgttgcttacagtcaggatgggaagatgggcattcaaccaagcagattaactcacatgtaattgcaggggtggctagtgctgtgaggggccagaagtggatgctgtgggagataataaaaggatggcctctgaggggaggtgacatgtaggctgagacctgagatggcgccatgctgaagtctcaaggggcgaaaggctcaggagagctcacagacagaggaggccagcattgagaccagaagccttgcaggccatgtgacaagagttgggattcttctatgcacaacgggaacagggctgccttctccattggtctcagtaggcaccatgcccatggcccatggaaatgtttgaaatgcatttttttttttgagacagggtcttgctctgtcaa

SEQ ID NO: 539271 - DNA, 533 bp, Homo sapiens
ttgtctgctgcaggctctctcagcctctgggaacaagtccttgctccctgaaggggctctgggaagcacagcctttcatgcacctgctgagccttggggacacagcggtgaatgacacagaccccgtccttgcctgcttgttgcttacagtcaggatgggaagatgggcattcaaccaagcagattaactcacatgtaattgcaggggtggctagtgctgtgaggggccagaagtggatgctgtgggagataataaaaggatggcctctgaggggaggtgacatgtaggctgagacctgagatggcgccatgctgaagtctcaaggggcgaaaggctcaggagagctcacagacagaggaggccagcattgagaccagaagccttgcaggccatgtgacaagagttgggattcttctatgcacaaygggaacagggctgccttctccattggtctcagtaggcaccatgcccatggcccatggaaatgtttgaaatgcatttttttttttgagacagggtcttgctctgtcaa

SEQ ID NO: 539272 - DNA, 511 bp, Homo sapiens
catttaatctgccctgagacaggctggcgatgagaaaatgcaaggggcaaggcacgtgaggcgagacgtggaaggggttggacagttggtcggctttgttcacttggtaacctggagcggggccagcctcggaggagctcccttggcagcagaagtctgttccaattaatcgtgtttaaccattctaatcacactttagcacattaatcctattttcaatccaaaacacatctgaaacagcggcatgtgggcctttttatgggaaccgcaaatcagatgtaacggagagacacagggccctcgtttgctctgcactttcactgaacttaaacttaataaaatatgggactggcttgtggttggatttactgcacgatgctgatgctttcacatataaatagatcccttaagtgacttaaaaacctgtcagagagtgcagcrgaaatttgattataaggtaaccagtgctgtgctttctccccctcctcctaacagtgccattgtgggtctg

SEQ ID NO: 539273 - DNA, 511 bp, Homo sapiens
catttaatctgccctgagacaggctggcgatgagaaaatgcaaggggcaaggcacgtgaggcgagacgtggaaggggttggacagttggtcggctttgttcacttggtaacctggagcggggccagcctcggaggagctcccttggcagcagaagtctgttccaattaatcgtgtttaaccattctaatcacactttagcacattaatcctattttcaatccaaaacacatctgaaacagcggcatgtgggcctttttatgggaaccgcaaatcagatgtaacggagagacacagggccctcgtttgctctgcactttcactgaacttaaacttaataaaatatgggactggcttgtggttggatttactgcacgatgctgatgctttcacatataaatagatcccttaagtgacttaaaaacctgtcagagagtgcagcaraaatttgattataaggtaaccagtgctgtgctttctccccctcctcctaacagtgccattgtgggtctg

SEQ ID NO: 539274 - DNA, 524 bp, Homo sapiens
cagcgatgcccggggaggctccgagggctggtgctgagcggccttgtaaagggtttatggaggtgtaatcttgaaaacttgataaacctcaagcacctcatctccgatgttgctgtcgagtttttcaagcagtttgacgtgaaggacttgtgtgcagcaggcctgcagatgggggcaggggggccttcagaatgactcccctgcaaatggccaggcccagagggggaagagaaggttgtccaagctgccatgagcctgggtgacatccagcccaatgcctgtcatcgggagatgattctcaaagtgtggaaggcacttgcctgaggtgagaactgcgtggcggccctccagcccagccagcaccctttctcttccattgarcagcccctgacacacacagcaaagctgaggtcgtgcagcctgcagtcatattccttgctgcagtgatgcctggtctattaaccactttgttctgcaataatatccacttcattttatcctaagcccagtcagtggtccgtagc

SEQ ID NO: 539275 - DNA, 617 bp, Homo sapiens
gttagactgcagcttttagggcccaccccagacctacataatgacagcctacattttaccaagatgcccaggtgacttgcattcacgttccgtcggagaagcgctggctgggtggggaagggagcaagggatctggactcccttctccaacactcctgggtttagcccggatttcaacagsggctagggtgaccacaccaaacaggttctgcaaatgctagtgttctgtgttgataacagaagaggacattttgcacttgagaggcccccaaacatcctcactcagatgtttcatgtggaagtttgggcatcatcctgaatctctctctggaccctccacctctgcctgggaaacaagtcccaggggattacacctgctagtgagaagggaatagcatggggtggtggcaggaggatggaaaaacccaaacaacagctaaaacaataccttgggaaagaaaccacaggatatcagaaaacccaaaataaaggagagaaaacagcccaaatcccggtaaaagtgacacgtctgtgactctcccgggcaaacccaaataagggagaaaggcggcagtaaccgggaactgggggtccctgaaatcccctccttatccaca

SEQ ID NO: 539276 - DNA, 565 bp, Homo sapiens
ctccctgacacctacatccgtgcatgatttttcctcttggcgctgctcacagcagtgaccgtgagtttggcactgtgcasttatcgggaactccctgcccacctcccaacatcacaggccatgaaggcaggggccagtcgtgtcttcctcaccaggtcccagcacttagcacacttgctgctacatcgttctgttaatgagaaagaaaagtagcaggactgacgttttgtacaaaaggggaactcttgcctgttttttgtttgctcatttgtgttttaattctgggtctatccacgtggatccagcccagtgggctgcacgagtggccttgggccaggcccagctttctctccacgatgaccttctgggtccctccaaatgtccacacctggaggcacatgagagacacctgtggctgggaagaagtgagggccgtggtttccatggctgcctctgccatgagcagacctcgctgagcatctcaggtggtcaaatagtgagcaggagagcttctggtaggactcttgcggtgaatgatctaatcggagggacttgccaggaacca

SEQ ID NO: 539277 - DNA, 608 bp, Homo sapiens
ctcctcttggaggtctccctgcactggcagacgaggccaggcctccctgacacctacatccgtgcatgatttttcctcttggcgctgctcacagcagtgaccgtgagtttggcactgtgcagttatcgggaactccctgcccacctcccaacatcacaggccatgaaggcaggggccagtcgtgtcttcctcaccaggtcccagcacttagcacacttgctgctacatcgttctgttaatgagaaagaaaagtagcaggactgacrttttgtacaaaaggggaactcttgcctgttttttgtttgctcatttgtgttttaattctgggtctatccacgtggatccagcccagtgggctgcacgagtggccttgggccaggcccagctttctctccacgatgaccttctgggtccctccaaatgtccacacctggaggcacatgagagacacctgtggctgggaagaagtgagggccgtggtttccatggctgcctctgccatgagcagacctcgctgagcatctcaggtggtcaaatagtgagcaggagagcttctggtaggactcttgcggtgaatgatctaatcggagggacttgccaggaaccag

SEQ ID NO: 539278 - DNA, 565 bp, Homo sapiens
ctccctgacacctacatccgtgcatgatttttcctcttggcgctgctcacagcagtgaccgtgagtttggcactgtgcagttatcgggaactccctgcccacctcccaacatcacaggccatgaaggcaggggccagtcgtgtcttcctcaccaggtcccagcacttagcacacttgctgctacatcgttctgttaatgagaaagaaaagtagcaggactgacgttttgtacaaaaggggaactcttgcctgttttttgtttgctcatttgtgttttaattctgggtctatccaygtggatccagcccagtgggctgcacgagtggccttgggccaggcccagctttctctccacgatgaccttctgggtccctccaaatgtccacacctggaggcacatgagagacacctgtggctgggaagaagtgagggccgtggtttccatggctgcctctgccatgagcagacctcgctgagcatctcaggtggtcaaatagtgagcaggagagcttctggtaggactcttgcggtgaatgatctaatcggagggacttgccaggaacca

SEQ ID NO: 539279 - DNA, 537 bp, Homo sapiens
ttttcctcttggcgctgctcacagcagtgaccgtgagtttggcactgtgcagttatcgggaactccctgcccacctcccaacatcacaggccatgaaggcaggggccagtcgtgtcttcctcaccaggtcccagcacttagcacacttgctgctacatcgttctgttaatgagaaagaaaagtagcaggactgacgttttgtacaaaaggggaactcttgcctgttttttgtttgctcatttgtgttttaattctgggtctatccacgtggatccagcccagtgggctgcaygagtggccttgggccaggcccagctttctctccacgatgaccttctgggtccctccaaatgtccacacctggaggcacatgagagacacctgtggctgggaagaagtgagggccgtggtttccatggctgcctctgccatgagcagacctcgctgagcatctcaggtggtcaaatagtgagcaggagagcttctggtaggactcttgcggtgaatgatctaatcggagggacttgccaggaacca

SEQ ID NO: 539280 - DNA, 313 bp, Homo sapiens
ttttttgtttgctcatttgtgttttaattctgggtctatccacgtggatccagcccagtgggctgcacgagtggccttgggccaggcccagctttctctccacgatgaccttctgggtccctccaaatgtccacacctggaggcacatgagagacacctgtggctgggaagaagtgagggccgtggtttccatggctgcctctgccatgagcagacctcgctgagcatctcaggtrgtcaaatagtgagcaggagagcttctggtaggactcttgcggtgaatgatctaatcggagggacttgccaggaacca

SEQ ID NO: 539281 - DNA, 488 bp, Homo sapiens
agaccttgccttctaatctcttcccggctggactggcctcctctcctgtcccctccctccccctccaccatccccgccagggccaggaaggttttgctgcaatgcctgccagatcgtgtcagtgcctgcactgagttccgtctttggagccccacaggtgtgctgagtgaataaataaatgaatacatgactgagctacgaatgaatctacctagtcattcagtcagtctggaagtgaaggggcagaatgtgtgacttcaaaatgctgatcaagacaacaacaaaagaagtgttgcgctrccttcttaccacggcgtaattcacctctgtgaagcaggcacttttgtcatgattgttttattttattgtcattatttgtgtggaggcctggtttacaattattaaacagcatggatctctgggggtgcagccgggtgaatttttgcctgtgtagaccccagattaccacccccgacaccacgaggtgg

SEQ ID NO: 539282 - DNA, 673 bp, Homo sapiens
ctacctagtcattcagtcagtctggaagtgaaggggcagaatgtgtgacttcaaaatgctgatcaagacaacaacaaaagaagtgttgcgctgccttcttaccacggcgtaattcacctctgtgaagcaggcacttttgtcatgattgttttattttattgtcattatttgtgtggaggcctggtttacrattattaaacagcatggatctctgggggtgcagccgggtgaatttttgcctgtgtagaccccagattaccacccccgacaccacgaggtgggctgtttctcgtgcatcctttcagcccctagcccgccccagacgcaatccctgttctggccttcatcaccccaggagttttgtctgctcttgaacttcacataaatggatgtgcccggagagtgcttctctgcctggcatccttccctccatgtgatgtgtgtgagagtcagccaggttgcagtgtgtgtgctcatagttggttcctgtttgttgctgcgtagtattccaccacatggacctgtcactttagaggatgactgtggatttcagagacccttcctgggctgtccatggctgcacacttactaaatgatgatgctgggaaccctgtttttttttgtcaagacttctgcttgttctttaatttcctaccatctctctggacaaagt

SEQ ID NO: 539283 - DNA, 673 bp, Homo sapiens
ctacctagtcattcagtcagtctggaagtgaaggggcagaatgtgtgacttcaaaatgctgatcaagacaacaacaaaagaagtgttgcgctgccttcttaccacggcgtaattcacctctgtgaagcaggcacttttgtcatgattgttttattttattgtcattatttgtgtggaggcctggtttacaattattaaacagcatggatctctgggggtgcagccgggtgaatttttgcctgtgtagaccccagattaccacccccgacaccacgaggtgggctgtttctcgtgcatcctttcagcccctagccygccccagacgcaatccctgttctggccttcatcaccccaggagttttgtctgctcttgaacttcacataaatggatgtgcccggagagtgcttctctgcctggcatccttccctccatgtgatgtgtgtgagagtcagccaggttgcagtgtgtgtgctcatagttggttcctgtttgttgctgcgtagtattccaccacatggacctgtcactttagaggatgactgtggatttcagagacccttcctgggctgtccatggctgcacacttactaaatgatgatgctgggaaccctgtttttttttgtcaagacttctgcttgttctttaatttcctaccatctctctggacaaagt

SEQ ID NO: 539284 - DNA, 449 bp, Homo sapiens
aaatgggacatcacatacatgacacccagctcagtggcyggtacaaaggcactcagcaagttacaatcgtcttttcatctcctctcactgagggcagggattgggtctcattcagtcttgtcatgacaccgtctggcaaagtgctgacacggggcctgtgctccctgtaggcttgttaatttcctgcctttccttgagagtcctctcatccagggacatgtggacagtgctggatggctatggggatgctctgtgaggtgggtggcagtgcagggggctcagaggacagactggattgtgtctagcccggagcactgtggttcgtgctgagctagctgtccagggcccttagatttgttggaactggagtattctttcttttttagagtgggtgattcatactacatgttgatctttggagctttaaaaagcatgaccccagagagagg

SEQ ID NO: 539285 - DNA, 490 bp, Homo sapiens
ttatgattgaggtcatctggccttatggaggagctctgtgtgcttcatgtcacacaagtgctgggagaggcacagagagagaaagagagagagagagggcattacggcatggttcccaccttccagaaacctctgtcctcttgaaataagacagatctggccgggcatggtggctgacattgcaatgtgaggagctgggaggacctctctcaagtgaaacaaccaaaattggtaaaaaaaaagaaaaaaaaaatttgaaagcagctattaaaatctctaataattgccctaagggcatacagcaaatgaaagaaaacatctattcaaactaatctgctaaatctgtggcaactgattcacaatccactccctcttctcctcttccagttgagyacaggacccctacccgccaccccctcaggaggggcccaccaccagcgtttctcatcccctccagctccgtgctgcagactgtgttccgggcaagagc

SEQ ID NO: 539286 - DNA, 656 bp, Homo sapiens
tgtgtccacatgggaaatcgccattcccccaaggttggttcacatctatatccctgggcgatgcacacctttttagttgaaccagggctctgttgtagtccaatgactctgttttgggtaatgttccagcccccacaagctccacctttttggcttctttgcctcaagagtgaaaccaagaaatgacttacagggtgggagggaggagattagaaaatacawtctcccccatgtgagggaagggcggggaagagtttgaagttcatttgaggtgacaaaaacccatcttccccctttctccttccttggctctgttcaaataagcagaagctttaccaaattctcagaactgagcccatttctatttcgtcagtgcctattgttccggaatcagtgcatccttgcaacggagaaggtggcactttctattccccagcagcgagaccatgatgagagaaggaagagagtgagaagaaaaggagagaagcaggaaccaggagaagaaaaaatgaggaagtaaccaggagtggggaggaaggaggcgaagaggctgagagagggacggagccgcgtgcctcggagggaacaccttgccttcttggccttgccagcagcttcatggctgtcccttttgtgcctgggacttcctcttctcc

SEQ ID NO: 539287 - DNA, 656 bp, Homo sapiens
tgtgtccacatgggaaatcgccattcccccaaggttggttcacatctatatccctgggcgatgcacacctttttagttgaaccagggctctgttgtagtccaatgactctgttttgggtaatgttccagcccccacaagctccacctttttggcttctttgcctcaagagtgaaaccaagaaatgacttacagggtgggagggaggagattagaaaatacattctcccccatgtgagggaagggcggggaagagtttgaagttcatttgaggtgacaaaaacccatcttccccctttctccttccttggctctgttcaaataagcagaagctttaccaarttctcagaactgagcccatttctatttcgtcagtgcctattgttccggaatcagtgcatccttgcaacggagaaggtggcactttctattccccagcagcgagaccatgatgagagaaggaagagagtgagaagaaaaggagagaagcaggaaccaggagaagaaaaaatgaggaagtaaccaggagtggggaggaaggaggcgaagaggctgagagagggacggagccgcgtgcctcggagggaacaccttgccttcttggccttgccagcagcttcatggctgtcccttttgtgcctgggacttcctcttctcc

SEQ ID NO: 539288 - DNA, 563 bp, Homo sapiens
agctggaacctacctggttcaagcttgggctattagaataatcaaaaactgttcaggtaatagtgtttaattcctttaattccaagagttaattccataaaaaccaagcaagcaaaaaacccccaaaatctaaattcaactccctattcttcgtgaacacctctcatgtaatgcctaaggagggaatttgtgacttaaatatttatgattttatttcctttggtatttgctttgggaacaaagttacactgtccctgtacaggaaaaccctgattctgtcctagaatatttgctctgccccgagttttctgccatgttgctaacaaacatcggrtgaattcgacttagttcctcagggagttataaatggaagtatgcacaggctgcaaatgctcactgctcagcattcattttcaagctcttctggacacacaaaacacgtttttttttttttctaaaacacaagaaatatatactttatggggtttagattggagctgcctgctattatcttttttaaaaaattataatttaatttaatttacttttgttttctgagacgg

SEQ ID NO: 539289 - DNA, 611 bp, Homo sapiens
ctgtgtgtggctgtgagtgggtccgtgcctgggctgggactctaggcatgcacctcactcaaaaacttttcaatkaaaagattccctcccagaaagtcttaaaacctcggagcaaagccacccctgtcccctcaggcatgttaggttagggcgggttctgagcaactgggctccgttgctccttagtgtgtaagctatagacagttgtccctgtatacagaatgtcatttactctctcttctcttctcgccctctgtcacccccaagtatatttacatgcacagaaaccggagccatgaatcagtgagccagagtggtagcttttaaaattcaggaagcgaattggggcttcattaaagcagtatctttgccgtgtgcctggcctgatgtccactcctcagagataaatcttcagccctactgcccaggaagtccgaccaagctactgacgggaggatttttctcactttgcttccttctcagaataaattatctccttcctcccccacttcctccccatcctcaaacctgccccaactctcctggaatacctcggcctgatcagcaggatttccacccctaagcccatcaagacagcaagaaatgtccag

SEQ ID NO: 539290 - DNA, 567 bp, Homo sapiens
tcagataactggattgattatctagtaaaatagataaaaactgaactggggagaaagtgagtgggtcaatcggctctgtagttggctatgaaaggctagcaacagaatggaaatatcgcagtggctttaccactctcctgggctagctgcttaggttccaaagcctcagtttcttccttcataagtggatattcctgtcctacttattgggcaagaaatgtgargattagatgatacactacatgtgaaagtccctcatacactgataaagctctgtagggatcactgatgatatctgtaaaataggaataaagatatccagttggtaggattgttgcaaagactaaatgagataacctatataatgctcctagcatattgctttacacatggcaataaacaacatgtaacctcccccacaacttctttttttttttccttttcaaaactctgatgtttattacttttaccctcactttgactgttttttgagctataggagaagctagaatttgtagttcggtctttgacctgggttgctccttccatgggttcgtttcctttggt

SEQ ID NO: 539291 - DNA, 608 bp, Homo sapiens
acgcgcgccgcgaaaggcgcggcggtcccgcgggcgcccggcgtgggctagagaggccggccctggcctggctcaggtcgccctcgccccgctttcatcttgccccagtcgccctttacaattcccacaccgaaggcaaagcaagcaaggaaagaagccggcgcctccccaagcggaccctcccttccgcgcagcctcggccactcttccagagcgccccggtgcgtactgcggcgggcgcagggaatcgaattaaacgyctctgggcggttattgtctttctctaattgctccaacaatggcctctattaaaatggagacacccaattaaaggccccgccgggccgctctcggctgccggcaaagctctggcccccggcctgcgacgtgcagaccgcggggccgcggacccggctggtgcggggtactggcgccggcctcgacacctttggcctccacttcctccccagactcacagcgacagcggccgcttcacaccgtttttattgaccgatcgcagcccagcaagattgatcgagctggaatgggaagggacttctcctcccccaggcccagctcgccagggcctcgggccgtgctgcagtttc

SEQ ID NO: 539292 - DNA, 494 bp, Homo sapiens
ggagatcagtctttcctacggtaattttgagatgtctatgacacatccacatgcagatatcaaataggtaaccaggtatttgagagtggcactcagatgagaattctacaataaaaacataaattggaagccactggtataaagatgggaaaggatgagatgacaccagaagagaatagagaggtgaaaagggtctaggactgagcaccaaygaacaaaagttcatagtgtatgactcttagttcataaatctaaggtagtcatcaatttaaagcccctgtctgaatcaggatggtgagaaattcaatttcatacgtttgatatttcctcctctccctactttctcagctatttaaaggtccctaggttttacctggtaccaaagcaccaaggagactactctgatcgttgatctgccactaaaccacccctgcctcagtaagcatggttttgccaaccctagaagcttgctatatttaaccttttatggagcc

SEQ ID NO: 539293 - DNA, 627 bp, Homo sapiens
ttcagcatgcagtaatagcttgtcctacattcttgtggccatcctaaatagataaggccatgttaatgtcttaagaaacaccagtgtgtgtggaatgaacacaggacattggaggatttgaattctggctctgccatgtgctagtttgagtgatctagaacaagctagtttaccacctctctttaagttttggtttcccagtcagtaaaatagaaagtgatgaaacctaacttgtaggtataaggaagataagaaatattgtatttgaatgcctagtacagtgtcagggttgaataaagtactacttcaactttttccctagtaattattgtcctcatgaccaaacctgcctcctctcaaaggcagtggcsacaacagcacatccaacttttatttaggaagacatctttgtcttttttcagagtgtgaggagcacaacagcctcaaggaaatggtcctgatggaggggctgtgctctgagcagggacgccggggctcaacactggctagttcctctgagaggaagcccttggagaaccagctagggaagcaggaagagttccgggtatatggaaagtcagaaaacatcttggtcctacgaaaggacatcgaagatctgaaggccca

SEQ ID NO: 539294 - DNA, 444 bp, Homo sapiens
aggttaaaatgatttacctctagaatacagagatgaactacgtgaaactgtaaaaaaatgattgaatatctccatttttatatggttcaacctaatagaatgtaagagggctcatatttgaaccgaggccaatttagttcaaaagcctayactttgcattgtactgtactataccctaaaattactagaatagcactggattctttattttcccttgggggtgctgtagtttcacatagatgtagatttatattcctgttccttagaagactagaacagcgatgcttagagaaagagcaaaccaaggtatggtatatcttgagttagagtaggagttgagttgagtgggagcctaagtttagagactaaagctaggagttatatgatggacccgcactgattcgtgtatctgctgctatttatatctgccacctgtgtgcattt

SEQ ID NO: 539295 - DNA, 444 bp, Homo sapiens
aggttaaaatgatttacctctagaatacagagatgaactacgtgaaactgtaaaaaaatgattgaatatctccatttttatatggttcaacctaatagaatgtaagagggctcatatttgaaccgaggccaatttagttcaaaagcctacactttgcattgtactgtactataccctaaaattactagaatagcactggattctttrttttcccttgggggtgctgtagtttcacatagatgtagatttatattcctgttccttagaagactagaacagcgatgcttagagaaagagcaaaccaaggtatggtatatcttgagttagagtaggagttgagttgagtgggagcctaagtttagagactaaagctaggagttatatgatggacccgcactgattcgtgtatctgctgctatttatatctgccacctgtgtgcattt

SEQ ID NO: 539296 - DNA, 159 bp, Homo sapiens
ttacctacggcaaaaaatacgagaagggagaggtatttgttatcttmtcacccagcatgcaaaagatacagtaaaatcttttgaggatctcctaaggagcaatgacattgactactacctgggacagagcttccgggagcaactcgcccagggaagcca

SEQ ID NO: 539297 - DNA, 596 bp, Homo sapiens
ctgggcaagggcctcatgattaatggaacaaaagacattataaatgttttaccctgatttagggcagaggaagtcatcatggtgaccggcaggtcagggacagtggggtcacttctctagagacacaagctgaggtatcccagaataactgttctggatgcacacatgaaatgctcactactctgtctccagataggctcctgcatttgtaatgcgggaagtgggaccagcctaatttcttatcgtctctttctaaatttggtttacagaggatcataaaagtgagaaagatcaagctggacttgagccactggccctcaggtaattcagaggagaatctgggaaagagattgggaccgaggcccaaagggtcaagggtggcggcaactccacaaatcaaggggaataaagcaaagtgctgaatgtattgaattcaggcattcattgaacacctcactgttgtttttaactaaattctttcttcccttttggttgaatyatattggcacattaattctccaggcttagtaacctagaaacagtctgagctaaaagtgaactaactaggtttcaagagtcttctgccccactaaggg

SEQ ID NO: 539298 - DNA, 606 bp, Homo sapiens
ggcatttccatgtgtctagggcttaactattctcaacctgcttctgttaaaatggtgcaaaagtaattgcaccaacataatacataacttctctcatggatcctcacaacaacgtgaacacatggtcatttttacccggtgggaaaagacagcgagtgaagcccggcatggggctcaagcctgtcataccaactacttgggaggctgaggtgggagtattgcttgaggccaggagttcaagactagcctgggcaacatagcaagattcccccatctcaaaaatgaaagaaagagagagaaaggaaggaagcaaggaaggcaggaggaagaaaggaaggacaaaaccagcaagaaagagtctgagggggaaaggatgaggaaactccttccctcagttccctaagcaccatgctgcacacacctgcaggcacctcactgcatcagaacccagagtgcaggaaggagccattcatcttcctgggaatgagtcttccagatgcaacactgtagcaacagtaackattatctctggcacaacgttgcttacaaaacagagggccctcagaaacttcaaggccagctattgaactctgtcctgatgcaggc

SEQ ID NO: 539299 - DNA, 650 bp, Homo sapiens
tgttccacttctatgaaagcatatgcccgggtaaagactacatacataaatgttcacagcagtatttttttgtgacagcctcaaactagaaacgattcaaatgtccatcaatagttgagytgataaactatggtttatggaatatcactcagcaataaaacagaatgaagaattgatacgttatacaacgtggttggatctcaaaataattatgcttagtgagagaagccagacgaaaacctgtacatattgtatgattctatttattttttcccaaccatttacacctgcatctatttatataaaattttaggaaatgcaaacaaatgtgtagtgtgacagcagataactggttgtttgaggatagggggctgatgagggttggaagggtgggagctcaaagaagcaggaagaaacttttgcaggtgatggatatgtacacattaaatagaaactggttattgcatgtcaattatacttcaataaaactgttaaaaatagtcatcctactaggtttatagtggtatcttactgtgattttaatttgcattcctctagtgactaatgatgttgaaatattttcttgcacttattagttatccatatatcttctttgatgcaatgcctgttcagatcttttgccattaaaa

SEQ ID NO: 539300 - DNA, 493 bp, Homo sapiens
tgggctctcttgagcgggataagcgagatgctcctcaccagtccagactctatttccaaaaccctctcctgcccatcagctcacttgagctggacaacagttttcttaggcatttgccccattttacagcagggcaaactgaggctcagcgaggagtaaggtttcacagctagaaactggtagagctaggattcgaacccagggttttctgagctaaagccctcgatccttccattacatcctgctctgcgcagcatctcaggtggagaactcaggaagtggggaggtgtgtggataagctggtgaaaargcccaaggccaggcctagggctggtccctcctctgcccagaggaaggacacgggggaaggacactggggctggggagcagggaagatgggggtggtagcaaccaggcttcgggggattttcttagaggcttctgcataaccctgacctggagggtggttcagggtttcctttagagacccaag

SEQ ID NO: 539301 - DNA, 607 bp, Homo sapiens
tttttaaaaaattaattttaacaagtttacctcttgctttttactgaatgtatcttgcagatattttcatatcaatattaaaaaccctttctcattttaaaaaaccaactttggctttaaatgggagaaaagaaaattcaccttttgttgatgtaggataaaggaaaataggatcatttttctcttttgaaagtcttttaaggaggtggattatgagtgcgggctccataccrtgtcttaggcaccccaactgtcactgcgtgccttggagggaagaggggacatgccagtgtccttcttcctgttctgtaagttcccttttcctagcttcagtccaggttgtgccagatctttgagggaagtcagtggttcttaaagaggaaagagtgcctttcagtctccccaggaggttttgaaagcacacaaaggcagtttgactcccagctctgtctggaaggaggccgcagggctcatggcctgccccctggcatctatcttctacctggaaggaccattaagtgcttaagcaccttggctgtaactccagataaacaagatgggtccctcttttagcaaggcatgatttcttcaggctttccatttattc

SEQ ID NO: 539302 - DNA, 502 bp, Homo sapiens
gtttcacaataactgccttgcttcctttcagtctccagaaaattytctttatctccaaaccatttttatcttgtttcttacttggtcccttacctttctcttgtaaactatttcttttagcatgaatgtggtgttacctaaccttgcaaagcctcccttcattagaaactttttttttttttaactctcacaaccaccatctagtgtccagttggatttttttgttctattcaaactagtctgttcttgggtcccctttctaccattttttttgggtcatgaattatgttttatgctgtattcaatgtctaaaatactgacattttcacctcattagtgtcttttcatctcattcagaaatctgtaatattctttgaaaaaataatgtatacttggttggtaacaatgatgtatgactgttgacatataaaattccacctcaagggaagctttagctcctttaatgaaaggatgattattataatgactatatgaatcttgc

SEQ ID NO: 539303 - DNA, 455 bp, Homo sapiens
gctgtgcatagcaacgtgctctctggttgtataacagagaatgagatggaacagttcacaagtggtcagtgagcaaggccaagagcaagttacacaccctgtctattggcaaatacaaagtcygaatagacttttcatgatcccagtgtgaataaacagaagaagaccttggacaaaaggaggaaaactagaaattttgagaaaatggagaaagtatatacatgttaaaattatttactataagaaccaaaagaatatttcagaaaagcagttaccatcctcaataggacacaaaagacctctatgaatcagaaatagaaatctataaaggaagaaaaagctgagatataagaagcaaactaaatcagataaagtaggatgacaaaaaaactaaaagactaactatggctgtatgatctatattggaaatatttaatcttcctaagcctcttttt

SEQ ID NO: 539304 - DNA, 455 bp, Homo sapiens
gctgtgcatagcaacgtgctctctggttgtataacagagaatgagatggaacagttcacaagtggtcagtgagcaaggccaagagcaagttacacaccctgtctattggcaaatacaaagtccgaatagacttytcatgatcccagtgtgaataaacagaagaagaccttggacaaaaggaggaaaactagaaattttgagaaaatggagaaagtatatacatgttaaaattatttactataagaaccaaaagaatatttcagaaaagcagttaccatcctcaataggacacaaaagacctctatgaatcagaaatagaaatctataaaggaagaaaaagctgagatataagaagcaaactaaatcagataaagtaggatgacaaaaaaactaaaagactaactatggctgtatgatctatattggaaatatttaatcttcctaagcctcttttt

SEQ ID NO: 539305 - DNA, 585 bp, Homo sapiens
agaatatacattttcttcaagaacaccagcagaaaatacatcttcttcaagaacacacaaaaccttctgcagaatagattgtatgttagacctttaggtagactaagaaaaaaagagaagactcaaatgagtaaaatcataaataaaagaagagacattacaactgatatcataaaaatacaaagaatcaatcataagggactactatgaacaactatatgccaacaaatttaataacctataaaaaagtggataaatttcaagaaacatagaaccaaccaagactaaataatggagaaatagatcatctgaacaaaccaataatgagtaaggagattgaatcaataatcaaaaatctttcaaagaaaaaagtccaggaattttactaaacatttaaagaataactaatakcaatccttctcaaaatctttttgaagaatgaatttttccaaattaattttataaggccagcattgctctgataccaaagctaggcaaggacattacaagaaaagaaaatcataggccaacagccctgatgaacatagacataaaaatcatcaataaaataatggcaaactgaat

SEQ ID NO: 539306 - DNA, 210 bp, Homo sapiens
tgaatggcatacattcaggttacagttgatgccaagatggagctttaagcttggaaaagtgtaacttttggggaaggaaggaaagattgtggaaagaatgaaaaaggwggaggagagagaaaagaaaagaaaacatattatgctttctgtgctggatgcatacattttctcatttaaccttcagcacacccagtgaggtgagtattgtta

SEQ ID NO: 539307 - DNA, 554 bp, Homo sapiens
taactttacgagtcttttatttatttatttatttttacttttattttttattgagataagatctcactgtgtcacccaggctggagtacagtggcagtcttggctcactgcagcctyaaattcccaggctcaggtgatcctcccacctcagcatcctgagaagctggaaccacaggtgtgtgccaccatgcctggctaattattgtattttttgtagagtttttccatgttgtccaggctggtttcaaactcctaggctcaagcgattcacccgttttggcctcccaaagtgctggaattgagccaccacacctgtgtgtcaagctataattttaggagtctttgtaaagagatttttcatttaatgtttggagtaactccatgacattggaaatttcatagaaagaaatcagagctcaggaatgtttctttttggtttaggtttggatgcctatggcagaaaaacctaaagtaataatgactaaaataggatagaactatatttccctttcatatgaaagaagtttgtcaatagacaattcagagcttataca

SEQ ID NO: 539308 - DNA, 554 bp, Homo sapiens
taactttacgagtcttttatttatttatttatttttacttttattttttattgagataagatctcactgtgtcacccaggctggagtacagtggcagtcttggctcactgcagccttaaattcccaggctcaggtgatcctcccacctcagcatcctgagaagctggaaccacaggtgtgtgccaccatgcctggctaattattgtattttttgtagagtttttccatgttgtccaggctggtttcaaactcctaggctcaagcgattcacccgytttggcctcccaaagtgctggaattgagccaccacacctgtgtgtcaagctataattttaggagtctttgtaaagagatttttcatttaatgtttggagtaactccatgacattggaaatttcatagaaagaaatcagagctcaggaatgtttctttttggtttaggtttggatgcctatggcagaaaaacctaaagtaataatgactaaaataggatagaactatatttccctttcatatgaaagaagtttgtcaatagacaattcagagcttataca

SEQ ID NO: 539309 - DNA, 554 bp, Homo sapiens
taactttacgagtcttttatttatttatttatttttacttttattttttattgagataagatctcactgtgtcacccaggctggagtacagtggcagtcttggctcactgcagccttaaattcccaggctcaggtgatcctcccacctcagcatcctgagaagctggaaccacaggtgtgtgccaccatgcctggctaattattgtattttttgtagagtttttccatgttgtccaggctggtttcaaactcctaggctcaagcgattcacccgttttggcctcccaaagtgctggaattgagccaccacacctgtgtgtcaagctataattttaggagtctttgtaaagagatttttcatttaaygtttggagtaactccatgacattggaaatttcatagaaagaaatcagagctcaggaatgtttctttttggtttaggtttggatgcctatggcagaaaaacctaaagtaataatgactaaaataggatagaactatatttccctttcatatgaaagaagtttgtcaatagacaattcagagcttataca

SEQ ID NO: 539310 - DNA, 636 bp, Homo sapiens
taatacccagcccagggctgagaatgaagctgtatcataaatacaatgtgttatacaaatggtagttcatttcactacaaaatacctgctcatgcccaacttcaccttaggcatataattgatcaggagtgagttgttgagagcacttctgagttttaaataacatggagaggggctgtttattgaagggataactgtggcagatgcagcaggaaggctctaaggggaaagcgtctcccctaaatttcctattatgcaacttagtgtccagaacactgtggtggttgagaatcagggttcagcagaatatgcaaattgcctttcctttcatcaggacacaaagaaagaaatgagcccccaaaatatctctcagaagtgacatgggtttatcatttccattatccttgacacttttcaggggttaaatgtctctggctaggcgcatgttattatttgagtattactagccctttaagagcctcgacacttctggaaagcagcccgtggagctgcttcagcaccgagtgggtctgagctacaagagggtgaccgctaatcctaattctaaccccaacctgaatttatgaggtcctgctggtacgcagarggaggactggagggaccagtcaggttggc

SEQ ID NO: 539311 - DNA, 589 bp, Homo sapiens
caaaaggctaacccttctctgagtagaaggaaattctttctgcctaattgcctttgaactggaacatcagcttttttcctgcctttggtcttgaactgaaacatcagctcttccttggtctcaagcctgttggctttcagatatgaacaaacaccatcagctttcctgcttctcaggcctttggacacagactggaactaaaccatagtctttcctggttctctagcttgcagactcaccgtgcagatcttgggacttgcccatctccataattgcatgagccagtttcatcccattccttcaagttctctggagaacmctaacacatttccaacgtctttttccactccccataatttactctgtactctagttgggctggacccagaatgctgcttggcctgccatgctcttatgtgtcttcctgcctttgcacaaacatttcctctgcccccaaagccctcctctaccctaatcttcagggtcaactcctgctcacctgttagaactcaatttttgtgtcacttaactcaggatcttatccttttgagtttgggccttctcccatgttagccaatgctcacatcat

SEQ ID NO: 539312 - DNA, 582 bp, Homo sapiens
ctaacccttctctgagtagaaggaaattctttctgcctaattgcctttgaactggaacatcagcttttttcctgcctttggtcttgaactgaaacatcagctcttccttggtctcaagcctgttggctttcagatatgaacaaacaccatcagctttcctgcttctcaggcctttggacacagactggaactaaaccatagtctttcctggttctctagcttgcagactcaccgtgcagatcttgggacttgcccatctccataattgcatgagccagtttcatcccattccttcaagttctctggagaacactaacacatttccaacgtctttttccactccccataatttactctgtactctagttgggctggacccagaatgctgcttggcctgccatgctcttatgtgtcttcctgcctttgcrcaaacatttcctctgcccccaaagccctcctctaccctaatcttcagggtcaactcctgctcacctgttagaactcaatttttgtgtcacttaactcaggatcttatccttttgagtttgggccttctcccatgttagccaatgctcacatcat

SEQ ID NO: 539313 - DNA, 477 bp, Homo sapiens
agtgctcagtatgtttctaaatgakagctgtccttgatctcctttggtgcttgcctcaaattggaatctttgcccctgcgtctttacctaaaactgtctgatgtatccatcagccaggccctgagaagccccacttgttccagattcttcagatcctcctggcagcagcaggccagtccaaatgaacattccactctgtgactttgccaagaaagtggaagctccttgaggcaggatctccttctggtcatgtgcaccactgtatccccatcccctgagaggtagtggtgcccaatgatatagtagggactccagaaaatatttgtggactgactatccattaaaaagaaagagagagagagagaaagagagagagagagaaagtaacgagccaaaccatcttgcatgcaatctagcatgcaaaaagagtcataggtcaacaggctcgctcttctaataggaagaaggaagcaatct

SEQ ID NO: 539314 - DNA, 477 bp, Homo sapiens
agtgctcagtatgtttctaaatgatagctgtccttgatctcctttggtgcttgcctcaaattggaatctttgcccctgcgtctttacctaaaactgtctgatgtatccatcagccaggccctgagragccccacttgttccagattcttcagatcctcctggcagcagcaggccagtccaaatgaacattccactctgtgactttgccaagaaagtggaagctccttgaggcaggatctccttctggtcatgtgcaccactgtatccccatcccctgagaggtagtggtgcccaatgatatagtagggactccagaaaatatttgtggactgactatccattaaaaagaaagagagagagagagaaagagagagagagagaaagtaacgagccaaaccatcttgcatgcaatctagcatgcaaaaagagtcataggtcaacaggctcgctcttctaataggaagaaggaagcaatct

SEQ ID NO: 539315 - DNA, 645 bp, Homo sapiens
tggctcaattccagggactagctctccctcagggagcactgaaaatcctagtataatcctaagatatgagtgttgactttaaaattctgatttaactgacagatgtatgaaatggcacatagaaaactccccattggggataatgaaaatgctagagtaacagttacgttataggagaatggcaatgatataatctcactcgttttctcrttttatgtgatccattttctgatgctgaaatttatttttgtgaaacataagattgtactcacatttctatatgcctgtttttaaaatgtcaaaattacacagacttcagggtctgtcttttgggaaaaactgacatataaataaaccttacttctgtgcaaaaaaaacaaacaaaaaaaaaaaaaacagacatttctttcaatcataaatggcaagtgttctacctttgaactatggatatatcaaccttaaatcaaaacaatttttgaaaagaaaaacacagtgatgagaaaaatcataatggttaaacatgtttatgtaaataattagctccttttattttgaaataggtacattgtctcctaacttctgattcgctcagtgccacattaataaaaggtcacaatgttttaaaatgctaagattttagcatta

SEQ ID NO: 539316 - DNA, 559 bp, Homo sapiens
gcacttctgccctcctgaatttttgacaactgatctgaggctctattctaagtctaataagggaaatttcctggtctttcctggtagagactgagcagggagaagtgaaagggggaaaagtagcaaagagaaagggaaaaactgggtcattcgacaatcacaatgaacttgaagatgttttagtkaatgtggatgcaaaggatgctgggctgaggatgactgatcagagctcaggcttgcaagacgtaaggtaatactggtcataatttatggcccagaaatccaaggcaggtaaatagaagaacagatggtaggacaaggaccaaagcaggaacctataaaataatcataattctagcttcattactggagctgatagccaaatgcagtcgtgtccttggtgattgtgggctaggagttgagcaatctgtaagtggaggctaatgacccaggaagccaaggagtgctgcagttgatgtggtgctgttcacttcagcaatagcaaaatcgctttcctgcaagccatgttgtactgataatacttgtgagtgattccatc

SEQ ID NO: 539317 - DNA, 624 bp, Homo sapiens
tctgacattggcaaaattacttcaattctctaagcctcaacttctttatcccgaaaatgagaatgataatgacaactctcagtgttataagaaataagtgtaagaatgtatgtagaatacatagcatatggcttagtatattgtgttcaataaaggataatgattcttattcatgaatgacaggtaaagaagcaataaagcaccagagagtgatgtcatttttcctgtttgaaattaagaattttgcttttcttcggcaaaataagtgttttgacttttctttatttgtttgaaaataaagactttgcatttctattgcttcgtcacttaggctgaaagataacttcaccatcaaattgtttggtttggtttttcaagagagacttcatcttgaacagagctgcttaattacactgccaacttaaaaaagcaagttgtttstaagtttggtggatttattggcattgttttttcattcagatatttctcattgccaaatctcactctgtccaagaaaaaaaaaattcagcacaccatactctatgtaaccttacttacattacttaatagtagctgtaaaatagaatttttttttgaagacctacgtcttcagccaggaaatat

SEQ ID NO: 539318 - DNA, 669 bp, Homo sapiens
  misc_feature (1)...(669): n = A,T,C or G
tggtgaggatactcaacaagctctgtggctaagttctcatggcaaggaaattgcattcccagccaagttagtgctggccagcaacaggcactaacttggctgggaatgcaagacagcttggaaataaatcccccatactnattgatgccttgagatgactgcagcttaatgagagatcctgaaccagaaccaaccaacaaagccaattctggattcctgacctacagaaacagtgtgggacaataaatatgtattgtccttttaagctgctaagtttttagttaatttgttatatagcaacagatagctaaaataaggccakaatctggaaatactagttctgcactggttttcattactttgggagtactcaactgtgctgtgttcttagaactaacaaatagaagtaagattcatgatgaattctgtcttctaagatccattctgtgaaactctttcaggtgaaatttcctaataaggatgtacattgagtattaaaaaattaaatgcatttttcttatagttcataatgaaactgctctatataaatcccaatctatttgataacaaatagcacaagtttccaataacctatatttctttgtctccctttgtcatcccagctcaaatacagcacttcaataacaatttgagtgacctaggcttgca

SEQ ID NO: 539319 - DNA, 388 bp, Homo sapiens
atttttgcctcatgcctttctgggatactctagctcattctcagaatgttgcgtttctggcttttaaaaacaaagaagatactctagaaatattggttcccttgtttttacatctcacatggccatatttttaaaataaagtgtaatccaaaaagcactcaaatacccaaatgaagtagctccaaattccctgtccagtaggagctccacatgatgttaagagtagtagtggcactytctaaccattagggacaatctaagactactactcttccctttttcatcaaaaagacaagagcaaaatggagccatctaagacacaaaaaggaagttactggattcagaaaatcaaggatatatgaattggagggtctttctttaggcttag

SEQ ID NO: 539320 - DNA, 519 bp, Homo sapiens
atggcctggctgactcacagcttacaaggcatctggtcccaattctcattctttgcctcaagatggaaatattggatagtagtggtgccaaagatgtccagaatttagcccaaggtagactcatgcaggctgttgtgctaggtctttggaaattagccccaattactagtcagtcccctttgtttgaggcttgtgctaccctcttgtcctgcaattgctatgacccaagactaccctcaccctcaagagagatatttctctcacttgggatcttggtggatgaccattactgactgggcatccagctcctgctgctcttcctctggagggcctaaaaggcttcatttcccagaaacctgattttgtgtctkgggccagatctttagggggctctccatttgcctgatatacattaactcctttgtattaaggctctgctgtccctttgtgaaactagactccttcacctgctgattgcagctgatgggtttgccctttctaactttgtaaccaagacat

SEQ ID NO: 539321 - DNA, 372 bp, Homo sapiens
aatgttttactcacagaagttgtgacatttcaacaatattaggtcttcagttcataatattttttatctggtacaattagtggtttattattagactggataacggggtgttcctattaccattaagttccttacatatatgcatacccagagccaagggtaaaaggtctgggcttgttataatttatcacccatctcaaataattggctatcatcaagaattagattcatgcaaggaatcacttaaagattcatttgtctgtcacattaaaaacactaacctatctttttcttcttccttagcagatttttcttcgaggagcacaagggtgggtctggtggaacycttcaggagctagggtgtcggaggtg

SEQ ID NO: 539322 - DNA, 613 bp, Homo sapiens
gctgaggccttagttgtgaccaaatagaagcccaacttcttcctctgcccagtcctgcttccttccctcccaatttgggtgttaatcaagagagcacttcctcataacttcctgtaccctaatttccatctctccgccygcttgccgggacctgacctgcaacagtcagtggacataaaaagataccttgccggccaggggtggtggctcacgcccataatcccagcactttgggaggctgaggtgggcagatcacgaggtcaggagttcgagaccagcctggccaacatagtgaaatcccatctctactaaaaatacaaaaattagccgggtgtggtggcacagtcctcttgtcccatctactcgggaggctgaggcaggagaatcgcttgaacccgggaggcggaggttgtggtgagccgagatcgtgccactgcactccagcctgggcaatagagccagactccgtttcaaaaagaaaaaaaaaaagtactttgccccagtcctaataaaatcaaaggttctattttgcttattagattggcaacattttcaaaggctgataatatccagggttagtgagggtgtgagtaaatgaccattttcatacatg

SEQ ID NO: 539323 - DNA, 650 bp, Homo sapiens
ggaagcagttctaactagaaagctcttatagattcttagttacatttttagacagtgtaatttgattgtacataaaatcattgtgaatatattcttattatttaactatttatataccataaataacaaacacaactacttgatttctcttcctttggctatgcaaacaataaatctatattaaatattgcctacaaaatatctaggaggtaaaataaaatattttgaaagctttaatttttgtaaaaaaacatttgtacatgattaggtaggaacatctcctgaatttttcaccaattcttgtaagttgaataaacacataggttcaaagggtgaatatttaaaattaacacaagaaaaaagcgttgtaaaaccaaacccyaaaagtacattttcactttgaaacttatctaaaaacgacaggatattgttattcagttgtataaaaaatgatctatgagtatttaatacataatatttattccagttttactaagtagctgtgttagtaaaacttcatgcttccagaaaaatatttataattcagaattacacaaaattattctgatcattttaatccttggatgaggagtttttttttattatgttttacttagttttctgtcataaccaagcgtaactcattaaat

SEQ ID NO: 539324 - DNA, 650 bp, Homo sapiens
ggaagcagttctaactagaaagctcttatagattcttagttacatttttagacagtgtaatttgattgtacataaaatcattgtgaatatattcttattatttaactatttatataccataaataacaaacacaactacttgatttctcttcctttggctatgcaaacaataaatctatattaaatattgcctacaaaatatctaggaggtaaaataaaatattttgaaagctttaatttttgtaaaaaaacatttgtacatgattaggtaggaacatctcctgaatttttcaccaattcttgtaagttgaataaacacataggttcaaagggtgaatatttaaaattaacacaagaaaaaagcgttgtaaaaccaaaccctaaaagtacattttcactttgaaacttatctaaaaacgacaggatattgttattcagttgtataaaaaatgatctatgagtatttaatacataatatttattccagttttactaagtagctgtgttagtaaaacttcatgcttccagaaaaatatytataattcagaattacacaaaattattctgatcattttaatccttggatgaggagtttttttttattatgttttacttagttttctgtcataaccaagcgtaactcattaaat

SEQ ID NO: 539325 - DNA, 624 bp, Homo sapiens
cagacccagaatatcccaagctagggcatgctgggatttaagctactgataggcctggcagccaggagaatatctgatggccagcactgttacctggaggacaagaagcctctgcaatgtcattctgtaaaaggcaggtaatagctcttaatagggtgggtggtctaccctcaagctcagagtttaggaatgtctgcagaactgaaatccttaagaatattcatccaggcatcccacaccattttttttccaggattttctctrctaggaatctaaatttagtgtaagctttggctgagcatttaaatctctggagctttgacactctattaatcttaaactttctccacaaatgtactcactcttcttctgcaagaggtaagtgactttttaaagctactaaagaagctggctctctggtactaaaacacggtctttaactgttaacctccagaatttctcattaattcactgtagggtgtcaatacatcttggtaatgagcagccaacccactgtccttgtaggtattggctctccatatgtttcaaatgcctgaatcattgcattatcaagggcatctctttctatcaagccatttgctcaaagcagtgaaatcttcagca

SEQ ID NO: 539326 - DNA, 588 bp, Homo sapiens
tgttttcctcattcagtactaaatgtttaagaagaattgctaagctatgaattacattctctggcatctctatgaagttctctggaatgaaaatatcaatttagtgcagcagttatgcaatttctatgcgttgagcataaagtagcagttttcattagcaggttttcacagtcaaaacttatttctctaccaacatttctaattcaaaatgcaagctgcttgtttgcaaacagagaaattggaacttgtcaattatgttaatcatcacttataaaatttcttgagtgtctcataatctacagaacaattgaaaattcacttttttatgccttgtctacagctatttagttatctgcctatctatctcaatatttctctcattttgattaaataatgaaggaattttttttcaagccatgtttttcagtcattaatggtgttattaagggatttakctgggttttgttttgttttttgtccctgaatcaaagtactttaagagctccatgaatgaatagaagtgatagaataagctacagaagcttagcttgcccttactattctgtgtaatgtctgggctagaaattt

SEQ ID NO: 539327 - DNA, 588 bp, Homo sapiens
tgttttcctcattcagtactaaatgtttaagaagaattgctaagctatgaattacattctctggcatctctatgaagttctctggaatgaaaatatcaatttagtgcagcagttatgcaatttctatgcgttgagcataaagtagcagttttcattagcaggttttcacagtcaaaacttatttctctaccaacatttctaattcaaaatgcaagctgcttgtttgcaaacagagaaattggaacttgtcaattatgttaatcatcacttataaaatttcttgagtgtctcataatctacagaacaattgaaaattcacttttttatgccttgtctacagctatttagttatctgcctatctatctcaatatttctctcattttgattaaataatgaaggaattttttttcaagccatgtttttcagtcattaatggtgttattaagggatttagctgggttttgttttgttttttgtccctgaatcaaagtactttaagagctccatgaatgaatagaagtgayagaataagctacagaagcttagcttgcccttactattctgtgtaatgtctgggctagaaattt

SEQ ID NO: 539328 - DNA, 642 bp, Homo sapiens
taacctcttccaaatcaacaaggaaagtccatttccacctccactggaatcccttggcattttaattatactgttcatatagctgttcatgacgtggctgactttgtcatggtccccatgagagctccattcacgcaggcatcagcataacataattcctgggcctgttgtccatttttgtgcctttcccatttttgttaaaagtttaattttaaaagcctcatcattatttccaattgctgtttctccattttctcctcctaaacaacatacaactcttcttgacaaagttatttactaacattactataagtaactgatactattggagttgtccaaaatgtaaacaatacataagtggtacccataagatattacaaaagaaaaatttctgactgaaagtaactgtgtatgctaagtcaacagaattttagacatcrtcaactttaattacattagctgccccaaacaatcacaactcagattaaattagatggtctaacaacatgaacagttttccattcttcctattctaaaaggcattttaaaatacagaaattttatttcaagtgttttctgtcctggagattaatgtttcaacagctaattcattcagtatcacttaacatattagtaaaagaa

SEQ ID NO: 539329 - DNA, 625 bp, Homo sapiens
ttcctggagggtcagcgccccagggagggcacacaaacttcctaccttttctcccatactttgccctacatctttcttcattctttgtaatatcctttataataaaccagtaaatgtgaaaaagaaagaaagaaagaaattttacataaaaaawttgatttttctaagacaaaaagggcaaacacacacacacaaaagatcttcagcctcattagtagtaaagaaaagtaatttaaccaccctcccaaaaaattccatactatggctacatgcatagatttgacaaaaatttagaattctgagaattactaatgttggtaagaatttagaacaaaatgtggctcttactcttattcaaagtataaaattaagctccatgttggaaaggatgtgtcattgtcactaaaactacatatcattgggttatacttaaagacatgtcctataaaatctctgcaatgtctaaactaacagatatgtgtaagaatattcttagcagcgtagttcttaaaagaaaaaaataactagaaactattcaagtgtctatgaacaggtaagttaaataaaccgttgtttacttaaacaaaaaaaaattagacagcagtgaaaattaatgtaggaaatg

SEQ ID NO: 539330 - DNA, 382 bp, Homo sapiens
gcttcacctatcaatatatcttctataaagacattaaaatcatagtatatgttagctgacagtctacaaatacagagttttatttcaaatattattgtttataaagtatatttttcctaaaatgcattaagcttcttctggattatttcattcacaaattaggaaagcaaaagcaaaatcaaaatcaaaagatgtcataatgttttagaatacagaatataaacacatatttctaccamgtcatcatgataaaattgaaatactaagtataccacacaaatttattatacaatgatattttgtattctattccacaataatattttgaactgcataggtgggaggagagtttttttagaactagatatatagaattgacaga

SEQ ID NO: 539331 - DNA, 597 bp, Homo sapiens
caggaccatggctaaagtgtgtggggcataaaactggagaggagggaactacttagaaaagggacaccagtagccactccacaatgtatacatatttcaaaacaccatgatacataccataatatatacaacttttcattaattaaaaaagtaaaaactgaaaactatggggaatccattgaaaaaagagaaaagaaaaggggcacaaaaatattcgagatctccttgagtctttggctgagcactatacttcatgtgcacaaagcaagactgaaagctgcagctactggaggctctaagctaaaaggaggcttcagaggtcatacagttctgagagatgctggagttctaaccagcaagatcagaatgagctcactgaatgargtcctaaatggtcaatacctcagggtagggctatgttagccctagactaaaggatactctagatgtgccttaacaaagctgaagatcaatccttggccaactgatgcttatctaccagtaaataaactgccttccacaacaaaaattgatactttttgaaggaagaaaactaaattcattttctcaacagtgtaactaactactgttacatat

SEQ ID NO: 539332 - DNA, 638 bp, Homo sapiens
cctttacctggaatgccatttctctattttttccccacatgatgagcttctcgtcatccttccaggcccagcctgcctttcctggctcccttcccatgccatcattctgtctcatcagtttcagaatcgactgctctttcatctgtgtgtccatggcactgtgcacatgcctctctcaggttgcttattccartgctttgtggaccatctccccactgaaccatgagccattcaagggcaggagccatatctgctccatctttgcaccccaactcctaggaaagtccctggcaccttctaggagctgagttaattaatggagtgtgcgctccagttagtactgccagattcccacatgttatcagaggaatacaaacatgcaagatctggctaagtgctccagtggggcaggcagcagggctggggcttctaaagtcagttgacttttggtctcttctggaaaccaaacattaggaagcttcctggaatggaggggtaggctgcaggacaatcttacccagacacctggaagcccaacagtgtggtttgcctcccaaagatgcccagaaaggcaggacctcagcatcctgcttcactctggctcatacacttttatacaaaatacaatgcaatgaatg

SEQ ID NO: 539333 - DNA, 488 bp, Homo sapiens
acgtctccacagtcaggggagggtcccttcattggcagcatcctgccactaagaaaactcctggagccgcctagatgccgcactgctccttggtccctccaaagggactatggggagctatgcasaaagaaaaccacataggcaggaatgtcgaaagactgcgggctctgcctggaggaactgaagtccttgtggcccgaagtttctaagcagaggctgggctgccgtttggcggggatttccccttcctgagcttacatttttttcaaggaccaggaagaaggggaccggagatgagcatggcaaaagcacgtgaggccctgattgcggtcagatagcaccctgtgttccttgctcctccaccgtgagtgtaaggacacaggtccaggcccttcccaacgctgtgctggggcaggagcccgcagggccccagagcctgggtggtccccgctccccgggctctggaagtccgctgttcggggtaaatt

SEQ ID NO: 539334 - DNA, 436 bp, Homo sapiens
tgttttcacttaggctacagttccaggcttaagggtggggtttagccaggagcccaamcattctgtatcaataaggcctccaattcatggcaagaatatggtataatatggtaaatgtcttgagtgcgcttgaaaagaatatgtattctgctgttgtcagaggtgtcaattcattctagctggctgactgttgttcaaagtttctacattattattgattttctgttgtgtagcatataagttatggagaaagggctagttaaatctctgattatacctatggatctgtctatttctccttcagttctcccaggttttgcttcatttattgtgaagttcttattacatgcataaaatttagaattgttatgtcatgttgataaattaatgcctttgttattttgaaatgacctccaaatgaccttcttcattcctg

SEQ ID NO: 539335 - DNA, 518 bp, Homo sapiens
ggggacagaaggagggagccagcatttctctgagaaccaattataaacaccttgggggaactctcatgatcagtaagatgctttctgagcatcgctttatgcatatgctaagaagctggggcaagagtagctttttttttaatagtacattttatgtaaatttttactgaagtgaacagacatatacaaaaatayacaaattataattatatggttcgattaatctttgccaagggaaccatgtcaccagcactcagattcaataattgaacattgtaagcacccaagaaactgacttgcaccctgtgttgatcatgcccccccaacagtgatagtcacctcattctccagaggccttaggcattgcctcaggatcatggtggaagcttctctgggtggggctgcttggggaccagccatcctgcagtgggcccatgataagcacctgtggcgccacacccctggctagcaggcctgctgggaacacctgtaggaagaccttggcaggatcattggcc

SEQ ID NO: 539336 - DNA, 604 bp, Homo sapiens
cttgctcaacttcatgatcagagataaaggtgaatgcaagtactgtggccatgccatgcttaggactcgagaatggtgcagcctctctgtaggccagggaaggaccactaatatggctcccagccaagggcctcagggattctgaatggcacagtctctgcagaacttgcactgtgtggcttcaggtcttccaggacagctaaaatgtgtgggccttgagggtgcctttgggtgctcatagcctcattagggagatgaagaggtgagcagatgtcacatatgycaagacagtggaagcattaagaaaggggaaaggatggggaggatatcaccccaaaggtatgggaaaggacctggtatgtctggaaagtgaagaaggccagtgtggctggaacaaaaggcacctggccagagagctgggagatgagggcagacaaggaggaaggggctttccaggcaaggctgaagcctggatttacccagaaggcaatgaagagccaccagacactttaggggggccatggtgttgtaaaatgaagcatttgggctttgtcccaggttcctggaagggagcttggcattttcagggtggcaggagtgtctt

SEQ ID NO: 539337 - DNA, 604 bp, Homo sapiens
cttgctcaacttcatgatcagagataaaggtgaatgcaagtactgtggccatgccatgcttaggactcgagaatggtgcagcctctctgtaggccagggaaggaccactaatatggctcccagccaagggcctcagggattctgaatggcacagtctctgcagaacttgcactgtgtggcttcaggtcttccaggacagctaaaatgtgtgggccttgagggtgcctttgggtgctcatagcctcattagggagatgaagaggtgagcagatgtcacatatgccaagacagtggaagcattaagaaaggggaaaggatggggaggatatcaccccaaaggtatgggaaaggacctggtatgtctggaaagtgaagaaggccagtgtggctggaacaaaaggcacctggccagagagctgggagatgagggcagacaaggaggaaggggctttccaggcaaggctgaagcctggatttacccagaaggcaatgaagagccaccagacactttagggggsccatggtgttgtaaaatgaagcatttgggctttgtcccaggttcctggaagggagcttggcattttcagggtggcaggagtgtctt

SEQ ID NO: 539338 - DNA, 417 bp, Homo sapiens
tcttacctgccttcatatcaaaagcactcagttaacccagagggcttcagccctgccctgcctgactttctaggaaacccctctctccacccaccctaatcagacactgtctgaaggttccccctcatcattttaaaaggaagagaaatttttctgacacagaggttctggtgaagtggcyagctcccacatcacagggtgatggtggtttggactggaccaggatcagacagtgctgtcctggggctggccatctgataaggggctccagaaagggcagtgatggacccctgggaggctttctgctctcctgatcacaggtttttggtgagaggacctattggccactagggtgtctgcgggggtgtgtgtgtgtgtgtgtgtgtgtgtgtgtgtgtgtgtgatgtgtgtttactt

SEQ ID NO: 539339 - DNA, 417 bp, Homo sapiens
tcttacctgccttcatatcaaaagcactcagttaacccagagggcttcagccctgccctgcctgactttctaggaaacccctctctccacccaccctaatcagacactgtctgaaggttccccctcatcattttaaaaggaagagaaatttttctgacacagaggttctggtgaagtggccagctcccacatcacagggtgatggtggtttggactggaccaggatcagacagtgctgtcctggggctggccatctgataaggggctccagaaagggcagtgatggacccctgggaggctttctgctctcctgatcacaggtttttggtgagaggacctattggccactagggtgtctgcgggggtgtgtgtgtgtgtgtgtgtgtgtgtgtgtgtgtgtgwgatgtgtgtttactt

SEQ ID NO: 539340 - DNA, 271 bp, Homo sapiens
actccaggaggctgggcaaagggtgattggaaagcagtgagcaggcactttcagagctcatgtgggacatgggggractcctgcattcctaccagccagagtggagcgtccttgtagaaaatctggtgcgttcagttgacatcccagaaaagtcatgtcttggcaggaggagtaaagaagccctaaataaagtctaatctaacccctttccttcagtcaaagcttcaaaacaaacctcaaaagggtcagggtaatttctaagtaactcagc

SEQ ID NO: 539341 - DNA, 528 bp, Homo sapiens
tggtgctgttccaacctgtggcctgactacccccttggcatccacccaggggtggtccttggtgtgcttggggtgcacttgggtactcagggtgtactggygatactcagggtgcagttgagtactccgggtgcacttggctgcctccaaagatgggactcactgcgtcctttgacagcccaatctttttccaatggatgtgaccagcaaagttcttgctttacctgaaccaaaatcagccgcatcaagcccacacctctgccatctagggccacaacacttattccctcccagtaacaacattttggatatctgaagaaggcccacaaattctgtgatgacctctgtcaaagcccagtgtccccagtcccttcagtggtccctcctggagcctgtttggggccatcacccctgaacatgctccagtttgcaaacttcccctcaagtggccctgaggggtaagcgtgtgcccaggaaccagcctgatcagggagatgggaatagcgtgggctctgaattcacttggac

SEQ ID NO: 539342 - DNA, 549 bp, Homo sapiens
gtgtcattgtgttactcatgctggcctcaacttcctgacctgggttcaagtgattttcccatctcagcctcctgagtagctgggactacaagcatgtgccatcttgcctggctctatcttatgtctatacattcatttcaatgkataagaatcaaagtagagatagtgaaatagcctaaatgcagcagccgaataaacgagttgataaatttttatcaatgattgcatctctttttcttttcttcctctatgcatatagctttggagtttaactcttctgccaatccagaggcaagcacaatattccagaggaactctcaaacagatggtgagacaacagtgttttttccgccaagagaaagaataaaagctcttgtttgatcaggttatagaaagtatttagaaaaactcatattggtttaaatttttcaccttttcacatgttcacttgtcttattttaatatgtgatatactttcctttagttgttatgatgttagtgaaaacgtgtaacctttttgtttatacattttgccatctttttatcaac

SEQ ID NO: 539343 - DNA, 549 bp, Homo sapiens
gtgtcattgtgttactcatgctggcctcaacttcctgacctgggttcaagtgattttcccatctcagcctcctgagtagctgggactacaagcatgtgccatcttgcctggctctatcttatgtctatacattcatttcaatggataagaatcaaagtagagatagtgaaatagcctaaatgcagcagccgaataaacgagttgataaatttttatcaatgattrcatctctttttcttttcttcctctatgcatatagctttggagtttaactcttctgccaatccagaggcaagcacaatattccagaggaactctcaaacagatggtgagacaacagtgttttttccgccaagagaaagaataaaagctcttgtttgatcaggttatagaaagtatttagaaaaactcatattggtttaaatttttcaccttttcacatgttcacttgtcttattttaatatgtgatatactttcctttagttgttatgatgttagtgaaaacgtgtaacctttttgtttatacattttgccatctttttatcaac

SEQ ID NO: 539344 - DNA, 549 bp, Homo sapiens
gtgtcattgtgttactcatgctggcctcaacttcctgacctgggttcaagtgattttcccatctcagcctcctgagtagctgggactacaagcatgtgccatcttgcctggctctatcttatgtctatacattcatttcaatggataagaatcaaagtagagatagtgaaatagcctaaatgcagcagccgaataaacgagttgataaatttttatcaatgattgcatctytttttcttttcttcctctatgcatatagctttggagtttaactcttctgccaatccagaggcaagcacaatattccagaggaactctcaaacagatggtgagacaacagtgttttttccgccaagagaaagaataaaagctcttgtttgatcaggttatagaaagtatttagaaaaactcatattggtttaaatttttcaccttttcacatgttcacttgtcttattttaatatgtgatatactttcctttagttgttatgatgttagtgaaaacgtgtaacctttttgtttatacattttgccatctttttatcaac

SEQ ID NO: 539345 - DNA, 549 bp, Homo sapiens
gtgtcattgtgttactcatgctggcctcaacttcctgacctgggttcaagtgattttcccatctcagcctcctgagtagctgggactacaagcatgtgccatcttgcctggctctatcttatgtctatacattcatttcaatggataagaatcaaagtagagatagtgaaatagcctaaatgcagcagccgaataaacgagttgataaatttttatcaatgattgcatctctttttcttttcttcctctatgcatatagctttggagtttaactcttctgccaatccagaggcaagcacaatattccagaggaactctcaaacagatggtgagacaacagtgttttttccgccaagagaaagaataaaagctcttgtttgatcaggttatagaaagtatttagaaaaactcatattggtttaaatttttcaccytttcacatgttcacttgtcttattttaatatgtgatatactttcctttagttgttatgatgttagtgaaaacgtgtaacctttttgtttatacattttgccatctttttatcaac

SEQ ID NO: 539346 - DNA, 614 bp, Homo sapiens
tgtttcttgaataaatctaacttggattgctgaaagcctttggttaatttccaggactctgaaaatgttaattttgacatttttgccagtgctctcattgttgttaaggaaggattttcagaagtcccttattctgacattctgcaagtgtttctcttggtttgagttttcatgtgattgtttggggtagttgtttttatttttgttgttgtcttgattggtttttggagagatggttttctactggatactcctaggattcttttctttgaaggcaaacattcattttgttaggatctgtcatctcagcattgacttctctaaatcaatttacccttcggtcagaaaattcaagtcttcctttatttcaggaaagttgttctgaatattgagtctaagtttttttctattccatagttcaggtttcctaaccaggggacagaatgtcctcccctgcactgaatggcctctgcctttgtctactgaagactgcctgagtatcacttgcaatttaaaacagggcctgtctgtagagmcttctctgtacccaggacagtttagaggcgtgtctgtgtttccacaccaacagtaattatagtaataatgattactac

SEQ ID NO: 539347 - DNA, 614 bp, Homo sapiens
tgtttcttgaataaatctaacttggattgctgaaagcctttggttaatttccaggactctgaaaatgttaattttgacatttttgccagtgctctcattgttgttaaggaaggattttcagaagtcccttattctgacattctgcaagtgtttctcttggtttgagttttcatgtgattgtttggggtagttgtttttatttttgttgttgtcttgattggtttttggagagatggttttctactggatactcctaggattcttttctttgaaggcaaacattcattttgttaggatctgtcatctcagcattgacttctctaaatcaatttacccttcggtcagaaaattcaagtcttcctttatttcaggaaagttgttctgaatattgagtctaagtttttttctattccatagttcaggtttcctaaccaggggacagaatgtcctcccctgcactgaatggcctctgcctttgtctactgaagactgcctgagtatcacttgcaatttaaaacagggcctgtctgtagagacttctctgtacccaggacagtttagaggcgtgtctgtgtttccacaccaayagtaattatagtaataatgattactac

SEQ ID NO: 539348 - DNA, 585 bp, Homo sapiens
acatcaccctcacccctggcatttcctcttggtaattttccatctttcaactcctacctgctccatggctccaagtctcaacttctcatgctgtttttagaatgagcctgactgtatattgaggtctcttttcgcttattgcaatagtcctgaataaaatctggttttactactttatcgtctagctctggtttttctttgccataggtattccctacctgtagccttgccatagctctatcatcgttgctttttaattccctccaagagatgatatctacatatactccytctctatcctcagatcaatgttttgcatttcctaggagctgaattccttttcttccattgcagcactggctgggagagaaggcacaacatggtccagcatactgagccccaagtttgtcctgcagcatgatttgagacacagtgttcgtgccgcacagaattctgtgagccgtccaatagcctttcatacatttgttttctgcttaaactacagagtagatgctcttgtcagcacctaagaacaccctctattacacagaactacaccctaatgacattttatctgtttacgtg

SEQ ID NO: 539349 - DNA, 585 bp, Homo sapiens
acatcaccctcacccctggcatttcctcttggtaattttccatctttcaactcctacctgctccatggctccaagtctcaacttctcatgctgtttttagaatgagcctgactgtatattgaggtctcttttcgcttattgcaatagtcctgaataaaatctggttttactactttatcgtctagctctggtttttctttgccataggtattccctacctgtagccttgccatagctctatcatcgttgctttttaattccctccaagagatgatatctacatatactccttctctatcctcagatcaatgttttgcatttcctaggagctgaattccttttcttccattgcagcactggctgggagagaaggcacaacatggtccagcatactgagccccaagtttgtcctgcagcatgatttgagacacagtgttcgtgccrcacagaattctgtgagccgtccaatagcctttcatacatttgttttctgcttaaactacagagtagatgctcttgtcagcacctaagaacaccctctattacacagaactacaccctaatgacattttatctgtttacgtg

SEQ ID NO: 539350 - DNA, 342 bp, Homo sapiens
tgcagacagatcttggacgaggtcgcgtcccccctcgtgaccagcaaactcctaaaagcggcccttgccccagagcccctgtagcctccaaccggcagtcaggaggcagcgccgtctcagcgccgcttagtggcgccaggcgtgcctggaaatccgctttcgcagcgccccctcgtagccgcctccgsccgcagaaaggcgttccctggacagagaagcgggcgcgcgggggcgggcgcgcggggccttgccggagaacctgactctccgcagcagcagtggaagccggagtgacgcgttgtattgaacaccagttttctggagcgctgtgtgttcttaaca

SEQ ID NO: 539351 - DNA, 507 bp, Homo sapiens
cctctgcaggatggggtccccgtgctttcacatggcccctggccattcacagcttccccctggctggccttcctctcctgcttgttccagcaccccctcactcccaccccatgcttgaatccacagactccttatttttgggtcctcacatatgccacactgtgcccagctcaatgccttccgaatctcatgctttccaattccaagtttaccttctctgaaaacttttcctggctcccttgtttcgtgtctgcatccctggattttgcactttgccttgttcctgttgggcacttagggaatcttagagctggaaggatgcaakagagtctccatcttttcacctggctgtaaccccggcaaacaaagggtgtaggttgttatctcctgggcagctggcacagtgcctggcccagaataatgccccctgagagcacagtaaattggtttccaccgtgaagaacagatattggagcttgaaggtgagctagcctccaacaggggacc

SEQ ID NO: 539352 - DNA, 475 bp, Homo sapiens
tggcacagtgcctggcccagaataatgccccctgagagsacagtaaattggtttccaccgtgaagaacagatattggagcttgaaggtgagctagcctccaacaggggaccagggaggtgctaggccagcgagcccaccttccccacgatgcagccaatcaagactccagagggctccagcaacagcatgaaaaaaatagctctccatacaaagcatggaaactagactttagggcctaggggaatggggcttgtctgcctctatgtaagaaagcaggacaggccgggcatggtggctcacacctgtaatcccagcactttgggaggccgaggagggtggatcatgaggtcaggagttcaagacctgcctggccaacatggtgaaacaccgtctctactacaaatacaaaaaattagccaggcgtggtggtgggcgtctgtaatcccagctactcgggaagctgaggcagagaaa

SEQ ID NO: 539353 - DNA, 475 bp, Homo sapiens
tggcacagtgcctggcccagaataatgccccctgagagcacagtaaattggtttccaccrtgaagaacagatattggagcttgaaggtgagctagcctccaacaggggaccagggaggtgctaggccagcgagcccaccttccccacgatgcagccaatcaagactccagagggctccagcaacagcatgaaaaaaatagctctccatacaaagcatggaaactagactttagggcctaggggaatggggcttgtctgcctctatgtaagaaagcaggacaggccgggcatggtggctcacacctgtaatcccagcactttgggaggccgaggagggtggatcatgaggtcaggagttcaagacctgcctggccaacatggtgaaacaccgtctctactacaaatacaaaaaattagccaggcgtggtggtgggcgtctgtaatcccagctactcgggaagctgaggcagagaaa

SEQ ID NO: 539354 - DNA, 600 bp, Homo sapiens
ggcacagtgcctggcccagaataatgccccctgagagcacagtaaattggtttccaccgtgaagaacagatattggagcttgaaggtgagctagcctccaacaggggaccagggaggtgctaggccagygagcccaccttccccacgatgcagccaatcaagactccagagggctccagcaacagcatgaaaaaaatagctctccatacaaagcatggaaactagactttagggcctaggggaatggggcttgtctgcctctatgtaagaaagcaggacaggccgggcatggtggctcacacctgtaatcccagcactttgggaggccgaggagggtggatcatgaggtcaggagttcaagacctgcctggccaacatggtgaaacaccgtctctactacaaatacaaaaaattagccaggcgtggtggtgggcgtctgtaatcccagctactcgggaagctgaggcagagaaatgcttgaatttggagggaggaggttgcagtgagccgagatcatgccactgcactccagcttaggcgacagagcgagattccatctcaaaaaaaaaaaaaaagaaaagaaagcaggacagtatattg

SEQ ID NO: 539355 - DNA, 475 bp, Homo sapiens
tggcacagtgcctggcccagaataatgccccctgagagcacagtaaattggtttccaccgtgaagaacagatattggagcttgaaggtgagctagcctccaacaggggaccagggaggtgctaggccagcgagcccaccttccccacgatgcagccaatcaagactccagagggctccagcaacagcatgaaaaaaatagctctccatacaaagcatggaaactagactttagggcctaggggaatggggcttgtctgcctctatktaagaaagcaggacaggccgggcatggtggctcacacctgtaatcccagcactttgggaggccgaggagggtggatcatgaggtcaggagttcaagacctgcctggccaacatggtgaaacaccgtctctactacaaatacaaaaaattagccaggcgtggtggtgggcgtctgtaatcccagctactcgggaagctgaggcagagaaa

SEQ ID NO: 539356 - DNA, 604 bp, Homo sapiens
agctggcacagtgcctggcccagaataatgccccctgagagcacagtaaattggtttccaccgtgaagaacagatattggagcttgaaggtgagctagcctccaacaggggaccagggaggtgctaggccagcgagcccaccttccccacgatgcagccaatcaagactccagagggctccagcaacagcatgaaaaaaatagctctccatacaaagcatggaaactagactttagggcctaggggaatggggcttgtctgcctctatgtaagaaagcaggacaggccgggcatggtggctcacacctgtaatcccagcactttgggaggccgaggagggtggatcatgaggtcaggagttcaagacctgcctggccaacatggtgaaacaccrtctctactacaaatacaaaaaattagccaggcgtggtggtgggcgtctgtaatcccagctactcgggaagctgaggcagagaaatgcttgaatttggagggaggaggttgcagtgagccgagatcatgccactgcactccagcttaggcgacagagcgagattccatctcaaaaaaaaaaaaaaagaaaagaaagcaggacagtatattg

SEQ ID NO: 539357 - DNA, 601 bp, Homo sapiens
tggcacagtgcctggcccagaataatgccccctgagagcacagtaaattggtttccaccgtgaagaacagatattggagcttgaaggtgagctagcctccaacaggggaccagggaggtgctaggccagcgagcccaccttccccacgatgcagccaatcaagactccagagggctccagcaacagcatgaaaaaaatagctctccatacaaagcatggaaactagactttagggcctaggggaatggggcttgtctgcctctatgtaagaaagcaggacaggccgggcatggtggctcacacctgtaatcccagcactttgggaggccgaggagggtggatcatgaggtcaggagttcaagacctgcctggccaacatggtgaaacaccgtctctactacaaatacaaaaaattagccaggcgtggtggtgggcgtctgtaatcccagctactcgggaagctgaggcagagaaatgcttgaatttggagggaggaggttgcagtgagccgagatcatgccactgcactccagcttaggcgacagagygagattccatctcaaaaaaaaaaaaaaagaaaagaaagcaggacagtatattg

SEQ ID NO: 539358 - DNA, 371 bp, Homo sapiens
gcaccggtggaagcaagttctgcgtcttgggcacagtactttatcacctgattgtacttcctccacctctccccaggcagaactattgacccagggatctataacatttgtatatatcaacacagaaaccaattaacaaatgcttatattcctgtgcaaatatgcaaacttccttctgcagacaggggtaagcagacacctggcagtatttttagaaatatttaagaaacacagttcaggtaagaagcaggctgctgtaccctcctccgrgaggaccagtacctagaaccatctgtttttctttgtcttccctgctctgctctgagcgtggggatggtccttatccttagcttcatctttattaaagctgg

SEQ ID NO: 539359 - DNA, 238 bp, Homo sapiens
atgcttatattcctgtgcaaatatgcaaacttccttctgcagacaggggtaagcagacacctggcagtatttttagaaatatttaagaaacacagttcaggtaagaagcaggctgctgtaccctcctccgggaggaccagtacctagaaccayctgtttttctttgtcttccctgctctgctctgagcgtggggatggtccttatccttagcttcatctttattaaagctggcatttt

SEQ ID NO: 539360 - DNA, 607 bp, Homo sapiens
cttcctccacctctccccaggcagaactattgacccagggatctataacatttgtatatatcaacacagaaaccaattaacaaatgcttatattcctgtgcaaatatgcaaacttccttctgcagacaggggtaagcagacacctggcagtatttttagaaatatttaagaaacacagttcaggtaagaagcaggctgctgtaccctcctccgggaggaccagtacctagaaccatctgtttttctttgtcttccctgctctgctctgagcgtggggatggtccttatccttagcttcatctttattaaagctggcattttcggctgggcatggtggctcacgtctgtaatcccagcactttgggaggccaaggtagatggatcacttgaggtcaggagtttgagatcagcctggccaacatggtgaaaccccgtctctgctaaaaatacaaaaattagccaggcgtggtggcatgtgcctcgagtcccagcactcgggaggctgaggcaccaggattgcttgaaccctcygcagtcagccaagattgcgtcacggcactccagcctgggggacagagactctgtctcaaaaaaaggaaaaaaaaac

SEQ ID NO: 539361 - DNA, 480 bp, Homo sapiens
tggacaaaagactggagcacagttcaatcagcctcagcaacattatctctaaaagcaaatgagtcctgctgttgctggggacctacycctctgccttggctggaagtgtttgagtctgtctgaacggtctgttatctccagggcaacataaagtttgcaggaggcctgttcactccaggtgttatcgctgtcgctgagatggtgctaagcctacaggcggcagaaggccaattgctaaggcagagggagcctttagtggggagccaggcagcctggggaccctgggccacagcttccttccctatgacatgcactctcatgcccttcccactcaaacatccagtcattctgcacgtcctggtagagggagatgccaggcgaaccctcggggtaaccccagcacctggaaaaactcctcagtgggtttgctcagtgtcatttaaggatcccaaccttgaaggttttggacttgggatcaca

SEQ ID NO: 539362 - DNA, 480 bp, Homo sapiens
tggacaaaagactggagcacagttcaatcagcctcagcaacattatctctaaaagcaaatgagtcctgctgttgctggggacctacccctctgccttggctggaagtgtttgagtctgtctgaacggtctgttatctccagggcaacataaagtttgcaggaggcctgttcactccaggtgttatcgctgtcgctgagatggtgctaagcctacaggcggcagraggccaattgctaaggcagagggagcctttagtggggagccaggcagcctggggaccctgggccacagcttccttccctatgacatgcactctcatgcccttcccactcaaacatccagtcattctgcacgtcctggtagagggagatgccaggcgaaccctcggggtaaccccagcacctggaaaaactcctcagtgggtttgctcagtgtcatttaaggatcccaaccttgaaggttttggacttgggatcaca

SEQ ID NO: 539363 - DNA, 480 bp, Homo sapiens
tggacaaaagactggagcacagttcaatcagcctcagcaacattatctctaaaagcaaatgagtcctgctgttgctggggacctacccctctgccttggctggaagtgtttgagtctgtctgaacggtctgttatctccagggcaacataaagtttgcaggaggcctgttcactccaggtgttatcgctgtcgctgagatggtgctaagcctacaggcggcagaaggccaattgctaaggcagagggagcctttagtggggagccaggcagcctggggaccctgggccacagcttccttccctatgacatgcactctcatgcccttcccactcaaacatccagtcattctgcacgtcctggtagagggagatgccaggcgaaccctyggggtaaccccagcacctggaaaaactcctcagtgggtttgctcagtgtcatttaaggatcccaaccttgaaggttttggacttgggatcaca

SEQ ID NO: 539364 - DNA, 609 bp, Homo sapiens
ttccctgccccatgtcaagagcaagctggagccgaatttggggctcccagttgggctccaagtgtgatttcctccacacttgatgaccaggaggccatttgtaggaggctgggatgagcaaagtgggtcaaagtgccccctgcctccaaatgctcgcgtggaggttgggcagtcagacaccatgggggagaaaccccaggactttagcagaacaaaagaagggcaccctcccttcctgggccctgccagactcttggcagaaggccagggctactcatggggcggggagtgggggaaggagggaggagcagggatggtctgttccagccctcctgtgttcatcctgagccgagtcactgaggcctgcagcacagctatgacacaacttttggggtgtcctggtaggagggctttgggctrcaggtggggcattggaagcagatttctctctatagtaaggcagtagatccccaggccttgccctctgttcctgaaaatgtgagttgtaccttgaaccacaaaatggctgtggggtgcagcttggtgtgttggaaggagggctttggatgtgggctgcaactgcatcatccttgctcagttctcatgtgg

SEQ ID NO: 539365 - DNA, 609 bp, Homo sapiens
ttccctgccccatgtcaagagcaagctggagccgaatttggggctcccagttgggctccaagtgtgatttcctccacacttgatgaccaggaggccatttgtaggaggctgggatgagcaaagtgggtcaaagtgccccctgcctccaaatgctcgcgtggaggttgggcagtcagacaccatgggggagaaaccccaggactttagcagaacaaaagaagggcaccctcccttcctgggccctgccagactcttggcagaaggccagggctactcatggggcggggagtgggggaaggagggaggagcagggatggtctgttccagccctcctgtgttcatcctgagccgagtcactgaggcctgcagcacagctatgacacaacttttggggtgtcctggtaggagggctttgggctgcaggtgrggcattggaagcagatttctctctatagtaaggcagtagatccccaggccttgccctctgttcctgaaaatgtgagttgtaccttgaaccacaaaatggctgtggggtgcagcttggtgtgttggaaggagggctttggatgtgggctgcaactgcatcatccttgctcagttctcatgtgg

SEQ ID NO: 539366 - DNA, 540 bp, Homo sapiens
ctggaggtaggaagagtaagggccctcccttactcttatggagaggcatactttctcatgaggggaatactctgcaggaattagcatcttgtaagcagtggtgaattcaactaattagtgtataaaaatacattttttggtgtggctgccgacaaagagatccaagagggtagatggagtcgagcttgctgaagcaaggaaagagaaaagcagtattctaggcagagagcaggggtagagcaggaaaatggctaggtgcaggtcagatgatttatagaatgcaattgatcaagttttgaagtgaatgcaaagtattctccragagtctcatttgagtcatgtcttggcagtcttatttaaacatgaagtgaaagttagattttttaagttgtcatttgtttttagggtgtgagagaatatttaagtgatactctttttatcctccacataagaaaataggactagagaaacctatggcttcctcacttgttggtggcctaacagccctggcacacagagcccctgaatctgaaacacttc

SEQ ID NO: 539367 - DNA, 513 bp, Homo sapiens
gggatcagcacgtggacagcagggccaactatgtttcgaggggtaggaaactgagtgctgggagagcagttgtctctccttcggcatgtgctctaaggagtctgagcttggacctgctgagcaccatagctgtctcctggggagactgtgtctgaagctggagcccaacagagccctgcagaggccagagacggggagrgaaagttcaggaccttgcttggactcctggatccaacctcacttcaaagtcatggtcacggatttcccagttagagagctcaccttgagaggtggggtctctgtcccatcccctggaatctaggtgagctctatgacttctctgacccatagagtgaggcacatggtgctgtgcccgcttctaagctcagggctaagaggctgtcagcttccacttcctgcctttctgatccagatgccatgctgtgagaaggcccaagccacatggaggagctgtgcctaggcctgcagaccacagccctcactcggttccca

SEQ ID NO: 539368 - DNA, 513 bp, Homo sapiens
gggatcagcacgtggacagcagggccaactatgtttcgaggggtaggaaactgagtgctgggagagcagttgtctctccttcggcatgtgctctaaggagtctgagcttggacctgctgagcaccatagctgtctcctggggagactgtgtctgaagctggagcccaacagagccctgcagaggccagagacggggagggaaagttcaggaccttgcttggactcctggatccaacctcacttcaaagtcatggtcacggatttcccagttagagagctcaccttgagaggtggggtctctgtcccatcccctggaatctaggtgagctctatgacttctctgacccatagagtgaggcayatggtgctgtgcccgcttctaagctcagggctaagaggctgtcagcttccacttcctgcctttctgatccagatgccatgctgtgagaaggcccaagccacatggaggagctgtgcctaggcctgcagaccacagccctcactcggttccca

SEQ ID NO: 539369 - DNA, 616 bp, Homo sapiens
actgtgctctctttagataatattccctcactgaaaggttagtctcaatagaatttttatgattaaagcacaaatgtggtatttatgaggactaggatttgtgtttctggcaacccgagtgtcctcaaaagcattgcagccctgtcctcatttcacaagtcctataatgttttgcagaccaccgtgtcctctatacttaaatccttctcatagactaacaagtggcaagccttcactcttacacatattataatctttgtgggatgcactaaagacttctgtgtgatgaattgtcatctccctcaacctcaaaggtaactggctataaaactgttttatgttsctagtattcctagtcctcgtgtaaaaatactagctgtaattcagtgttggcaatgtggtattattcataaagcattcagactgtacagttttagaatgtcatcggaacttcctgattgaattacaatctagcattcagctaagtgtccttttttatgcatgaaaattactcacaagcatttcccaacatctccagggcctacatgggagttccagagggagcaacactttgcataatccttcaaaaatatcttcagggacattcaagaaccaa

SEQ ID NO: 539370 - DNA, 616 bp, Homo sapiens
actgtgctctctttagataatattccctcactgaaaggttagtctcaatagaatttttatgattaaagcacaaatgtggtatttatgaggactaggatttgtgtttctggcaacccgagtgtcctcaaaagcattgcagccctgtcctcatttcacaagtcctataatgttttgcagaccaccgtgtcctctatacttaaatccttctcatagactaacaagtggcaagccttcactcttacacatattataatctttgtgggatgcactaaagacttctgtgtgatgaattgtcatctccctcaacctcaaaggtaactggctataaaactgttttatgttgctagtattcctagtcctcgtgtaaaaatactagctgtaattcagtgttggcaatgtggtattattcataaagcattcagactgtacagttttagaatgtcatcrgaacttcctgattgaattacaatctagcattcagctaagtgtccttttttatgcatgaaaattactcacaagcatttcccaacatctccagggcctacatgggagttccagagggagcaacactttgcataatccttcaaaaatatcttcagggacattcaagaaccaa

SEQ ID NO: 539371 - DNA, 565 bp, Homo sapiens
cctatatatattttcctctccttctctctattaccattatccccaatccctgatccaggcatactagagtttatttttcattgaggatcatggttttgttctctctgtacgtggtgatttggctctgttatgggttgacaattgtgaaataaagaatccctctatttccccttttgtggctgtttattcctttccctatctccaatatatcaaatagttggtacttcatgctctttcaacttgcacactattttttctctttatatactatctgggctgaagtattgatattgttttgcttctgacctttagagggggaaacrtaattatgcattctccaaaggcaggtgaaaatatgtgaagattacataaccttcagatatctcttgaagtttggagaattgactagtacattgacactagacaaatttgcatagcctacttcatggggcatatttagcttttcctgcctcattggacttgagacccctttcttccttctcaactctctaaatgtgcttaaattgatacattgaaatgagtagggaatgatgaatactgtttt

SEQ ID NO: 539372 - DNA, 615 bp, Homo sapiens
caaattccatgagcaagggggccagaagacataacctagaggctgttcaagatgagggctcaaatagactgtccctccatacagttggaactttagagagctatccctcagattaaatccaccatagccttaagaatggtggcactaagcraaaagatgaggaaaaacacctcatttgaatttgcagtgtatgtgaagtaatcaaactctattccacctgtaggtgctcctagaaaactgacagattaataacaacaaaagacctctgttggaatgtacttttattctatgtgttctcataatagttttccaaagaaaataggcagctcacacaaaaaaagctacatcaggaaacaagacaccaagaaagaactagatcattagcaaacagaaatagatatatgaagtcttcagatatttaaattattagtcctagtttataaaacaactatgtttactgttttttagaaataaaagacaaacttgtagataaatgtgaagaactataaagttacctagtagatttgaaaatgaagcaaattgaatcaagaaacgaaagtcacagcaaatgaaatgtaaaactcggtagataaatttgacatcagattagacaca

SEQ ID NO: 539373 - DNA, 519 bp, Homo sapiens
ttcagaagcttacaaaactattgcccacctatcaataccagtgagagtgttggagatgatgctaatcattctggtgtttttgtaccatcctgctttatcatcgctgtgatgccccataggcccttcttcacyttggacaactctgttatttcattaacaataactgaagccactcttcatgaaattctacaattcccacaaagacaagttcttccagtaaatactgttaaagactaaatacagacatcagaattcaggataaaattttgtttgtcttataagtcctttaagtcaggatagaggcaaatgatgtcactggctcattctttatatgaaaagtgaggagctgcatgtacagtcatgtgctgcataatgatatttcagttaatgaaagactgcatatacagtgatagtcccataatattacaaaagaactgaaaaattcctatcacctagtgatatcatagccattgtaatattgtagttgagttgatgctattgtaaacaaaacgattgccc

SEQ ID NO: 539374 - DNA, 473 bp, Homo sapiens
tgacccagtctcgggtacatctttatcagcrgtgtgaaaacaaacaaatacagagaaagagcagattgaattctgtttcagatctgtttagtttgaggtgccaacatgattttctatcaggagaggtacaaaaggaatttagaaagacagatctaagagatgaagaaagaaaaagagaactaagattataaatttggaagaggctgccagagaaggtagttgaaattttgtctgtgggtgagatctcccattggaatagtgtagagcaaaaaggaggagagggttagaaaaacatgtgccatcagtgagttttcaaagaactggtgatataattgacttaggatattataagaaaattcaagaaagagagagtattcctaatgagggctggttagcaatatcaaatgctgtgtagaggtcagctagaatgaagggtaaagagctcagggaactttttaatgagaaagttattg

SEQ ID NO: 539375 - DNA, 473 bp, Homo sapiens
tgacccagtctcgggtacatctttatcagcagtgtgaaaacaaacaaatacagagaaagagcagattgaattctgtttcagatctgtttagtttgaggtgccaacatgattttctatcaggagaggtacaaaaggaatttagaaagacagatctaagagatgaagaaagaaaaagagaactaagattataaatttggaagaggctgccagagaaggtagttgaaattttgtctgtgggtgagatctcccattggaatagtgtagagcaaaaaggaggagagggttagaaaaacatgtgccatcagtgagttttcaaagaactggtgatataattgacttaggatattataagaaaattyaagaaagagagagtattcctaatgagggctggttagcaatatcaaatgctgtgtagaggtcagctagaatgaagggtaaagagctcagggaactttttaatgagaaagttattg

SEQ ID NO: 539376 - DNA, 355 bp, Homo sapiens
ttgggctcatccttcttccccaaagccaccagtttaactctcgtggtagatcctggggtaaggtagatgaacacttggtctttggagtcaggatacttgggtctcagtccttggcaactctctgagcttcagtcccctcatctgtaaaatgggcaagcagtcattttaagtgtgtagttcccatctatgagtgctatggtgattgttatatgttcacctctggctctactagtggttcccattacctatccaagccccagcctagtctagaygcctgacagagtttaccagtccaagggtgaaaagcagtttcctttttttcttttttttttttttcttttttttttgagacaga

SEQ ID NO: 539377 - DNA, 471 bp, Homo sapiens
ctggagtggcgggagtggagggcaatgtgaggtgagtttgggtttggagcctggaaggccttgaatgcagtgagtttggacattattcattgacagtggggagtcatggaagagatttgaggaggagcaaaatgttcagaccagaactgtgccttagaaaactaaccttagtagcagtgaggaagatagctggagtatgaaaagattgagcatactaaaacttctgagagcatgaaaggtggggactgatgcagtgacccaaaaatacgtcatcatctgtcgggcctggtctagacaaggcaggtggagaaggagaggacttttgaagaggtaacacggaggtcaaattcataggacttgtcagctaactggatgacgggtttttgaagagggggatggtgtgggtggcagggagggggactggttgctgggtgaggtaaacacargtggcaaagcaggttgagagagggg

SEQ ID NO: 539378 - DNA, 489 bp, Homo sapiens
agctgggggaccaaggatttcgcagggccttgtgcctggcacaggggtgaggggcaaggagtcgggtgggcagacggccgagtcttaccgtggccacaggtcaagaaatgaaaagcgaaaacggaccttccctgttttccgagagccccacgcggcgctttcttgtcaaccgtcgccgggaagtggagctagcgtggcggtgccggttgaggtgttgggttaatcatcaccgcggggccagactcagcttgggaaaatccaggagtgagtcaggaggcccagagccgccccagcaaggggttctctgcggagcacactccccgtggakgcgcccctcggcgcacctggccgccctgcccgcctgcctggccgggtcccacctgcacaggctggggtggggtgggagcgcccggcgaggaatgtgatcccggcgtgaaaacctaacttgttggttaacctgcccgacgggcttaatcaatggtgcggcct

SEQ ID NO: 539379 - DNA, 451 bp, Homo sapiens
gagacctctgagtcagcccgctgggcggaagctgggggaagcccacactggccaccacagcccatgcgggaacgctcagagatgcgtcacctgtgaacacatcccctcccccaggtctaaccaacttcagccaccccagctccaataacgtccctatcagctaaggccgaatttgggaagggggcccacctggcttggggtgcctgccttccacacttctccccacctgcccagtgctcagggcccacctcccagcaagcttgggcagtggaggagggggatggggcgttggggtaaggggccagcttggccctgtggctgggctgagacgccccttcctsgggcttctacagtctgtgcactcagggcagcctgtgaaccacgaaatcaagtttgggcagtgcagggtgccccaccctccaccttctcagctcctggggccctgagggca

SEQ ID NO: 539380 - DNA, 489 bp, Homo sapiens
agctgggggaccaaggatttcgcagggccttgtgcctggcacaggggtgaggggcaaggagtcgggtgggcagacggccgagtcttaccgtggccacaggtcaagaaatgaaaagcgaaaacggaccttccctgttttccgagagccccacgcggcgctttcttgtcaaccgtcgccgggaagtggagctagcgtggcggtgccggttgaggtgttgggttaatcatcaccgcggggccagactcagcttgggaaaatccaggagtgagtcaggaggcccagagccgccccagcaaggggttctctgcggagcacactccccgtggaggcgcccctcggcgcacctggccgccctgcccgcctgcctggccgggtcccacctgcacaggctggggtggggtgggagcgcccggcgaggaatgtgatcccrgcgtgaaaacctaacttgttggttaacctgcccgacgggcttaatcaatggtgcggcct

SEQ ID NO: 539381 - DNA, 252 bp, Homo sapiens
atcaggagagggggtcactaaccccacagccaggtgggtccagcccgagagtccgtgacttagtagctgaggacttgctctagggtcagagggcacatggcaggagagtcaccccggctgaacgaggctctgcatcttaccraagccgctctacgggtgccaggcactggctctggagcgagtgcccaggcggagcagagcgctgggaggagggtccgtggggagcccctgccaggtgggtgtggcttagcc

SEQ ID NO: 539382 - DNA, 252 bp, Homo sapiens
atcaggagagggggtcactaaccccacagccaggtgggtccagcccgagagtccgtgacttagtagctgaggacttgctctagggtcagagggcacatggcaggagagtcaccccggctgaacgaggctctgcatcttaccgaagccgctctacgsgtgccaggcactggctctggagcgagtgcccaggcggagcagagcgctgggaggagggtccgtggggagcccctgccaggtgggtgtggcttagcc

SEQ ID NO: 539383 - DNA, 570 bp, Homo sapiens
  misc_feature (1)...(570): n = A,T,C or G
gggccctctggtagccaaggcctcaccctagtgagggggatggatggagggagcttgagcctagctgacctctccccatctgactcygaccccacctcccagggcacaggatggcgtctgggcagcccctagtcttcagaagctacccctgagaccacagggtcccaccttgtatgggaaccccattctggagacaaaggcccctncgagctcnccaggtcgggnagggccacgcccctcaccacncctgccgggacaccgctngaggtgcacctgctgctgggccacacctggactcagctctactgaggactcctttcntcagtttctcacctggccctgcangatcttcctggccctgcccagccaaggcccctccccnagtcaacaaccctcagaaaggctcctccccccttctctgcctagggagccacattcctggcataactaagacaggtatgtgtccctccctctgcgccacctttgggcgggggaggcccgctgctccctccggaaggagacccccgcccctgctttgtcagggaagtggcctggcctccgcagtgccag

SEQ ID NO: 539384 - DNA, 563 bp, Homo sapiens
ggccccagtggtgatgtgagtgctcaggacctgtctctacccctccctagcccagcccaggcaggtggagcaggctgtgtaggctgggctagggacggctgaggtccccagcccccagttcctatggagagcctgcctcacagcccaccgggcaggccccaaggactcaccccttactgctcccaggggcccactgggagcctccccttttgatctgakcaggcgggtccctgcctaagccgtctgctgtcccagatggaggacaggcaggatgggctccagcaactgtgtctctttttcttttcctagaagttaatttcccaaagggtggggagagctgtcttacttcagtttcggggtggggggctccctattttgatccctcgaagctgtaactgcaaacccttatcccttcacttggcagcccaggcctggtcaccaggatggaccctgggttctccctcctgacttctcccgccccatcaccaggggtctgaggcggacgctggaggaggggcaagcacagacacagaggcagccatttctctttacaacagccttta

SEQ ID NO: 539385 - DNA, 457 bp, Homo sapiens
ccttgccgcccaccgaggttgaacaaaagccaggatgggaaggcttctgtggggcccgtgtggagtgtgggcgacatgggcaggggtaggggcagccgcgggcaactctcgcctctccaccyctgcctccccaccccccagctccgcagggctccttcccaggctgccttagaagcgggtagggtggccccagggtgaggggtcacaacctgcccgccgcctccctgcagcggtggtgccctgtcccatggggctgaggcctctcatggacagagggcaggggccatacctgcctgtctttgctccaggcccgcagcccttaattttggagcaatgaagggaccccccgtaggcccaggtgggtctcaggatcggtctcctcgccaggggctcggaggagctacgtgcccccagtcccaccccaatgggcaagaggctccgagaccccacagaccca

SEQ ID NO: 539386 - DNA, 458 bp, Homo sapiens
tgctgagcagccgccacctgaggtggggaggggcaggaaatgtctggagagtagggagggcaggggagggcagaaaggacccccacgtgagggggcaccccacatctggggccacaggatgcagggtggggagggcagaaaggcccccccgcgggaaggggcaccccacatctggggccacaggatgcagggtggggagggcagaaaggaccccccgctggagggggcaccycacgtctggggccacaggatgcagggtggggaggacagaaaggaccccccgctggagggggcaccccacatctgggaccacaggatgcagggtggggagggcagaaaggaccccccgctggagggggcaccccacgtctggggccacaggatgcagggtggggaggacagaaaggaccccccgctggagggggcacccatctggggccacaggatgcagggtgggg

SEQ ID NO: 539387 - DNA, 458 bp, Homo sapiens
tgctgagcagccgccacctgaggtggggaggggcaggaaatgtctggagagtagggagggcaggggagggcagaaaggacccccacgtgagggggcaccccacatctggggccacaggatgcagggtggggagggcagaaaggcccccccgcgggaaggggcaccccacatctggggccacaggatgcagggtggggagggcagaaaggaccccccgctggagggggcacctcacgtctggggccacaggatgcagggtggggaggacagaaaggaccccccgctggagggggcaccccacatctgggrccacaggatgcagggtggggagggcagaaaggaccccccgctggagggggcaccccacgtctggggccacaggatgcagggtggggaggacagaaaggaccccccgctggagggggcacccatctggggccacaggatgcagggtgggg

SEQ ID NO: 539388 - DNA, 458 bp, Homo sapiens
tgctgagcagccgccacctgaggtggggaggggcaggaaatgtctggagagtagggagggcaggggagggcagaaaggacccccacgtgagggggcaccccacatctggggccacaggatgcagggtggggagggcagaaaggcccccccgcgggaaggggcaccccacatctggggccacaggatgcagggtggggagggcagaaaggaccccccgctggagggggcacctcacgtctggggccacaggatgcagggtggggaggacagaaaggaccccccgctggagggggcaccccacatctgggaccacaggatgcagggtggggagggcagaaaggaccccccgctggagggggcaccycacgtctggggccacaggatgcagggtggggaggacagaaaggaccccccgctggagggggcacccatctggggccacaggatgcagggtgggg

SEQ ID NO: 539389 - DNA, 449 bp, Homo sapiens
ggaggacagaaaggaccccccgctggagggggcaccccacatctggggccacaggatgcagggtggggagggcagaaaggaccccccgcgggagggggcacctcacgtctggggccacaggatgcagggtggggagggcagaaagaacccccgcgtgcctaagcaggttctggtgggcgtcctggctgggtgtaggcagaggctggctcccggaggcccgaggggggctctgagaagggggcggcctgagggggagcccaggacagcccctatgctgcccccgtccagcccggcccctcaggctgtgtttcctgagacctcgctagtctaacccaaacctcccagctctgtcattcaaaggratggattaggtccccgtgggtccatttccctgttttgggtgctgaggacagagcttctggacagactcagccctcgccctctggagc

SEQ ID NO: 539390 - DNA, 483 bp, Homo sapiens
gatgagggaagggatccttcagcaaggggtgtagggggagggaagctccagaggaggctctgcagggacactgagattcttcagttgctcccacaaaggtggtggcccagagacagaatcagccccctccaaacacttctcccacaatcctctctactccaactcctccaggktctgggaggcaatgggaagaccccctggggaggggagtcccttcttaaggcagagagcattctggtccaagttctctgtcgtggactcaaaggtggtctatgtgtgtttctgtgtctgtgagtttccactttcacatgctttagtgaccagccatccatgtgtctgaatgtgtaatatggtccacaagtatacttgggtccttatgtccctccgtgttcacgtggccgtaacgcccacaaccatgtgtacacacatacatggacccatgctggggtatgtgtgtctgcaggggtgagtgtgcatgtgcag

SEQ ID NO: 539391 - DNA, 483 bp, Homo sapiens
gatgagggaagggatccttcagcaaggggtgtagggggagggaagctccagaggaggctctgcagggacactgagattcttcagttgctcccacaaaggtggtggcccagagacagaatcagccccctccaaacacttctcccacaatcctctctactccaactcctccaggttctgggaggcaatgggaagaccccctggggaggggagtcccttcttaaggcagagagcattctggtccaagttctctgtcgtggactcaaaggtggtctatgtgtgtttctgtgtctgtgagtttccactttcacatgctttagtgaccagccatccatgtgtctgaatgtgtaatatggtccacaagtatacttgggtccttatgtccctccgtgttcacrtggccgtaacgcccacaaccatgtgtacacacatacatggacccatgctggggtatgtgtgtctgcaggggtgagtgtgcatgtgcag

SEQ ID NO: 539392 - DNA, 584 bp, Homo sapiens
ataacagtaacgaatcttcactaagggcattttcacatgccagcctgacctatacaatctcacttcattcttgcaacaaccctaagaggcaggcactattattattcccatttcatagatgaggcgatcaaggcacagagaggttaagtaagttgttagcaacacagctagtaagtaagtggcagtgccaggattattccayaatgcaaatcttaattatgtcatatattgtcctaaaatcctttatgggctccccatccccttaatacaacgactcaaattctttagcccagcagacctatccacctctcctgtgccatctttacctctgggttttagtacatactggtcttcctgccagaaactcccttttctctctgtctcccctcctgactttttgtggcctgtgtaacccctactcattcttctaacctcagcccaggcattgtctcacactgaaaccttctttgatgctctgctctctccagtttgggtcggtgcctgtggtgaacactacaacgtgccactcagatccccttcaatgtgggacttatcaccagttgctcggagtgctagcacacagg

SEQ ID NO: 539393 - DNA, 645 bp, Homo sapiens
ctgtaatgattagaaagttctttcttaagacwagagcccaggtcaggcgaggtggctcatgcctgtaatcccagcactttgggaggccgaggctggtgcattgcttgagtccaggagttcgtgactagcctgggtgacatggcgaaacctcatctgtgcaaaaaatagaaaagttagctggtcatggtagtgtgtgtctatagccccagctattcaggaagctgaggtgggaggatcccttgagcctgggaggcggaggttgcagtgagtcaagatcatgccactgcactccagcctgggtgacagagcgagaccttatctcaaaaaatattggtaatgaaaagaacctgaatctgtctcctggaaggtgcctgtcccctatccctgcaaaggagacgttcttcaaggatggttgttactatgatctgactgtttctgtctcccccaaatttgtaagttgtacctgccactgaccttcatgtctatggccacaatctcgggcttctcagacttgcattttgcaccttgttatgtggttgattaactagtgtaggtcttccttactagactggactattccctgaggataggggtctacatcttatttttgtacccctagcgccagcccaatgtgtgacacctagt

SEQ ID NO: 539394 - DNA, 645 bp, Homo sapiens
ctgtaatgattagaaagttctttcttaagacaagagcccaggtcaggcgaggtggctcatgcctgtaatcccagcactttgggaggccgaggctggtgcattgcttgagtccaggagttcgtgactagcctgggtgacatggcgaaacctcatctgtgcaaaaaatagaaaagttagctggtcatggtagtgtgtgtctatagccccagctattcaggargctgaggtgggaggatcccttgagcctgggaggcggaggttgcagtgagtcaagatcatgccactgcactccagcctgggtgacagagcgagaccttatctcaaaaaatattggtaatgaaaagaacctgaatctgtctcctggaaggtgcctgtcccctatccctgcaaaggagacgttcttcaaggatggttgttactatgatctgactgtttctgtctcccccaaatttgtaagttgtacctgccactgaccttcatgtctatggccacaatctcgggcttctcagacttgcattttgcaccttgttatgtggttgattaactagtgtaggtcttccttactagactggactattccctgaggataggggtctacatcttatttttgtacccctagcgccagcccaatgtgtgacacctagt

SEQ ID NO: 539395 - DNA, 645 bp, Homo sapiens
ctgtaatgattagaaagttctttcttaagacaagagcccaggtcaggcgaggtggctcatgcctgtaatcccagcactttgggaggccgaggctggtgcattgcttgagtccaggagttcgtgactagcctgggtgacatggcgaaacctcatctgtgcaaaaaatagaaaagttagctggtcatggtagtgtgtgtctatagccccagctattcaggaagctgaggtgggaggatcccttgagcctgggaggcggaggttgcagtgagtcaagatcatgccactgcactccagcctgggtgacagagcgagaccttatctcaaaaaatattggtaatgaaaagaacctgaatctgtctcctggaaggtgcctgtcccctatccctgcaaaggagaygttcttcaaggatggttgttactatgatctgactgtttctgtctcccccaaatttgtaagttgtacctgccactgaccttcatgtctatggccacaatctcgggcttctcagacttgcattttgcaccttgttatgtggttgattaactagtgtaggtcttccttactagactggactattccctgaggataggggtctacatcttatttttgtacccctagcgccagcccaatgtgtgacacctagt

SEQ ID NO: 539396 - DNA, 613 bp, Homo sapiens
atagtaccttataggtaacttttcaatcttcaccttcctctcaccctccaccctcaagaagtccttgtgtctgttgttcccatttgtgttcatgtttactgaatgtttagcacccacttataagtaagaacatgcagtatttggttttctgttcctgtgttaattggcttaggataaatggcctccagctgcatccatgttgctgcaaaggacatgatctcattcttttagctgcatgatattccatggtgttatgtaccacattttctttttccagtccaccactgatgggcatctaggttgattccatgtttctgctattgtgaaaagtgctgtgatgaacatacacatgcatggtctttatggtagaacagtatattcctctgggtatatacccaataatggaattgctgggtcaaatgagagctctgttttaagttccttaagaaatttccaaattgctttccacagtggcagaactaatttacattcccrctagcaatgtataagcattcaaagagtttatcttattcaaaaactataaaaacccagtttgtgatactgtgggcaagagagactatttctgttctctgttgtagaatttattttgata

SEQ ID NO: 539397 - DNA, 528 bp, Homo sapiens
cctttttttcgttgtataagtatcccaaatgttgtagtctctgcacggaaggaattaataaaatggtcagggagagtgtcagtagataagcaaatacactakgctgataaaagcaaaggctgagtgaggcttaatacactatttgtcggaaattccttaaaaaaaaaaaccttaaaaaaaaaacaaaaaacgtagacgagactagagaattgaagaaaaatcactgttcatgggattcaaacctgtgcggaaagtgctcactggtctgaaggctctgggtggttgcgaccccatgctctaagctggggctttatctgcggcgaagcgcaggaggtggaggcgcacaacttggcgacgccacgaaacctaacatgctccacaaggtcttgcaggggtagcggccggggtttggggagggacgtctctgtaggtttactttattcctggcttctgtcttccaagatccctcacaccttaacaacaacaataatattggcaaacacctaaatagcgcggactccggctagc

SEQ ID NO: 539398 - DNA, 544 bp, Homo sapiens
cctagagaattacatgtccctgcacgcacggagaataaagccaggaacgataagtggtaaattatagggaatttgggcggtggtgacatagttaaygccattctcgccctgctgggacgcgcactttgcgtttctgaaattctcagtctatatggtgtgatatcccaggaaagctgcccgagtcctcccatttgttgagtacccttcgattcattctgtgggtaaatcaactgttagtagaggaaattgaaattgtttaaatattcaaagccgtgagtgcgggggcgggacgttagggtagatggtgaccaggaggaatttccaacattttcccgtcttaagatctggagcccagcagggccataattttccactcagttgtaattggtgccaagtagcttttggacattccaagaccacagatgtttctctcaaattgtcctcccaccctgttaaaatctgttggggagcgtagcttacttgctctctcaccagaaacgcggagaaggtggatgcaagaaggactttgcggaaatcgaaccag

SEQ ID NO: 539399 - DNA, 606 bp, Homo sapiens
tcaaatttgacccactcccttctaaaaaattattgggattttgattgagagtgtattgaatctatagattattggggagaatcaacattcttacatgaattttctaattcatgaacatggtatagcattccatttctttagggtcttaatttttcccaataatattttatggttttctgtgtcrgtcttgatcatctttattagatttatttctagacatctgacatttcttccatgtaattgttagtagtgtcatttttaaaaatttactttctgtttacagagacttagcattgatttttatatattgactttgtagccagcattctaataacatatagatattttaggtctttacatataccattcgcaaatgatgacagttgtatttcttcctttcaaatctttatactttttttccctcttattacattagtatgacatctactaccatgataaaaagaagtggtaatagctggcatctttgtctggaaggcctgctgtgaccttaactgtaggttcctttctccagtgactcatctgagattacccttctctcatacctccaacatttttgagacttggatattccaagcctgtgctaac

SEQ ID NO: 539400 - DNA, 491 bp, Homo sapiens
ttagttttcatggttagaaacaattatttccttgttctgacccagtgtttaggagagggagaataaagtttgaattgtacaatagtgttctttcaaatatgataactcattaataatataaaatattatttataaatgtttttcataatcaaaaaactgttattataaatgataatatcttatcaatttttctaatatcacttatatttatgccatgtggacataatattttaaaaatataattgtttcataaaataatgaaaggtggtgtatctatagaatctccaatacaataagtatttaaagttccttttattataaatcagttgtttggattatgaataagtctttaaatgtagatatcattttgacyatcatctgtatcactagcacatcatttgtttcaatatttgactactttctgtaaaagaatctttcccaaagattatatggcatggccccagcatgttgtaaataaaataatttaaaac

SEQ ID NO: 539401 - DNA, 491 bp, Homo sapiens
ttagttttcatggttagaaacaattatttccttgttctgacccagtgtttaggagagggagaataaagtttgaattgtacaatagtgttctttcaaatatgataactcattaataatataaaatattatttataaatgtttttcataatcaaaaaactgttattataaatgataatatcttatcaatttttctaatatcacttatatttatgccatgtggacataatattttaaaaatataattgtttcataaaataatgaaaggtggtgtatctatagaatctccaatacaataagtatttaaagttccttttattataaatcagttgtttggattatgaataagtctttaaatgtagatatcattttgaccatcatctgtatcactagcacatcatttgtttmaatatttgactactttctgtaaaagaatctttcccaaagattatatggcatggccccagcatgttgtaaataaaataatttaaaac

SEQ ID NO: 539402 - DNA, 636 bp, Homo sapiens
agtaatctagcttacttgtgtaactttcaccattttaattgcaacttctattgtatatatgtaaacatacacagataatagagatttatataccttacattttggtcgagaaaactcatataggtcctttttcctcaaaactttattttgacatagcattcaaataattggctatagggacatggacaattgggatttttcagtctttacctgacaaataaattatggtctttctttgtattcattttctgttgattcaaattaaagttttaaattgtcacagtagaaataggatgatcacttttatttcataatttttgtagatgatttcaagtttttcaggaattcaattataattttgatgatttgaatttaattctataggaaattgrgttatagggataggaagagttttgtgaacaacaaacctacgtacatgcctgtacatctttttcatgtagccaattaaaaactaagatggcatttagggtaacttttttcatagtcatacatttttgtacctagactcactgtaagcaacaaaagaataaagtgtttggaatcaaggtcagagattaaagtttatcgtcagcgttagaggctagtgtaaagggcaataattgttaaaacaatctg

SEQ ID NO: 539403 - DNA, 532 bp, Homo sapiens
cctgaccaacatggtgaaaccccgtttctactaaaagtacaaaattagccgagtgtggtggtgggtgcctgtaatctcagctactcaggaggctgaggccggagaattgcttgaacctgggaggcagaggttgttgtgagccgagatcacgccactgcactscagcctgggcagcaaagtgaaattctgtcttaaaaaaaaaaaaaaagactattttactcatcttccctagaagattttacattttgattttacaaaactatgttgacactgagacaatatatctctcttgaggaccctcatagagtggacagtatctaatgtggtgagcacatcctctctaatgtatttagggtaacatgataataaatttaatggagatatttgtaataatgcccaatgtaagcaaatgccattttgccagagtaaactttaagaaaatcaatgcaacagggctgagttggtgggcagctcacccctcacagtcatcccagcccagggctaaactactttctattttctaagaagaagc

SEQ ID NO: 539404 - DNA, 532 bp, Homo sapiens
cctgaccaacatggtgaaaccccgtttctactaaaagtacaaaattagccgagtgtggtggtgggtgcctgtaatctcagctactcaggaggctgaggccggagaattgcttgaacctgggaggcagaggttgttgtgagccgagatcacgccactgcactgcagcctgggcagcaaagtgaaattctgtcttaaaaaaaaaaaaaaagactattttactcatcttccctagaagattttacattttgattttacaaaactatgttgacactgagacaatatatctctcttgaggaccctcatagagtggacagtatctaatgtggtgagcacatcctctctaatgtatttagggtaacatgataataaatttaatggrgatatttgtaataatgcccaatgtaagcaaatgccattttgccagagtaaactttaagaaaatcaatgcaacagggctgagttggtgggcagctcacccctcacagtcatcccagcccagggctaaactactttctattttctaagaagaagc

SEQ ID NO: 539405 - DNA, 571 bp, Homo sapiens
aaaacagataaacaaggtaaaatgttacaagagagcaagcatatttacaaaaaattatacaattaaatatccgatgatttaaaaataattgaaattaaaattcaaaggaaagcagaaagaatactttctatctcattctatgaggctatttttctaatgccatcaccaccatagcaaaaacaaaacaacaacaaaaacctgtagggaaatatctctcataaacaaaaagcaaaaaaccttaacacaatattagtgatactgacaaatgaatcctaaaatttatatgaagaggcaaaagacccagaatagctaacacaatactaaagaataaagttggaagactgtcacaacctgacttcaagacttactaaaaatctacagtaatccagacagcctggtgttggtgaaacaaaagatacaccgatcaacagaatagaagattagcactataagacagggtgagaaaaaaaaaaaaattagaagagcccagaatcagacccacatmaatacagtcaactgatctttgacaaaaaagcaagggcaattcaatggggaaaaggtatctttcagc

SEQ ID NO: 539406 - DNA, 571 bp, Homo sapiens
aaaacagataaacaaggtaaaatgttacaagagagcaagcatatttacaaaaaattatacaattaaatatccgatgatttaaaaataattgaaattaaaattcaaaggaaagcagaaagaatactttctatctcattctatgaggctatttttctaatgccatcaccaccatagcaaaaacaaaacaacaacaaaaacctgtagggaaatatctctcataaacaaaaagcaaaaaaccttaacacaatattagtgatactgacaaatgaatcctaaaatttatatgaagaggcaaaagacccagaatagctaacacaatactaaagaataaagttggaagactgtcacaacctgacttcaagacttactaaaaatctacagtaatccagacagcctggtgttggtgaaacaaaagatacaccgatcaacagaatagaagattagcactataagacagggtgagaaaaaaaaaaaaattagaagagcccagaatcagacccacatcaatacmgtcaactgatctttgacaaaaaagcaagggcaattcaatggggaaaaggtatctttcagc

SEQ ID NO: 539407 - DNA, 651 bp, Homo sapiens
actatcaaaatgttacaggagggtggaaatttttgcggtattctcagcaaaggtaacagtgcctggcacatcagcaggtgctcaagaatttgttgaataartgaatgactatctgggcactcagataaaaaaaagataccaatcttactcaaaaatagctattatgaagaatctcatttttcttgccttttattccttattctgcccttcattttcaccctaagagggctagaagcatcaaccctctggccccctgacctcaaagagtcctcaagtgccagcctgacaaacactcagggacaggagtacccagtgccccccacccccactgctgtccagtgtccctcccccattgcacaactgtgcaaggcaagggaaagggcagggagggagtgagagacggagggaggcaagctgttgcaagctatctatagcaactgaaaagtcagtcaaagaagaaaagtcattaaccagtagcatctttgttctggaagcctgttgtctgtgccctgcccctgcctccccctgctccccaaaaaattctcaccttggacagttttcagagagaagccatagctgcctccttccttcacgagatagcagagccggggctgggtccaagtttgcacacctccattcatcacaggggaa

SEQ ID NO: 539408 - DNA, 540 bp, Homo sapiens
actatcaaaatgttacaggagggtggaaatttttgcggtattctcagcaaaggtaacagtgcctggcacatcagcaggtgctcaagaatttgttgaataaatgaatgactatctgggcactcagataaaaaaaagataccaatcttactcaaaaatagctattatgaagaatctcatttttcttgccttttattccttattctgcccttcattttcaccctaagagggctagaagcatcaaccctctggccccctgacctcaaagagtcctcaagtgycagcctgacaaacactcagggacaggagtacccagtgccccccacccccactgctgtccagtgtccctcccccattgcacaactgtgcaaggcaagggaaagggcagggagggagtgagagacggagggaggcaagctgttgcaagctatctatagcaactgaaaagtcagtcaaagaagaaaagtcattaaccagtagcatctttgttctggaagcctgttgtctgtgccctgcccctgcctccccctgctccccaaaaaa

SEQ ID NO: 539409 - DNA, 637 bp, Homo sapiens
tgcaccatggggctgcccctcctgggctggaggctgtgccctctgcaggatctgagaaagtccagtcctgagatgggacagtgctgcccatggtgggtgcccggtgcctgacagcagtcccccagggagtgaccacatcacccagccggggtccagggagcctggcctgagacctgcccagtgcattgagggtgcacctggagcccactgcgcctgatgcccccacagccctcacagggtctgacctcccagcatgcacctgcctctccctgcaccctgctgcccaccctgcctgttccctggcttcctccatcctgtgcagcccatagactgtgaccatctatctggccactgtggcccttcctttccctttgtcctgttggaatctctgagcaagatctcccaggtccatcgaaacacctgctttgtccagttttgactgggtctttgggcactactgggccatcccaactgtccacagggccctcaataacgtgcattgcacctgacatctcccagcagtgctcagcagcccctgctgaccaggtccaggtccctgctggccatatcccacacatcaggtcctccctgaccacacyctcactgattagaaccccatgaccaggccccactaacc

SEQ ID NO: 539410 - DNA, 415 bp, Homo sapiens
  misc_feature (1)...(415): n = A,T,C or G
nnnnnnnnnnnnnnnnnnnnnnnnnnnnnnnnnagcattaatgtctgcaatattcataatctatccacttctcagcaggaataacctaaaaggcttctaggcattcttatgagcagatgactatttgtggtatagatataaaaaaagagttaaaaaaacttctgaattctaaaattcaactctataattgagggatttatattatctatagactatatattatgaaccaatatatgctgtcttgaaaaccttgaaatctttatgaaaatataytataaaaaaggagttaaagctcaaatacttataaggatgaaggaggttacctaagtaagtgaagtactcaggtgggcacagtagcaaactggagaatatgtgcctcctacccagggcaacctctgcgcagcagaccaagcag

SEQ ID NO: 539411 - DNA, 547 bp, Homo sapiens
ggttagggctgagtgcgtggtgatattatctccattttacaggtgtggaaactgagrtgcggaaagggtaagagctcgctggaggtctcagagctgtgggtggagccagggcgtccaggctgcgccgcgcggcctatctcggcgatccagcagccaagccgcgaaagccagacccccctcagcaagcagcgccccagaaccgcaggccgtcgtttgtggggccagaactgatggcccaggcccagagggggtgcagggccgctcaaggtcacacagccccagggaacagaggctgctaacgctgctgtctggctctgggcagggagtgctgggggtttccccactctcctggttcatccaccggccccggggagcatggcccctgcaggggcaggagccaggcccagcccgcagcagggaggcgcctgcgagccccagctggatctgtcgggcggctgcggcctcctaacggcgggccgggatgataacgatattgagggtaggggctgaggaatttgattagatatcaagggtgatcagagacctt

SEQ ID NO: 539412 - DNA, 547 bp, Homo sapiens
ggttagggctgagtgcgtggtgatattatctccattttacaggtgtggaaactgaggygcggaaagggtaagagctcgctggaggtctcagagctgtgggtggagccagggcgtccaggctgcgccgcgcggcctatctcggcgatccagcagccaagccgcgaaagccagacccccctcagcaagcagcgccccagaaccgcaggccgtcgtttgtggggccagaactgatggcccaggcccagagggggtgcagggccgctcaaggtcacacagccccagggaacagaggctgctaacgctgctgtctggctctgggcagggagtgctgggggtttccccactctcctggttcatccaccggccccggggagcatggcccctgcaggggcaggagccaggcccagcccgcagcagggaggcgcctgcgagccccagctggatctgtcgggcggctgcggcctcctaacggcgggccgggatgataacgatattgagggtaggggctgaggaatttgattagatatcaagggtgatcagagacctt

SEQ ID NO: 539413 - DNA, 659 bp, Homo sapiens
tttctctccttcatcgctagattgtaagtttcatgagggcaggatttgtttccactttgttgctgctttatctccaatgacttttagagagtaagcacacagtaaatgcctgttaaaagaatgattgaattgcatgaggacaaagaaacttttattttactgtcataatgccatgacttcctgaaaatctccatgtggatctctatgtcagctttttactgcctctacttaattttctccaagaccttccttggaaatatctgtaggcttaggaagttttagtagtaaatagtggagtaaataaataaataaataaaataaaataaaataagttaygaaatatacctagcagccatgaaacctcaacttataaaatgcagagaagaccagatacgtaacactctcacctgttggaggtggctgaggagttggtctttgtgtggcctaaatcagaactcagatggcaaaagtgactagctcaaatctcagggtagtggaatctgcaagaagcagtgagtatggcttgtgaaaaatgtaccaagctacagaaccagggatgccagcggaaagaggtttttgattaaaaaatgcaatagaatgctgaggcctctagaagaggcaggagtgaatctcctagggaaattaagacattaataaca

SEQ ID NO: 539414 - DNA, 451 bp, Homo sapiens
ccacaattcataggtgagtgtaagcagaccttagtaggatctgaagatgctggagttgtctaagccccggaaattcctatactaataacctaaggctcctcccaggacaaagccctttactgagcataaattgctagcagtagaatccaamatgaggagtagctaggaaataatttgtctggacaagggtggaaaagagaggcagactcagaaaatatgaggagatagatggatggatagatagatagataggtatatagtagatagatgatgaatggatgatagatattaggtagatgataaataataatgataatgagatagatagatagaagaaacagagatatagtcacattgtgaaaacaaaaaagggaactctaaagccacaaagtaagaaataatgtctgacccagccttccttcttgaatttataagaaaacttatttcactt

SEQ ID NO: 539415 - DNA, 451 bp, Homo sapiens
ccacaattcataggtgagtgtaagcagaccttagtaggatctgaagatgctggagttgtctaagccccggaaattcctatactaataacctaaggctcctcccaggacaaagccctttactgagcataaattgctagcagtagaatccaacatgaggagtagctaggaaataatttgtctggacaagggtggaaaagagaggcagactcagaaaatatgaggagatagatggatggatagatagatagataggtatatagtagatagatgatgratggatgatagatattaggtagatgataaataataatgataatgagatagatagatagaagaaacagagatatagtcacattgtgaaaacaaaaaagggaactctaaagccacaaagtaagaaataatgtctgacccagccttccttcttgaatttataagaaaacttatttcactt

SEQ ID NO: 539416 - DNA, 529 bp, Homo sapiens
aggcagccatgactatgacacaggagagcttttggcaggtaggtgaggaagaacctacttcctaagacttgatatatcatatctaaaggacctctgaatgtaactggggaaagccccacaaagaagctttgaagatttgtgggctaggtgttgaccctgggcaagcaacaggctggcaagaacatgaccattcacagagtttatccyctgatcccagacagcgtgtgccatgtggtctctgagagcaagaattttcatgatgcagtttccagcaggtatgaggtatccccagtaccttgggcccactgcgggatctgcaggggctggtagccttctgagaacaaaaacatgaccttattagctgtggccccaaaggtgattccataggaccatcggttactgaaagtgcccacgaagtccagaggcctgcaaacaacagaaacagtttgtgaggccagaaggtggctctgagacattcccacagatcatcgccaaagtagagatcccaccctgaggagggattattgaa

SEQ ID NO: 539417 - DNA, 385 bp, Homo sapiens
gaaaaacttaagagggtagagatataattttgtctcccctacacattcatgccttcctagccacagttgactggactatgggcctgtctttgaatgggctgatcagatgtctgatcttatattttgaatctgtgaccctaaggacatgaacwagttagctgttaaagtacttgtctggaaagtcataaaaagttgggatcagagtcagtgccagaggagagccaaggttacagggaagcagagattctaagtcagagaggaaaatggtagaacggtgctaagaaggccccagtaacacagaggggcagtatgagagagaaaaaatcaatctcccacagattcccatctcaagagatccagttcccatgaggcctgttctgttggt

SEQ ID NO: 539418 - DNA, 510 bp, Homo sapiens
gtctgctaaactgaggggaacttctaggagtggtttcatttccttcttgaaattcctaacttcagtacttgtaaaaggagcatttacaaagccaatctctccctgtcccatgggaacttccctamgagggaacatgctagatgcctgctgtgtggaagggatagggaagttctcaatatccctcttacactcttgtaattcttttcttaaatttggataaggatttaaaggagcagttggcttggctcccctgtagtctctgggtctttcttcctctaaccctcctgctgccccttgatcttcctgtccccttttttgtgagacgtatgaaggggcaagcacgatagggggtcccagggcttttcactgggtgagggctcttcaccaggctctttttcttcttttttgagggggatcatgggggctaattccttgattcagcagagagtaacctatctcttcttgtgaggatgaagttttattattcacagagagaattaaagcttagaa

SEQ ID NO: 539419 - DNA, 562 bp, Homo sapiens
ctggatggcatgaatcccctgggaccgagaggagtctcctgggatactcttctatactcttcctctaaaaagctaatccactrggacttagatttttttttcttctcttacccccgttatcactccttagagacaaaatgctggtcaggcagtcggatactggtattgagggaagaaagaatttctgccctctggattgtctcatgcttgtgaagggagaacagctattccaaagtacaaggaaaccccgccccgcagtgaggcaggaacctgaaaagcaaaatgcatttggggcacagtggggacacggcacaggtttctgggggagggtgggcattgagtacttccctgagcaggatggggtgggaggacacagtggggacactgggagagacactggtgtcatccaatccaatgctggtattttgagggagagacagaaatgattcctgccctctggattctttcacacttgtgaagggagaaaaacaaccttaaagaacaagaaaatttcttcccaggaagatgacacaaaaacctgccaagcaaactgcaccttagg

SEQ ID NO: 539420 - DNA, 506 bp, Homo sapiens
atattttaaaggtcacttatcacaataccatcccatgtacggagctatcggtgatagattaggtagatgtagatatctcaatgcagaaatggtgacaattagtatttttggctcttactcagaaattaacrgctaaggtagaaaatttctctaaaacaacctcatatgtatgagccaatcatttcaacctcatatgttgaaatgattgctaatacatctgcaaaatcttagtaaaggaacacacttccagaaccaaacaactgacagttccatgaacacgcaccttaaccctcagcacaacttggttttgctgtcatgataaaaccaggaaaagagccaggatatcgttgatttaaaggcttaatggtctctcttttggggattatagctccagtaaaagaatacttggatgtggactattaatatatgtgcaattatttataaactacatgtccatataaatttgttaataaaacacatggaagccatataacagaaagagataa

SEQ ID NO: 539421 - DNA, 584 bp, Homo sapiens
tgtccaattatattttaaaggtcacttatcacaataccatcccatgtacggagctatcggtgatagattaggtagatgtagatatctcaatgcagaaatggtgacaattagtatttttggctcttactcagaaattaacggctaaggtagaaaatttctctaaaacaacctcatatgtatgagccaatcatttcaacctcatatgttgaaatgattgctaatacatctgcaaaatcttagtaaaggaacacacttccagaaccaaacaactgacagttccatgaacacgcaccttaaccctcagcacaacttggttttgctgycatgataaaaccaggaaaagagccaggatatcgttgatttaaaggcttaatggtctctcttttggggattatagctccagtaaaagaatacttggatgtggactattaatatatgtgcaattatttataaactacatgtccatataaatttgttaataaaacacatggaagccatataacagaaagagataaaataggaaatctgatgttttattctcttaagatatatttagttcaccccatgtatttcacacccttctc

SEQ ID NO: 539422 - DNA, 506 bp, Homo sapiens
atattttaaaggtcacttatcacaataccatcccatgtacggagctatcggtgatagattaggtagatgtagatatctcaatgcagaaatggtgacaattagtatttttggctcttactcagaaattaacggctaaggtagaaaatttctctaaaacaacctcatatgtatgagccaatcatttcaacctcatatgttgaaatgattgctaatacatctgcaaaatcttagtaaaggaacacacttccagaaccaaacaactgacagttccatgaacacgcaccttaaccctcagcacaacttggttttgctgtcatgataaaaccaggaaaagagccaggatatcgttgatttaaaggcttaatggtctctcttttggggattatagctccagtaaaagaatacttggaygtggactattaatatatgtgcaattatttataaactacatgtccatataaatttgttaataaaacacatggaagccatataacagaaagagataa

SEQ ID NO: 539423 - DNA, 584 bp, Homo sapiens
tgtccaattatattttaaaggtcacttatcacaataccatcccatgtacggagctatcggtgatagattaggtagatgtagatatctcaatgcagaaatggtgacaattagtatttttggctcttactcagaaattaacggctaaggtagaaaatttctctaaaacaacctcatatgtatgagccaatcatttcaacctcatatgttgaaatgattgctaatacatctgcaaaatcttagtaaaggaacacacttccagaaccaaacaactgacagttccatgaacacgcaccttaaccctcagcacaacttggttttgctgtcatgataaaaccaggaaaagagccaggatatcgttgatttaaaggcttaatggtctctcttttggggattatagctccagtaaaagaatacttggatgtggactattaatatatgtgcaattatttataaactacatgtccatatamatttgttaataaaacacatggaagccatataacagaaagagataaaataggaaatctgatgttttattctcttaagatatatttagttcaccccatgtatttcacacccttctc

SEQ ID NO: 539424 - DNA, 569 bp, Homo sapiens
  misc_feature (1)...(569): n = A,T,C or G
ctggccttatgcattttctagtgtaaatttgttttatctctactgtcgacttaatgatcttatatggttataataatccttccggngattttgttagattagacaaaatagttattcaccctcaaatawaaaaacaccaatataaaaataacatgtattaagtgcttactacatactgggcactgggtactaagtgcttaacaaatcttttcttcctcacaacagtgacctgtgcccgttttacatattaggaagcagtcataggagggtatacatgtctgagattatgcaaccagtaagcactgatactgagatttgaacccatgtctgttttagaagtcatactttaaaccactacataacatgtcctctaataatgaggatttatatcctattccttccattatttatacctcttattatttatttatttatttatttatttatttatttatttatttattgtcttcacaggtcttgggcttgccttcaacttgaatccagctctgaccatgattggcaagtatttctacaagaggcgaccattggccaacggactggccatggca

SEQ ID NO: 539425 - DNA, 550 bp, Homo sapiens
tcttccaggaagttgtgtctgacgccctagtctgtacaaggtgccctgcccccacagccatgtgtctgcactgcctcctgctcttccttttatcactgcacttaacacactggattgtaattgcctgttcactcatctgtctcccttcaactagtctgtgggctccttctggacccacagtacttagtacactgactggcaaacactggtgttcaataactatttgacaattaatacattcattgaaaagagaaaaaaggtcaactctccaatcccttggtggatctggaagaggcagcataaaggtgggaagcctgtgggattgatctttgggcagttggctggctcaagagagargcaaactttctcctatcaaatgacagagggtgaaagactccctgcctgagggcacctcttcaagaggcatgaagaccatttgctgaagtcattgactccagacctcaaagggcttgcagaggttgctggactgaatgaaggaaacttgtacaggtcagggaggcttccttgataacacaggtctccctggctg

SEQ ID NO: 539426 - DNA, 598 bp, Homo sapiens
tgcagggcatgatcttctgacagtggyaaaagtgcaagaaggcatgcccaaccacagagcacatttcaagcttctgcacacatcatgtctgctaatattccatgggccaaagcaaatggcaatatcaaatccaaagtcaagaggaggagaaatatactccatgcaccacaaacccttgcccaggtatagatacataatactattaaagaggatgatggattggaaccaataattcagtctaccacaatcactgaactgccctaagcttttgtttcctcatttgtcaagtgggaaagatggaatctatctaaggcttggcaggtcacataaagaaaggcactagaatgatttcgttctttctcctcaccacccgctcgaccctccctcttactgccttgagggttggcgaaagagaggagacaggcgaggttaagagattttatagggcaggtttcacaaggtcagagaaattacattaaattaacactgactacattaaacatggaatgcctttttggagtgttggtccccacagctcagcattcatcttatccataggaatctgtgagatccaattaggtaacatctatgtgacctt

SEQ ID NO: 539427 - DNA, 502 bp, Homo sapiens
catctatgtgaccttactagttcttgccattgccaattctagtccatttccaagccccctgtaacctcactctatccatccctttagagctctttgggagtttctgatcastcccacccttcactccagccttactaggccctagcacctgtcgttgtgtctcatctactctcaaatcttaaaagtctattccttttcagcctctttccctctctcttttgtcctgctagcttatccaaaaggcaactttatggggaaggtctcttaatccctcatgctgggtgagtttacccttaacttctcctactgggatatttacttcattgtagttacatgtttgattgtttcttattcttttcagagtgctaaactgtgtgaaggacagtgtatgtcttatttaccactatattcccaggtctagcacaggctgggacactgggtgcttgataaactctttgttaaagagtgaataaacacatgaagaaaaaccattatggcatgg

SEQ ID NO: 539428 - DNA, 618 bp, Homo sapiens
gtcatccacagctgctgggagaggaaataagttattcgcactctgatctggggcatcccttacttgctgtgggcatctacccaagcaggagcattgcttatgyggatgctatgctgcccacgtggctaatctgcatgtgtctcctgggacaaaataataagcgcttccatttgtatggcacttcaaagtctacagagctctgtcgtaatttttttttttttatacacaacaaccaacttgtaagacatgcaagtgtcattggcttcattttatagatgaaaaaatgaaggctcagcatcttgttaaggttatacatctagggaacttcaaagccaggtaatctcctcatcaaggaatatacttttagcataaaaaatctcaaggccttcttttgagccctaaagatacctcttaccttgtcactgaacataatgttgaaacatgccaaataaagggattcagggaaacagggtgtcaagttatgattcagttttaattcttgagggtacagttttattctagtgaaatcatattattaataggtttcatcctagtttgatttagagggagaaagaaaaagagagagtgaaagagatagatagacaaactttgatttca

SEQ ID NO: 539429 - DNA, 618 bp, Homo sapiens
gtcatccacagctgctgggagaggaaataagttattcgcactctgatctggggcatcccttacttgctgtgggcatctacccaagcaggagcattgcttatgtggatgctatgctgcccacgtggctaatctgcatgtgtctcctgggacaaaataataagcgcttccatttgtatggcacttcaaagtctacagagctctgtcgtaatttttttttttttatacacaacaaccaacttgtaagacatgcaagtgtcattggcttcattttatagatgaaaaaatgaaggctcagcatcttgttaaggttatacatctagggaacttyaaagccaggtaatctcctcatcaaggaatatacttttagcataaaaaatctcaaggccttcttttgagccctaaagatacctcttaccttgtcactgaacataatgttgaaacatgccaaataaagggattcagggaaacagggtgtcaagttatgattcagttttaattcttgagggtacagttttattctagtgaaatcatattattaataggtttcatcctagtttgatttagagggagaaagaaaaagagagagtgaaagagatagatagacaaactttgatttca

SEQ ID NO: 539430 - DNA, 650 bp, Homo sapiens
aaaggttacacactcacacacacacatctatctatctgtccttctgtctattggtgtgtagatggatagacatatgcacctcttgacaagagcttccccgacatggtgggaagttgttaggagtccctaagtatctagtttgcatgagaatgtctatattaaaagtctctgtccttaatgataaacacgtcttcatatctaatgctaagactcttattagaaacattaaactatgcaatccataatgtattcagtctttggaaatgctgagctacaccatatcattatacaacagcatccccaacaaaactccctccccaacccacctcttccctggcctccctgtcctaaagccagtgacccctcaaagaatatggttgttccatatgggagcctagtcacagaactctaggggaagactcaagatgtgaagtaagaattctgcatggagtacagatggtcaatggggtttcccactctggactgcagaggcccagcttctgaggttgctaggaaacartcacccaggttactgagggaggtgtcgtcgctatccaggtcatggaaaaggggctcggcacctgaaatggagatgaaacactggcatgagggtcttgaagaagtgactcatttcagtgctaggatattca

SEQ ID NO: 539431 - DNA, 615 bp, Homo sapiens
tgatccaggaacactcatcttttccagagactgaccaggccactaggctggccttacgtctgagtgaatgtttctgtttctccttctttacaggaacaaaagtcaggcatttgcctcttttgacatttagtttcattcagtaaatatttttcaaatgtctactacatgtcaggcactgtgctaggcactgggggaaagatgatcatgtggatgttatggtccagcaggaaataactagtcacctttatgtttgcccctaacctgcctttcgtggttaagaacatccagagtcagttcatatagagcagtcagttgcatctaaatttagccctaatcctgggacataaataggacaatgcaaatgcaattatccagtgaattcagagagtgtagacagctactgtaggtaatggaatgtaggaaatattttatgcaggctagtggtcagatttaccagtatgcaacaackctttgccatgattcttcttgaataatgatgcgcaaaattgaccaagtccttgttctctcattcttttagcgttttcttgctggcagatatgagagtaaaaggagagaagaagaaaatagagagatgatgcaagaaagagaattcaa

SEQ ID NO: 539432 - DNA, 520 bp, Homo sapiens
gtggccaagtaaccacaaactgctggccctcctgggattgtgctggtcacggacttggcttcggcagcccaatgacttgttcctccagacatcgcctacgcctgcagtcagttatycttcactcagaccaccagccctctgggtcccagggacgcaaagcatgatgggaagtaggcgggtactggacaggaatgtaaagggccaaggtaagaccaggaaggaagccacttcccccagagtcagcctcctgctagatcctaagacccctctgctctaacaattatttttctaaacagcctcattccaagctgtggaggctggggtggactttaacgcagtaggaacagagtataaagctttccatatcttccacgcagatattatatctagtatatgggtgggattaccccacgccagagattgtgttttcttaaatgcaaagtttattacacccttcatctaaggtgcacaaaccctgggcctgagaaaggaaagggtcacggtggtcactacattacac

SEQ ID NO: 539433 - DNA, 525 bp, Homo sapiens
tttctagcttttaaaataacttcattataaggtgaatctgcaaatcactaggcttttgaagcatgccsccaacataaataagcaaatacaaaaagaaaaaagaataaaagcaaaagaagatgaaggagatttaagagaacatgtaaaaattcaagaaaagtgtgaaagaactgtaattaataaagtaacatataataggcagaaacacggtggttgaagcaattggccctggcagtgaagaatattttatagttgacttggtttagaatttactgatgcatggtgatgataaaaatgaaaactgatatttggtcaactctagtattattctaaaacgttctttattctaaaacgttctacaataaaccccttattatctgtacccaaaagagattgctcctaccaaccatcccttaatgtgctgctaagttaatatcctcaaagcaatgagagaagcatttgtactcagtccagatgggagtaggtgcattaagcacttctgaatgacagttttcgaacaaaatc

SEQ ID NO: 539434 - DNA, 525 bp, Homo sapiens
tttctagcttttaaaataacttcattataaggtgaatctgcaaatcactaggcttttgaagcatgccgccaacataaataagcaaatacaaaaagaaaaaagaataaaagcaaaagaagatgaaggagatttaagagaacatgtaaaaattcaagaaaagtgtgaaagaactgtaattaataaagtaacatataataggcagaaacacggtggttgaagcaattggccctggcagtgaagaatattttatagttgacttkgtttagaatttactgatgcatggtgatgataaaaatgaaaactgatatttggtcaactctagtattattctaaaacgttctttattctaaaacgttctacaataaaccccttattatctgtacccaaaagagattgctcctaccaaccatcccttaatgtgctgctaagttaatatcctcaaagcaatgagagaagcatttgtactcagtccagatgggagtaggtgcattaagcacttctgaatgacagttttcgaacaaaatc

SEQ ID NO: 539435 - DNA, 615 bp, Homo sapiens
atgaaagataacataactagtcttagatgtagaattctttcataaattagaaaaagaccacctttatctttaattaataaattttaaaagttatgtttaatttaaacttaagatttttatatagtatactctttgataatacataatttggaarcagattttttaattttaaaaaataaatgtgtaaaataagtatgcatttttaaaaatcaaagacttaactaggattttattgtagagatggtatgatctttctggctatatatacttggaattgggctgggtcctaattgatacataggaaaccaaataacctagagaaaacaatacccatgaatgattagcaaatttcttacatataaaggaaatgatttaacttcaagagactagaataaatgaaaacatattcaaaattgaaaacgttaatggaaggtaagtttggtttgcatttgtgcattttattttgcagactagaacagacataaacttctaattctgttaacattgtagcagttcatggcagtacaggggaagacttttagaaaagaaaaagatactggaggaaaggattgatcttttctgacagcatgtaacactttttacagggtaaacaat

SEQ ID NO: 539436 - DNA, 615 bp, Homo sapiens
atgaaagataacataactagtcttagatgtagaattctttcataaattagaaaaagaccacctttatctttaattaataaattttaaaagttatgtttaatttaaacttaagatttttatatagtatactctttgataatacataatttggaagcagattttttaattttaaaaaataaatgtgtaaaataagtatgcatttttaaaaatcaaagacttaactaggattttattgtagagatggtatgatctttctggctatatatacttggaattgggctgggtcctaattgatacataggaaaccaaataacctagagaaaacaatacccatgaatgattagcaaatttcttasatataaaggaaatgatttaacttcaagagactagaataaatgaaaacatattcaaaattgaaaacgttaatggaaggtaagtttggtttgcatttgtgcattttattttgcagactagaacagacataaacttctaattctgttaacattgtagcagttcatggcagtacaggggaagacttttagaaaagaaaaagatactggaggaaaggattgatcttttctgacagcatgtaacactttttacagggtaaacaat

SEQ ID NO: 539437 - DNA, 615 bp, Homo sapiens
atgaaagataacataactagtcttagatgtagaattctttcataaattagaaaaagaccacctttatctttaattaataaattttaaaagttatgtttaatttaaacttaagatttttatatagtatactctttgataatacataatttggaagcagattttttaattttaaaaaataaatgtgtaaaataagtatgcatttttaaaaatcaaagacttaactaggattttattgtagagatggtatgatctttctggctatatatacttggaattgggctgggtcctaattgatacataggaaaccaaataacctagagaaaacaatacccatgaatgattagcaaatttcttacatataaaggaaatgatttaacttcaagagactagaataaatgaaaacatattcaaaattgaaaacgttaatggaaggtaagtttggtttgcatttgtgcattttattttgcagactagaacagacataaacttytaattctgttaacattgtagcagttcatggcagtacaggggaagacttttagaaaagaaaaagatactggaggaaaggattgatcttttctgacagcatgtaacactttttacagggtaaacaat

SEQ ID NO: 539438 - DNA, 426 bp, Homo sapiens
tacttatccagctacatctttctacgaggcacttgctcctcagagaaaccagctccaggacctttcttcatgaaatataaaagtgattcatttttttttaaacgaaggctgcgtatcacttgaattgttttcatttgcatcataaggtttttaattactactgtcattgttttcacttccctaaacttgtagttaaagattcaaagtgtattcacctctcaaggcttaaattctattagatggtgcatattttgttattggcttactgttttaccagaaaatcacaacaaactattgcaaataagyaagttgaaagtaaactggttgtataaattttacaatttccattagttaaatatggtagcaacaaaattataaaacctatatgaacaatattcttccataaagctttgtgtaagaaaaata

SEQ ID NO: 539439 - DNA, 363 bp, Homo sapiens
acctgccactgtcatggggaagctggtgcccttgaccaggggtcctgggaactggcctcaccctgctgggcccctgcctggagcacaaggtggaccagaggtgtcgggctgcctggataccccaggtgcacagtcagaggagcccaggccccagacgcatccacagcagatcctcctgttygtgagtctctgggagggtaggccaggcggccactcagcagggtcctgtcccatcctctccccaaccctcccagagctgtaaggacactgctcagctcagcctaggtccatgaccctgggggtactggggctggagctgctgtctccaccatggtcacttaggggacaagtggtgtgcccgag

SEQ ID NO: 539440 - DNA, 433 bp, Homo sapiens
gtggcttctatgtggggaggctgagggcctcctgtccccacccagatcttgccagcagggagcaagaggcacctgccactgtcatggggaagctggtgcccttgaccaggggtcctgggaactggcctcaccctgctgggcccctgcctggagcacaaggtggaccagaggtgtcgggctgcctggataccccaggtgcacagtcagaggagcccaggccccagacgcatccacagcagatcctcctgtttrtgagtctctgggagggtaggccaggcggccactcagcagggtcctgtcccatcctctccccaaccctcccagagctgtaaggacactgctcagctcagcctaggtccatgaccctgggggtactggggctggagctgctgtctccaccatggtcacttaggggacaagtggtgtgcccgag

SEQ ID NO: 539441 - DNA, 363 bp, Homo sapiens
acctgccactgtcatggggaagctggtgcccttgaccaggggtcctgggaactggcctcaccctgctgggcccctgcctggagcacaaggtggaccagaggtgtcgggctgcctggataccccaggtgcacagtcagaggagcccaggccccagacgcatccacagcagatcctcctgtttgtgagtctctgggagggtaggccaggcggccactcagcagggtcctgtcccatcctctccccaaccctcccagagctgtaaggacactgctcagctcagcctaggtccatgaccctgggggtmctggggctggagctgctgtctccaccatggtcacttaggggacaagtggtgtgcccgag

SEQ ID NO: 539442 - DNA, 363 bp, Homo sapiens
acctgccactgtcatggggaagctggtgcccttgaccaggggtcctgggaactggcctcaccctgctgggcccctgcctggagcacaaggtggaccagaggtgtcgggctgcctggataccccaggtgcacagtcagaggagcccaggccccagacgcatccacagcagatcctcctgtttgtgagtctctgggagggtaggccaggcggccactcagcagggtcctgtcccatcctctccccaaccctcccagagctgtaaggacactgctcagctcagcctaggtccatgaccctgggggtactggggctggagctgctgtctccacyatggtcacttaggggacaagtggtgtgcccgag

SEQ ID NO: 539443 - DNA, 621 bp, Homo sapiens
gcatgtgcactggtggacagcgagccttccctcctgcagaggctacaccgcctccccacaggcctggtgcagaccagagctgtcacaggcacttgtgagtgtggagtgctcagagagtagaggctattcatgtaatgtctataaaaaaataacaccaaggccgggcgcggtggctcacgcctgtaatcccagcactttaggaggccgaggcgggcggatcacgaggtcaggagatcgagaccatcctggctaacacggtgaaaccccgtctctactaaaaaatacaaaaaattagccgggcgtggtggcgggcacctgtagtcccagctactcagaaggctgaggcgggagaatggcgtgaggcggagcttgcagcgagccaagatcgcaccactgcactccagcctgggcgacaagagcgagactccgtctcaaaaaataaaaataaaaaaataacaccagcttctcagtctctccctcagatgcctcctttgtgtaatagaaaaatcacagtactcttcccatccttcaagctggcaattrgatggaagcactgtggggaaggagcgctgagagtggatggctacctccctcctgccagcctctccacaaagaccgcag

SEQ ID NO: 539444 - DNA, 545 bp, Homo sapiens
actacatggtaaaagaaaccagttactaaaagccgtgaagttagtgtgagttcaaagatctcagcaaaataaagttacggagacagataagcactttaaaaatgtaaatggaagcagaagctttacctcttcagactcacgttcaggtgtcagggtcagctacctcgttactaggaccctgagcccaatgggaaaataggaaaaccagctatcctgaaagtcataaccaamccatgggcttattaaatgcccatacagcaacagcagccagacctttgctgagtgtggcccattccttccatttccctgtgctcactccctctccttgcaagacggttcacgcgtgattcttaaaaattagctttgcatttgatgtgagttgatccaaatttgaaagaaaaagcaaatattttgtgcttcaggttggtgagcgccttgggaggtatgaggtagagaaacgctgtgccgtggagaaggaagactacgatctcgccaaggagaagaagcagcagatggagcagtatcgtgccgaggtgtacgagcag

SEQ ID NO: 539445 - DNA, 545 bp, Homo sapiens
actacatggtaaaagaaaccagttactaaaagccgtgaagttagtgtgagttcaaagatctcagcaaaataaagttacggagacagataagcactttaaaaatgtaaatggaagcagaagctttacctcttcagactcacgttcaggtgtcagggtcagctacctcgttactaggaccctgagcccaatgggaaaataggaaaaccagctatcctgaaagtcataaccaacccatgrgcttattaaatgcccatacagcaacagcagccagacctttgctgagtgtggcccattccttccatttccctgtgctcactccctctccttgcaagacggttcacgcgtgattcttaaaaattagctttgcatttgatgtgagttgatccaaatttgaaagaaaaagcaaatattttgtgcttcaggttggtgagcgccttgggaggtatgaggtagagaaacgctgtgccgtggagaaggaagactacgatctcgccaaggagaagaagcagcagatggagcagtatcgtgccgaggtgtacgagcag

SEQ ID NO: 539446 - DNA, 545 bp, Homo sapiens
actacatggtaaaagaaaccagttactaaaagccgtgaagttagtgtgagttcaaagatctcagcaaaataaagttacggagacagataagcactttaaaaatgtaaatggaagcagaagctttacctcttcagactcacgttcaggtgtcagggtcagctacctcgttactaggaccctgagcccaatgggaaaataggaaaaccagctatcctgaaagtcataaccaacccatgggcttattaaatgcccatacagcaacagcagccagacctttgctgagtgtggcccattccttccatttccctgtgctcactccctctccttgcaagacggttcacgcgtgattcttaaaaattagctttgcatttgatgtgagttgatccaaatttgaaagaaaaagcaaatattttgtgcttcaggttggtgarcgccttgggaggtatgaggtagagaaacgctgtgccgtggagaaggaagactacgatctcgccaaggagaagaagcagcagatggagcagtatcgtgccgaggtgtacgagcag

SEQ ID NO: 539447 - DNA, 533 bp, Homo sapiens
gcttcactgtaaaacaagcggatggagggcggcagtcaagaccccctctgaggctgctgttaggagaggggcactaagggtcgggggctgactccctcaccgggtctgtcgcctgacttaacaggtgacctagacacaaagkggtagagtcatttgcccagggtcaggccgggaggatgggaccaagcgagaattccatctcaggccaagccctgacctcaggcatgtgggaggccagtgtttccttccagcacactccaggagcctcccttccccggtgcttttatcagggagcctgcacagcctgccaccctcaagagacgaggacattgtggcccaacctaggctgcagcccctgataactgtccccctccttaaccctgcccgataaggcgcctgctggcctctggggaggctggccaggggagggggggtgcgtggggcagggcagcaggtccggggcagcggctggtacagctagaccggtccctgtctggggaggatgcgtggctggccccaggcagtggcagcag

SEQ ID NO: 539448 - DNA, 519 bp, Homo sapiens
ataatgagaatgcccagtcaggaccctgggtctgctcctgtttttaggttaggagagattaggttaggttaggatctccagaggataaatgacttgaggaaaaggaatatcacacctcatatccgatcaacctgcttgaatgcttgaggccatgaacacctcagcacagctccaagtcagtttggaaggcttggttctttcatctgataccacgacttcaaagtactaggagatgtagatggttmtcaggaaatacagaagccaacataatgtattcccctataataatcagagattttcatcaatagggcacagttggctgggtggtccaggctcctgaggaacaaggcaaatgtctaaatctggcttcagaactgagaataatttctctttcacggaacttttctggatgatgatatttctctatataaagcattctctgacccagtggacaaatatttctcacatctctgcctgccttgaaccttgccctcctatcttccatcaacactgctgtca

SEQ ID NO: 539449 - DNA, 519 bp, Homo sapiens
ataatgagaatgcccagtcaggaccctgggtctgctcctgtttttaggttaggagagattaggttaggttaggatctccagaggataaatgacttgaggaaaaggaatatcacacctcatatccgatcaacctgcttgaatgcttgaggccatgaacacctcagcacagctccaagtcagtttggaaggcttggttctttcatctgataccacgacttcaaagtactaggagatgtagatggttatcaggraatacagaagccaacataatgtattcccctataataatcagagattttcatcaatagggcacagttggctgggtggtccaggctcctgaggaacaaggcaaatgtctaaatctggcttcagaactgagaataatttctctttcacggaacttttctggatgatgatatttctctatataaagcattctctgacccagtggacaaatatttctcacatctctgcctgccttgaaccttgccctcctatcttccatcaacactgctgtca

SEQ ID NO: 539450 - DNA, 600 bp, Homo sapiens
tgtctgcaaattggaagcccaggaaagttagtggtgtattatgactccagtccaagccagaaggcctgagaacyaggagagccaatcctgtaagtcccagtccaagtccaaaggccccaaaaccagaaacactactgatatccaagggcaggaggagatggatgtcccagctccagaagagagagtgaacttgtgcttcctccacctctctgttttattcaggccttcaagggattgcatgatgcccactcacactgccaagggtgatcttttactcactctaccaattcaaatgctaaccttttccaagaacaccctcccagacacacccacaaataatgttttaccagtgatctcagcaatccgtagcccgctaaagttgacacacaaaattaaccatcacactatggtaccaaaatttgatagaggagagcaatttttaaaaacatctgaaaagcctccttaggaaggcaataatgaaaagaaaagggttgagaaatattgtgataggtgatgaggctgcaattcctgtaacagaaggaacataaggagactggattgtgaggaaatggaggtagtcacagttatttgactgagaag

SEQ ID NO: 539451 - DNA, 551 bp, Homo sapiens
atgttatcaccatctctgtttattcacaatgccaagaacaccagtggaacagggaaatattcaggaaaacccactttatggtgtcaacttgaccagaaaacraaacacaactccatcattgctttattgaatttggcatcgttctacaaataaactatcatttatattttgtcaaacaaaaagaagaggagaagagatttcaaaagcactgcttctggggagggtctggatcaaaggtaaatgtgtgactttaggtgacagaaaagcatctccactcagatgcatccaactttgagggggcactgactacaggacagtagagacaagggacactcatgaacaagcagcttttccaattctgggtccttttcaaactgtagtatcaacatatatttttaagtttcataaattcttggaacattaaacatatccattcaaacagttctttcaatatggtggatatttgtaggctgccctggaaatcagaacaccttgaatttaattcctgctatgacattggctgactctgtaactttcaccttttttagttc

SEQ ID NO: 539452 - DNA, 506 bp, Homo sapiens
tgcataactctccagtccacagagctaacaaatcactgtgtcatcaaagaagagggaatcatgggaaatagcctgtggttcacyctctaaggcagggagtcaggaggctgtgaggtggcacatttgattcttgctcattaacatagtttctctttgtgtcctcctcctcctctttgcctgcttgcctgttccactgggtaagcagcaagtgcctactcaaatcattatttatcaaatgtgtactatgttcccaacattcattcaatacacctatattgaaagccttttatgagaataacaaaaataacaagatagattcagagtaagattcagagactgaagcaagtccccatatagtaatcacatgttcaactagttgttaagtggtatatataatacatagaaaccaaccgtggaggacctcagggaaaggagccaggaagctgaggaaggctttggagagaagatgacattggaggtaggccttcacccaaaattccacaggt

SEQ ID NO: 539453 - DNA, 506 bp, Homo sapiens
tattagtggtggtattataggtcatttttcctttaaattttaaattgatgttttaatgtttataattagttggcaataaatagaattttttttccttgctggctttaaaaaatttactaggaacacttagaagagagtatttcaaaataaaaagttgtaaggtgaaaacaatcagtagaattgtatgaacacctcccatataaggggcagatgccaggaaaagaagtccttaagttgarccagagttggaagctgacaagcaagaggttggatgccacgatatagaagagcacaaaagaggtatatgacctagcccttgactcacagtaaacttgagagactaggcttacaataaatgattcgaggataacttattcagttatctaaacaacggatgggactggatcactgaggcagtgacctgtgggcaggcgggacaatgcagaggtcaattatgtgccatcggagttgatcagatggacctgggcttaaatccctgtgccact

SEQ ID NO: 539454 - DNA, 569 bp, Homo sapiens
tcctactctccaaaattgttcaaggtcatctgatgagtggcctcaatttattttcagatgtgcatgtgctttacttggggctttgttttggtttttagttcagtttttttttattggggttcaaatatgagacagtcttggggaacctagtagggaaaatctgaaagcaaatacagtaccatactgagaattgtacaatatatatatatatatatatatatatatatatatatatatatatatatatatatatatatatataaaagaaacaatacagaaacttcattctgctatcacaaagccttcaaagaaatgacgattgatgccttagtgaggttcactagaagggaaaaagttggcagatgtttcccacagaaggaaaagcatgagcaaaattctggagacttgccatagcttcttatgcttctggaggcagtatggcttcagggtttggatgtcagcaatccctgaaaccatgtttcacaagtctccagatrccaattttttcattaataaagtataataattcatatctcatggggctgttaaacaagaacataaagtactca

SEQ ID NO: 539455 - DNA, 569 bp, Homo sapiens
cggggctcccgacaaccagtgtgctggggcacaatcggcccaggttgcacgccccctgaaccaccctcgcgtctccccgacccctctctcgctggctcagatgaatgatgacggcagagggcagagagcttagaggacgcsgtaccaagccccgtccctcgcccatcccaacgaaggtcttagaatacaatcaaccaactacaggaagaatttgtagaggaggttttcttgtgtgtctgcatcgccccacccacaggtaaccccagagccagagatggagtctaggaaggtttaggagcaatcccggctgaatgcagacgtataccctacgtggtcatggaacacgatgttgtcttcctagagatgtgacatgccagtttcaccattaatccagggacaggacccttcatcaggaagggaagcatcccaacaaaaccttacagccctattagctgcctgtatcccagacatctcctgttttagggtattctacctcctcgtttttcagtttcgccagcaactgggctctaccaatagcttcaaggagggagaagcttcctgactcccag

SEQ ID NO: 539456 - DNA, 616 bp, Homo sapiens
tctccctgagcctattgatggcaaatttcatcctgtgaaaaatgggaacaagacacccacttcataggactattatatggttgaaattaaatatgtgtaaratgcataacatggtgcctggcacacagtaaacacaaaacagatttcttcctctatagcatttaaatgggaagtgtttagcgtttacttgccatgtgcatgagtgaatttgggaaaagtggggggaggatatggggcaaagaaggacagaaagggcctaagagtaggaagaatttaataccagaagatgggacaagacctgggtctagaaacctcttctgcagataaagtagctgcaaattatagggaaggagtcctcaggctgctttccttataaccatttattttcctgcaccttacatcaagaacgttaggcactggttaagaccctgtccccttgcagcagtagagaaaacaggaggaaggagacgggaggtagaaatttggaagctagcagttgaaggccaactcagaaagcgtcaggtggaattccattcctaattgacatcaccatcctctaactgcagcaattctctccagcccttttatgtgctccctacagaaccaagcttccaca

SEQ ID NO: 539457 - DNA, 616 bp, Homo sapiens
tctccctgagcctattgatggcaaatttcatcctgtgaaaaatgggaacaagacacccacttcataggactattatatggttgaaattaaatatgtgtaagatgcataacatggtgcctggcacacagtaaacacaaaacagatttcttcctctatagcatttaaatgggaagtrtttagcgtttacttgccatgtgcatgagtgaatttgggaaaagtggggggaggatatggggcaaagaaggacagaaagggcctaagagtaggaagaatttaataccagaagatgggacaagacctgggtctagaaacctcttctgcagataaagtagctgcaaattatagggaaggagtcctcaggctgctttccttataaccatttattttcctgcaccttacatcaagaacgttaggcactggttaagaccctgtccccttgcagcagtagagaaaacaggaggaaggagacgggaggtagaaatttggaagctagcagttgaaggccaactcagaaagcgtcaggtggaattccattcctaattgacatcaccatcctctaactgcagcaattctctccagcccttttatgtgctccctacagaaccaagcttccaca

SEQ ID NO: 539458 - DNA, 616 bp, Homo sapiens
tctccctgagcctattgatggcaaatttcatcctgtgaaaaatgggaacaagacacccacttcataggactattatatggttgaaattaaatatgtgtaagatgcataacatggtgcctggcacacagtaaacacaaaacagatttcttcctctatagcatttaaatgggaagtgtttagcgtttacttgccatgtgcatgagtgaatttgggaaaagtggggggaggatatggggcaaagaaggacagaaagggcctaagagtaggaagaatttaataccagaagatgggacaagacctgggtctagaaacctcttctgcagataaagtagctgcaaattatagggaaggagtcctcaggctgctttccttataaccatttattttcctgcaccttayatcaagaacgttaggcactggttaagaccctgtccccttgcagcagtagagaaaacaggaggaaggagacgggaggtagaaatttggaagctagcagttgaaggccaactcagaaagcgtcaggtggaattccattcctaattgacatcaccatcctctaactgcagcaattctctccagcccttttatgtgctccctacagaaccaagcttccaca

SEQ ID NO: 539459 - DNA, 390 bp, Homo sapiens
ctgaaggaacctgtctgctctcaccccagcttcacagaagatggcagggactggttattactaacctgcctcctagtcttctgaggctcyaaatggttttgtcagcaagctgagcttccccacaatcccacagactagaaggggttggaaagaacaagccttagtacaatactgctccccacctctaagggatctgctcctctgagtcccagaagttcaccaccttcatttgatttctgctacaggaagactctgggaatccagctctggacccagcacttcctgatttttgaagtagagagttgacaaccctgttgtcatcaatacaactgtgctaggtgggtgggaaaggaaaatatcttgggctcccaaaatcactaagctaaaagg

SEQ ID NO: 539460 - DNA, 610 bp, Homo sapiens
aggaacctgtctgctctcaccccagcttcacagaagatggcagggactggttattactaacctgcctcctagtcttctgaggctccaaatggttttgtcagcaagctgagcttccccacaatcccacagactagaaggggttggaaagaacaagccttagwacaatactgctccccacctctaagggatctgctcctctgagtcccagaagttcaccaccttcatttgatttctgctacaggaagactctgggaatccagctctggacccagcacttcctgatttttgaagtagagagttgacaaccctgttgtcatcaatacaactgtgctaggtgggtgggaaaggaaaatatcttgggctcccaaaatcactaagctaaaaggaaaactcaggatcatgctggatggaagtcaggactagattgcagctccgactcggatggacagagaagcatgtggaggctcgtatcatgaatttttgctccagaacgactggaggaataaattacaaaacctcagaggacccacaggccccctgaaggaagcagatggctcctgcaggacccaggagacacaccaaatactgtgttagtatttacttatagaaa

SEQ ID NO: 539461 - DNA, 610 bp, Homo sapiens
aggaacctgtctgctctcaccccagcttcacagaagatggcagggactggttattactaacctgcctcctagtcttctgaggctccaaatggttttgtcagcaagctgagcttccccacaatcccacagactagaaggggttggaaagaacaagccttagtacaatactgctccccacctctaagggatctgctcctctgagtcccagaagttcaccrccttcatttgatttctgctacaggaagactctgggaatccagctctggacccagcacttcctgatttttgaagtagagagttgacaaccctgttgtcatcaatacaactgtgctaggtgggtgggaaaggaaaatatcttgggctcccaaaatcactaagctaaaaggaaaactcaggatcatgctggatggaagtcaggactagattgcagctccgactcggatggacagagaagcatgtggaggctcgtatcatgaatttttgctccagaacgactggaggaataaattacaaaacctcagaggacccacaggccccctgaaggaagcagatggctcctgcaggacccaggagacacaccaaatactgtgttagtatttacttatagaaa

SEQ ID NO: 539462 - DNA, 610 bp, Homo sapiens
aggaacctgtctgctctcaccccagcttcacagaagatggcagggactggttattactaacctgcctcctagtcttctgaggctccaaatggttttgtcagcaagctgagcttccccacaatcccacagactagaaggggttggaaagaacaagccttagtacaatactgctccccacctctaagggatctgctcctctgagtcccagaagttcaccaccttcatttgatttctgctacaggaagactctgggaatccagctctggacccagcacttcctgatttttgaagtagagagttgacaaccctgttgtcatcaatacaactgtgctaggtgggtgggaaaggaaaatatcttgggctcccaaaatcactaagctaaaaggaaaactcaggatcatgstggatggaagtcaggactagattgcagctccgactcggatggacagagaagcatgtggaggctcgtatcatgaatttttgctccagaacgactggaggaataaattacaaaacctcagaggacccacaggccccctgaaggaagcagatggctcctgcaggacccaggagacacaccaaatactgtgttagtatttacttatagaaa

SEQ ID NO: 539463 - DNA, 610 bp, Homo sapiens
aggaacctgtctgctctcaccccagcttcacagaagatggcagggactggttattactaacctgcctcctagtcttctgaggctccaaatggttttgtcagcaagctgagcttccccacaatcccacagactagaaggggttggaaagaacaagccttagtacaatactgctccccacctctaagggatctgctcctctgagtcccagaagttcaccaccttcatttgatttctgctacaggaagactctgggaatccagctctggacccagcacttcctgatttttgaagtagagagttgacaaccctgttgtcatcaatacaactgtgctaggtgggtgggaaaggaaaatatcttgggctcccaaaatcactaagctaaaaggaaaactcaggatcatgctggatggaagtcaggactagattgcagctccgactcggatggacagagaagcatgtggaggctcrtatcatgaatttttgctccagaacgactggaggaataaattacaaaacctcagaggacccacaggccccctgaaggaagcagatggctcctgcaggacccaggagacacaccaaatactgtgttagtatttacttatagaaa

SEQ ID NO: 539464 - DNA, 642 bp, Homo sapiens
gctgccagtatcctgcagaaggaactgactcggagaccagaaactgccctaggcaagcctccagggaaaggtgcttcagtccaatgggaagaaaaacccagcccctcactgcctggccagaggacccggggtaccatggctggagcgacrtagctggctggaaatgcgagaggggcaagggacactaaggtgaacccccaagagcttgttcaatcatacctagtaaaggccaaactattggggagctagtagaacagggttttgccaagacaagtacaaaagggtgagggagatattagtatgattaatcaatgccacctgaggcagcaactctgggtgtgtccacaccacacttcagtcactgcctggctgtgacgagaagttccttcagccactgccactgagaactgcatcttccaaggaagatatctccaccataacttgtcctagttcaggcttggcattcgggactaagaacacagcactctctcttgccgcaaacccactaacagacataatagacaccacaacatgtgccaaatttatatttacaccctcaccagacaaaggggtttttgtcttttccccaagccaagttctaatacttctaaattacaacacagaaagaggaaaatggcagac

SEQ ID NO: 539465 - DNA, 642 bp, Homo sapiens
gctgccagtatcctgcagaaggaactgactcggagaccagaaactgccctaggcaagcctccagggaaaggtgcttcagtccaatgggaagaaaaacccagcccctcactgcctggccagaggacccggggtaccatggctggagcgacgtagctggctggaaatgcgagaggggcaagggacactaaggtgaacccccaagagcttgttcaatcatacctagtaaaggccaaactattggggagctagtagaacagggttttgccaagacaagtacaaaagggtgagggagatattagtatgattaatcaatgccacctgaggcagcaactctgggtgtgtccacaccacacttcagtcactgcctggctgtgacgagaagttccttcagccactgccactgagaactgcatcttccaaggaagatatytccaccataacttgtcctagttcaggcttggcattcgggactaagaacacagcactctctcttgccgcaaacccactaacagacataatagacaccacaacatgtgccaaatttatatttacaccctcaccagacaaaggggtttttgtcttttccccaagccaagttctaatacttctaaattacaacacagaaagaggaaaatggcagac

SEQ ID NO: 539466 - DNA, 641 bp, Homo sapiens
ctgtggaccactcacaacattttctcactttattttgcttcagagtcagtgtactgcaatgatttctcctttgcttgctttatatgtttaaaattgtcttccctaaaagctgaacttaaaattaatgtttgctaccaaaagggggtagcagtgcctggtcatgtaggcatatgtcccactctgtcrgtacagagggtaagcagcctcttcctttttaaaaaatttattatgatgatttacaaaaattgaagcttacaggataaacactcaacaaaaaagtagccagtctcaagaaaccaatttttatgtatgaattaatattattttattaatccatggccaggatgattcttaagattatttcttaattctctgaacagcttaaaagagagaaactccttcttttttatttacttgctttgaggttgatactcttaggtttttaacataactctctagctttgacaactcctcttataatttaaaatccttatagcttccatttacaagtaaggattatatctattttagtctcctcaatcagctacctaggagaagacttgccacttggaaagagaaagatagcacccactctccagttctcttctcccaaagttgcccgtatttcccttccctgaagc

SEQ ID NO: 539467 - DNA, 452 bp, Homo sapiens
agtgcaaatcttaaagagcttctaaccagaggagtctcaattgcctttgataatccagagctcacttctaatgagttcctttgcagttttcagccccaagctttttgagctctgaggcagttcaactaatagcctttattgccatgagccttccccygaaacacaccatagctatccgcaaagaaagagcaaatcttttagctcagcggaatctttgcagactctatttaccagttacaaagctcagaaagaggcagggtcaaaggatcctccctccatggaagaagggatgggcagaagagagtgtgggaggatgacagagagggagccgtcatcctggagcacaaagatttcaggcagtcactggttcttaactctggcacctgccaagtggagccgggcactcatcaccagatcttgctcctaaagtaatttaagatccttgagtgaca

SEQ ID NO: 539468 - DNA, 452 bp, Homo sapiens
agtgcaaatcttaaagagcttctaaccagaggagtctcaattgcctttgataatccagagctcacttctaatgagttcctttgcagttttcagccccaagctttttgagctctgaggcagttcaactaatagcctttattgccatgagccttcccctgaaacacaccatagctayccgcaaagaaagagcaaatcttttagctcagcggaatctttgcagactctatttaccagttacaaagctcagaaagaggcagggtcaaaggatcctccctccatggaagaagggatgggcagaagagagtgtgggaggatgacagagagggagccgtcatcctggagcacaaagatttcaggcagtcactggttcttaactctggcacctgccaagtggagccgggcactcatcaccagatcttgctcctaaagtaatttaagatccttgagtgaca

SEQ ID NO: 539469 - DNA, 452 bp, Homo sapiens
agtgcaaatcttaaagagcttctaaccagaggagtctcaattgcctttgataatccagagctcacttctaatgagttcctttgcagttttcagccccaagctttttgagctctgaggcagttcaactaatagcctttattgccatgagccttcccctgaaacacaccatagctatccgcaaagaaagagcaaatcttttagctcagcggaatctttgcagactctatttaccagttacaaagctcagaaagaggcagggtcaarggatcctccctccatggaagaagggatgggcagaagagagtgtgggaggatgacagagagggagccgtcatcctggagcacaaagatttcaggcagtcactggttcttaactctggcacctgccaagtggagccgggcactcatcaccagatcttgctcctaaagtaatttaagatccttgagtgaca

SEQ ID NO: 539470 - DNA, 638 bp, Homo sapiens
ctgagtgcttgactgcaacctcatgagagaacttgaggcaattctaaccagctaagctgctcccagatttctgaccctccaaaactgtgagtactaaatacttgcagttttcagccactgaggtgatttgctatgcagcaatagtaatagtaacaaacacacagacttctgaacctttccccaatccaaggtcattctgtggagttagagacccagctctcccattcacaaagaagctattattctctctacagtaaagaaagacaaagaagtcagagcagttttttaacgctgcacatcaggaaactagatgtatgctgaaaatttgrgagtgataagtaggacctttcccagtctgtagaatataccaccaaagcatgctcactcgagaatgtgcttttgattactaccaagcacacttttttttctttttgaagatatgtgcaaacaatgaaaacccttcttgctgaaattacaatacagccgtacattttggttgaaatgtttatttggagatttcaaagtcaaggttgatatagccaaaagataatacagattagactatcatggaaacaaaaagaatctaaaatttgatattgtttgtacactagggtcaccgctcatgttaacatttcctt

SEQ ID NO: 539471 - DNA, 493 bp, Homo sapiens
aacccttcttgctgaaattacaatacagccgtacattttggttgaaatgtttatttggagatttcaaagtcaaggttgatatagccaaaagataatacagattagactatcatggaaacaaaaagaatctaaaatttgatattgtttgtacactagggtcacygctcatgttaacatttccttcattgcatccactttctcggagctggtgttgtagggttagatgtgagtgtgaatgagcatgcgtacagtggacaaaatccccccattctgtaaatgcatgtgcctattattctgggcagtgaacccagcctgctttaagtctttgttatttgaatagtgtcccagattctcctttgaaatgtgcggttcacctatttttattaaccttaatatggagctttctgatgcttttttgatagattcttggtcgtgcccaggtacacttcctttcgttttaaacaggtcatatatttctctgtgctggccttca

SEQ ID NO: 539472 - DNA, 463 bp, Homo sapiens
gtgagaattaaataatattattcttatgaaatgtttaagatagggcctagcatttatcatttactcaataaatattaatcatgtaattatatatgtaattatggtgataatgataatgttgctgccatgagatgtcaggtttcacaatataaaatcattacagaattctgtttggaactcctgtgagacctagtatgaatcacctatagttatgaggctgctctagcaaakaaatctaagagaacaggcaacttcatgaagaggttaaagtgtcctagggcagtggtctccaacccttttggtaccaggaaccattttcaaggaagacaacttttccatggacagggtgggggatggatttggaatgatcatcaggtattagatcctcataagaagcaggcaacctagatccttcatatgcccagttcacaatagggttcccgttcctatgagaattgaatgc

SEQ ID NO: 539473 - DNA, 623 bp, Homo sapiens
gctggccaaagatggaataaactgctgtggagagctgtctaccacaagagatgttcaagaagagagaaaatatggtacctcttgactagaatgttgtaaacatcagatccagcatgggatggacagaaagactagatgaattttaaagttcccgccaatgcataagtcaacaaagaggaaaatttcagccactccttaattaattaaaagagatagcaaaaaaagtctgtgggtggggtcagctttcaactgatcctatctcttcaaaggaaaaaagaacatagaaacacactccaactcaccatcagcctctcctatagaatgttctaaaggtgggaaagcaggagtcatagatgctgtgactaagacctgctgctcagttgactctgaatttggggcacatgccagacaagttctgtagtacagagaagaaatgtgtgtagcacagacctggccctcaaggatcaaaatcatgtggcagagacaactcaacaccatgtgattctctcaaatatttattcatcatatttcayctttagtttttgtcagtagggtgttcaggggactctcttggttcaaaaaaaaaaaaagcaaatatactttactaaatgtacatattctct

SEQ ID NO: 539474 - DNA, 555 bp, Homo sapiens
gatggaaaaaaccaagtggaaaagtttcagtttattcaatataaggctccacattcaaatggcaaaactgctctgttcaggtcatatttcaagcccaacctatgtcagtccttagtaaaagcttcaaagcaataccagtcctttcccagcctggtttaccttgattagacaaacacagacacccatgtctgagtaagcactgagaccatggatgagtgctaaggagattaggtgtttggatagacacagctagggtgtgtgtatgtgtgtgtgtgtgtgtgtgtgtgtgtgtgtgtgtgtgtagagagagagagagagacagaggcaaagacagagacagtgctcattgggcagaggacagagtagctgagatagtatcatttgtttattcatttgctttttcataaaatacttagtaagcacctacttggtatgtgccracactttaataggtactagaaagagcaagacagacagaatcacagtcttcagagaatttacagcctatggggttaattaaaccatgattatcatagcatgtaacaaacaaagaga

SEQ ID NO: 539475 - DNA, 555 bp, Homo sapiens
gatggaaaaaaccaagtggaaaagtttcagtttattcaatataaggctccacattcaaatggcaaaactgctctgttcaggtcatatttcaagcccaacctatgtcagtccttagtaaaagcttcaaagcaataccagtcctttcccagcctggtttaccttgattagacaaacacagacacccatgtctgagtaagcactgagaccatggatgagtgctaaggagattaggtgtttggatagacacagctagggtgtgtgtatgtgtgtgtgtgtgtgtgtgtgtgtgtgtgtgtgtgtgtagagagagagagagagacagaggcaaagacagagacagtgctcattgggcagaggacagagtagctgagatagtatcatttgtttattcatttgctttttcataaaatacttagtaagcacctacttggtatgtgccgacactttaataggtactagaaagagcaaracagacagaatcacagtcttcagagaatttacagcctatggggttaattaaaccatgattatcatagcatgtaacaaacaaagaga

SEQ ID NO: 539476 - DNA, 449 bp, Homo sapiens
cttcatggccaacgcaagattatggatcacctaaagagtagactaaaagtactattgtctagtaacttcaagtttgtaggttaactcactgtgaatcaaaagcttttaaaaatcttttgcgtggtcatagtttgtagtgtcttgtacctctcatctcagaagcaattgattcatagaaaaaattatttaggatttcagatkaaagatgaagaactcttccaataagaaggaactgatttggttggattatttgtttctttcacccctgagttttcatggaaatcaggtttaaaatgttagaagcagttggttttcagcattgggaaagcttatctgatcaggcatgcgaagtggcctatgtcggatttctgagctaggaaaggctaggggaggttgaggagattattgtacttgtaattcctgagcatggttgagacacaaggagagga

SEQ ID NO: 539477 - DNA, 449 bp, Homo sapiens
cttcatggccaacgcaagattatggatcacctaaagagtagactaaaagtactattgtctagtaacttcaagtttgtaggttaactcactgtgaatcaaaagcttttaaaaatcttttgcgtggtcatagtttgtagtgtcttgtacctctcatctcagaagcaattgattcatagaaaaaattatttaggatttcagattaaagatgaagaactcttycaataagaaggaactgatttggttggattatttgtttctttcacccctgagttttcatggaaatcaggtttaaaatgttagaagcagttggttttcagcattgggaaagcttatctgatcaggcatgcgaagtggcctatgtcggatttctgagctaggaaaggctaggggaggttgaggagattattgtacttgtaattcctgagcatggttgagacacaaggagagga

SEQ ID NO: 539478 - DNA, 449 bp, Homo sapiens
cttcatggccaacgcaagattatggatcacctaaagagtagactaaaagtactattgtctagtaacttcaagtttgtaggttaactcactgtgaatcaaaagcttttaaaaatcttttgcgtggtcatagtttgtagtgtcttgtacctctcatctcagaagcaattgattcatagaaaaaattatttaggatttcagattaaagatgaagaactcttccaataagaaggaactgatttggttggattatttgtttctttcacccctgagttttcatggaaatcaggtttaaaatgttagaagcagttggttttcagcattgggaaagcttatctgatcagrcatgcgaagtggcctatgtcggatttctgagctaggaaaggctaggggaggttgaggagattattgtacttgtaattcctgagcatggttgagacacaaggagagga

SEQ ID NO: 539479 - DNA, 516 bp, Homo sapiens
tatatgtattataatttttattcaagacaggttgaaattaatagatttcttacattcactgcattaaaggaatatttatggctttggtaatattttaaatttcaaattaaaaaatttgaatatctgaattaagtatctctgatttaactctgtgtgtgtgtgygtgtgtgtgtgtgtgtgtgtgttgggaggaggaatagaccttggaattgttttttcaaaactttttttataatagtgcctaatctcagttggcaaggaatagctgtccagaatgctgcatagatctagtgaaaagatttagggaagttgtaactagtttaataaccatctgtggagtgacatagattgacacacccaattacacaagacctgagtctgagaactgttgatgtgcaatcatcccatcagcatctgctcatcattatcaacaacaataatggctcaactatttctttgaggccacatgaaaagacagtgtacccatagcaaaggataagtcagacctgaaaaaaa

SEQ ID NO: 539480 - DNA, 516 bp, Homo sapiens
tatatgtattataatttttattcaagacaggttgaaattaatagatttcttacattcactgcattaaaggaatatttatggctttggtaatattttaaatttcaaattaaaaaatttgaatatctgaattaagtatctctgatttaactctgtgtgtgtgtgtgtgtgtgtgtgtgtgtgtgtgttgggaggaggaatagaccttggaattgttttttcaaaactttttttataatagtgcctaatctcagttggcaaggaatagctgtccagaatgctgcatagatctagtgaaaagatttagggaagttgtaactagtttaataaccatctgtggagtgacatagattgacacacccaattacacaagacctgagtctgagaactgttgatgtgcaatcatcccatcagcatctgctcrtcattatcaacaacaataatggctcaactatttctttgaggccacatgaaaagacagtgtacccatagcaaaggataagtcagacctgaaaaaaa

SEQ ID NO: 539481 - DNA, 504 bp, Homo sapiens
gcttcacacataatgcctggcaccctgatgggaactgctggtcgttgtgctcagctaggcccctccccttgtcatgtggtctcatggcctctgcacgtggtttatctagcatggtagtttgacttatccagcagcttaggccttagaagacatgtcccaagagtctcacatggaagctacaaggcttcttacttacytagcctggccagtcagacatctcttctgctgtattctattagtcaagtaagtctctaagggtagcccatattaaagggaggagaattagattccacctctcaatgggagaagtagcaagtaatttgtggtcatctttaatctactacagacactgtatccttgatctcagaatgatgcctctttgtctggaaagggcatttgttttttaagcccaaggttagagagacagacatggagctgtgatggatcaagaagacatcatgttctgactaaccaggtgatcacagggatcactgaagtgacaga

SEQ ID NO: 539482 - DNA, 656 bp, Homo sapiens
tttctgaatctttacttattcatcagtaaaatggacttaataatcacttatgtctatttcactgattgcagcgacttcataaatgaaataattcatgtgaaactattttgtaacatgtaatgccctttaaatatgttggctgttataattgttactattactaaatagtaacctgaaaaattatcggtagagatagtttgctagcagcttggttctttccttkagactgttttggttaccttttgttatgtgacaaaccatcccaaaacttagtgacttaaaacaggggtcagcagcaaactacagcccatgagccaacagtcagtttttataagtaaagatttatagccacacagtgacactcattcatttacacatggtctgtgtctcctctgtgttacagggtagagttgagtacctgtgccagagatgatatgacccacaagcctaaaacactgtctggtcctttaagaaaatgtctgcccacacctggcttaaaacaacaatgatttattatttctcacaattctgttttggcaaactgggcattatcgctgctggtctcacttgggatcactcaactggctgcaactttctgatggcttgactgagactgaaggtctcagacagccctgctcacatgtctggcaggtggt

SEQ ID NO: 539483 - DNA, 609 bp, Homo sapiens
tttcactgattgcagcgacttcataaatgaaataattcatgtgaaactattttgtaacatgtaatgccctttaaatatgttggctgttataattgttactattactaaatagtaacctgaaaaattatcggtagagatagtttgctagcagcttggttctttcctttagactgttttggttaccttttgttatgtgacaaaccatcccaaaacttagtgacttaaaacaggggtcagcagcaaactacagcccatgrgccaacagtcagtttttataagtaaagatttatagccacacagtgacactcattcatttacacatggtctgtgtctcctctgtgttacagggtagagttgagtacctgtgccagagatgatatgacccacaagcctaaaacactgtctggtcctttaagaaaatgtctgcccacacctggcttaaaacaacaatgatttattatttctcacaattctgttttggcaaactgggcattatcgctgctggtctcacttgggatcactcaactggctgcaactttctgatggcttgactgagactgaaggtctcagacagccctgctcacatgtctggcaggtggtgactgtcag

SEQ ID NO: 539484 - DNA, 609 bp, Homo sapiens
tttcactgattgcagcgacttcataaatgaaataattcatgtgaaactattttgtaacatgtaatgccctttaaatatgttggctgttataattgttactattactaaatagtaacctgaaaaattatcggtagagatagtttgctagcagcttggttctttcctttagactgttttggttaccttttgttatgtgacaaaccatcccaaaacttagtgacttaaaacaggggtcagcagcaaactacagcccatgagccaacagtcagtttttataagtaaagatttatagccacacagtgacactcatkcatttacacatggtctgtgtctcctctgtgttacagggtagagttgagtacctgtgccagagatgatatgacccacaagcctaaaacactgtctggtcctttaagaaaatgtctgcccacacctggcttaaaacaacaatgatttattatttctcacaattctgttttggcaaactgggcattatcgctgctggtctcacttgggatcactcaactggctgcaactttctgatggcttgactgagactgaaggtctcagacagccctgctcacatgtctggcaggtggtgactgtcag

SEQ ID NO: 539485 - DNA, 609 bp, Homo sapiens
tttcactgattgcagcgacttcataaatgaaataattcatgtgaaactattttgtaacatgtaatgccctttaaatatgttggctgttataattgttactattactaaatagtaacctgaaaaattatcggtagagatagtttgctagcagcttggttctttcctttagactgttttggttaccttttgttatgtgacaaaccatcccaaaacttagtgacttaaaacaggggtcagcagcaaactacagcccatgagccaacagtcagtttttataagtaaagatttatagccacacagtgacactcattcatttacacatggtctgtgtctsctctgtgttacagggtagagttgagtacctgtgccagagatgatatgacccacaagcctaaaacactgtctggtcctttaagaaaatgtctgcccacacctggcttaaaacaacaatgatttattatttctcacaattctgttttggcaaactgggcattatcgctgctggtctcacttgggatcactcaactggctgcaactttctgatggcttgactgagactgaaggtctcagacagccctgctcacatgtctggcaggtggtgactgtcag

SEQ ID NO: 539486 - DNA, 609 bp, Homo sapiens
tttcactgattgcagcgacttcataaatgaaataattcatgtgaaactattttgtaacatgtaatgccctttaaatatgttggctgttataattgttactattactaaatagtaacctgaaaaattatcggtagagatagtttgctagcagcttggttctttcctttagactgttttggttaccttttgttatgtgacaaaccatcccaaaacttagtgacttaaaacaggggtcagcagcaaactacagcccatgagccaacagtcagtttttataagtaaagatttatagccacacagtgacactcattcatttacacatggtctgtgtctcctctgtgttacagggtagagttgagtacctgtgccagagatgatatgacccacaagcctaaaacactgtctggtcctttaagaaaatgtctgcccacacctggcttaaaacaacaatgatttattatttctcacaattctgttttggcaaactgggcattatcgctgctggtctcacttgggatcactcaactggctgcaactttctgatggcttgactgagactgaaggtctcagacagccytgctcacatgtctggcaggtggtgactgtcag

SEQ ID NO: 539487 - DNA, 558 bp, Homo sapiens
taccttttagggctacaggagagctagtgggcattctgaaattcttcgcaaagtgatagttctctcactggcctttggtaggagcgtttctatgagaaaaygtgtttcaagcatagaatttcgggatggccaaagatcttaaaagccctctagagctaactcctagctgatgtgggaaaacttttaacagtatccctgaaaggcgattcttgagttttggtcaagcaccttttgtgacaggaagtttattttgtctcatgatgtatgtactcagtaaaaatttgatgtataaacatatggatagagtgtggcaatatctttattacatctaactctactagagaattcatccttatatctaattgataactgcctccctgtaattcctactttcattccctttaaaatagttttaaaaattataagctgttttacaaacaacaggaatatacaaagaataattaaacacttgtccatgtgttgaatatctaaatgttagaaaacattatttttagtttattttcctcaggtgaaaaaacaaaagttaccattacagat

SEQ ID NO: 539488 - DNA, 558 bp, Homo sapiens
taccttttagggctacaggagagctagtgggcattctgaaattcttcgcaaagtgatagttctctcactggcctttggtaggagcgtttctatgagaaaatgtgtttcaagcatagaatttcgggatggccaaagatcttaaaagccctctagagctaactcctagctgatgtgggaaaacttttaacagtatccctgaaaggygattcttgagttttggtcaagcaccttttgtgacaggaagtttattttgtctcatgatgtatgtactcagtaaaaatttgatgtataaacatatggatagagtgtggcaatatctttattacatctaactctactagagaattcatccttatatctaattgataactgcctccctgtaattcctactttcattccctttaaaatagttttaaaaattataagctgttttacaaacaacaggaatatacaaagaataattaaacacttgtccatgtgttgaatatctaaatgttagaaaacattatttttagtttattttcctcaggtgaaaaaacaaaagttaccattacagat

SEQ ID NO: 539489 - DNA, 578 bp, Homo sapiens
atacagttgcaaccttcttagtatcctgcccagatcccagtcttctgactgtcttcctatacttaactattaagtagtttccccaaaatgacccaatgagaaaaaaggagagccgggatttgaacgytggtcttcatggttcaaagctattgctcttttcacagttccacgctacccaccctagataaatatgtataatagtgatcatatttattgtctatgtgtaaattgatgtaaagtgtcaagggttacttaaagcactactcttctgtttttctatttgccatattaacttatttttaaaatatttttattttcaaggaaggtaaaggtaagaattatccacagatatcaaattagtacagttaaaattgtggaagtttgattatatttgaaaagaatgtgtccattaagaagattaatcattttttgttagtgaagctttatttttaggagaaagattggtaaacaattaatatgttttcaagtacatacattatatgagctagctggggggtctgaatatgatgaagcaaatgtcaagctgggttttttaaaggcagacttgacagttggtt

SEQ ID NO: 539490 - DNA, 535 bp, Homo sapiens
taagtagtttccccaaaatgacccaatgagaaaaaaggagagccgggatttgaacgttggtcttcatggttcaaagctattgctcttttcacagttccacgctacccaccctagataaatatgtataatagtgatcatatttattgtctatgtgtaaattgatgtaaagtgtcaagggttacttaaagcactactcttctgtttttctatttgccatattaacttatttttaaaatatttttattttcaaggaaggtaaaggtaagaattatccacagatatcaaattagtacagttaaaattgtggaagtttgattatatttgaaaagaatgtgtccattaagaagattaatcattttttgttagtgaagctttatttttaggagaaagattggtaaacaattaatatgttttcaagtacatacattatatgagctagctggggggtctgaatatgatgaagcaaatgtcaagctgggttttttaaaggcagacttgacrgttggttgtgttaatggggcatgacaggcaacag

SEQ ID NO: 539491 - DNA, 444 bp, Homo sapiens
tttgaggtttttgttatggctgacagacaaggctaaccattgaaagggatggatctgaataaacacacacacacggttcacagtaatyatttattgaatgaatgaatgaatgaacgaatgaatgagataatgcatcagaaatactgtgtacattttaaggcattgtcccagttgtctattcctgcataaacacacacacacacactcacacacacacacttcctcaagacagatacaagatgggggaaatgtccaccttttctgctccctagacctccagccagcaagtgaggaaatccacttattcagcttccttgccaatgctttggtctcacatgataaatcagaaagatgagaaatggaaaatctgggtcactggcctagccctagggagcactttggagcagaactgaaattaaaattcatgacttctacacagtattg

SEQ ID NO: 539492 - DNA, 640 bp, Homo sapiens
tgaatattcaaggagactctccacagatctctggaattttctattctttctggtactcttccccatgaactctacctgccttggccttctcaaatctctgcatgatctcttcaactcaggcagatcaccaggctctgcctggattccctctctgtgagctctggggcagttaagtaggacagttgtatggcttactttgcttgtttctctcttctcttggataactttcctatgttgtctgatatccagtgtctgaaaataattattttatatatcttgtcctattttttagtaatttctgtcaggggtgaaggggaatgaataccaaccctattaccgcatgctgtctggaagtagaagtgtctttctagccacgttataaattagtagttttcaaccctgactrcatattagaattatttgggggaggtctttaaaaagctgatgtaaggcttcattccagaccaattaaatcagactttttcagattgaggtcttagcatcagtgttctttaaatgcactacaagttttctcatgtataccagggttaaagaacctccatattaaagaaaaggttgcatttatagatcattctgagaaacttttgtattctgtcatttcagctaagacacagaggcg

SEQ ID NO: 539493 - DNA, 527 bp, Homo sapiens
aatccccaatcctagaatttgtcagggacctatttctcttttacccatctcatccagtcattaattctacttttttactctctccctctctctctctctctatagatagatagatagatagatagatagatagatagatagatagatttttttttttgagayggattctcactctatcacccagcaggctggagtgcagtggcacgatcttggcctactgcaagctctgcctcctgggttcaagcgattctcctgcctcaatctcctgagcagctcggattacaggcacctgccaccacgcctggctaatttttgtatttttagtagagatggggtttcgccatgttggccaggctggtctcgaactgctgacctcaagtgatcctcccgtctcagcctcccaaattgctaggattacaggcgtgagccactcacctggcccattctttcttttaagcctcctaacttaagcttcatctttacctctccttatctttgtccaatctgtcttatctgggctctttgtc

SEQ ID NO: 539494 - DNA, 544 bp, Homo sapiens
tttttggcctctttactctgtttttactttcttcatatcacaatgctgtaccaattttaccaagtacacatttgtcccttcatgaagatatcgcactctcctctggagggaaaagtaagtaycatttttgctttttctgaagtttaaattaatgaggaaggacaagtaaatgtttgaagtaccaaagtctaaaacctcaatttaaaaatttcaactttatgaagtttacttaaaatgattgttctcagtgactcctatcatcctatcatgcccccaaacacagtgactgcccatcgtggaattcagcttctctcttattttccaccctatagaatcccctttcttcagttcccctcagccactcctgttcccaagaagtatgaaaatgatatttattataataataaatgttggcctcttcaaagatagaaagaactgttcgtaggatggggttaagggaccagatgccaaggaatgttttcattgtcttttcaaaatgctgagggaaaaggagaatgagcaagctttggtatttcccattagc

SEQ ID NO: 539495 - DNA, 489 bp, Homo sapiens
tctgtcactccatcaccattatytgactgcccttcccctctcaactgcttcatttctgcctcccaaattttatgcagattctttttttggccaatcctatattgaatcatataggaaataggtgtctgaaaaacatagatctcagcctaatcaagttgacataccacaatccaatacatgtcccaatagtgcaataaaacagatattacttccccatttttcagaaaagaagcctaaaatctagcaaggtaacttgtttgaagatacacaatacttcactaagtctatttgagtccagaacttgtcttcccttaactactacagaatactgggagtcttgctgatttttttttttttcaaatcatgactcaaataaaataatcccattccagaagtgctttaggtaagcaattgagatggatgaacccatttgacaattatagtcaacattctagcgcactgaatggtcagatcaagtgagcatttttg

SEQ ID NO: 539496 - DNA, 489 bp, Homo sapiens
tctgtcactccatcaccattatctgactgcccttcccctctcaactgcttcatttctgcctcccaaattttatgcagattctttttttggccaatcctatattgaatcatataggaaataggtgtctgaaaaacatagatctcagcctaatcaagttgacataccacaatccaatacatgtcccaatagtgcaataaaacagatattacttccccatttttcagaaaagaagcctaaaatctagcaaggtaacttgtttgaagatacacaatacttcactaagtctatttgagtccagaacttgtcttcccttaactactacagaatactgggagtcttgctgatttttttttttttcaaatmatgactcaaataaaataatcccattccagaagtgctttaggtaagcaattgagatggatgaacccatttgacaattatagtcaacattctagcgcactgaatggtcagatcaagtgagcatttttg

SEQ ID NO: 539497 - DNA, 643 bp, Homo sapiens
tgtaattttctgttctgagctaatggaaaatttgcagatggtctaggggtttagcatgttttcgcatcaaaaagatgtggtctgtgctccaggtagaaggagagagctaatccactaatcaagtcaacaaatatttattgagtgctacttgatgctcagctagatgctagtgttgtaggggatccatgatgaggagagcttttgcttttaatgaggaaacatgactcacattcaaaagcagcctggcattgtggacagagcacagcatctggaatgaggctgacctggtttagaaatccagcttaaaagtggtatgatcctggaaatttccatttcacatgaaagatacctcttttctttatattaaaatagggatattcgtacctttagagttgttgcaagcattagcaataacatttgtagcrgaactggcatgttggagacactccaaaaatattattctaagatgctatatcatatagcatgttataatttggcccttaataatagttttataaagcctcagaaactagagagaacagttccagccagaatagatgggtaaccactgagcataactaaggtagcacttggaaatgacagaatcaaattcccggaagggatcttataggtttattggccc

SEQ ID NO: 539498 - DNA, 514 bp, Homo sapiens
ctgacattagctgaaataagtgtaaagaggaaaaagccagcatttagatccctggactggctggggatttcttttctcctraagaagagctcctgacttcaggctgcagcccttaaactgaagtgctttcccaccttgtttgctttcatgggagacccgagaaagatgatctgggctactggaggaagagcctattagaaattgtattcgggttctccagagaaacagaaccaattgagtatatacatacaacacacacatacctacatacacaaggaattggctcacataattgtgggttctggcaagtccaaaatctttagagcaagttggaaattctggtaagagctgacgttgcagtattgcatctgaaggttgaaaactcaggcagaatgtctatgttgctgtctggtggtagaatttcttcttttttcaggaaatcgatctttgttcttaaggccttcaactgacccatgcatattatggaggataatctgctttaagttcaactgat

SEQ ID NO: 539499 - DNA, 563 bp, Homo sapiens
aaatggggtcagctgattattacttatatacacgattgttgatattgctaatagaaatttgagggttgttgacgatgtagtcaactgatatgaaaagcctctattaccaatctgtagaccaaacacagcctctgttttcctcatatacaccagataccccatagataccctcctgcaaaaatgcagcagtatgtttgatttttaatgacaggaggattaaattaaagttaygtctacacggatgtcttccttgtgtgttgcaactgttcaagaagtacggtttggggaggtcccctaatgaagtgcataaatagtaactttctttcaaactgtcagtgaagattgctgtattactcatgtgaatttcggtgaccccttactctagaaggagcccagggtagaacacatttttacaaataatacactttgctttgcagctctgataattttgttcctgtctttgagtctgtcatacaaccaggaggctgcttgtttcttaggacaaaggtatttgcagggaaactgatcaaactatttttattaataatctcattattattaat

SEQ ID NO: 539500 - DNA, 604 bp, Homo sapiens
ctgacctgaactttgagagacatggccagagtcacttctggctctgaagaccattgctgtctccttagaggtttcataaaaagtcccttcaggctgatgttccacaggtgagctttgggttggctttcagatgagatcattaaaaggcacagcaaattggctgccaagggttactctgtaaggcaatagtagtaataaaaaaatgttaattgtgctgggatcctcttggggaagttcaaaggggacaaaagaaaaacaggatctttcaaaagtgtcatttaaaaatatgcrgtggcactgaagtgtgagtctgaatatcttaaatgaacataaaatattttaaaatgactttttctgcaaatggtaagctggaaaaaaacttttattaaaaaaaattgcacaaaaccttcaagctcatacgctattcactttctaacaaatggctggttcccattttgaaggatgttaatttgcaatttcccaggcgatgagaggatatgaatttgcatcatatattttcactgtagcccacatctttggtgattccctcattctgatgaaaaggaattggattgggttggggtgaaggtgaggaagagaaaat

SEQ ID NO: 539501 - DNA, 618 bp, Homo sapiens
gtagaggagaagcaagccaggcactgccagcccagagcctgcattatcggggagaaatcatgctacatcacagaaaataacttctttttctcactttataaattagcttggcaatttctagaatgatgaacccttaggctcacagatcgtgcttgtgaagagtggggaaaaaggaaccagaatgcaatgctctttgcagttccaaaaaagaagcctggtgggaattactctggcaatccctagggtaccctattctctaccctccctgactccacttttttctccttagttgcacccctattttggttgctctattgcagaaagctttggctaagacatgggatctcagttggggcttccaggctgkggagaagggcggggaccctgctttttacaggagaaggaccgtgcaaaatgctagattcctgtgcctgatagtcgactagccttttcagatatgggtttatccagtatattgattttgtcacagaagcataaaagcagagataatcagagctagaaatgaaccaaaacatcatctagactcacccctttgctccatagataaggaaattgagacccagagaggctaagtgacctacccaaggttttcacaca

SEQ ID NO: 539502 - DNA, 527 bp, Homo sapiens
cctggatttattgtttttcccaagagaggtgattataacactttatcttccccttttggctttcagccwgtggctctgcatctagtctctaattttctttttgtttaaagggttgttctgtcttcccagccaaagcaaaatgatgatggtaataacgtggttgttatttcttgaaaacctactgtgtgctagacactgtgctttacatatgagatctcatttattaatcttcaccaacattttataaattaggtactatttccctattttatggatgagaaaagggaagcctggagagattaaaaaaacatgcacccaaatcattgaagtagtaggttagagttggagtcaagaactgaacccagggctgtcagcccaagtcttcttactatgtcctgctagaaaaggatgacttaagggtggggtggatatcggacttggctgacttttcctgggacctacgaccatgaggcttttgcagtagagggacatgtaaacctctatggcagcttggttttgctgagcac

SEQ ID NO: 539503 - DNA, 527 bp, Homo sapiens
cctggatttattgtttttcccaagagaggtgattataacactttatcttccccttttggctttcagccagtggctctgcatctartctctaattttctttttgtttaaagggttgttctgtcttcccagccaaagcaaaatgatgatggtaataacgtggttgttatttcttgaaaacctactgtgtgctagacactgtgctttacatatgagatctcatttattaatcttcaccaacattttataaattaggtactatttccctattttatggatgagaaaagggaagcctggagagattaaaaaaacatgcacccaaatcattgaagtagtaggttagagttggagtcaagaactgaacccagggctgtcagcccaagtcttcttactatgtcctgctagaaaaggatgacttaagggtggggtggatatcggacttggctgacttttcctgggacctacgaccatgaggcttttgcagtagagggacatgtaaacctctatggcagcttggttttgctgagcac

SEQ ID NO: 539504 - DNA, 653 bp, Homo sapiens
ctggactttactttcagcctgatttcatggggaaccttggagtgtgcgtaatatcacaaaattgtttctacctttgggcaaaggaccaacattttgtatcccattttcagtctgtcattgtctgaattgctggatgccccaattttggtttctgcccaaaaaaaaaagatgaagtaacttccttcaatgggggacaattctctggagaaagaagcaactatgtgtcactaggcatcaacttgtacatatgaggatgtgtgccccagtccagtagaagggatctgggtggagcactaacagtatctgccatagatkttctcactgaaaatagacctgaggactgaaaaacttaaccggcttctagaatggcactctcctcaagatgcttggcacactgagccattctggtctctcctgtagcaggacaattacagaaagtgtggtcaacccaggccactgagcaaaatatctgtgtttcctctgaaggagcccaaatctactactatgttctaaggtccagcagttagctcccatggtgcagcctgagtttcagatacagcttctagagcgtttaccggacatggaacccaagatgaaaagcatcacatattcatacctgccctgctgcattctctggaaggtgctgcaagcca

SEQ ID NO: 539505 - DNA, 522 bp, Homo sapiens
gctgcttgatctttctttgaggtttggtcaaccaagagcagttggggctttcctctctttcttaatagggcaagaggcatccrcatcacagaaagacccttcaacagacaaggtttttgaagatcccatctacctctcaccactgattaggcattatgcatcttattagacaactgtgcattacagtcattccttggtcatgcaagatatcgatgcctatgatgggtcaggatatcacatgaataagtatggctgtaaaagactgtacatagttcctttggtctgaaaatgaggaccttcttaatgttgatttttcatttttttcttctctccatactgtcctctgtcctctctcttccttttcctcttggtgtttcagattcttttttttttctttccaactttaattttagattcaaggagtaaatgtacagatttgttaaacatgagtcagttgcaaattacaggggtttggtgtacagataattttgtcacccagataatcagcataatatctgatag

SEQ ID NO: 539506 - DNA, 639 bp, Homo sapiens
tagtgctgtattgatgccaaagcgtgagagactgtcacttgattacgatttccaaaggctactgtaatgaatctggcccaattcctgacttggcttggacaagcctcctccctcctccacccactatcccattcctaggttccattttcactttagttcttctaccagagttagatgcatgttttccttaatctttacatttaaaaataaaattaaaatgcaaagtcgtcacatgaaaacacacttctcaattttctttttttaaatatcccaaacatcaaaacagtactactcaataaacrccctcatcaagtgctatgaatacaccagttggcatcagatgcgtctccctagacagcaacgtttctgtgtccacggatcaacagtccacttatgacagagcttccgattcaggcaggccctggcaggctaatttcacctccataattttatatgcaagttaatgctactccctgaaactgctcttccctgagttctgcctgtcagggatggagatggagaagctatccataacacttctctcctccttagccccacaggcaacatgccagcctgtcctccactctgccttcaaagcatgctctgcggctggcgacttcctgccacttggactgctac

SEQ ID NO: 539507 - DNA, 639 bp, Homo sapiens
tagtgctgtattgatgccaaagcgtgagagactgtcacttgattacgatttccaaaggctactgtaatgaatctggcccaattcctgacttggcttggacaagcctcctccctcctccacccactatcccattcctaggttccattttcactttagttcttctaccagagttagatgcatgttttccttaatctttacatttaaaaataaaattaaaatgcaaagtcgtcacatgaaaacacacttctcaattttctttttttaaatatcccaaacatcaaaacagtactactcaataaacaccctcatcaagtgctatgaatacaccagttggcatcagatgcgtctccctagacagcaacgtttctgtgtccacggatcaacagtccacttatgacagagcttccgattcaggcaggccctggcaggctaatttcacctccatrattttatatgcaagttaatgctactccctgaaactgctcttccctgagttctgcctgtcagggatggagatggagaagctatccataacacttctctcctccttagccccacaggcaacatgccagcctgtcctccactctgccttcaaagcatgctctgcggctggcgacttcctgccacttggactgctac

SEQ ID NO: 539508 - DNA, 596 bp, Homo sapiens
ctggagtagttgttgagttgacatggatggaattggtgaagaaatgaatgggctgtataaggttgacagtattcactcataaaggtttagtgacttgactcctgccacaccctcagcaagcagacatgcagttcctaggtgaactgcaccatctggaagactccctaggagaagaaatggggagaggggctgcaggaggcaggttagaaaattctagaacagttggttctccaagacagagtccccttagagtggggctgtaaagatatgtgagaagcatagtcaatgttcacacttgtgctagctttggcagcacatatactaaaactgaaacaatacagagaagattagcatggcccctgtgcaaggatgacatgcaaattcgtgaagcgttccatattttttagtggaagcaattttggaggtagtggaagctacaatgattttggcaattacaataatcagtcttcaaattttggacccatgaagggaggaaattttggaggyagaagctctggcccctgtggtggtggaggccaatactttgccaaaccacgaaaccaaggtggctatggtggatccagtagcagcagcag

SEQ ID NO: 539509 - DNA, 477 bp, Homo sapiens
agttggaatactgtcagttttattaatggaaactgaatgaccgtaaatcattctgagggtagggaatcgggggagggaggaagctctgtttgtacgcttgccagccaggtgtgtttcttcattcagtgaacaagtgtgggctgctggcccaccagacagggggccgggggaccgagtgcccacygttccttctgctgcatcatatccctggcagacgggcagaagcaattcactagccttcaaacctcctggccttgtttataagatagtttaatatttgcttttctttccacagtgttcagagccatcgggagtagtagcacctgctgtcttggagctggaagacgcacagtcagcactgctgtttggtccctcaacccccttccaccatggcaggcttataggccgatttccttgagatctagtaatttcttcaactttagatgaaattgcatgaacgataaataacagatccat

SEQ ID NO: 539510 - DNA, 477 bp, Homo sapiens
agttggaatactgtcagttttattaatggaaactgaatgaccgtaaatcattctgagggtagggaatcgggggagggaggaagctctgtttgtacgcttgccagccaggtgtgtttcttcattcagtgaacaagtgtgggctgctggcccaccagacagggggccgggggaccgagtgcccaccgttccttctgctgcatcatatccctggcagacgggcagaagcaattcactagccttcaaacctcctggccttgtttataagatagtttaatatttgcttttctttccacagtgttcagagccatcgggagtagtagcacctgctgtcttggagctggaagacgcacagtcagcrctgctgtttggtccctcaacccccttccaccatggcaggcttataggccgatttccttgagatctagtaatttcttcaactttagatgaaattgcatgaacgataaataacagatccat

SEQ ID NO: 539511 - DNA, 582 bp, Homo sapiens
tgcccagcttctggctggccattaaggattccatggtgaatgaggccatcattccaatcgccagccrcagaaaccagtgccccaagaggcctcattccctgggctgagcctaagatgcactctttgcagagcagggaaggaatggctgttgtttccagagcccaggatgaaactgtgtgtgagggaactgtttcaggcctggggataacagggcacacgtggtttcaatgttttattcaagcctagcatatacgctgagaagggcaccactcaccagcagacagacgtccatacccaggtaaccagcgaccagatggagaagcagaacacgccccagaagccgtcccaggctctgttttaaccaccacaccctttccccaccaaatatagccgcgatcctactttggaataatataaaacacctttgcctgtttttgaactttataagtttgtctctgccttcctttgctctacaccgtctttgtgaggttcatccacatttttgcaggtagctgagttagtcatccatccacaatgaggagagtatccacttgtctgaataaaacaggatttatttttccc

SEQ ID NO: 539512 - DNA, 580 bp, Homo sapiens
cccactggccaaacccagctagaagcaagctggcaagggagactgatgcaattctccctcctcagcttcccaagtagctgggacaacaggcacatgccaccacacctggctaatttttgtattttttgtagagatggggttttgccgtgttccccaggctggtctcaaacccctgagctcaatctgcccgcctcagcttcccaaagtgctkggattacaggcgtgagccaccatgcatggccttattgcatatttcaaaataactgaaagatggaattggaatgttcctaacacaaagaaatgataatgcttgaggtgatggatatcattacacattatatgcttgtatcaaagtttcacatgtaccccataaatatgtagaactattatgtatccataaaaaataaaaaaaattaaataacatgtggtacataaaatggaggactggggcaagtattagttcataaaaacaggagtgggctggagcccctgctgctaccaaatgttgcctgagatgacgctgcttttggagaagtgcaggctttggaaaggagggagacagatccagcctgtttcagca

SEQ ID NO: 539513 - DNA, 580 bp, Homo sapiens
cccactggccaaacccagctagaagcaagctggcaagggagactgatgcaattctccctcctcagcttcccaagtagctgggacaacaggcacatgccaccacacctggctaatttttgtattttttgtagagatggggttttgccgtgttccccaggctggtctcaaacccctgagctcaatctgcccgcctcagcttcccaaagtgcttggattacaggcgtgagccaccatgcatggccttattgcatatttcaawataactgaaagatggaattggaatgttcctaacacaaagaaatgataatgcttgaggtgatggatatcattacacattatatgcttgtatcaaagtttcacatgtaccccataaatatgtagaactattatgtatccataaaaaataaaaaaaattaaataacatgtggtacataaaatggaggactggggcaagtattagttcataaaaacaggagtgggctggagcccctgctgctaccaaatgttgcctgagatgacgctgcttttggagaagtgcaggctttggaaaggagggagacagatccagcctgtttcagca

SEQ ID NO: 539514 - DNA, 580 bp, Homo sapiens
cccactggccaaacccagctagaagcaagctggcaagggagactgatgcaattctccctcctcagcttcccaagtagctgggacaacaggcacatgccaccacacctggctaatttttgtattttttgtagagatggggttttgccgtgttccccaggctggtctcaaacccctgagctcaatctgcccgcctcagcttcccaaagtgcttggattacaggcgtgagccaccatgcatggccttattgcatatttcaaaataactraaagatggaattggaatgttcctaacacaaagaaatgataatgcttgaggtgatggatatcattacacattatatgcttgtatcaaagtttcacatgtaccccataaatatgtagaactattatgtatccataaaaaataaaaaaaattaaataacatgtggtacataaaatggaggactggggcaagtattagttcataaaaacaggagtgggctggagcccctgctgctaccaaatgttgcctgagatgacgctgcttttggagaagtgcaggctttggaaaggagggagacagatccagcctgtttcagca

SEQ ID NO: 539515 - DNA, 615 bp, Homo sapiens
agactcactttggtggcgattgcctygtagaagttggtcagccttcccatctgtgagcttgttccactcccgtcacaaacctggaccctttaaagaccactagccattggttccagcccaaaaggtcccccagagcccttggccatggtgactgggctgctggccaccctaaaatggatttgcctgcacgtctcaggacgtcaccgacctggtgcaggggtcaccgaccagggcaaagtgtatctgttgaacccagacagggtcctctctgagcactggtgcagctactgagggtctttccaggcccagccctcaggcttcctcatcgggggtcctgtcatgaattatgaacagtcagtccctcatggaacaaataataatcctggaactacacagtggttcagagactctgcttactaagcattttcacgtcctttcatctgagttttgtaacaaccccatgtgaaaggctggtaagtatttttagctttgctttaggcttagggaagataaacgacttgctcaaggtcacactggtaataagtgtcaggacatgctcctgaccacatatctgaacaactgtaaccccaggtttcttcaccacagcagagcagc

SEQ ID NO: 539516 - DNA, 525 bp, Homo sapiens
tgcccaagatgagttccccacygccttggaggtgcctccacaaaagggaagcagctttattttcattcaaaagccttaccaaatcccttcaccacttccattgtggatctagaaccactccccctacattcctagtgtctcatgggggaagccctttgtaggatatttggagcaagagagacctgtgttcaaatcccagttttgccatttcctagcactgtggctgtgtgcaagagaactcactgagcctctgtgctctcatccataaagtggggacaatgctgcctccctctgggtcatagtctgttctgtgctgctatgacagagtaccacagactggataattaataatgaaggggaatttattggcttatggttctagagactgggaagtctcaagattgtggggctggcatctggcgagtgccttcctgatgcatcataacatgatggaaggcatcccataagggagagagagactagcggaggccaaactcacccttttataacaaacccactcctgca

SEQ ID NO: 539517 - DNA, 561 bp, Homo sapiens
gaaatgctatcttcttgctgtcccaggattgagccagctaagcttagccctcaggctgcagccgatgtgaactgtcccatgatgttagtcctcacttaatagctggagaagtaaagaaaagtggctgttcataggaattcagtttattcattaactctacattgtgagctagaagcgggacttctccctgaggcgtggagcctcctcagagcggatctgctgacaaacaatcatcagtggatctcacctgttctattttctttccttcttacaaggcctgctgtactagagatattagtttagtactccaaaatgacacagagatctgtgcagttacaattactcaagtaayggtgacagactcaatgttctttgttggaattaccagggtttttgagaatgaggaacactagtcaagtggtgaagatattatcctttggaattgcacataactgcaagacaacatggccccagaatccattggtaatgcatcagcctgtctgtgccaactaggagtagaaatactcagctccctgccagggttgtaggcatggccaagaa

SEQ ID NO: 539518 - DNA, 551 bp, Homo sapiens
ggtggaaatagcaaagctgaaggccttttctgcatagtgggggcatgcagctagtctgcacagcctaagacatacaggttgaaagcctagggcagtcagaggcctgcyggctgaacagaatttacagggcttctagagtctttccaagaatatcctatccatatatttcatggccctgtagacaataggctccctctgcagtcaggtccatgagtacccacaaggccaacctttggaggaaaaattttaggaggctgaggtggcatctctcaagtctctctctctctctctctctccccaccccccccccccacacacacacacatacactcgccaccacaattagggttcttcttgaagcacatataggcatttgttaacaccttctctcttgaagacattgttttgttaatgcctacatgtctgaaactgaacttcaattctttttgattaaagcctctcatttgatgcaaacacaagtagccttgcaaacagtaaccactgagcactgacagtcattcactttttctgagaaaaggccctggaatggc

SEQ ID NO: 539519 - DNA, 551 bp, Homo sapiens
ggtggaaatagcaaagctgaaggccttttctgcatagtgggggcatgcagctagtctgcacagcctaagacatacaggttgaaagcctagggcagtcagaggcctgctggctgaacagaatttacagggcttctagagtctttccaagaatatcctatccatatatttcatggccctgtagacaataggctccctctgyagtcaggtccatgagtacccacaaggccaacctttggaggaaaaattttaggaggctgaggtggcatctctcaagtctctctctctctctctctctccccaccccccccccccacacacacacacatacactcgccaccacaattagggttcttcttgaagcacatataggcatttgttaacaccttctctcttgaagacattgttttgttaatgcctacatgtctgaaactgaacttcaattctttttgattaaagcctctcatttgatgcaaacacaagtagccttgcaaacagtaaccactgagcactgacagtcattcactttttctgagaaaaggccctggaatggc

SEQ ID NO: 539520 - DNA, 656 bp, Homo sapiens
tattgcaaaaatgatctgagcataaagcatgctttatagtaagtagaagcagcagctactttaattacagtgatctcactggagaaaagaaataaacaccattatcatccttctgctttcgccctayttttatctgaaattgaacataaaacactttgcatcaagacttaaaattatttcaaaatgtttcaaacagcacacacaaggtgtatcattagaattttagctcatgtataccattaaaataacacaattgctgaatattgtttattttttctatagagtatctagaagaacaacaataacaataaccaatcaccttctctgctaacgaagaaaccaagatctagagagattaagagtaaagcaggaaagagtccagcttaaagtttcagatcagcctaaaatcctttcttactcaatttacgtaatgcataaaatgggaaaatacataatctaattaaacctcatttttcttatctataatttaaaaataactatatacattttatgggattattattaggattaaataagaaaatatatgtaaaccaccctggtcattgacagtcatgcagattgctccattaaagattggttctcttttccttccccaggtagtagtgaataagggacagatgctggataaacctttt

SEQ ID NO: 539521 - DNA, 610 bp, Homo sapiens
acatttgaatcctggtattcattatgttttgatcccacaaattaactgtagtactatattgctctcattaccagacaattgtggcaaacttaccacagcttatgccttataaatacatttagcattaatgtaatatttccttaaatatttttataagtcagattaccaatttaagcatgtgttaaactgctcaatttaaaatggtaaatatgctgaaaccttggcacttattccttcatgacaaatgaagctctttagcagctacacacaaaccgttaataatgtggaatagaactttttaacactgattaatccataggattccagagtataacaaggaagcacttcatagattaattgtctttcacacatgtaacaaggtgttgataaaataagtgtgtttattttgccagtctaattttttaaatgtggtatttgcccaagtgcaaatgcttacaactaagagccctgtgaaatatgtaaaacwattccaatcttttccgatttgcagaaggaaaaaaatgggctagtcttgttctcaaagtagctgtatttttaatatgattagttgtctcaatttgcttcttcatggaagaaacagcattatgag

SEQ ID NO: 539522 - DNA, 586 bp, Homo sapiens
ttctcagatcttagtgcaggtctgtcttctggtattactctgggagctgccaggacatcagagggaaataataatatatgttccctaggaggctagaattagttaccagctctgtcacattcwgtaaaatttgcatttctcaagagtggcaaataggccatttaacctcctgattcaaagaactatttgggctcagaaaatatacgtatcaacaactaactactaggagttctttctctgtttccaaataaatatctcacatttttgtgagtcctcagaaagatgatccctgtaccccatcatgcaaacagcactctaagattcatgtgggatgagcctccagtctcacttaaattgcttaaaaaaataactaaagcactaagatctctgtcacactcccaaatgtagactaaaatttatacccagtatatatgggtgtgagtgtcagagaaaaatttgtactaaaaaatgacaaatatagtttgagtaagaagtggtaaaactaggctaaatgagtgactagatttcaggattttagatttctactttttaaaaaaatttagcataatgaaacttcctggctaaa

SEQ ID NO: 539523 - DNA, 500 bp, Homo sapiens
tactttttgttactatttgttatttggctacagtggttttatgattgctgcactacgttatggcagacgggattgcgaagggattgcaaagttaaagccaagtcagtttttcgtaaagaagaaagggaagtgttaagcatctcagataaggaactgcaattggaaaacagaaatgggtgacagaatgagaataaggccttctttgtctagatttagaaggtgacaatgtgtctagatgtcactgggttattggatgtttctttttatcttgaggtgaaccacaagataagaagtcagggtcgcaacctggtgcctataaagttgtatcagtccttgaagaatgattcttggaaatgttmtcaaattatctgggaagatgtttcaaaggtcctatgccaattctgtttggagactactctgttcctataaattccacatccttactatctttcaaagccatttatattttctacccttctcctaatatcttagttcattcc

SEQ ID NO: 539524 - DNA, 470 bp, Homo sapiens
tgcaccaccagtcctcactggactgggcttggcactagcttctggctcagcagccctgcttttacctgaactcagcgcagcagcagcctcctgctgtcctagaaagcaccctgatagcagggtgggagaccccacccatccccacccatccccaccactggcaaccacgtaagcgacacctgctagcgcttccagcccaggattctcacttctgtgtgaactcagccagaggatgtagcctcctgttgtcccaggaaatacccagacagcaggatgggcaaccctatccaaccccrctgctggtagccaagtgggcaagtcttgctagagctttcagcccagcagtctctcttctgcctgaactctgctggcaagcacaaccttgtgttccttcaggaggcactcagacagcagattaaggctgacccaacaagggtatggcctctctgccaactgcggcccctgcctga

SEQ ID NO: 539525 - DNA, 576 bp, Homo sapiens
agcacgacagccccttcttcctgatgggaagctcagcacccagacccctctctaattaaaaagaagctgctgcctgcactggattctaaccggaggtgaagtgaccctctctaattaaagagaagcctgcggcctgcactggattctaaccggaacctgatgcaccactaggcccacacaacagtctctgaggaaaaaaaaaatgacaattctacccagaagcgaaatcccctgggagctccaccaccagcctggactatcccccatctgaagtgtgacacaggaaacaggtgcagagaaagtgtctccctcagctctgctcgtgtagctgcttctagagccctccatycggttctccccacctgctcccagacacacaacccgcacagtgaagcccacggggccggtaacccacacacaggactgcacagtcccctccgctctgatgccagtcaactgggcttttattcacaaacaggaagaacccatcaaggccacacctgataggaaataacagcatagcacaaagagaactgacctatgactcccaaaaagatggagaagacacatctcccc

SEQ ID NO: 539526 - DNA, 567 bp, Homo sapiens
actggaaagacttacccggctgcccacatgggccaggcatgaacayctactaagggatctgtgtcccatgtcaagggccaaaaagggagaggaatctggggctaagtcctattattaaactggtagctcatctagaaagtagctgcatcactgactcacacaattcaggctttgaaggaaccttacaagtatacagtcccagtgcccatcctctggctagttagacgtaatgtgagtagaaagttctctccaattccttggagaggatcttcccctccactcaacccctacatgttctctgattggtaagttcaagctgactccgacttcccatccttttatcatcccaacactggagaggatggctttcccaaaaggatcctttagaaaaacaaaacccatagccaatattatcacgggtccttatcactgacaggtaaaatggtggctgccttggaagctgtggcaatttttaatgcatgagagacaacaaattatcttaacttcctatcaggaggaagtactttaagcaattctttagtagcagggattgttgagggttattct

SEQ ID NO: 539527 - DNA, 599 bp, Homo sapiens
atatctttggtgcttataaaccttcaatgccaagtttcaataaacagtttacctcctcatctgtctgaatctagaacaaagacaacacttggctgggcgtcccatcccagactatagatttacttctgtttttattgcaattaattattaagcctgcatcaacaagttttgagtttcagtaagtggttcccacattttaattctttcaaaagtgttaatatttttaactattcttgtgggtgaaatcctaatcacaatcttggctaaaaaaaatctaaaagagaactgagcattaggcagagcagtataataaaagaacttgtccttcagaaatacacagggaagatgagtgtttyagaaacaggtaaggcaatttcttttccaaaacctctcactcactaaattatcccagctccttacgatgctggactgcccacctgaactcccttctgaagtctctcgactgtaaagtgagaaaatgaaaacctgccctctcacctttgcagaccgtctcaagatgcatttacagccagaactccagcttgtacagagtggcccaagaatgtcccacccagtgccatgcaaggttacttgtgcaa

SEQ ID NO: 539528 - DNA, 625 bp, Homo sapiens
acttgcttggtttgcctcagtaagttacttatcctcaagtgaaattctacaaacatcatcatcatcatcattttttttttctttttttgagacrgagttttgctctgttgtccaggctggagggcagtggcgtgattagtagagatggggtttcaccatgttggtcatgctggtctcaaactcctgacctaaggtgatctacccgcctcagcctcccaaagcgctaggattacaggcatgagccactgcacccagccaacatcatcattattcttattaataattattattttggttgcttttgagatacaaatagaaattgtgtgcctaggggttttttgccctaactggaaaaaaaaaaaaaatttaagcatgccaagtaaaaaagttataagaaaatgaagtcatccaagttgcactgctttccaacagtaattaaatttttttaattttccaaatttcaaagttttccagcttaaaacccagtgcttctcaaagtttaccaataaatgcgactcacacaatattcctttaaaaccaatttataaaaatattttcataatcaaaacaattgggggataatatctgattttctacaggtaattaaggagggcatgcaccaaaa

SEQ ID NO: 539529 - DNA, 625 bp, Homo sapiens
acttgcttggtttgcctcagtaagttacttatcctcaagtgaaattctacaaacatcatcatcatcatcattttttttttctttttttgagacggagttttgctctgttgtccaggctggagggcagtggcgtgattagtagagatggggtttcaccatgttggtcatgctggtctcaaactcctgacctaaggtgatctacccgcctcagcctcccaaagcgctaggattacaggcatgagccactgcacccagccaacatcatcattattcttattaataattattattttggttgcttttgagatacaaatagaaattgtgtgcctaggggttttttgccctaactggaaaaaaaaaaaaaatttaagcatgccaagtaaaaaagttataagaaaatgaagtcatccaagttgcactgctttccaacagtaattaaatttttttaattttccaaatttcaaarttttccagcttaaaacccagtgcttctcaaagtttaccaataaatgcgactcacacaatattcctttaaaaccaatttataaaaatattttcataatcaaaacaattgggggataatatctgattttctacaggtaattaaggagggcatgcaccaaaa

SEQ ID NO: 539530 - DNA, 625 bp, Homo sapiens
acttgcttggtttgcctcagtaagttacttatcctcaagtgaaattctacaaacatcatcatcatcatcattttttttttctttttttgagacggagttttgctctgttgtccaggctggagggcagtggcgtgattagtagagatggggtttcaccatgttggtcatgctggtctcaaactcctgacctaaggtgatctacccgcctcagcctcccaaagcgctaggattacaggcatgagccactgcacccagccaacatcatcattattcttattaataattattattttggttgcttttgagatacaaatagaaattgtgtgcctaggggttttttgccctaactggaaaaaaaaaaaaaatttaagcatgccaagtaaaaaagttataagaaaatgaagtcatccaagttgcactgctttccaacagtaattaaatttttttaattttccaaatttcaaagttttccarcttaaaacccagtgcttctcaaagtttaccaataaatgcgactcacacaatattcctttaaaaccaatttataaaaatattttcataatcaaaacaattgggggataatatctgattttctacaggtaattaaggagggcatgcaccaaaa

SEQ ID NO: 539531 - DNA, 625 bp, Homo sapiens
acttgcttggtttgcctcagtaagttacttatcctcaagtgaaattctacaaacatcatcatcatcatcattttttttttctttttttgagacggagttttgctctgttgtccaggctggagggcagtggcgtgattagtagagatggggtttcaccatgttggtcatgctggtctcaaactcctgacctaaggtgatctacccgcctcagcctcccaaagcgctaggattacaggcatgagccactgcacccagccaacatcatcattattcttattaataattattattttggttgcttttgagatacaaatagaaattgtgtgcctaggggttttttgccctaactggaaaaaaaaaaaaaatttaagcatgccaagtaaaaaagttataagaaaatgaagtcatccaagttgcactgctttccaacagtaattaaatttttttaattttccaaatttcaaagttttccagcttaaaacccagtgcttctcaaagtttaccaataaatgcgactcacacaatattcctttaaaacmaatttataaaaatattttcataatcaaaacaattgggggataatatctgattttctacaggtaattaaggagggcatgcaccaaaa

SEQ ID NO: 539532 - DNA, 562 bp, Homo sapiens
ctgctggagcctggagacaggtgtgtctcccctcccctagtgagagggtttcctctttgcttttggcatgtcatcccctctttttcttttacacgtctatatttaaattttcttgttttcagcatttttcgagtttattttaagaaagggaagacttgctgccccagtcagcccytggaaaggtagcactaagctacattctcttggttccccactcctcaataccagtgaattttattaatttttagctaccagatgggccaaaaaatgctgcttttcttaggatagtagggcagttgagtattttctaatctatttcctggctgtgtgcttttctgtctgttacgaatggccgtaatttagcctcttttaatttcaatgctgttttttggtagaagctactagaaggcttcctaggctgcccgggagttacctgtgcccctgctgccccgcacccctcctgttgatggcacatttcttctggcgtgaccgccccaggagcctggacagtggtggggcaagcaaggagctttgcatcagaagccaggagtggccttgctgg

SEQ ID NO: 539533 - DNA, 581 bp, Homo sapiens
acaatcaaacttgtacacgtgcacgaacattttaaaaattgctttcctgccaactttttctacacttggaaaaatgtgtagaaaagcacaagaaaaaaccagtagaaggaaatggcaatggtgggcgcctcgcacacagcacgtctggaaggtggaacagagaccctccacacggctggggcgcagggcagacgccacaccatccgtgagttaccttgttatctaccctcagcgtcctcactcaaacattaaaaaaatgctttcccgccaattttttctacaattggaataatttacagaagaaaatagctatgaagcctgtcaatcagataataaataatgttcatctgtgggtcaaatgtacaacttgcccattcctgacagtrtgaagatgggactaggacttccaatgatggtgcagatgtatgtgtagggtcatttactgggaattggcaaattccgggataactctgatcttacaagttcacggcttgtatatattcaatcaatactgccaactggggtaatagaataaaataagctacaatgagtgtatcaaacaggggccttgttttctgttt

SEQ ID NO: 539534 - DNA, 581 bp, Homo sapiens
acaatcaaacttgtacacgtgcacgaacattttaaaaattgctttcctgccaactttttctacacttggaaaaatgtgtagaaaagcacaagaaaaaaccagtagaaggaaatggcaatggtgggcgcctcgcacacagcacgtctggaaggtggaacagagaccctccacacggctggggcgcagggcagacgccacaccatccgtgagttaccttgttatctaccctcagcgtcctcactcaaacattaaaaaaatgctttcccgccaattttttctacaattggaataatttacagaagaaaatagctatgaagcctgtcaatcagataataaataatgttcatctgtgggtcaaatgtacaacttgcccattcctgacagtgtgaagatgggactaggacttccaatgatggtgcmgatgtatgtgtagggtcatttactgggaattggcaaattccgggataactctgatcttacaagttcacggcttgtatatattcaatcaatactgccaactggggtaatagaataaaataagctacaatgagtgtatcaaacaggggccttgttttctgttt

SEQ ID NO: 539535 - DNA, 596 bp, Homo sapiens
gctgtctcccaccttagcctctcaccagtctctagattcttccttgggggagaggtagtgaatacaaggggaaggagaggcgacttgtgctgccttatgggactccctgtgtgttatggctcattgagtgtgctgagatatttgctgagcatttctcaggcagcatctccactgagctgggagaaggggacctttccacgcagagcgctggttaccttttcacctcgcagccctgggatgcctatgccaggtgggcctgcctgccctttctctccttttgcacctttgtctccaggtaagccaggtgaaccttgtgggccagggatgccaggcacacctttctctccaggtgttcctataaacacaaacaattgaaacttgatttgggcttagctagtgctggtattacaaatgaaaaagtgcctccacagccagccaagaatgagatacaagaacgtgaatcccccacaaccagccaagattgagatacaagaatgcacatccctcatgtatcaatcggctcatgacccagaacacgtcagtcacccagatcacatcagagccaygctaggaaatgtctctcccgtcctttaaga

SEQ ID NO: 539536 - DNA, 482 bp, Homo sapiens
ctgggatgcattttgtcgccacacatcactgtacrtgtcctgcatcccaggataataaaagtgctgtgttctgaatgtccatgccccgccccaaattcctgtgtggaaattctaacccccaaggtgatggcatggaggtggggccttgggaagtgatgaggctcatgaacagaattagtgttcttagaaaaaagaccccagagagagcccccgccctcgcgctgcctatgaagaaggggtccacagccgacctcgaatctgctggagccttgatcttggacttccagcctccagcacgggaggaacacacttctgctgctgaaaccacccagtctgtggtatcctattacagcatcctggggagactaagaggaaaagaaaaagccctatgcctctgccctgtaaaatgtcagtaatttccttgggccccacttccgacgttcaccctcttgtgggtgacttctgccggctggccttggctc

SEQ ID NO: 539537 - DNA, 482 bp, Homo sapiens
ctgggatgcattttgtcgccacacatcactgtacgtgtcctgcatcccaggataataaaagtgctgtgttctgaatgtccatgccccgccccaaattcctgtgtggaaattctaacccccaaggtgatggcatggaggtggggccttgggaagtgatgaggctcatgaacagaattagtgttcttagaaaaaagaccccagagagagcccccgccctcgcgctgcctatgaagaaggggtccacagccgacctcgaatctgctggagccttgatcttggacttccagcstccagcacgggaggaacacacttctgctgctgaaaccacccagtctgtggtatcctattacagcatcctggggagactaagaggaaaagaaaaagccctatgcctctgccctgtaaaatgtcagtaatttccttgggccccacttccgacgttcaccctcttgtgggtgacttctgccggctggccttggctc

SEQ ID NO: 539538 - DNA, 482 bp, Homo sapiens
ctgggatgcattttgtcgccacacatcactgtacgtgtcctgcatcccaggataataaaagtgctgtgttctgaatgtccatgccccgccccaaattcctgtgtggaaattctaacccccaaggtgatggcatggaggtggggccttgggaagtgatgaggctcatgaacagaattagtgttcttagaaaaaagaccccagagagagcccccgccctcgcgctgcctatgaagaaggggtccacagccgacctcgaatctgctggagccttgatcttggacttccagcctccagcacgggaggaacacacttctgctgctgaaaccacccagtctgtggtatyctattacagcatcctggggagactaagaggaaaagaaaaagccctatgcctctgccctgtaaaatgtcagtaatttccttgggccccacttccgacgttcaccctcttgtgggtgacttctgccggctggccttggctc

SEQ ID NO: 539539 - DNA, 622 bp, Homo sapiens
gactgacagctgctgaggtattcatctttgattaacaattcaagacaaagttttcaaataacacttcagaggtgactctgaaaaacagttgttggtacactgtaaagcaaggggggaggggaaaatgtgacttcactttagcttttaacttagcataaattacacaaccctcacactgtggtagtgggtagtgggatagagggtgcttcaatgccttaagataagcatggaacagctctctggaacatctgttttttacttaaaaatattgagggaaaacttaagtttctatttttaaagcctggctatattatggcataggacatagcatcagcattataagataaaacctagagttcaagtaaattctctctttattgcagagaacttcagacagaaacatacccacgcaccctcccccatgcctagatgtgtgtgtatataccgttaacacagcccataaacacacagcactgccctaatcctcacaagcatctcaaatgcttcttctgtgggtttcttttcttttcttttcttttttagtgttaagataacttttattattactattatyattattattataatactttaagttctgggatacaagtgcagaaagtgc

SEQ ID NO: 539540 - DNA, 671 bp, Homo sapiens
caggtggcattatcctcattttgcaaattgtgcaactgaggctcacagaggtgaagtagggaagatggttggaaagggggccttcggactccaagagctgtggtcgttctgtccctttgtgctgctccccttccaccagccccactactcttatcatcatcaaagctgggttatgagccatgtagatcattcaggcagacatgacctttctgcacccaggttctcagagaacaacccagaatgaaagaagtgagcacgttctattttgtttagcagtcaaagatgtaactagggccgggcgcggtggctcatgcctgtaatcccagcactttgggaggccaaggcgggyggatcacctgaggtcgggagtttgagaccagcctgaccaacatggagaaaccctatctctactaaaaatacaaaattagctgggcgtggtggggtgtgcctgtaatcccaactactcgggaggctgaaggcaggagaatcacttgaacccgggaggcggaggttgcagtgagccaagatcgcaccattgcactctagcctgggcaccaagagcaagacgccatttcaaaaaaaaaaaaagaaaaaaaaacatgtaactagactgagtgagaagctatgtaacagttaagcctcactgaagatgggcaggttcaggatctgtc

SEQ ID NO: 539541 - DNA, 671 bp, Homo sapiens
caggtggcattatcctcattttgcaaattgtgcaactgaggctcacagaggtgaagtagggaagatggttggaaagggggccttcggactccaagagctgtggtcgttctgtccctttgtgctgctccccttccaccagccccactactcttatcatcatcaaagctgggttatgagccatgtagatcattcaggcagacatgacctttctgcacccaggttctcagagaacaacccagaatgaaagaagtgagcacgttctattttgtttagcagtcaaagatgtaactagggccgggcgcggtggctcatgcctgtaatcccagcactttgggaggccaaggcgggtggatcacctgaggtcgggagtttgagaccagcctgaccaacatggagaaaccctatctctactaaaaatacaaaattagctgggcgtggtggggtgtgcctgtaatcccaactactcgggaggctgaaggcaggagaatcacttgaaccygggaggcggaggttgcagtgagccaagatcgcaccattgcactctagcctgggcaccaagagcaagacgccatttcaaaaaaaaaaaaagaaaaaaaaacatgtaactagactgagtgagaagctatgtaacagttaagcctcactgaagatgggcaggttcaggatctgtc

SEQ ID NO: 539542 - DNA, 565 bp, Homo sapiens
gaagacaactcagcaatgacttgaagaagctaaaaggtgagctatgtgtgaatgcctggagacaaggtctaaaaagtaagctggaaggacagatctgacataaccttgtaggctgtaacaaggtgtggcagataccatcaaacactcaccaataactccatttactctgctacatttcccaatctccttgcagttagggagaactatatgactagtttaggccaatgaaaggtgactgaagcacagtgtaccatttccatgcttaggcaataaaaatcccatataagtccaggcacagtgactcacacrtgtaatcccaacactttggaaggccgaggtgggaggatcgcttgagcccaggagtttgaggccagcctgagcaacatagcaaaccccatcacatgtttgttggttttttttttttttaagaggctttcggtctgttgcccaggctagagtgcagtggcatgatcaggactcactacagcctcaacctcctaggtccaagcaaacaatcctcccacctcagcctcccaagtagctaggaccataggcatgtgtcgcc

SEQ ID NO: 539543 - DNA, 592 bp, Homo sapiens
ctctctgaaagtctagggaatcagggactgttactcagggcacagatttgctcctgcttgctttgctctaaactaaaaatggcaatatttaatatatattctttctgtcttgtttttttttcatttagttactaatcatggacaactttccacatatagccctttctttgccgctttaagaccacattgttcttgttaacaattgcattgtattttattatatgattcagcatcatatatttaatcagtctcctattcatgggcatttatatggcttctaattgttcactactgtaaayaatgctttaatggaaattcttgcatatgtatccatgtcaatttgtgttagtttgtccttggtataaaagtggggttgtaggtgcctggctagttcagttggtagaggatgagactcttgaaagtggagttgtaagttgaagggtatcatggttagtattgagtgtcaatttgattggattcaaggatgcaaagtgttgttcctgggtgtgtctgtgagggtgttgccaaaggagattaacatttaagtcagtggactggaagaggccgacccacccccagtctaggtgggcac

SEQ ID NO: 539544 - DNA, 608 bp, Homo sapiens
ggggaaagcaacatctggaaagtttgaacagtcagcagaagaaacacctaagaaaattatgaggactgcaaaagaaacatctaagaaatttgcatggccagcaaaagaaagacctaggaagatcacatgggaggaaaaakaaacatctgtaaagactgaatgcgtggcaggagtaatacctaataaaactgaagttttggaaaaaggaacatctaagatgctcacgtgtcctacaaaagaaacatctacaaaagcaagtacaaatggtaagatgcttgagtgaactttgtaaggtttattggcatttcaggtttcttagtgaaaaaagtgtgatatgggagtagctgggaatgacttgaatatctaaataaggcaagcttaggcaacactttttcatagtatagaaataagtagatattattccgtaggccctggaaaaattctcacaatacttctggctgtaaatactaagtgaactaactaacaatggctaaaaccataggaaccaaagttgttttggtggtacagggatattataggatcccacatttttttgtttgtttttcatttgagacagagtctcacagtgttgtctgggctggagtgca

SEQ ID NO: 539545 - DNA, 608 bp, Homo sapiens
ggggaaagcaacatctggaaagtttgaacagtcagcagaagaaacacctaagaaaattatgaggactgcaaaagaaacatctaagaaatttgcatggccagcaaaagaaagacctaggaagatcacatgggaggaaaaataaacatctgtaaagactgaatgcgtggcaggagtaatacctaataaaactgaagttttggaaaaaggaacatctragatgctcacgtgtcctacaaaagaaacatctacaaaagcaagtacaaatggtaagatgcttgagtgaactttgtaaggtttattggcatttcaggtttcttagtgaaaaaagtgtgatatgggagtagctgggaatgacttgaatatctaaataaggcaagcttaggcaacactttttcatagtatagaaataagtagatattattccgtaggccctggaaaaattctcacaatacttctggctgtaaatactaagtgaactaactaacaatggctaaaaccataggaaccaaagttgttttggtggtacagggatattataggatcccacatttttttgtttgtttttcatttgagacagagtctcacagtgttgtctgggctggagtgca

SEQ ID NO: 539546 - DNA, 441 bp, Homo sapiens
tgaactcctcccagacatttacaaattcagttccaaggaataatcacaaagttgaattttaatatgctttcttaaatccatacttataagtgactagtatcttaaagaataaaagmcacttactcttttatctctctggattttacttttcactattgaggcaaacgagcacttcagcttctttgggagttgtttcttattctcgtttctttgattcacatgggtttcttctctgagtgatggtggaatgtgctccaagtaaggtagaaatctctttgtgagtgcttgagagtaatccagggcttcaacaagtataacaaagacaccaaagttcaatgtcacacaggtttgatgtcagtttcctgccttgccacttactggttctttggtataggaaagaatcttagtttaccttctctgtaagatggtcataacatttgt

SEQ ID NO: 539547 - DNA, 204 bp, Homo sapiens
aataacaatagcagcagcaactaccatttattgagtgcctattatgtgtcaaattttccggtaaaaggtttttgtttttgtttttaaatttgttgatttaaaagtaaagaaatttactcaagcccaaagtaagatggaatttactgaaaaacatacagataatgctcacagaaacctkgtgaaaaacaggaagtcaccaagcag

SEQ ID NO: 539548 - DNA, 359 bp, Homo sapiens
agccctcccacctgccaggctgccatgcgcccactgagtggggtggccgggggacagccctagctgccctctccctcctccaccctgagccayggggccagggcctgtgctccagtctcagcccctttgcccacctgtgaaatgggatccctccctcgggactcctccttgagcctgcgctctgtcacagcaccccctccccctcagaaatccttttaggaatttaccaccttgctacagatgcctttaatgcctgggtaaaggagacacacttagtgaaggtgacaggtgtctgggtgaagggtgtagacaggtgtgacttgcccctggagggtgaaggaggggtctccagggacagt

SEQ ID NO: 539549 - DNA, 298 bp, Homo sapiens
gcaacgttccaattttgtgaaaytttcactaaacaaaactgaactagaacccctttgcaactagaaaatgttttcctattatgtttcttttcaagtatgttgagaataaaattaacttgaaaacaaaataaaaatctaaaaatacaaggtccaggtaaaacctggcattagaatccacgccaattaaatgaaacttctgcagttccacctttactaaggggctggcaaggtcgtcatggtcagaatgatgaacccaaggcctgccgacctctaaccactgatgggacattcagggaca

SEQ ID NO: 539550 - DNA, 498 bp, Homo sapiens
agaagaatttctctaatgctgcgggggattatgctctggacctgggatctgggagggctttgtccaaggtgtctctgcaaagcagacactaaggcasggacttgctccctaggagcagaaagccaggggcttccccctgcaaagcccacatgaggctttcacgaagccagggcaggggtggccagggggatgcagcccaagggggcagctttctgatgatgtgcaatgcagcagccgcaggcaggcacgtggggcaatctatgatattaacttgagtggtatattctattccctactcatgccggcctactccaggcacttggtggccatctggagtgagcgctacaacactgtccagtgtgctgctggcccctttaggacctggctccctaaacctcactgatgcaggaataatggtctggggagaatgttctcctgggaggcagtcacggatgcaccaggaaatttgaggaccacatgtacatcctttccatgttt

SEQ ID NO: 539551 - DNA, 604 bp, Homo sapiens
tccagagctgctttggtttgggaagtctgttcagaatgtgacatctggggcaaggtggctgcccgggggtggccctgtgtacacaaagcctctggcattctgggggagctgagtggtggagcgtaggggctgacccagggttcagtttccccatctgtgaaatgggtatataggtgagggtctccactccctcctggaggggctgagagcaggggcccaggaccgtggagagcccatgcccagggctttgagctctgygcactttctgggcagattttgcaaatttggcttcagaagtggtaggaacccaggtctcaaaccccgggcgcagtcaggtggcaggagggaggcttgtgatctcctactcaggagtgaacactcctggaggaagaagcacagcccactgtgaagcggcagccccggcagagcccctcgtcttcctctggctgggcggctctttgccctcttggaaacgaagtttcgagttgctggatcaggttgagatgaaggccaggtgtttccagcaggcacagtggggagaccttgtgacccgcatggttgcccagctctgtgggctgtccctcgtcaacccagcttttgctca

SEQ ID NO: 539552 - DNA, 604 bp, Homo sapiens
tccagagctgctttggtttgggaagtctgttcagaatgtgacatctggggcaaggtggctgcccgggggtggccctgtgtacacaaagcctctggcattctgggggagctgagtggtggagcgtaggggctgacccagggttcagtttccccatctgtgaaatgggtatataggtgagggtctccactccctcctggaggggctgagagcaggggcccaggaccgtggagagcccatgcccagggctttgagctctgtgcactttctgggcagattttgcaaatttggcttcagaagtggtaggaacccaggtctcaaaccccgggcgcagtcrggtggcaggagggaggcttgtgatctcctactcaggagtgaacactcctggaggaagaagcacagcccactgtgaagcggcagccccggcagagcccctcgtcttcctctggctgggcggctctttgccctcttggaaacgaagtttcgagttgctggatcaggttgagatgaaggccaggtgtttccagcaggcacagtggggagaccttgtgacccgcatggttgcccagctctgtgggctgtccctcgtcaacccagcttttgctca

SEQ ID NO: 539553 - DNA, 627 bp, Homo sapiens
cttccatctctcccaggccacagagaggtcatgatcttggtgcccacaggcgtggggctcctccctggccatgctctgggggtgtcccaccaatcccccagtcagagtgggggcacaggcaccatgatagaccagccccactcgcttcctggaggatgacatggagaatctcccctgggatcctgggggaagggcgggcttcgaccatcagcaatggtgactttcagcacgcactccaccctgccttgaggcacccagagaggccacacagccagtgccaccagcaggcctggctcagaggtcctagtccccttccaccacattgcagccttgttccttccacccaagcacagccctgggagctgccccttctactttaagctgtttctcctcaacygcaccccaaaaccctacagaaccccctctgaagtggtaagaacaaaccaagaccagaagaatcccagatgttccaaattaaggttcctgaggcctcagccagggtcttggacgtgagggagaggggactgaggtccacctcaggctgcaagacctgtcccgtctcaaaggcacacaagggctgaggtgttccatgtgtcaccccaatggagagcaagcagccccagccca

SEQ ID NO: 539554 - DNA, 597 bp, Homo sapiens
acccaggcctggtctggcagccttggtgtggcttgcgttggggcacaggttgtctgtctgaggtccacccttcaaagagcatcttgtcaggatgaggcagggtgacaaccccatcttagggagggcaaggaagtgaggccgatagcggggcaggggctgggggcagatggcactgctggctgcaagggtggttatggtgggacccggggccatgtcctgatgtcaggtcaggcggatacctcgtggcagcatgctggctggctgtgaaggggcgctctggaacacatgatatgtgccctgctggtgggaggccttcccacagggatccacacccctacacagtccactcatgttttggggcttgcagactattctgttcaaactcgagtgaggkgagaggggctagtatgggagccttcccacctgggcactctcgcacttgggcctccttatctgggtcccatccttcctggcattttcccacctgggcctccttacctgacctcctcctacctggccttaccccagctctgagccctgtcagccctgtaactgtggcacagccctgccttttgagcctcagcctccgcaggaaag

SEQ ID NO: 539555 - DNA, 464 bp, Homo sapiens
cagcaaagggtacttggggttcccctactggggtcatacttgcagcccccaggaaggaccttcccagcgccccccgaaaagctctgggccccacccctccagcagargcatcactgccccaccccacaaggcctgtggggctctgagcatcccatgccccccatcctccactgccacccacttggacacagacctcagagggcccctctcctccaatggttgccacgtggaaaccagcctgggtgcctcgcaaatggccttagatgtggtccttgcaggaaaaagggtgaggtctaccctagcaagaacccccacccccacaaaggcagcctagcccttccaagccggccttccagccagaagtgtccagcaagcacaacctatgtgtgcctcagtgtccctgccccagggaaaagctcctcaggggcttcagggaggcttcagtgagggaggagcatttagcc

SEQ ID NO: 539556 - DNA, 615 bp, Homo sapiens
ttattgtggaatacagctcagaaggatggtttcaaccaagcacaaagcagcagcwcaaaatcttagaaaatctttaccagaggacggggaggagaatttatctttatggtctacttagaatgtgccaggcctctgataaatttaaccaaaaaccagccatattagcttggactttacataaaatgcaaacaaatgtatctggtcttgttaaaccactattatgggcctgtcacatgtagctgaatttacattcaaattcatacatcttcctttgtacttcatgctctggcaattatggttatttccagttccccaaatgtaaaaccccactgtttctcaaaggaatcacctggaagtccacttaaaatgcagattctgattaggtggatcacaggcctcagcctgagattctgcattcctaacaagttcctaggtgaagctgatgctgctggtatcagggacgtaccatgcttttaatagctgggcactgtgatgtttcagatctgcatgcattggcaaatgatgtttcctttgcctcaaatccttgcctctccttgagtgtctggaaaattcctatttattcttcaaaatcttgctcgagggtctttcattcac

SEQ ID NO: 539557 - DNA, 614 bp, Homo sapiens
ggatcatcatgctgggaatagagtctaagtggttggactgggtaacctttgtaatcctttctattctgagaatcaagtaattctattaccttaagtcactgtgagtagagtaataagaagcaaaatcactaatcctcccagagaagctgcaaaatatgttctctttatttctttataatgtttcctgcaattatttttctttcaagaagaataacatctctctgaaatttaggagtccataacctatttccctcaactactaccagtgttttaatcttttgatgacccwctagaaccacagaattattattctgcattaagacttctgtataattctacccatgaattagaatgaggaacatgaaatttaattcaatagcataggaaatgttcgcctgtaatcccaggcaacattaagctaggttacttcacttaataatgagctctcttctttttacttcatgtgttcaaggaagtgcttaaatacctgaagtgcttaaacacataaagctatggccaccaatacattaaaataactttttcttcttcctttttaacagccattatctctggaattcctgtaaggagcttagaatctatttttgagcttcctc

SEQ ID NO: 539558 - DNA, 684 bp, Homo sapiens
ctgcaaatcatggaggcatatggtttagattcgtgaagccaagtcattagccctctgacccaattataggaattatcacaaagaacaaagcaattgggattcagccatggtgctgctcttcactttaaaggaagtgtcttgggaaccaggtctattttcctttaaaaaaaaaatgcctattttacgtgatacagaggcatttccaaacttacaagacatcatcgaagagagtgcaggaggctcctttagggtagagggcagatgtttctcaaaaagcacaggtatctggtggccatgatagaatagtacatagcaacagcagctagaatagtacaaaacaagtgtkgcttgttaagggttgtgggttctagtcttggttcaggctccagtgtgttgtatgaacatgggtgagtcacatttccactctgagactcagtggccttcttcataaagcgaggaatcattttaatgatctttaaggtttctcctagcatgcccattcccaactgatcatgccccagagttatatcatcctttatggtgaaaaacttagtgaaataagctcataaaataatattactttctaaaataagctataattttatagcagatttctgtgcgagagagtcatgaatgtgttttctttgttttatttttaatgaaattgaacttagaaaaagacct

SEQ ID NO: 539559 - DNA, 706 bp, Homo sapiens
cccagagttatatcatcctttatggtgaaaaacttagtgaaataagctcataaaataatattactttctaaaataagctataattttatagcagatttctgtgcgagagagtcatgaatgtgttttctttgttttatttttaatgaaattgaacttagaaaaagacctgacacccctgaacttaaaaagtgaacagaatcaactatacgactttgtatcayctagttagagaaacaatttttaataaagaaagaaactatgaaatgtgattgcccattacagctatctactgggtaataagtgttgctgattctgtgccatttagcaaaaaatactgcaaagaaaaaaaatattgcaggtttagtatcttaattatgtagattttactttcaatgaactcctgccaaaataaattgcgtatattatctaaaaagcaaatgttaattaaaactgtatcttgatagcatgcttggttcacaagacattctgagcatatgagattatatggcacacataagctacaatcaactcagactgaaggtccgggtcatttcagtgattcatgttaagccggacagtgctgactggtactggcgtctgacagcagcacctcacatatttatatagaagatgcagcttgatcccaacttattttttccagatgagtgaagtgtctctgcctgctacagagtctcataaataggac

SEQ ID NO: 539560 - DNA, 674 bp, Homo sapiens
ctcggagagctgctttattgaacactgtaattgcctggatggtgttattcatttctgtagctgttgatattaattaaatatttttgtcgaaagctccccatgacatttcttgctgcattcttgaatatctgataagatatacagtcagtacactggtacccgctgcatttggctgatagtcttgtcctagtttctaaccctcaaaacgctaaagaaatgacacggttttagtggaatgaggacttctattgttacagagtttgggggagtagggggagtccacaagtcttagtgaaatagatgcaaatgtcacgttttagagctcattgtactggcagaagctggaaattggcctagacccttattcaaaggtttagctcgttccttaggtcaaagaaagttcagttgcactggttcctacaatcccaaccccagtagaaagaggcatttaggcattcattcattartattttacaagtatctctggaggtcctacaatgtgccaggccctgtgctaagtgctgaaaacacagaatttaaataatacaaatacaatataaaataaaccaaagaggtctctctccttataaaagcgtagcctgttggggaacagaggcaaggctactatagcagaaggcacactttaattccaggtgtgaactaacagtaggaac

SEQ ID NO: 539561 - DNA, 674 bp, Homo sapiens
ctcggagagctgctttattgaacactgtaattgcctggatggtgttattcatttctgtagctgttgatattaattaaatatttttgtcgaaagctccccatgacatttcttgctgcattcttgaatatctgataagatatacagtcagtacactggtacccgctgcatttggctgatagtcttgtcctagtttctaaccctcaaaacgctaaagaaatgacacggttttagtggaatgaggacttctattgttacagagtttgggggagtagggggagtccacaagtcttagtgaaatagatgcaaatgtcacgttttagagctcattgtactggcagaagctggaaattggcctagacccttattcaaaggtttagctcgttccttaggtcaaagaaagttcagttgcactggttcctacaatcccaaccccagtagaaagaggcatttaggcattcattcattagtattttacaagtatctctggaggtcctacaatgtgccaggccctgtgctaagtgctgaaaacacagaatttaaataatacaaatacaatataaaataaaccaaagaggtctctctccttataaaagcgtagcctgttggggaacagaggcaaggctactatagyagaaggcacactttaattccaggtgtgaactaacagtaggaac

SEQ ID NO: 539562 - DNA, 438 bp, Homo sapiens
aagtgaagcagacttgtaatgtttggattgtttagtgattaaaaaaaaagaaagaagagaggaagaaagaaggatgagaccattggcacmtggagagaggatgtcagaattaccggagcagagcagtgtggtacagccgaaagaacactgacggttaggagaccttgtgctggtccttgctttgctgataactgtctgtgttttgctgagcaagttaccacccctctctgggcctcagtttcctcaactgcaaatgaaaggcaaagacagtagtttccagctcccccaggtacatgatttcagatgagctacttatagggtactcaagtttttaaatgcaggaacctcctaatatcaggtgagggttacacatgaaaatataacaaagtgagagaagagcaaaaagttgaggttctcatagcaaccagaattcatagc

SEQ ID NO: 539563 - DNA, 613 bp, Homo sapiens
ttactggcctgctcttccatagcgttacttcagacctgctggcccagctatccactccgctaacaggtctgtctctgctaacaggtctagctctgtctcctcagcacatgttctaggctctgactgcaagtgctgacttgggctcccagccccacacagaccctctgttccatgaaagggccatctatgcaaagtgccccccaaatgccaaaggagccaataaaccaaggaacaagacagacaaatctagttgtcagtaaagagtgttttattggggaacttacagacagaagcgtggtcttggatggcagsaagacaggtaggtttctgcacttattacccccacacccagggcttatataccacaggggaagagtatacatgctctgtgcaagacaaaggctactactgtccagaacaggtaagaatgctaatgtgtcatagcctagaatttgtataacatcaaggttgacatgttcttacaatagggatggtaaataaagtgggaatcaggagtcagtcctgggactggggctaatcagaagtcagcatagagaattagcatccaagagggagtcacttttctctccacatcccagccctctaatccagc

SEQ ID NO: 539564 - DNA, 529 bp, Homo sapiens
agcagaacacttaatatacctcaaggtataataccatgtgttttactgagagagtcaaatttgatcttcaatgcaaacccatgagaagcccratatgtgatatctttgtatagacagggaaagggagactcagagaggttaagcaggtggtgggggtggagtggacccagggaattttctcttaatggaatcatctttcactgattccctgtccatctggtggtggatatgacgctgtatcccatgccagtgaactctttcaatgtccctgaatgttctatgacaggaggtcatgagatacagtgctcaggagaacatcaaggggcaattgatcaaggaagtctgatttccctgcctaaccacacttatatttcctcattcagcatgtatttcaagtcctctgatgaatcatgtgatctactagaccctgaagatacagtgaagagcaaaagtaagatgctggcaatttgatgtttgcactgtcatgaaggagatgcacatttagcagaacttacaaagagaaatataa

SEQ ID NO: 539565 - DNA, 529 bp, Homo sapiens
agcagaacacttaatatacctcaaggtataataccatgtgttttactgagagagtcaaatttgatcttcaatgcaaacccatgagaagcccgatatgtgatatctttgtatagacagggaaagggagactcagagaggttaagcaggtggtgggggtggagtggacccagggaattttctcttaatggaatcatctttcactgattccctgtccatctggtggtggatatgacgctgtatcccatgccagtgaactctttcaatgtccctgaatgttctatgacaggaggtcatgagatacagtgctcaggagaacatcaaggggcaattgatcaaggaagtctgayttccctgcctaaccacacttatatttcctcattcagcatgtatttcaagtcctctgatgaatcatgtgatctactagaccctgaagatacagtgaagagcaaaagtaagatgctggcaatttgatgtttgcactgtcatgaaggagatgcacatttagcagaacttacaaagagaaatataa

SEQ ID NO: 539566 - DNA, 529 bp, Homo sapiens
agcagaacacttaatatacctcaaggtataataccatgtgttttactgagagagtcaaatttgatcttcaatgcaaacccatgagaagcccgatatgtgatatctttgtatagacagggaaagggagactcagagaggttaagcaggtggtgggggtggagtggacccagggaattttctcttaatggaatcatctttcactgattccctgtccatctggtggtggatatgacgctgtatcccatgccagtgaactctttcaatgtccctgaatgttctatgacaggaggtcatgagatacagtgctcaggagaacatcaaggggcaattgatcaaggaagtctgatttccctgcctaaccacacttatatttcctcatycagcatgtatttcaagtcctctgatgaatcatgtgatctactagaccctgaagatacagtgaagagcaaaagtaagatgctggcaatttgatgtttgcactgtcatgaaggagatgcacatttagcagaacttacaaagagaaatataa

SEQ ID NO: 539567 - DNA, 607 bp, Homo sapiens
ggctatgcctggactcctaacccacagaaactgtgggataataaatgattgcagtgggcttctgttagtatccctgcccacagtctctcccaacccacctcccaccttragtgccagtgccaccctgatgccctgcacaccactacctgcaggaaaggacaaggtcctcactgtggcctataaggatttaacagcccagtcccaatatcctcctccagttttatctctgctcctcctgaccacatccccatgctctggccacactgaaccacttggtcattccaagacggtgtgggcttatcccacctctgtgatttggcatctgctgttctccctgcctggaatgcccttccatctcttctcagcctgaagaactcttattcattcttcacaacctcaggtccaatatcatctctttttgaaagcttctgtggaccccttagacagaaagaatttggactttacttggcacattgctctttccttgtgtccactgatggtgacattgtattttagtctgtcctccagtgcccccactggagtatggacagtggtttggacgtgttcttccaatgtgtcttctttccctggttcccctactttagtg

SEQ ID NO: 539568 - DNA, 314 bp, Homo sapiens
gttggcagcatgaggctttacccatggcccttatattgctgtgggcaaggaagtagtgatgccaggcatttctttctgtttggtagaaaaatggaatgttagtatcatatcagttagccaaattagggtgcaggaacacaatctttacatctgagagtattccttttatgtttagaaccattgcattagccccaaaccccagatgtatatttractggaaagcaccttttcttgagctgtagaagtcatgaaacattgacctgcagagttcctggccgcgccaggttctggtcatgggtgatgttggatgtgtg

SEQ ID NO: 539569 - DNA, 550 bp, Homo sapiens
cgctttcagtttataagctcctaatccattgttgagaggaaatgttaaattaaaaaagctaaatttaaaatcaaaagcatttccatgcataattttaacatagaattgttttgtttttaacaatttccattgttatcagaagagtcaataacatttctatatttcacacttaaggccacattcctaaagtggtttccacataaagatgtgagtaaaggttcatttgaccaaagagttctctgaggaaaacagatttggaaacagtgtaaacttccacctttaatattaacatattagagacactaagaaatgcattagtttacttagctttctccaaatatatttgacaatggaatattttcccagaagacaatttgataaaaacctatggtccttatatgacytatagggtcctgagcaatctggtctgctgatccttcctaactttgtcttccacccatgccctctaccattgccaattccaaccccatggcctctttgctgttcattagaagcacccagcacattcccatctcagggattttgtggc

SEQ ID NO: 539570 - DNA, 612 bp, Homo sapiens
gatgcctttgggtgcatgagatctgggggtgggrttgagacccagacccactggctgggtctcaggaagcaaggagtagcagaggttaagacaattatccagataatcctaattccctctgcggtacagaggccagatgtgtcttggttgcagaattaaccaggtctttgtgggcatctccatctacccccattgacagagatgcgactggcgggtcctggtggtcattttggatcaagcctggcagcctgttggttggtgagcattgcaggcagggacaaacctattgcaggggcttttgtagggatttgtagggatttctcctatgttttgttttctatgaaacaaacagttgattaagaaaacaaacagttgattaagaagacaatgcattccctcaccccttcatcctttgtctcattaacttggatctatttatgtcatgttaaccaaactctgagctggcttaaagtgggattgtatcacccagccaagtcgtaagtgcaagagggggtcttccagagggccattgcattgagaaagaaacactcactcatgtcaagatgtatttgttagaaaacccctctggccaggtgcagtggctcactccta

SEQ ID NO: 539571 - DNA, 556 bp, Homo sapiens
ccttgtcttctgtcccctccatatgggctccaacaaagaaagagaggcagggygataaaataggaagaaggaaaacatttttaactctttttaaacattctttttttttttttttttttttttttgagactgagtttccctcttgtctcccaggctggagagcaatggcacgatcttggctcactgcaacctccgcctcctgggctcaagcgattctcctgccttggcctcccaagtagctgggattacaggcatgtgccaccgcgcccggctaattttgtatttttagtagagacggggtttctccacgttggtcaggctggtctcgaactcctgacctcaggtgatccacctgactcggcctcccagagtgctgggattacaggtgtgagccaccatgcccagcctgaacattcttattcaagcacctctacaactacagcagaaaaagtgtttacatgttcctccaaattccagcacccaaactcaaccttgtttcttctggtgtcccaccacacagagaggtaaaattgagagatttctagcaaagcagtac

SEQ ID NO: 539572 - DNA, 565 bp, Homo sapiens
gtagacagacagcaacttaattttacatggaacttaatcagcttttaaaaggtcatttttaatttttgttatggtgttcagcaaactagaaaatgtagcacaaaaagccatttctgtttaaaggtaacatttcctttaggataatttttttaaataaacacttctgagatttttgtttatactgatgagacaattagatattagctcatttacatcacagaagaaccctcttatttcctgtgttgggataattttgctatctacaggaatgcttagtagaaaggaagtcagaacagacccatagacttataaaattaatagactatggcaattcattctaacaatgtgtatactttatattagttgagtttttaaactatagaatactaatatttactaaatataatcttaaatttattaaaatgttaataccaatagtttagaaatgcttctacaaagcyttagtttgattctaatcaggtttacaattgaatagatatttaagtacttaatgcccttgaagatgtgaatagtcagaatattggaattagtaggcaatggtttt

SEQ ID NO: 539573 - DNA, 219 bp, Homo sapiens
acctatgtggcgatgctgaaagcatatgtgttttcctgagagtaaaagcccatttcctaagtaacagttgcaacagcaaacaaatagtgcttactacagaccatgctcagtgtgaagtgctttmtatgtcattaacacagttaatccttcccaaacctaatgaggcaagtaccattattatccccatattatagatgaggaaagtgaagcagagacttt

SEQ ID NO: 539574 - DNA, 560 bp, Homo sapiens
tgaaaaagtgaactaataattcctatacctttaaaggattttgactttttagcgtgaacatttgaagtgagttcttcttcctgctctaggcctttaaatactatggctacttttggcccatcctgaaatcctgtgatgatttgaactatttattcggttttggttgatggacttggaatgcggatctgatcttaaaataggaatcttgatgggctattattttcaggtgccactgattatagaacagttaggttttcaccctttttcttcctctttctggttttgcatcccccaccccacacgacatccctcctcccccatgccatgtcccatcccccatttcccatgccctcctcatctcctgtcctccatgacctctccaatccatctttccactcatggctgattcttctttttttcttcctcttccaacttcttcattgctgtcacgaccttctttaaaataaatttgaaaacttyaaaaaaaaatttgtttttctcttggagaagtgccccaaatggcaaagtatttcccgcccttcccagttttaccagtgatt

SEQ ID NO: 539575 - DNA, 499 bp, Homo sapiens
attcaaagagcttgttaaaaaaatactgattgccaaggcttgccttgagaaattctgagtcagtctagtgcagggcccaagaacttacacgtataygaattcagaacatactgcaggtatatggacaacactctgaagataatgcctgcagttagtagactactgccatgaagggatgctggcctggtgttgcttcttatttaagagaagctagaaagacagctttctctcccaaatttaaaatgttcacttactttacttttgaaattctaggtaagccaaataacaattttgtccattgttggctagcctgtaaccactggttcacattctgcagacgctgcctattttatctgtcgcttctccaggctatttactttcattgcaccaaaataataaggctggtggtgctctagtaacagtcccccaaaatatgttaaaactgataaccaggcactgtccagatagtcttgtttctcctaaactgtcccctccttcc

SEQ ID NO: 539576 - DNA, 499 bp, Homo sapiens
attcaaagagcttgttaaaaaaatactgattgccaaggcttgccttgagaaattctgagtcagtctagtgcagggcccaagaacttacacgtatatgaattcagaacatactgcaggtatatggacaacactctgaagataatgcctgcagttagtagactactgccatgaagggatgctggcctggtgttgcttcttatttaagagaagctagaaagacagctttctctcccaaatttaaaatgttcacttactttacttttgaaattctaggtaagccaaataacaattttgtccattgttggctagcctgtaaccactggttcacattctgcagacrctgcctattttatctgtcgcttctccaggctatttactttcattgcaccaaaataataaggctggtggtgctctagtaacagtcccccaaaatatgttaaaactgataaccaggcactgtccagatagtcttgtttctcctaaactgtcccctccttcc

SEQ ID NO: 539577 - DNA, 538 bp, Homo sapiens
cagagggcactcagatgtgtggttgcatctgactcagccagcaaagggatattttcatccttggaaccttgccttgtccaagccaggatcttctgcccccgcatcacccttgtcttccctagcaagtgtgcagatctctgccttgataacgcgtgttcttttgtacgtttgctgagatccatgtacaactattctcagggtttttaagcagctataaaatgaggtttttacaattcagtttgaatcttctcatacaataatcatgttcatgattcagcacaggtttttacatgttgcattcctactcaagggcagggttttttttcccctccttttktccactgaaagaatgccaacaggaataaattgagtgggatgagccttcatggttaccttttttcttcacttgggtatttatagtaagatgaaatgtgcagaagctgttttcctttcatataaaccaaagatacaaggaatttactaagtgtctgggcagtcgtttggtctcatgagaagagcatggaagctgcaggggcct

SEQ ID NO: 539578 - DNA, 725 bp, Homo sapiens
tatgcccaacttattactcactacaatatagaaacttcttaccactctctaatgtcaagagtaataaccaaccttgaacttgtctgtcagataatattagaacaaatatcaaaatacccaatgtaggctgagtgtaaccacccaccagctttcctttttatctaagcaaacagcagtaaatctaattaagcaataggatggggggaggggagggggaaagggaatataggcaatgtaggcacatgttggtacattacaatatgttccttcatgtttgtgatattacaagagcttgatattccaatttaagtcaaacaagatggtggtgtgctgtcagaagaaaaaacaaaaatgagcatctactctgtgttctgcatattcacatattatcgcaattggaactgaggtatctacttcttaatttgagaaggggaggacaggaagagggagggaaaaacaagcaatgttctctgtaaataaaaactgcaataaaccaatttaataaatcaattaaataaacccattttcttaatactgatgttttccttacacataaacattcatgycttatcatcttttcccaaagaaaaataaaattattcgaatatgaaaagtaccactctccaagagtgggggctttaaaatcctgatttaaatatattttgagtaccacattcatggcagtgtcccacagtctttcaatattaactttattgggacaacag

SEQ ID NO: 539579 - DNA, 677 bp, Homo sapiens
attccattctttgtgagcttggtgaatacaaggccccaaggaccacaaacccaaaatctcaattccaatgtgaagacccatggtttaaacaagccactgtcgaaagactggcagaacctttgtggaatcaaagtcacattttatacaccacactgctkcttatgtttctctgcctaataatgatgcaaaaaaaatcaaaatttatcatttgttttatacttcctgtaaatattatacatttgtgtcatacaatgttggtataatgtggcttcttttcatagtaacaaaaatttaggaactagattatatctataattttcttatgaaatagtattctttcaatgaatcagggcatgagtaagttttacaatagaaatgttttatctctggcttatcaaaattttgaagaaagtaacatgaaagttttcatacacaggagctctcaccaaaagaacaaggcaatcttcaacatacaagttgcaagtcttgtttaaatattatctctaccgtctctctaatcagaatcttccagctgatttacattggttatattgtgaataactataagcttaagaaatgttttgcatggagcatacctcaagcatgaacagatgaaaactccatatttaagcaattacatgcaactcagaaatgccaatttccatcacaattagcct

SEQ ID NO: 539580 - DNA, 677 bp, Homo sapiens
attccattctttgtgagcttggtgaatacaaggccccaaggaccacaaacccaaaatctcaattccaatgtgaagacccatggtttaaacaagccactgtcgaaagactggcagaacctttgtggaatcaaagtcacattttatacaccacactgcttcttatgtttctctgcctaataatgatgcaaaaaaaatcaaaatttatcatttgttttatacttcctgtaaatattatacatttgtgtcatacaatgttggtataatgtggcttcttttcatagtaacaaaaatttaggaactagattatatctataattttcttatgaaatagtattctttcaatgaatcagggcatgagtaagttttacaatagaaatgttttatctctggcttatcaaaattttgaagaaagtaacatgaaagttttcatacacaggagctctcaccaaaagaacaaggcaatcttcaacatacaagttgcaartcttgtttaaatattatctctaccgtctctctaatcagaatcttccagctgatttacattggttatattgtgaataactataagcttaagaaatgttttgcatggagcatacctcaagcatgaacagatgaaaactccatatttaagcaattacatgcaactcagaaatgccaatttccatcacaattagcct

SEQ ID NO: 539581 - DNA, 643 bp, Homo sapiens
aaggaggaacttttttattgaggtccatccacgattttatcagggccagcacttttacggttgtcaggggggtgcaggcatccaatttttcttatctgcgtgattaatacaaacgctgtttcaggacacattaattaacagatacaaatctacgttctcatggaaggatcaatacggagaagaaaagaggcatcaatgtgaatttagtgctgatgatggagaaggcacgctagcgacatttacgtgcacggaaactttaaagttgcaccgggccccctttgtccctgtgatttactaattaaccatgttacagccataacaacatttcgcacatttctttggggtttaattgaacaaaatacaataaaatttcatttttaaagttgatcctgccatttgtttcttctataytgatggttgtgtgtgtgtatatgtgtgtgcatgtgtgtgtgtttatccttcctgcaaacctaactttttccttttgcttctctatgaaataaagagaaggaaaaaaggggaagaaacagctctcctttttttttttttttttttttttttttttggtgagggagcatgaggagacggatatagcacaaaaggtttgacacatttgcttgattgatatcctcaagtatatttc

SEQ ID NO: 539582 - DNA, 464 bp, Homo sapiens
agggcagcagtcctggaacagcctcaggaacctcatgctaccagtcagaggaagctcagagaaaggagaacacaccgggggtcaaggtagtggctcccagggggcttagagaagagagaggtcaaggggggtgaggctaggtatggcgaggatttgagtcttgacctgggcattcaaggaaggtgggatatggataggaggaggagagaatgctttctcagcagggagggcagcatgcttttggtgtgtgtgggggctggagctaagcmaacatgtggaggagccgtggaagagaaagctttataagtatttgtgccacactgacaatgaccttgacttagttccatgctttgtggcatcatttgtgaagttgtttgctttccactggtggacaggtgcttgcacttggtttgtttgcagtttgactcataccccctctcctgctgatctcccatgaaactggg

SEQ ID NO: 539583 - DNA, 460 bp, Homo sapiens
gctaggagagtaactggaaccttccytgatgcccggctgggtggtcctgcctaggagcttgtcccctctgctctgggatggagaaggatcccactgaggcttgtggtacaggtggcatggccagaaaccaagtggactctcaagagcttgctacccagaactgtttggcaagagagctgggctggcaggtggcagggtgggggcctgggccccaggggggcagtgggctggcctgtggtctcccctgaaggagtggggtgtctatcaagagtccagtcagaacgcattagctctgtgacacagatctcattagtgcccatgagaggtgtcactgcgggagaatcgtcggctcagggagacgcttgtaccaaaaggaagaaaggacagtgacagccttttctctgccgcctctgccgccacgctcactgggctgcccgccctcctcctcgttgaggggggt

SEQ ID NO: 539584 - DNA, 556 bp, Homo sapiens
  misc_feature (1)...(556): n = A,T,C or G
ctcaagccagaaacctgggaggcatcttaattcctatctttccccttgactcctccccttcaccaaatctgtggcttttacctccaaaatttctgtctccattgccacttctccgtcggcctacaccactggtacacagtgaccctggnactccagcagcacaagtagccctacgctactgatctctgcccacattcaatccgcttccaatcaattctccatctgcagctaagacgtgatctctttgaacagtgctacttaaaggatagtctgcaaaccagtgctgtttacacttacccctggtctatgatgagaatggaaactgagagtacacactgaaaaacttacgtaacaattttacrgcaattgtatgctgttgaatctaatatgaagaaacatggacttgtattttgtctttataattttattatctttatcagtctctgatggtttagaaataaaatagaaaaatgtccttcaccacagatgatttgagacacactgtcctagtgttctagaatatatatcttatcattacccccaactatcccttatt

SEQ ID NO: 539585 - DNA, 542 bp, Homo sapiens
ccaggagtgttttgaattttgaatttttttcagattgtgcaatatttgcatatacatgagatatcttggggatggggtcccaagtctaaacacagaattcatttatttatgtttcttatacactttatgcacataccctgaaggtaattttatataatcgtttatataattttgtgcataaaacaaagttttgacggcgacccatcacatgaggtcaggtgtggaattttccacttgtggtatcatgctggcagtcaaaaagtttcgaattttggagcattctgcattgggattttcagattatggatgcctaacctgtctgtatactttttttttcactcactgaaaccttaaaatttatacccttactctctccatatatattgtctctcctgtattcacatttttccttgcccayttctttttctttgagttagagccctactctgtcacccaggcaggagtgcagtggtttgctcatagctcaccacagtctcgacctcttggggtcaagcaatcctcctgcatcagcctcccgagca

SEQ ID NO: 539586 - DNA, 545 bp, Homo sapiens
tgttgctgcttgttcttgttttttttcttcttcttctttttaaacgtttttcatttgtttgttttgttttgttttgttttgctggctaaggaactttaagacaatccttaacattgtttgactctcagacctaagctaaacatttggacttttattgacagtgaaggaaataaccttttaataatactaccaagtcccaaagtgatggtatatatacccttaactcttttagtcactgtgttatagatgaaaaagtcaaaccctctgaattcagtgctgattagagtatagaaaatcayactaaaatatgtgttacatgtagattagactattcagtgtgcacttatacctgttctcaactttaatttttttttaactttgcaggtcaattttaataaacagaagcaattaagtcaataaatgtccagtagggtcaaaaagcacacttttcagaagagaagtacaatccaatgggatttcatttcagttttgtatttgaactactgtaagaagagaagcattaatttaacatgttttcttgaggt

SEQ ID NO: 539587 - DNA, 580 bp, Homo sapiens
agccaaaagcaaactcctgtgttctgtgttgctgggtggggctgggattgtttagttcttgtccttgctacctatttctggaaagaaaacctagtgggtcagaaatgaaatcagtccctgctgggagactgggagagaaaacccctgaatcaattatctctaatgtgtgttgagatttgtttttcctgttgtgagatgaacctttcttagcctcagactgtttgtacttttgtcgtcacagagtcagtgtctcatgtgatgacrgtggatgcattccttagtctagctcagcagcctgagagggtctctggaggcccccattgagccatgagtaaatataataagatataggacgtggaccacattaagggcacccatgaaaatgggacatgtactttcctatctaaacctggcagcacctgactgggccaagagacatgagcgctgttgaaaagaaattagtgtcagatataataggaggaaggatttgctaggatgtctctggccacacgggagtaggaccaaccagggaatgggttgaggggagacattggtgcagaattcccagcaaagggagaca

SEQ ID NO: 539588 - DNA, 632 bp, Homo sapiens
tatttttaaggttagctattgttgctcttagaagtcagggtaccctgggaacagtgagtggcactggaagggagcaggagggcacttctggggtgagttccacttgtcaaagcccattgggttgtaaatttatgatatgtgcattttcccatatatatgatataagcctaaaaatgtttaagtaagtttaaaaatgtaattgccaggtgtggattacacaagtcaagagggtagatgtagatatatgtgaawcctctcccatcccagaggtagagatgacagaggtacacatagaaatgcgatcactctgctaccattgctgctgaccaaggcatgatgctcctctaagtgcatcttaacattttagagcaaagttgtcagcggcactatgtgtctccttccagtcttactcagcccaaagtcctgcttccaaaaacagttggcttctctaaaccaggagttggcaaacttttgctgtaaaggtcagatggtaaatacttcaggctttgccagccttgcagtctctgtcgcaactaaggatccagctctgccggtggagcatgaaagcagccaatgatgatatgtaaacaaatgggcataactgtgttccaataaaactttatttacaatgg

SEQ ID NO: 539589 - DNA, 574 bp, Homo sapiens
tgccctcccctccatcccttgcccatgcccctggctctgttccctgaatggaggcaggaggtctctgctcactgcaaagctcgttcagggcccattccatgtcagtcagcatcccatcgggaggcaggtggctcactcaaatccctgcaaggggcaggcctggaaagggaccattgcagacccttgggaggcagaaagcgacacgcgcgggagagtgcagggacccaggccagcagcrgctgagctgtcaccacccctaccaaaggcacaaggcagggggcacccccaggacctgggaaggaacacagagagctgtctgcctagacagggacctggcctgagggacagactcatggtgtcccacagggagggctcaggggtgatgcttcctgaccctgctgtcctccctccctccagtctccagcctgaactccccattggccaaatacaactagaaaccagtggactcagggtcaaggtctgcccaggcctggtgtcactcagcacagcttcctccaccaaacagaggcagctcattctccaacaaaagtgacagctccttccagaaagggca

SEQ ID NO: 539590 - DNA, 553 bp, Homo sapiens
cagggagggctcaggggtgatgcttcctgaccctgctgtcctccctccctccagtctccagcctgaactccccattggccaaatacaactagaaaccagtggactcagggtcaaggtctgcccaggcctggtgtcactcagcacagcttcctccaccaaacagaggcagctcattctccaacaaaagtgacagctccttccagaaagggcaattgggtccccaaacagtttgttttctatggcaactgcagcctcagccagggccctccccacctcaaagcctgtatttggagaagacattttgtcattcaccatgcataaaaagctgtggctgggccacacagagacagtgcctatgtcctcaaggattctccagtcaatgatttttcagaatcaaaaacattcaggctgcatttcctccgggagtcccggcccttgaggtctccaggccaygtcatgtgcctgcacacagcatgtgtgggatgcatcggtggatgccttttctgaagctgtgagtctttagagttgtcctccctccacgaccctgtccaca

SEQ ID NO: 539591 - DNA, 288 bp, Homo sapiens
cgttcccctggactctgtcctggcaggctcaggacaaccggaggacgggcacaytgctctttccccactctgcagatgaggacatggaaagaggaaagaggtggcttggccaagctcacatagccagccagtggtggaggtgagcacaagtcccaggctgtcccctccaaaccctgggtgaggatctgtgcaggcagacgtgagggtaggtaagtgcaggacccgcagagcagaggaaaatgaaccaagacggctttctgccagcgttcactctgtccaggtgtgtta

SEQ ID NO: 539592 - DNA, 536 bp, Homo sapiens
gagctagaacgctgtgcttgcagacgtcacctgtcacttgctctcggagtgggattgtgggcatgtaccttctctttggactttccgatatgttccatgatgttctctgatgaatatacggtttatgaaattagactgcgaaatatgtgcagtgaaaacagtctccatttgcatgttaacacggcgtgcggcaggaagcatcctgcaggtcactctgattttttccaagactgcccagggctcttgtcctcagggcacccacctgaccatgtgctccctacccagcctgaacctgaaacaggcatcccagttcccctctggcactgcatccaaaggcccagctgtaggtctcttttcccaggtccatgtgccagcccctgaccctgccccytccccaggagcagatccatggctctcctgctgccccacaggcctcatcctccagttcactggctttcaagggccaaggccagagcacccaacaggactgccccctcctgccgaggccacatgagtgcctgcctctgtgtcctcct

SEQ ID NO: 539593 - DNA, 376 bp, Homo sapiens
ccaacttgggggctggtctacgggcacagccagggtgggcagcctcttccccctgctgstttctgccccttggggttggagtctagggagaaggcggtaaagtcctcacttgcctggtgctgtcaagagtcaggccgcggactctgtgattgccacatgctctgagctgacacatttgcctatggctgtgtctatgcctacatccctctgtgctccctcttcctggacttgcagaacccaccaccccccacaagaggaactaggacagggactagctgagccccaggcacaggggctgtgtctgttaaatgaatatattagtgcttacaaaaaaacaggataccttttgttcttggaaggcagagctcccagggca

SEQ ID NO: 539594 - DNA, 370 bp, Homo sapiens
ctcagctctagaacttgacgtccctggcctctctccccctcctgctggcctctgaccttcccacgtttgctgtccctgttcctgcatgaacttccctcctccctccctcagagcctcctcccttggttcctgcgctggcaaccctggtgtttggaattattggaattagcacctccttcctctgaccacccctcttccctgccctctgcactgcatttgccacagtgactgcgtggtgagcacatcccrtcaccgccatgttcccagagcctcgagcaaggtggggcccggccacttaactccatggggtggggcaggcctggtagatggaaaaaatcagacctagagaaactgaggacctgacactgtg

SEQ ID NO: 539595 - DNA, 586 bp, Homo sapiens
tgcagtgttagcagacctgctcgccccaaaaggacatcccagcagcagggatcttgcccgtatattccttatgcatggttcaatgacagttaaaatctgattggagagtgtgtagccatgaaaagttgagatgaaagagtgtaagggggagatgggaatgaggtcggctccccagcccttgtccacattcagatcagcagttcacagcatcgctttgggccgtccctaaagtggttccattccagctagtggttttaggtatacaagttgtcttcggggagtttaaaccctgccgcggggatttccctaccatacaaaatggctctcctgagtggtgctgaaaagaaagtctcccccacttgcttctggtgatgcttcgggggcctaagagtcaaagaaagaacatsagtgtatcgtaaataactttactccatgcactgaaggatgtggtttttgacagtgcagtgggactcagaaatggggagccagccatttaccaacaatttggctgtcaacttgagtccttgaacccctgcccagcctccttcccagccccaaatatgcacacacaggtttccgttcccag

SEQ ID NO: 539596 - DNA, 571 bp, Homo sapiens
tgcagtgttagcagacctgctcgccccaaaaggacatcccagcagcagggatcttgcccgtatattccttatgcatggttcaatgacagttaaaatctgattggagagtgtgtagccatgaaaagttgagatgaaagagtgtaagggggagatgggaatgaggtcggctccccagcccttgtccacattcagatcagcagttcacagcatcgctttgggccgtccctaaagtggttccattccagctagtggttttaggtatacaagttgtcttcggggagtttaaaccctgccgcggggatttccctaccatacaaaatggctctcctgagtggtgctgaaaagaaagtctcccccacttgcttctggtgatgcttcgggggcctaagagtcaaagaaagaacatgagtgtatygtaaataactttactccatgcactgaaggatgtggtttttgacagtgcagtgggactcagaaatggggagccagccatttaccaacaatttggctgtcaacttgagtccttgaacccctgcccagcctccttcccagccccaaatatgcacacaca

SEQ ID NO: 539597 - DNA, 640 bp, Homo sapiens
tcacaactttcactggacacctgctgcctgtcaggctggaaccaggccccttgctatgctatctcagtctccttccaaggcaggaagaaatgggaactcagagagcccagggccatccccagggcaagccgcggggctgggatttcctctgggtcccgactgacgctggcgcagcttgagtcctccacactcatcaccaactgccagcttctgacgtccaagggaagagacagtagccagcaggcagagacagcagaggttgcaagggccccggggcaggggcacagatggcatgtggggcaaggtgagaggcgaggggagtggtgccctgagacctgcrcaggggttaccaggttagagtcaggagtgattcacgcagggccaaggttgagcaaatgaatgaatgaacggccaggatgcaggggacagcggagaggctggaaaggaggcgagggctgggaagtggacagccgtgagcagcggatgagggtggagcctgggcatgctctggaggaggaggtgggaagtcacacaggctgccctgaggctgcggggaaggggacatgctcaggctatgcttcagggagggtcctgcctgggtggccttggaggggacagtgaggaggacaatgaagaaagg

SEQ ID NO: 539598 - DNA, 520 bp, Homo sapiens
gaaagctcacaactttcactggacacctgctgcctgtcaggctggaaccaggccccttgctatgctatctcagtctccttccaaggcaggaagaaatgggaactcagagagcccagggccatccccagggcaagccgcggggctgggatttcctctgggtcccgactgacgctggcgcagcttgagtcctccacactcatcaccaactgccagcttctgacgtccaagggaagagacagtagccagcaggcagagacagcagaggttgcaagggccccggggcaggggcacagatggcatgtggggcaaggtgagaggcgaggggagtggtgccctgagacctgcacaggggttaccaggttagagtcaggagtgattcacrcagggccaaggttgagcaaatgaatgaatgaacggccaggatgcaggggacagcggagaggctggaaaggaggcgagggctgggaagtggacagccgtgagcagcggatgagggtggagcctgggcatgctctggagg

SEQ ID NO: 539599 - DNA, 605 bp, Homo sapiens
gggccttgcacaccgatgggtggctgtcacgctggggagggatgagtcccactgatgtgtgacacacggagctcctgtcccatggtctgtccttcgcagatggtgagtcccctaaggacagggcttgggacctctgagtgtagcccctgcgcagaggggtctggcggcacacacctgtggagtgaacagttaaggtgagacggccttgctggtctgcaccttctcttcccctgaagcatggcaccactcaggcagtgcagacccttcacacttctccaggcagggagagcatctggatgagcaaagctgcagcttatctcattgtgtctccccgggcacccgctccaggggcctgtggggtctcagggtgacttatgcatgtcacctgctcacagtgacatggatggtctgcaaggaagatgccccttggtggctgcgtggcaggggagaatacggcagaagctgagtcgtggtgcatctttgaaagcccagagagygctccacccgcctcaggtcccatcctgggattcctgggggaaaaaaatgcctggagttgggccgggccatgggcatccacgcaggggcatgcgttcacttccagtgcc

SEQ ID NO: 539600 - DNA, 605 bp, Homo sapiens
gggccttgcacaccgatgggtggctgtcacgctggggagggatgagtcccactgatgtgtgacacacggagctcctgtcccatggtctgtccttcgcagatggtgagtcccctaaggacagggcttgggacctctgagtgtagcccctgcgcagaggggtctggcggcacacacctgtggagtgaacagttaaggtgagacggccttgctggtctgcaccttctcttcccctgaagcatggcaccactcaggcagtgcagacccttcacacttctccaggcagggagagcatctggatgagcaaagctgcagcttatctcattgtgtctccccgggcacccgctccaggggcctgtggggtctcagggtgacttatgcatgtcacctgctcacagtgacatggatggtctgcaaggaagatgccccttggtggctgcgtggcaggggagaatacggcagaagctgagtcgtggtgcatctttgaaagcccagagagtgctccacccgcctcaggtcccatcctgggattccygggggaaaaaaatgcctggagttgggccgggccatgggcatccacgcaggggcatgcgttcacttccagtgcc

SEQ ID NO: 539601 - DNA, 605 bp, Homo sapiens
gggccttgcacaccgatgggtggctgtcacgctggggagggatgagtcccactgatgtgtgacacacggagctcctgtcccatggtctgtccttcgcagatggtgagtcccctaaggacagggcttgggacctctgagtgtagcccctgcgcagaggggtctggcggcacacacctgtggagtgaacagttaaggtgagacggccttgctggtctgcaccttctcttcccctgaagcatggcaccactcaggcagtgcagacccttcacacttctccaggcagggagagcatctggatgagcaaagctgcagcttatctcattgtgtctccccgggcacccgctccaggggcctgtggggtctcagggtgacttatgcatgtcacctgctcacagtgacatggatggtctgcaaggaagatgccccttggtggctgcgtggcaggggagaatacggcagaagctgagtcgtggtgcatctttgaaagcccagagagtgctccacccgcctcaggtcccatcctgggattcctgggggaaaaaaatgcctggagttgggccgggccaygggcatccacgcaggggcatgcgttcacttccagtgcc

SEQ ID NO: 539602 - DNA, 454 bp, Homo sapiens
tttccgttttgctctgctacacaacgcagcattaaatacccttgctgcttagtctttgctcacttggctgatttagctccaagataatttctcaaaaaaaggaactgctgggtcactgggtcactctttgtatgattgcgaatatgtttaagaatcggacccaagaacatctatgtggctcttagaaagaataactcartgtctgtggtttgcaaacaggccacgcagcccagggtgggaggggctggcggaagatgggcgatcggaagcccacaccttctgctggacccatggccctttgcaagctgcagggccagcagctacaggtaccactactgtcaccgtctctgacaattcctgaaaactggggcccacatttcctatgttccaggtgacaagttaagggccacggagagagggcactcagacgaggggctgagaaggcctaccacca

SEQ ID NO: 539603 - DNA, 442 bp, Homo sapiens
ctgtgtccgggtggggttgagtttctgaaggccaaggcctcgcccactctgctggccctcggcccacctgtccctccactctcttggacaggagcgtggctaactccaggctgagtgtgaagagggagtggcaagkttctgaaaacacagagaccacctcaaggtcctcgctgcccctgagagattctgctgcttttttgcaccaactaatgaattaagatgtaaggaaaactctgggctgcagccttgagtaatagcatccactttggatttgctggggctcccccctccaagaagctattcctcataatagatccattaacccattagggcctagctcgtatacctcctgcatggcaggagctgccaacgtaggccccattgcttcacaacctgagctgagccctgaagcccatcagtgctgtggcctgggcaacccaac

SEQ ID NO: 539604 - DNA, 535 bp, Homo sapiens
ctgtctctgccccgactttcagcmtgagctctctgagtgcaggtcctgccaatgcagtgtgacagtgacgtctcaggtgtgaggacgtgggcttgctcgtctctgtcccctgcaggcttggtatagggtctaatggaattagggggtgacagactgtattagtcagggttatccggagagacagaactaataagatagatgtacatataaaagggagtttattaaggagaattgactcacacagtcacaaggtgaagtcccacaataggccatatgcaagctgaggagccaggaagccagtggtggatcagtccaagtcccaaaacctcaaaagcagggaagccggcagtgcagccttcagtctgcggccaaaggcccgagagcccttgaaaaaccactggtgtaaatgcaagagctgaaaagctgaaggacttggagtccgatgttcgagggcaggacgcatccagcacgggagaaagttgaaggccggaagactcagcaagtccagtccttccaccttcctctgcctgattta

SEQ ID NO: 539605 - DNA, 510 bp, Homo sapiens
cttccctcccagcggaatgtaaggatagccaagccttccacccatatgtgagactcagggtcctgccttcagctttctgggctccagtcagctccagaataattagcaccgtgtaatcccagggacatcggcctccagaggcctcaggctgtgacaaaggccagaatgcagttcagsgtgtccagtggcggcttctcacctcactcctcctgttgtcactgagagccagatggcccaaggccgggcttgccaaggacatggacacttccctccgaggaataggaacaccagtaggaaggacaggtgagaacgtttgactatggccccgagacctctaacttcagcactgccagcagcatcctctgctgtggcttcttgagagctgaggcccagtgctgggatggggcaggtggctggacatccggagggactgcccgctggggaaagctatccttgccctctgagaaaactatgaatgtacgagccctggccctgctcaggccatgccac

SEQ ID NO: 539606 - DNA, 606 bp, Homo sapiens
cggcgttcatggcacccacgcctgtccacagcgaggggtcaagcgtggtccyggggagatttgaggaattggcctcacggctagggctggtttctttccgtgttttgggcaatgacctagctacctttactagtgcctgggaatgctcaaggcttgggtttgggttcgagcttgctgggaaaacctgcagagtggtcaaggcactgtgatcttgggtcagaacacaaagagaaggcagggggccctgtggcctaaagagaacaaacaggacgagtaaggggagctgctcctgcctgcctgctggagctggggcgtccatcttttcccacctttggacatcagactgaaactgcatcattgggtctcctggtctccagcttgccggctgcagatctggagtctcctcgagctccataatcccgcgagccctcctaatcctgagtctccttctctatgtgggaacacatgtcctgttggttctgtttctcgagggacccctgataaagacactcaaggacagttccctggacctaggactgatccctcgtgtgcccatccaggcggcagtgctgtgccaagctcgggctgatgacccacagagaacag

SEQ ID NO: 539607 - DNA, 621 bp, Homo sapiens
catctcctgggctttgggccccggagtccctcatgaggctggctcacctaaaacctgcagcaatttccctgagacagagtggcacacggcgtttgtgctggggaagtggacttggarcaaaggtaccagtcagctaacggaccttccaggccccagctcagaagcctcggcctcactttgcccagaccagcagtcaggggcttgttttaacaagctgtccccaggagatgggtgtgccccatcaagcttgccgatgccttgccctccatctgagaacttcagaccctggacccctgagcccatgtggtggagaccactgcctgccttggctgaccctattcccattccctcaggtgctcagagaaatcccctgcctggctggtgcccccaggtcctcaggctccaggtcacctgatcctgactgaagacggaccctccttgaggttcggtctgaatcggaggacttaaccaggccctctgagccatgccaggtgggattccagaaccgggaaggggagaggagggctccttgggcctgatagtcccaggagaatgaaactcactcctgtccaggggccctcatcctgcccagcgaaaacagaggccacagtgtgggtgagt

SEQ ID NO: 539608 - DNA, 621 bp, Homo sapiens
catctcctgggctttgggccccggagtccctcatgaggctggctcacctaaaacctgcagcaatttccctgagacagagtggcacacggcgtttgtgctggggaagtggacttggaacaaaggtaccagtcagctaacggaccttccaggccccagctcagaagcctcggcctcactttgcccagaccagcagtcaggggcttgttttaacaagctgtccccaggagatgggtgtgccccatcaagcttgccgatgccytgccctccatctgagaacttcagaccctggacccctgagcccatgtggtggagaccactgcctgccttggctgaccctattcccattccctcaggtgctcagagaaatcccctgcctggctggtgcccccaggtcctcaggctccaggtcacctgatcctgactgaagacggaccctccttgaggttcggtctgaatcggaggacttaaccaggccctctgagccatgccaggtgggattccagaaccgggaaggggagaggagggctccttgggcctgatagtcccaggagaatgaaactcactcctgtccaggggccctcatcctgcccagcgaaaacagaggccacagtgtgggtgagt

SEQ ID NO: 539609 - DNA, 621 bp, Homo sapiens
catctcctgggctttgggccccggagtccctcatgaggctggctcacctaaaacctgcagcaatttccctgagacagagtggcacacggcgtttgtgctggggaagtggacttggaacaaaggtaccagtcagctaacggaccttccaggccccagctcagaagcctcggcctcactttgcccagaccagcagtcaggggcttgttttaacaagctgtccccaggagatgggtgtgccccatcaagcttgccgatgccttgccctccatctgagaacttcagaccctggacccctgagcccatgtggtggagaccactgcctgccttggctgacccyattcccattccctcaggtgctcagagaaatcccctgcctggctggtgcccccaggtcctcaggctccaggtcacctgatcctgactgaagacggaccctccttgaggttcggtctgaatcggaggacttaaccaggccctctgagccatgccaggtgggattccagaaccgggaaggggagaggagggctccttgggcctgatagtcccaggagaatgaaactcactcctgtccaggggccctcatcctgcccagcgaaaacagaggccacagtgtgggtgagt

SEQ ID NO: 539610 - DNA, 621 bp, Homo sapiens
catctcctgggctttgggccccggagtccctcatgaggctggctcacctaaaacctgcagcaatttccctgagacagagtggcacacggcgtttgtgctggggaagtggacttggaacaaaggtaccagtcagctaacggaccttccaggccccagctcagaagcctcggcctcactttgcccagaccagcagtcaggggcttgttttaacaagctgtccccaggagatgggtgtgccccatcaagcttgccgatgccttgccctccatctgagaacttcagaccctggacccctgagcccatgtggtggagaccactgcctgccttggctgaccctattcccattccctcaggtgctcagagaaatcccctgcctggctggtgcccccaggtcctcaggctccaggtcacctgatcctgactgaagacggaccctccttgaggttcggtctgaatcrgaggacttaaccaggccctctgagccatgccaggtgggattccagaaccgggaaggggagaggagggctccttgggcctgatagtcccaggagaatgaaactcactcctgtccaggggccctcatcctgcccagcgaaaacagaggccacagtgtgggtgagt

SEQ ID NO: 539611 - DNA, 538 bp, Homo sapiens
gaggccacagtgtgggtgagtaaggatgagggtcccacaagtacaggtaagagaggcctcgggcaggtgcaggcaagaaaggcctcaggcaggtgtgggcgagagaggcctcaagcagggcaggtgagagaagcctaggttaggtgcaggcaagagatgcctcgggcaggtgcaggtgaccctatcgttccagcttcccagggcttaccagctccttctggagggcatgatctcactgcctccagcagcctctcccagtgccaggcatcagcaggctccctgggcaggtcacgagcaaggctggttaaagccgacacgaatatttgataaccaggtgccaccgtgggatgacacatgtgtggcgctgtgctccaatgcagtttcacatctgacaagtgtattacagatttgaaagaaaccraaaaccaaaaccggcagcccacttttatactgaagatgttaggctccaaacaccagcgcaggaaacaccacagcctggctggggctgctggctggcttgaaggtgagcttctggcag

SEQ ID NO: 539612 - DNA, 520 bp, Homo sapiens
gcccagcgaaaacagaggccacagtgtgggtgagtaaggatgagggtcccacaagtacaggtaagagaggcctcgggcaggtgcaggcaagaaaggcctcaggcaggtgtgggcgagagaggcctcaagcagggcaggtgagagaagcctaggttaggtgcaggcaagagatgcctcgggcaggtgcaggtgaccctatcgttccagcttcccagggcttaccagctccttctggagggcatgatctcactgcctccagcagcctctcccagtgccaggcatcagcaggctccctgggcaggtcacgagcaaggctggttaaagccgacacgaatatttgataaccaggtgccaccgtgggatgacacatgtgtggcgctgtgctccaatgcagtttcacatctgacaagtgtattacagatttgaaagaaaccaaaaaccaaaaccggcagcccrcttttatactgaagatgttaggctccaaacaccagcgcaggaaacaccacagcctggctggggc

SEQ ID NO: 539613 - DNA, 445 bp, Homo sapiens
ctggcagagactgtgtggcactggttactgggaagctggggtcctccagccatgcagcaggtgagtggtcctgggcaggtgtggctgccaccgctggtggccagatcccaggaagrcatggctgccccttttgactgtatttgcctcaatcccagcatccaggcagcaggagggtccgacacttatttgtcctaggttgggtatcaagggcccattgtaagtgaggcattgggctcggtgcacagtggaggtgctgtctatggcgtcaaggaagaacattctcttcatatctgtgagcagcaagacgagagacgatgcctccaggttatgaccatgaggattctcaaactcagtgccactcaggcccagcatctcctcgcaggctggtttgtgtttgcagaagcctgctgagggaatgaccccagcagccctcgcttgcctccct

SEQ ID NO: 539614 - DNA, 445 bp, Homo sapiens
ctggcagagactgtgtggcactggttactgggaagctggggtcctccagccatgcagcaggtgagtggtcctgggcaggtgtggctgccaccgctggtggccagatcccaggaagacatggcygccccttttgactgtatttgcctcaatcccagcatccaggcagcaggagggtccgacacttatttgtcctaggttgggtatcaagggcccattgtaagtgaggcattgggctcggtgcacagtggaggtgctgtctatggcgtcaaggaagaacattctcttcatatctgtgagcagcaagacgagagacgatgcctccaggttatgaccatgaggattctcaaactcagtgccactcaggcccagcatctcctcgcaggctggtttgtgtttgcagaagcctgctgagggaatgaccccagcagccctcgcttgcctccct

SEQ ID NO: 539615 - DNA, 445 bp, Homo sapiens
ctggcagagactgtgtggcactggttactgggaagctggggtcctccagccatgcagcaggtgagtggtcctgggcaggtgtggctgccaccgctggtggccagatcccaggaagacatggctgccccttttgactgtatttgcctcaatcccagcatccaggcagcaggagggtccgacacttatttgtcctaggttgggtatcaagggcccattgtaagtgaggcattgggctcggtgcacagtggaggtgctgtctatggcgtcaaggaagaacattctcttcatatctgtgagcagcaagacgagagacgatkcctccaggttatgaccatgaggattctcaaactcagtgccactcaggcccagcatctcctcgcaggctggtttgtgtttgcagaagcctgctgagggaatgaccccagcagccctcgcttgcctccct

SEQ ID NO: 539616 - DNA, 571 bp, Homo sapiens
ctgggcccagaccctggcagagactgtgtggcactggttactgggaagctggggtcctccagccatgcagcaggtgagtggtcctgggcaggtgtggctgccaccgctggtggccagatcccaggaagacatggctgccccttttgactgtatttgcctcaatcccagcatccaggcagcaggagggtccgacacttatttgtcctaggttgggtatcaagggcccattgtaagtgaggcattgggctcggtgcacagtggaggtgctgtctatggcgtcaaggaagaacattctcttcatatctgtgagcagcaagacgagagacgatgcctccaggttatgaccatgaggattctcaaactcagtgccactcaggcccagcatctcctcgcaggctggtttgtgtttgcagaagcctgctgagggaatgaccccagcagccctcgcttgcctccctcagcctggccactgagcctctccctggctgagaagaggtttggagtccgygtcctggcctcgtgccccacccagttccagcgatcctggcagcctctggaaatggaggggaag

SEQ ID NO: 539617 - DNA, 608 bp, Homo sapiens
gggctgcctcttgtcttctgtgaatggcaggggtctctgactaacttgcctcgaggcagaggtcagaggccatgggctccctcccctcgtttcctccctctccttaaggccggcagcatcttctcgcctccaaccccctggccggtcctcatgtcttccctctgacgctgagcctcctaactcccttttataaggacccttgagcttccayagggcctgtgcagatgatccagaataatctcccttttccatgaaatccttaacttaagctcatctgcaaagcctctttagataggaacattcacaggttctggggaagaggatatggcatctttctgtctgccacagtcacaggggcttctgccagtactcacccggctagatcccatcatcctagcttcatctcagcctgagaacagcacgggggggcggtccttgaataaagcccacccggcctcagctccaaggaggggccgatgtcatgaaggtgcccctgcctgataagaggcagcgagtctccctgtcatcactggctgcagaacagaattatgggtgtggaataaattacatgctaacatgcatggtcactccctgcttctcctgccatc

SEQ ID NO: 539618 - DNA, 608 bp, Homo sapiens
gggctgcctcttgtcttctgtgaatggcaggggtctctgactaacttgcctcgaggcagaggtcagaggccatgggctccctcccctcgtttcctccctctccttaaggccggcagcatcttctcgcctccaaccccctggccggtcctcatgtcttccctctgacgctgagcctcctaactcccttttataaggacccttgagcttccatagggcctgtgcagatgatccagaataatctcccttttccatgaaatccttaacttaagctcatctgcaaagcctctttagataggaacattcacaggttctggggaagaggatatggcatctttctgtctgccacagtcacaggggcttctgccagtactcacccggctagatcccatcatcctagcttcakctcagcctgagaacagcacgggggggcggtccttgaataaagcccacccggcctcagctccaaggaggggccgatgtcatgaaggtgcccctgcctgataagaggcagcgagtctccctgtcatcactggctgcagaacagaattatgggtgtggaataaattacatgctaacatgcatggtcactccctgcttctcctgccatc

SEQ ID NO: 539619 - DNA, 466 bp, Homo sapiens
gggtgagcagcctgcctgctgagggcttacactcaggaggggcactggcagcagggagaagggtcagtctcaagaaatgtggaagcaaaaactgggcagcttyggccccggcagatgctccaaaagggacagaacagggagcttgatggggcatgatgggcggggtcatttcggatgggggccctgggaggttctcacagccgcatgtgactgtggttctgctgatgacgtcgcctgcaaggagcccattgctctgtggtccatgggtcgggcagcggcctccatccttcccatccaccactggacagaactggggcccctgggtcgggggcaatgcagggttcactcagtgtcccagagcaggctgacccccctccctccacaggcagaggaacaagggctgtctgggccgatgagggggctggggggtggcatgttttgtgctaagtcactctgcagagggcat

SEQ ID NO: 539620 - DNA, 466 bp, Homo sapiens
gggtgagcagcctgcctgctgagggcttacactcaggaggggcactggcagcagggagaagggtcagtctcaagaaatgtggaagcaaaaactgggcagctttggccccrgcagatgctccaaaagggacagaacagggagcttgatggggcatgatgggcggggtcatttcggatgggggccctgggaggttctcacagccgcatgtgactgtggttctgctgatgacgtcgcctgcaaggagcccattgctctgtggtccatgggtcgggcagcggcctccatccttcccatccaccactggacagaactggggcccctgggtcgggggcaatgcagggttcactcagtgtcccagagcaggctgacccccctccctccacaggcagaggaacaagggctgtctgggccgatgagggggctggggggtggcatgttttgtgctaagtcactctgcagagggcat

SEQ ID NO: 539621 - DNA, 466 bp, Homo sapiens
gggtgagcagcctgcctgctgagggcttacactcaggaggggcactggcagcagggagaagggtcagtctcaagaaatgtggaagcaaaaactgggcagctttggccccggcagatgctccaaaagggacagaacagggagcttgatggggcatgatgggcggggtcatttcggatgggggccctgggaggttctcacagccgcatgtgactgtggttctgctgatgacgtcgcctgcaaggagcccattgctctgtggtccatgggtcgggcagcggcctccatccttcccatccaccactggacagaactggggcccctgggtcgggggcaatgcagggttcactcagtgtcccagagcaggctgacccccctccctccacaggcagaggaacaagggctgtctgggcygatgagggggctggggggtggcatgttttgtgctaagtcactctgcagagggcat

SEQ ID NO: 539622 - DNA, 553 bp, Homo sapiens
ttatcatgaacgaccgagaagacgggagcaagaatggttctgtgggtttggaaatcgatggttctgtttgtgaagaagtaggaaaattgcctgttaccctaagaagtctacgggccgtggtcagagctttaggctcctgattccccaytcgggttgaggtcaccgctcacctctgcaggtgcaggcaggagagaggcagtgagtgggtacaaccgggctgtgaatttgctgagggaggcattataatgacggctcacaaatccaggctgggaccacatcaaggattatggcgggagtggggttgagagctgagctaggtgcttaattaccgaggagggcaatgtgtgttccctccccttccccccagacagcagggacagaggcgtgagccagcatcaccccctcttgacacagagctggtccctcaaagtaaacctcaggggtcatgactgatgattgtaggaagtgatgtgcttgctcttcctcaacgggaaagggggtctgagccaagcggtggctcccagcaaccacactgtgaccataagaacagcca

SEQ ID NO: 539623 - DNA, 261 bp, Homo sapiens
tcagccttttccataacaaagtttgctaaamaaaactgataaaagtctgcagagcaattgctacaaaatcattagggtgggtcaaattaagaactttataccaggttaaagagcgattctttaacaaaaaagaggaaacctttttttgaataggcaagaattctgggccctttctccctaagaccttttattagaggatgaatatcagataaccaagaagtgacacaaaaagcatggtaaaaatattggtggtagcctctg

SEQ ID NO: 539624 - DNA, 617 bp, Homo sapiens
gtaatgctcattgtactatcccataaaatgcttagtaagaaaaccacccatatttcaatatcttgaaatgtctacatgggaagcctcgagtgtgccaagcttcacttgtatgtaacccaggaactatttgtatgtagcatacctgtgttgttatttgccattgctttctagtactggcaacctggtatagtacaggagttggccaaaaacttttataaaatgctataaatactttaaccttccaggccacatacttatttctgtcacttttcttaaccccccatcccccaatcttagctcatkgttcattgaaaaacagattctcagccagatttggcctctggtccaaagtttgcttacccctgatacagtggttaagaacattgaccttgaaactagacttcctgggctcaaatcccaggtctgttacatattaggtgtgtgatctggggcaaatccttgaacataagttctttagtttcctcttctgctaaatgatgatactaatgttacctccctcatggggttctagtaaggattagttaatttagtaaagtacttgaccaatgtgtagaacattccaagtgttagcactattatgaggaacattattcctt

SEQ ID NO: 539625 - DNA, 617 bp, Homo sapiens
gtaatgctcattgtactatcccataaaatgcttagtaagaaaaccacccatatttcaatatcttgaaatgtctacatgggaagcctcgagtgtgccaagcttcacttgtatgtaacccaggaactatttgtatgtagcatacctgtgttgttatttgccattgctttctagtactggcaacctggtatagtacaggagttggccaaaaacttttataaaatgctataaatactttaaccttccaggccacatacttatttctgtcacttttcttaaccccccatcccccaatcttagctcattgttcattgaaaaacagattctcagccagatttggcctctggtccaaagtttgcttacccctgatacagtggttaagaacattgaccttgaaactagacttcctgggctcaaatcccaggtctgttacatattaggtgtgtgatctggggcaaatycttgaacataagttctttagtttcctcttctgctaaatgatgatactaatgttacctccctcatggggttctagtaaggattagttaatttagtaaagtacttgaccaatgtgtagaacattccaagtgttagcactattatgaggaacattattcctt

SEQ ID NO: 539626 - DNA, 598 bp, Homo sapiens
aacccttaaggaaatcatgctgcagcaaatggtgggagtgctttggggaaagatctgttttaagattgtttgcttctaactcagttgcaacagaacctggcaggtgacttacctgttataagatggatgggtgttttctattcctgctctgccatttacaaactggatgagtctggacaggttacttatacatccaagagtcaaggtttctcagctttgcaatgatgcagacacagacacccctactctctgcctctataggattagggtaggtaaggcggcaccacatctctagagggccyatatcacaatggacatggcgtgagagcagctcagaatctggacaaagaccatggagactgaatgtggggcatgttggttaaagactggagatagaactcctccagctatgcccagtgatctctccctgcagaccatgcccacaccaaccctccaagattaatatttccacagcatacccctttccaccactcagtccagtcacatatcttttctgagacgtggtccaaacctttcatcatagtggggagaccttctggatgtgataacatttacagagcatcactcattctgagca

SEQ ID NO: 539627 - DNA, 406 bp, Homo sapiens
tctgagaaattaatttgaagacgacaacttggttgccctgtgtctgcaggtgaaaaaaaaaaaagggggggagagagagagaaaacttggacaagtgtagaaaggtatatgctcaaaggtgttcctccataatgttcatttgtaagagtaaaaatatgggaagctacctaaaagtgagccattgataggatgtagataaaatattgttgatccagcagagaaattttaagtagtcgtaaaaatgatcaggtaagggtagaaaaactaacatggaaaactggtaatmgcgtattgtaaatgagttcaccatatatattgtatttccattgtgtaagtgtgtgtgtgtatcctaaaaggacactgaaatataagaagtaatataaaccaaaagtccctggtaaaacta

SEQ ID NO: 539628 - DNA, 513 bp, Homo sapiens
ctgctctgggtcaagccgaggttttgttagcattgctgacatgaggctgttggcagagcagactgctcctccgttgcctcctttgcagtgctgccatctaaaccacagaggggctkttctacttgtcacagtaagggattggataaggaatgttgcggtgaggatcgtgcaactggtgcaacacttctgccagggctggtccctggcccgcttcccccagcaaactcaaagtaatcactaattttacgtcccccagcagtgcctttcccttggctagtttcatgtggttcagcttttcttttccactttcgctggtcattctgctttttctcgggagtctctacttctttatcactcaaggatcccatgctgcacaagctctggttggaagactcactattaagtggtcccttttgttaaatctgatgtactctccttcattttgccttttgtttcctgattttccaactcttgaatatttcccattctgttttgcatgtatttatttcttct

SEQ ID NO: 539629 - DNA, 666 bp, Homo sapiens
tgctctgggtcaagccgaggttttgttagcattgctgacatgaggctgttggcagagcagactgctcctccgttgcctcctttgcagtgctgccatctaaaccacagaggggcttttctacttgtcacagtaagggattggataaggaatgttgcggtgaggatcgtgcaactggtgcaacacttctgccagggctggtccctggcccgcttcccccagcaaactcaaagtaatcactaattttacgtcccccagcagtgcctttcccttggctagtttcatgtggttcrgcttttcttttccactttcgctggtcattctgctttttctcgggagtctctacttctttatcactcaaggatcccatgctgcacaagctctggttggaagactcactattaagtggtcccttttgttaaatctgatgtactctccttcattttgccttttgtttcctgattttccaactcttgaatatttcccattctgttttgcatgtatttatttcttcttgcatatttattgttttttcctcttctagttttccttactaatacctactctagtaaacctggcctccaataattcctgccgtcgtgggtccaggctatgcaattcttccatcatttctggctggcagagcgtctcccgagactaaaggtgctc

SEQ ID NO: 539630 - DNA, 476 bp, Homo sapiens
acttcactgagaagtaggtctacagaggtcctcatgctgccattgtggaagtcatggtaactttttatatttattgccccactagaaaataagttctataaaagcacagagttttgtctgtttcatctagaartaactcctaagcaactacaaaaatgacatacctattggttggatgaatatatttaggatttccttggttcttatttaactctcagaataaccccacaaagtaggtactactgccattcgcatttagagaggaagaaactgaggttttcagtagttaaattacctgtccagtcacatatttgttaagtgtggtggatgtatatgcaggcctcactgactccaaagtccatgctcttgaacagtgtgctttactatggaccactcacacccctcagtccagctcttactagacggcctttaacaactcttcaatcacattcaagagcctcactccgcagtacaga

SEQ ID NO: 539631 - DNA, 476 bp, Homo sapiens
acttcactgagaagtaggtctacagaggtcctcatgctgccattgtggaagtcatggtaactttttatatttattgccccactagaaaataagttctataaaagcacagagttttgtctgtttcatctagaagtaactcctaagcaactacaaaaatgacatacctattggttggatgaatatatttaggatttccttggttcttatttaactctcagaataaccccacaaagtaggtactactgccattcgcatttagagaggaagaaactgaggttttcagtagttaaattacctgtccagtcacatatttgttaagtgtggtggatgtatatgcaggcctcactgactccaaagtccatgctcttgaacagtgtgctttactatggacyactcacacccctcagtccagctcttactagacggcctttaacaactcttcaatcacattcaagagcctcactccgcagtacaga

SEQ ID NO: 539632 - DNA, 476 bp, Homo sapiens
acttcactgagaagtaggtctacagaggtcctcatgctgccattgtggaagtcatggtaactttttatatttattgccccactagaaaataagttctataaaagcacagagttttgtctgtttcatctagaagtaactcctaagcaactacaaaaatgacatacctattggttggatgaatatatttaggatttccttggttcttatttaactctcagaataaccccacaaagtaggtactactgccattcgcatttagagaggaagaaactgaggttttcagtagttaaattacctgtccagtcacatatttgttaagtgtggtggatgtatatgcaggcctcactgactccaaagtccatgctcttgaacagtgtgctttactatggaccrctcacacccctcagtccagctcttactagacggcctttaacaactcttcaatcacattcaagagcctcactccgcagtacaga

SEQ ID NO: 539633 - DNA, 627 bp, Homo sapiens
tctctatcctgactccacctgtcactctctctcgactctgggagtatagctgcttaaggccaaggcactctgtcttactatttgtggccactgtagctggcacatagcagggacttaatatgggtttcagcaaattgaacgaaaaaggatacttcgtattcctttgtgtttaacttttatcaaacattgcttgaatcaagtggatttttttttttttgagayggggtctcactctcacccaggctagagtgcaatggcactatctgggctcactgcaacctctgcctcctgggttcaagggattgttctgcctcagcctcccgaagagctgggactgcaggcacccaccaccacgcctggctaatttttgtatttctagtagagatggggtttcaccatgttggccaggctggtttcaaactcctgacctcaggtgatccacccgccttggcctcccaaagtgctaggattacaggcgtgagccactgaacctaaccacaagtggactattgatagtatattcattgcacattttataacaagtttattgagatataatacacataccatacaattcacctctttaaagtgtacaatcatttttaatatgttatcagagttgtgcag

SEQ ID NO: 539634 - DNA, 627 bp, Homo sapiens
tctctatcctgactccacctgtcactctctctcgactctgggagtatagctgcttaaggccaaggcactctgtcttactatttgtggccactgtagctggcacatagcagggacttaatatgggtttcagcaaattgaacgaaaaaggatacttcgtattcctttgtgtttaacttttatcaaacattgcttgaatcaagtggatttttttttttttgagatggggtctcactctcacccaggctagagtgcaatggcactatctgggctcactgcaacctctgcctcctgggttcaagggattgttctgcctcagcctcccgaagagctgggactgcaggcacccaccaccacgcctggctaatttttgtatttctagtagagatggggtttcaccatgttggccaggctggtttcaaactcctgacctcaggtgatccacccgccttggcctcccaaagtgctaggattacaggcgtgagccactgaacctaaccacaagtggactattgatagtatattcattgcacattttataacaagtttattgagatataatacacataccatrcaattcacctctttaaagtgtacaatcatttttaatatgttatcagagttgtgcag

SEQ ID NO: 539635 - DNA, 513 bp, Homo sapiens
tttaaaatttggtgcacacctaaaaaattgtctgcagcccacattcagcctcagggctgcctgtttgtgacctcaaggttagagaaagctagtggtctagagtctgtatgccctccaagattggaagcctagctctgttcttgcctgctggtggctttaagcaagttatcatctgagccttggtttccttacctgtaaagtggaataatgacagctaatcttggggagtaaagtgataacatgataaaaatcaggaataaaatgtatacattcaaatataaatactattgtagaaacaatatactttgcttgtaccaaaaacagaaaawaaatacagaaatggtggaaaaaccagatcagtttaacatcaatcagtgtctataaatacaatagaaagaagaagtctggatctttgcaacatttggggtcacagaaataatttttttggtacacatttggaagagaactagccagcatcattatgaaggaaggtctgcataggttcttaaaagg

SEQ ID NO: 539636 - DNA, 625 bp, Homo sapiens
tgtggagaccttggggcccagggtggctgaggtcctggaaggcaaaggagcagggaagaaaggctgttttcagggcaagaccaccaagttgagccagcgggcggaggcacaggcacttctccaggactacatcagcacgcagagtgctaaggagtgagagcttagggtgctcacttcctgtttccacaggaatcttttggtcaataaaatagtttgactcagaaaaaaagaaaagaatgactattaaaatggcacacagttttacggaaattcaagaataaggccttacagagattacaactcaaaagtagttctagatatatcaacattaacaactggtggaacttcacgggctccagtattttgccactaatgtgctaatgtgactagttattctgcaaacatctgcttctttctcctttccctgctaataggcttattattcctgtgacgtctgtacacaagtcatcactaaaaatggctcaacttacaaacatctactttttatgacctttcatatayatacagaatatatagaatctagatatttatatatctatatatttaaagtataaatatatacattttttgacttttattttgcattcagggggtacatatgcag

SEQ ID NO: 539637 - DNA, 594 bp, Homo sapiens
agctagagaatattccggcatattaatctatgtttctaaaaaagtaggtggtagttaagactgaagcctcaggacctgcttagcctggttcaaataccacctctgcctcttgatacatgtgacttggagcagattctccagcctccttgaaaacgtagcctccatctcctcacatataaaattagaacractcttcaattcatatcataagattgttttgaggattaacatcaatatattaacatatatgggttcagaacaatggcacatagcaaattctcaatatatgttcaatattgtcattactatgactacaattattttattatttctccccctcttcccctttgtccatcaagcaaatagccagctctgtacttcattgcctcaaggaagatatgtggcaggcagaggcaaagacttctgctttcttacaggctgtgtctttagggagaatcttgacggactggacataccccgcagggagcagcgtaagggagaggatctgactgcacaggcatctttgtctgagggcgtaggctgtactgaaaaagaagtaaaagaagtaacaggatcctaagaatcacggcagca

SEQ ID NO: 539638 - DNA, 630 bp, Homo sapiens
tcaccaccacatatgtataaactattgaagagattaagagctcatggcaaaaaaaaatcctatagttattttcatgtttatataaataaatggcatccaatacatttaaaaatgtttgatattatgcacattataattgtaaaatacaggtactatgcaattaaatactatttattatgccttactgcaatgattcaggcattcttttccttagagtttcagtaatttactgacacatttattttcatttattttattttaatacatatagttagaaatgcactttctggtttgtgtctattcaaatattgtataacttcctaatgttatgacttaaagttatcgagtgttgtttgttatatcaaagaaaatagcatcggagctttatacaaagctcctttgattctcttcttttgcaactggctcagaagtgtatatataaggattctgtttatgttttatcttattttttttaaatctcctataaggcttcattagagaacaaagaaaaaaacacaaaatttaaaactaatctactttaacttcaccatctgctttatttctgtcttctatttctatcctccagttaaatcakttttgcttttttttttttttacaattatcctcaac

SEQ ID NO: 539639 - DNA, 534 bp, Homo sapiens
cccccgtgtattgctgcttttgcagccctgtgcttcttgtttcagtgattgatgaaggtgggaagaagatcaaaacacctgtacatctagtttttttttctttcttatttttttccataagttattggggtacaggtggtatttggttacatgagtaagttgtttagtggtgatttgtgaaattttggtacaccatcacctgagcattatatactgtaccctatttgtagtcttttatccctcaccgcttcccacccttctccacaagtccccaaagtccactgtagcattcttatgcctttttgtcctcatagcttagctcccacatatcagtgagaacatacaatgtttgagtttccattcctgagttacttcgctgagaataatagtctctaatctcatccaggtcactgcaaatgctgttaattcattcctttttatggctgagtagtattcarttgtataaatataccacagtttttttatgcactcattgattcatggacatttgtgttggttccatatttttgcagt

SEQ ID NO: 539640 - DNA, 370 bp, Homo sapiens
atctactatttttctgaagctgctcaaaataggatttagtgttagcctctgcgcctatctataatttgtcaaactccgtggtatttcttccccccaccatcccatcattcaaatatgaaaacaggactactctaggtaaaagagagtatcaactggtttgaatgaggcagatctctgagacaatggacttctcaaaccaatccccgcgcaagttatttccaaccttatcaaagtcacaaggcacaaaagayagataaaaacatctctgggaaaaaataaatatctcagaatctcctatacctcagattccttgaaaactcatggtacgaaatgatcgactgtctggttggttcagcacagggaataaaaa

SEQ ID NO: 539641 - DNA, 496 bp, Homo sapiens
aacagaacaggaggcaggtttgtcctaagtggcattgtaaaactcattatggcaacatcttctgtgtttttcttttcactgggaaaagattactctgrgtaagtgccacgtgggaaacaagagcgagagagggcagagtggaggccactgaccaatgccatgggcaggcagagggggtgttggctttcagtaggcaggcaggatgggggagaaaagggaaggaggcatctgctcaggattcttaatgatgagaccaaaggactgggtgacagactggttctgcatccgagggagaggaaggtcatcgagaatgactctgaggttactggtttgcgtaaccagttagacagaaatggcttttgctgaaacagtagaaatgtgccaggatatggggagacaagatcgcaagtttcaattttggatgtgttgagtctgaggtgtttttgagaaaaccaagaggagatgtcaagaaagaagttggatttgttctttcccc

SEQ ID NO: 539642 - DNA, 618 bp, Homo sapiens
ccacataatcagatatgagaagaaataaaaatccaaagkcatcagtaaagatcaggtaatatacatattccttgatatgtaattccaggacttggatttcacaagctcttatttgaaacaaataaaagcatttagtgctttataatctttggagctggggagggtgatctagaaactataaagaaaatctagaagaactaagatccatgattaactggtatttagaacacttctctacttttaaagttgactcaattcttcaaaacttaattaatataattgtactcaactgtctatgaaacttagataaggtctattacatacaaaagatacttgcacttgtatatttattgcagcactattcacaatagcaaagatatggaatcaacctaagtgtccatcaatgtatgactggataaacaaaatgtgtggggtgtatatatctacttacacatgcacacatatacgcacaccagggaatactacccaacccttaaaaagaatgaaatcatgtctcttgcagtgacatggatggaactggaggccattgtcttaagtgaaataactcagaaacagaaagtcaaatactaagtgggagctaaacagtgtgtacgcatg

SEQ ID NO: 539643 - DNA, 568 bp, Homo sapiens
agtaaatggaatcaagccatatttgtcctttttgtgactggcttgtttcacttcacataatgtcttcatgtgtgagaaataccttcctaaagctgaaaattattccatgtatgtacagaccacgatttgctcatctttcatttgctgatggacagttgggttgcctccatctttttggctattgtgaataatgctgctaggttatggctgtacaaatctctctctcggtccctgctttcagttctctygggtgtatacccaaaagtggaattgctgatcacatggtaattttatgcttaatatgctgaggaactgccatactgttttctgcagtggctacatctttttccattcctaccaaaactgctttctctattctcattttaagatatcttaaataagaaaagtgacccagacacctccattcagcacaaagcacatcagagacgaagaccccagccatgttccccgacagcctcggaccaaggtggaagagcctgtgtctcccctagtgagagaacgtgtctcagtcatgaaccagcctctaacgccaggacataaccttgca

SEQ ID NO: 539644 - DNA, 510 bp, Homo sapiens
ctgctggcccactgcccagccctgcctgtcccrgtatctggtatgtctaagtaccatcaggaactggaattgctggtctcctttattggattgcagtcttaggtttgcaacagtaggggacgcctatgctctgagcaggaacatactggagatttgagggatttcagttgactgagcactcagtgaccgtgacctttctctacacggctcagacactggctgaccctcctaaaagaggctattcgtgtgttgataaataagctcttgggagcggggatcttattttttattcttttgtgccccacactacctagcctagtactttattcacactcagcgggagcttgaaagatgcctgctgataaaagttcagacagacaatgcacccagcacaatacctacctactagcactcaatattcaatatttgcttggctcttcgaacaacaaagatgttcaaagtgctgatgtgatttgcttcaattcacagctttggcagagcttgcgatca

SEQ ID NO: 539645 - DNA, 643 bp, Homo sapiens
tgtaagttactcagaacatggcaatgctctgrctatgggaattggttcaggaaccggcatgtggcccaattctaacaatgaaatacaaagagaggtttcctagaaacttccaggaaaagcgccctcttaagatgcactttggatgtcatcgtggcctaatatgaggatctgaaatcctataaccatcacactgttggctgaaggaggacagagccaggagaatcacaaagaaacacactggggtgcttggattaagcctgtgttggggcctgctttatctctggactttcagttctgtcagccaataaaattctttattgcttaagccaggttgagttgtattttctgttccttgcaggcaaaaacattctagctgatataacttaggcatgaaataataatgagtgtctggagtaggttataggccaagagctagagaggatgagaaggaagggatttgctcattcaggaagcatttactgagtgttccctgtgggccaggcccaaatgctaggtgctagaagaacaagacgaggaacgaaacacaggcctgccatcaaagagctctgtatctgataactatcaaccaatgtcatgatcattatagggaagcactgcccagggggctaagaggcataatgag

SEQ ID NO: 539646 - DNA, 534 bp, Homo sapiens
cccccgtgtattgctgcttttgcagccctgtgcttcttgtttcagtgattgatgaaggtgggaagaagatcaaaacacctgtacatctagtttttttttctttcttatttttttccataagttattggggtacaggtggtatttggttacatgagtaagttgtttagtggtgatttgtgaaattttggtacaccatcacctgagcattatatactgtaccctatttgtagtcttttatccctcaccgcttcccacccttctccacaagtccccaaagtccactgtagcattcttatgcctttttgtcctcatagctkagctcccacatatcagtgagaacatacaatgtttgagtttccattcctgagttacttcgctgagaataatagtctctaatctcatccaggtcactgcaaatgctgttaattcattcctttttatggctgagtagtattcagttgtataaatataccacagtttttttatgcactcattgattcatggacatttgtgttggttccatatttttgcagt

SEQ ID NO: 539647 - DNA, 627 bp, Homo sapiens
ctgtccgacattatttatgtacgggagatgatcccaatatcctaaggtaatcctctycattgcctgaaattcttaaaattgccataagacatagagatgaaaacatgggtattggaatcaggaggcctgggtttaaatcttgactttgtcactcacaacgcaactttaacctccatgagctccagtttctgcatttgcaatatggtgataataaagtttccctcatgggaatggctactcaccaaattcaacaaatatctattgtaggttgattgcctgcaaaggacacagaaatagagttgattcaatttctcaactgaaggaactcactgcctagcagagaaagcaaagacagaagacgcatgtaaaggaaatagcacgaagaaatggctaacttactttttggtgggactaaaggcttcctggaggaagtgagagctaagttgggctttgaaggatgggaagagttacatggtggaaaaggagagaatcaagtgatacttttcaaatttaatctgcatctaaatcactgaaattgcagattctgactcagcacctgaggtggggcatgtgattctgcatttctaacaagctccagttaacgctgatagtgttggtctctggatc

SEQ ID NO: 539648 - DNA, 598 bp, Homo sapiens
ctgtccgacattatttatgtacgggagatgatcccaatatcctaaggtaatcctctccattgcctgaaattcttaaaattgccataagacatagagatgaaaacatgggtattggaatcaggaggcctgggtttmaatcttgactttgtcactcacaacgcaactttaacctccatgagctccagtttctgcatttgcaatatggtgataataaagtttccctcatgggaatggctactcaccaaattcaacaaatatctattgtaggttgattgcctgcaaaggacacagaaatagagttgattcaatttctcaactgaaggaactcactgcctagcagagaaagcaaagacagaagacgcatgtaaaggaaatagcacgaagaaatggctaacttactttttggtgggactaaaggcttcctggaggaagtgagagctaagttgggctttgaaggatgggaagagttacatggtggaaaaggagagaatcaagtgatacttttcaaatttaatctgcatctaaatcactgaaattgcagattctgactcagcacctgaggtggggcatgtgattctgcatttctaacaagctccag

SEQ ID NO: 539649 - DNA, 627 bp, Homo sapiens
ctgtccgacattatttatgtacgggagatgatcccaatatcctaaggtaatcctctccattgcctgaaattcttaaaattgccataagacatagagatgaaaacatgggtattggaatcaggaggcctgggtttaaatcttgactttgtcactcacaacgcaactttaacctccatgagctccagtttctgcatttgcaatatggtgataataaagtttccctcatgggaatggctactcaccaaattcaacaaatatctattgtargttgattgcctgcaaaggacacagaaatagagttgattcaatttctcaactgaaggaactcactgcctagcagagaaagcaaagacagaagacgcatgtaaaggaaatagcacgaagaaatggctaacttactttttggtgggactaaaggcttcctggaggaagtgagagctaagttgggctttgaaggatgggaagagttacatggtggaaaaggagagaatcaagtgatacttttcaaatttaatctgcatctaaatcactgaaattgcagattctgactcagcacctgaggtggggcatgtgattctgcatttctaacaagctccagttaacgctgatagtgttggtctctggatc

SEQ ID NO: 539650 - DNA, 572 bp, Homo sapiens
ttatggttaaattctgtaccattcctaatgagttatatgaattccaagttctttatgtataggtgcaaataacttacctgttttttttttttttttttttttgkgcctacatttaattttggtaattaaatattttgacttatggaagcttcagattttccttgaaattatatcttctaagtttttattcttattttaattttgtattttctttaactgcttttagattggaatgtccttattcacaaagggaccacagacatttatctccctctactttcaggttttgttttgttttgatctcacatagccatctgaaatttattttaatgttatttctttaggaaatatctaatttgattctttcctgaatttttagccataatattttctttgttatggtcttaaagtttatatttggtagaactgatcttgagttttctttttgtgtggtttttttttttttggcatttagtctgcacttttgcctccagataaattttattagcacattgtcaaatttttgaaaaatctcactgagatttggattgagatgacattagacctctaaa

SEQ ID NO: 539651 - DNA, 572 bp, Homo sapiens
ttatggttaaattctgtaccattcctaatgagttatatgaattccaagttctttatgtataggtgcaaataacttacctgttttttttttttttttttttttgtgcctacatttaattttggtaattaaatattttgacttatggaagcttcagattttccttgaaattatatcttctaagtttttattcttattttaattttgtattttctttaactgcttttagattggaatgtccttattcacaaagggaccacagacatttatctccctctactttcaggttttgttttgttttgatctcacatagccatctgaaatttattttaatgttatttctttaggaaatatctaatttgattctttcctgaatttttagccataatattttstttgttatggtcttaaagtttatatttggtagaactgatcttgagttttctttttgtgtggtttttttttttttggcatttagtctgcacttttgcctccagataaattttattagcacattgtcaaatttttgaaaaatctcactgagatttggattgagatgacattagacctctaaa

SEQ ID NO: 539652 - DNA, 581 bp, Homo sapiens
gattatcctcgtggcaattcctctacacacatgcaaaaacagacacatacactcttgatagacagatagaggaagaaagattgagatagataacatttttataaaattgcaatcactctgtgatggttaatattgagtgtcaacttgattgaatttaaggatgcaaagtaggccgggcgcagtggctcatgcctgtaatcccagcactttaggaggccgagaccggcagatcacaaggtcaggagatcaaratcatcctggctaacatggtgaaaccccatctctactaaaaatacaaaaaaattagccgggcctggtggcgggtgcctgtagtcccagctacttgggaggctgaggcaggagaatggcatgaacccgggaggtggagtttgcagtgagccgagatcgtgccactgcactccagcctgggtgacacagcgagactccgtgtaaaaaaagaaaaggatgcaaagtattgttcctggatatgtctgtgagggtgttgccaaaggagattaacatttgagtcagtggattgggagaggcagacccaccctcaacctggaaatctgggtgggcac

SEQ ID NO: 539653 - DNA, 513 bp, Homo sapiens
tgtattatatacatgaagatgggacacaagagaatcatttagagattgagggttccccagtgaaggcgggagacaagaatctccctaccccaactacatattctttttatttctttttttgtttatttctttttaaaacatattatcaatattttgatagacaaactataattctatacatttatatgatacagtgtgatgtttttggtaaacgtatacaatgtagcatgattaaatcaaactaattaacatttctatcaccatacttacgtatcatttcttatggtgagacattcgaaatartctctgttattttgaaatatataatacatagctattgactataatcactctactgcacaatagatctcaaaagctattccttctgtctatctgaaactttgtaccctttggacaacaacttttcctccctctctacagcctctctccccagcctctggtaaccattattctcctctctacttctataaattcaactttatcagattccac

SEQ ID NO: 539654 - DNA, 525 bp, Homo sapiens
ttggttggctctcccgtcagagccataaatcacacggttgccactgaggaaaagaggaggcgagacgagaaacttggcccatcctggttctaatttatcccaagtacgtggggggtgggggaattgttgtaaatgacagggattttcattgcacaactgcttaggttttcatgatgaaatgtttctatcatggcactgaggtgtgtttccttagaactaggttctgcctcatatgactaagatgtcaattctaggcccaaattcatcatcatcatcactcagaggtactttatatggtcaaacattgtgctaagctcttgactttcattagatccgcaagtgaagtaggtgccatttattatctccattttttggaggaggaaactaggcttagctggaaactcagcagagctgggatgtaaacctaggcaggcgagcttaagcactggatagagtgygagagaactttctagcccaaggcacaggcagcttctcttcacaaggttcgtagaaggggctaggcga

SEQ ID NO: 539655 - DNA, 618 bp, Homo sapiens
caacatattcttctgatgtccaaatcaaagtgctccagaaatatgtagaatatttattgttataaaaaatccatagtagatttgaattgataagatctcctataggcctttgtgattttttaaaaaatatatgctaccttatgaatcttgtctaagttattaaaacctccaaacatcccttgtcaaatcaggaactaggagggtatattagtcattctcatgctgctaataaggacatacctgagactggrtaatttataaaggaaagaggtttagtgaactcacatttccagatggctgggggggcctcacaatcatgatggaaggcaaaggaggaggaaaggcacatcttacatggtggcaggcaagagagcttgtgtagaggagctcccctttataaaaccatcagaccttgtgagacttattcactatgaagagaaaagcatgggaaagacccacccctaatgtcatgattcaattatctcccgcctggtccctcccatgacatgtgggaattatggaagctacaactcaagatgagatttgggtagggacacagccaaaccataacagagggtgagttttttcctgaaacatagagcagataatgctgatttt

SEQ ID NO: 539656 - DNA, 490 bp, Homo sapiens
ggcacatgggagacatctggcaaaggtttcataaggacatgaataccgaacttggaatcgcacgaagcaatgtttgagtccaggctctgctatgaagtttgcagacaaattctctgtgctttggacctcagtttgtaatctgaaaaatgttgcttgcaatgtctgccttataatgttgccgtgataattgaaataccgaagagaacataaggtacaattcctattacgtccgcatccccttcaagattcaggtgtcctgtaaaagccttcaccacgcccttggccytccctcactaacctgtgagcccttctctttcttagcctgttttcagcttcttttgttaagagtccagctcctccacctggctgtgaaggcactgagacctggaattttccttctgtctcttctaataaatgcaggtgcagcttcctttaatgggctgtcagtggacagtaagaatctggactgtacaattaaatgaaataaatg

SEQ ID NO: 539657 - DNA, 626 bp, Homo sapiens
cctgcctcgtcatcctcgctttatagaatgtttaatttctataaagtgtatgggagttcttggtgaaggctgrgtgaatagatctgtcctgaatgtaggagaatctttaggaaattataggagttttccaaagacagagttggagattacataattgcaacctgcatctcttatgctatgctgcatttacttcagtcaaccatgatctaatcaatcaaccggctcaccaatcaattagataacagagatttattgagtttctgctgtgtgctcagccatgtgtttaggtccctgaggaacacagaataaggaaaaagcatgggatgtgcttcgaaccatttacaatccagttcaggagaaacagtgagctttcgtgtctctacagtaaaccccaccaggcagttgctaactgactgctgcattgtgtgtgtgtatggagagagatgggggacaggcacacctgccatggagaggtagtgtggtgacgtgaagccagcctgggtttcagaatgggaggaaccaagtttgagtcccagttccccctcttatagttgtagggctttgaatcccgaatcactagcagaaaacatttattgaggactttctgtgcacatcacccagctgca

SEQ ID NO: 539658 - DNA, 638 bp, Homo sapiens
cctctctggctcctgatagtcaaatccccagagcagatgtggaccacgtatagagacccagggaacacccatggcaggaatcatcccagcaccatagtgatggtgctcactgcccatctttcttcatgtttcccaccccaaatatgctaggaatcaccgcatttggctccagaaaactggcccacccagtgccatctagactgcatggttcaccatcctctccagtgctgtgaccccctacctgtctgaggatcagatgctaatctttcttagagcttcacagcttagataaagtcctgggagtttccctaaggcagggggcattttgttcctacctatctccctggtgcctaacattttagtaggagggataatgcctttagtggagatccattatttatacttcagtgggaatttcagagctttccttttactttatgaacaaagagtggtaaactgcccagctaggagaactgagctcaaaaaaccatagccttattccagactctgcctcacccacattatgawtgatcttggcctctctgagcctcagttgtttcacatataaaaagcttccctgagattggggaaaggggaaagtggaaagtggagcaacatcatggaagtaaatatattga

SEQ ID NO: 539659 - DNA, 504 bp, Homo sapiens
gggcttattatttcttgcagtgtggctcttgccaccagcgacaagatgaatttttcaacaagagccttgctgatgcttttctctgttcaagcccagacaagaaaaataatcatctgttagaacaaaacacagaaaataaaaactatcttcacttacagatctttttcgttaacatacaaatgctttagaggggaaataaacttttgataaaattagatgaggcaactcaagaagagagcaatcaaaggaaaatggaaggagccaatcattcagcrggggtcagagattcagagccaatgatgatagaattgctggaaagtcaaagaaggaaggtggagactgccagcctgagtcactggattatatattgtggggctctatgagggctttggggacagtagttttcatttcctatgttctgctggaaaagcaaaaacatatgggaaataaaagggttagcttccattggagtggccattgatgttgccctgagaaatgtggttc

SEQ ID NO: 539660 - DNA, 559 bp, Homo sapiens
tggttcccgaaacctggctcagatgccccttctgagctctggaagcattttctacctcccctatctcagcagataccacattaaattgtattttcttattttctggttacaccgttccccctcgaccataaattctacttaggcaaaagctttcttttaattgtttttttgttgttgtttatttacttgtttagatcctgctgcctattcatgtacctggcacacaactgttgttcaacaaatacttgcagaatcacaggattaatagcagatgcactgcagtcctcctggctcctgcacttgccacaggagaatggcagtactttggaggttgcccatctcctgtgggctccagaaacctcaggtgagggagctggctcyatagagagttcatgcttacctgggtaagctttgtcccaggacctccagacgcatgtatggagaggggagggtatgtaagtggcaggagtgtcctctaggtgagccctgctttgcagagtttcttagtgtggctgcacccacgcatccaaattcctttggtgtataattgaaacgcaca

SEQ ID NO: 539661 - DNA, 559 bp, Homo sapiens
tggttcccgaaacctggctcagatgccccttctgagctctggaagcattttctacctcccctatctcagcagataccacattaaattgtattttcttattttctggttacaccgttccccctcgaccataaattctacttaggcaaaagctttcttttaattgtttttttgttgttgtttatttacttgtttagatcctgctgcctattcatgtacctggcacacaactgttgttcaacaaatacttgcagaatcacaggattaatagcagatgcactgcagtcctcctggctcctgcacttgccacaggagaatggcagtactttggaggttgcccatctcctgtgggctccagaaacctcaggtgagggagctggctccatagagagttcatgcttacctgggtaagctttgtcccaggacctccagacgcatgtatggagaggggrgggtatgtaagtggcaggagtgtcctctaggtgagccctgctttgcagagtttcttagtgtggctgcacccacgcatccaaattcctttggtgtataattgaaacgcaca

SEQ ID NO: 539662 - DNA, 624 bp, Homo sapiens
agtgactttgggcaatcttaatatctctaagtaccattcacacacacacacacacacacacacgcacgcacgcacacacatctttatagatctcactctatatacagatagaaatatctatgtagacttctatatagagacagaaaaattaagatgcttgttgcacrgtcctcagtattgtgcctaatgcacaatatgtcctaaatacatggtagctttgtccatggtaagaactacaataataacaagcattcactgagtgctcctgccatgctttacctgtattaaccactaaccgtgttaactcatctaacccttacaactagcgtatgaattaagttctattattagctccatcttatagatggggaaacagaagcagagtagtgtccattctacaggtcatacagctatatacagctagagtgtccgagcagacactccagctcacacaatcaagagtccctgctcttgactgttaggtcaagaagatgatgaggagaagaaggatgacaatgttgatgatgccatcctttggcttcctcagcttttctgtggagccctttgctcacaagaaaatctaactgtgctatgtcctttcctttctctctggcctccgtggct

SEQ ID NO: 539663 - DNA, 621 bp, Homo sapiens
gtgtgcatcagcatggctgcatgatacctattatttctacatgggctggcctctaaagaagaaaaaagctctgcagtggctgggccctcacattcctgcagaagccacatgtccttgcacatctgagcactagagaccatgagtaggggacaaacctacccatgttctggaacactgactactgtctaagccacaaaggagagtaacatgttcttctgcattgtgttgaagaatttctgcttgagagtcagagagatgtgggcttgaagccctactgtggtatttcagtgactttgggcaatcttaatatctctaagtaccattcacacacacacacacacacacacacgcacgcacgcacacacatctttatagatctcactctatatacagatagaaatatctatgtagacttctatatagagacagaaaaattaagatgcttgttgcacggtcctcagtattgtgcctaatgcacaatatgtcctaaatacatggtagctttgtccatggtaagaactacaataataacaagcattcactgagtgctcctgccatgctttacctgtattaacyactaaccgtgttaactcatctaacccttacaactagcgtatgaat

SEQ ID NO: 539664 - DNA, 334 bp, Homo sapiens
tacaaggtcacaacaaaaattaatgtataggcattatcccatgtagtaatcagcactatttatagagccgaatttacataataaatacagtgaataaagtggggcattgtttaacgtataaagaacaagggctttggagtcaggyttggatgcattcaagtctatttctcccatatcctagtggtgtcacaccaggcagattcctttacctcatatcttcctttgaagatatgatgtctagttctcagagatgttatgaggcttgaatgagaaggcacgtgaagaactaagcactgtgcctggtgctgcatatacgttctctgaatattggctg

SEQ ID NO: 539665 - DNA, 334 bp, Homo sapiens
tacaaggtcacaacaaaaattaatgtataggcattatcccatgtagtaatcagcactatttatagagccgaatttacataataaatacagtgaataaagtggggcattgtttaacgtataaagaacaagggctttggagtcaggtttggatgcattcaagtcyatttctcccatatcctagtggtgtcacaccaggcagattcctttacctcatatcttcctttgaagatatgatgtctagttctcagagatgttatgaggcttgaatgagaaggcacgtgaagaactaagcactgtgcctggtgctgcatatacgttctctgaatattggctg

SEQ ID NO: 539666 - DNA, 545 bp, Homo sapiens
gttctgacaggctaaatactggcatttttgatatatctattttcctcatttaaaaatatattttgcggctgggcactgtggctcacgtctgtaatcccagcaatttgggaggctgaggygggtggatcgcttgagctcaggagtttgagaccagcctgggcaacatggcgaaaccccgtctccacaaaaaatacaaaaatttgccaggcatggtggtgcatgcctatagtcccagctacccaggaggctgaggcaggaggatcgcttgagcccagaagacggagactgaagtgagccgagatcacgccactgcactctaccctgggcaacagagcgagaccctgtctccaagaaaaaaaataaaataaaaatgtactttgcattgagagaatttaaggaaattcaatgtaaaaaagtaattcagaatttactatgggaaaaggcatttttctcaggagtttccatccagcttggaattcatctcataatgtgaatgaagtgtgaaaatacctctgattccctgaggttgcagaacactgcacaca

SEQ ID NO: 539667 - DNA, 205 bp, Homo sapiens
gtgaggacagttggacatttataagtctgattccctgtctacctcctccactgctttctgaaaagagaccaagtgtggttcattgtgttctccagggccaagtgagtgtgctgagttcacctaacatgtgttgacttttcccccawaccagtgacccagtggcatggaagttgaactgtgttctctttgcctgagaacatgtgga

SEQ ID NO: 539668 - DNA, 548 bp, Homo sapiens
agctttcaggaatggtacaaaacattaattagattcttatttgcttatcttctcctttgcccacatcatagtttttcttgtcttcttatactatctagttttacttaactcttgattttagtgaaaatatagtttatgacaaactaaatgaaatgtggaggaaaaatgagttctaggaaattttgcattcatcaggagtttctgcctcggagagtagacacctatgtctatcacaaagccattgataaccttttagagaagagtttttattccttctacaatataacatctatgacctatgggagctagataagatttccatcttgatttttgctcttttcttattttaaacatgattttacagtagtgggggtttatgtagcatatttcttctaagtaattcaatagattttcatatatttcacctctgctattgcctatgaagtaataacagatatatactatttccatgtctcagatggagaaatagagaaacaaygatgaaaagacttatctgtcattatgtgacaattaaggtttgaaccttg

SEQ ID NO: 539669 - DNA, 533 bp, Homo sapiens
acgtgtttgctttgagtcaggcccagagcaggtctcctgcctttacatgactgggtggataccccaatctgccagggccccaggttaatagttgactgcaaaactgggatttgactctggaacttggggccaggctctagggaagrgctggaaagaggtgaaacaaggagatcgctttggatccaggccaaccggaggagccctgtgaggcggggaagagtgggtttctgtggctgcctgggcatgaaggcatgaagcctaaccccatcctctgtggcctggaccagccctgtcaggttctccaacttcgtgcattgagactgggtgtgtccgtgcctacgggtttctgtgtgtgattggggttgtgctttttgcacacatctgcctctctgcccactgacctatttatagcaagaaccctgggcagagtgctgcttcccctaaggtagcccaagttgctggttcccactgccatgctttctgaaaggggctggcagcccagcagcccagagagccagaccatgccctgggga

SEQ ID NO: 539670 - DNA, 366 bp, Homo sapiens
tgaaataattgatacaacaaacctccatgacacatgtttacctgtgtaacgaacccacacatcctgcacatgtaccccgaacttaaaaaaaagtcaaacaaacaaaaagagccaaatggcactggttgaagggggctcccatagcagccctctggtcttctgtgaggacacttggctgtggaatacaatttgaagccccctgaccaggtgatcctggggcccaggccaaagagggggtccgtgaggctgcagagggagatgttccaaaaccagacataattcaccgtcttgcctgggcctggacacagggcattccaatgcaggggaagggaggractgtgcaaaagctcagggaaaggaagggga

SEQ ID NO: 539671 - DNA, 626 bp, Homo sapiens
ggagcggcagaaccgcctggctgtgagtgacccctagcccaggcccatggaggccccccatgctcccagctcctgctgggcccccaggcccctctctattcatcaacatgaatgaaatcagtcaagagacaatattggccgggtgcggtggctcacgcctgtaatcccagcactttgggaggccaaggcgggtagatcacttgaggttgggagttcgagaccatcctgaccaacggagaaaccctgtctctactaaaaatacaaaattagccaggcgtggtggcacatgccggtcatcctagctactcaggaggctgaggcaggagaatcgcttgaacccaggaggcraggttgcagtgagccgaggtcatgccattgcactctagcctgggcaacaagagtgaaactccaactcaaaaaaaaaaaaaaaggaaaaaaaagagacaatatcaatatcaacctaggaagtgctgggcattgtcttggctctgataatacatcagcaaacaagacagaaatgcctgcgtccttatgaacgtgttattttataagactctccagccctcatcccttccccagtgcagacttcgtgggaaccgaaggccccgtagctctcttcctgtgca

SEQ ID NO: 539672 - DNA, 583 bp, Homo sapiens
gcccatggaggccccccatgctcccagctcctgctgggcccccaggcccctctctattcatcaacatgaatgaaatcagtcaagagacaatattggccgggtgcggtggctcacgcctgtaatcccagcactttgggaggccaaggcgggtagatcacttgaggttgggagttcgagaccatcctgaccaacggagaaaccctgtctctactaaaaatacaaaattagccaggcgtggtggcacatgccggtcatcctagctactcaggaggctgaggcaggagaatcgcttgaacccaggaggcaaggttgcagtgagccgaggtcatgccattgcactctagcctgggcaacaagagtgaaactccaactcaaaaaaaaaaaaaaaggaaaaaaaagagacaatatcaatatcaacctaggaagtgctgggcattgtcttggctctgataatacatcagcaaacaagacagaaatgcctgcgtccttatgaacgtgttattttataagactctccagmcctcatcccttccccagtgcagacttcgtgggaaccgaaggccccgtagctctcttcctgtgc

SEQ ID NO: 539673 - DNA, 474 bp, Homo sapiens
ctggaagagccttgtgcctagagtcagagctctagttggagacccagctctgccacatacagttgtgtgaccttttgcaacctctgagcctcggtttcctcaactggcrctcatattgcctgccttgatgctttgagaagctcaaatgagctaccatggaaagtgtctatgtgccacacagatgtgaggttgtttgttcctggaaactcactctcgatccctaacttttgtgccccattcctcctaggtcctccattctcgagggaggagggatatgtgaaattgattttctctaggtagtgaaggaatcaaaacattttcttagatttccagcttagtccctagctcaggactaggccaccccctgcctctgcccccatggtgaccacaccagccaagactttggcatcaaagtcttcatgctaccgaacagcccctgctgtaaccctcagacccacgtcctagtaaacccgg

SEQ ID NO: 539674 - DNA, 507 bp, Homo sapiens
gttgtcccctcccctttggagaagtgactgggaccacttagaaccctggtgaaggctgcagcatgacgatgactgcagcaatgacccaccatgaccatctatgcattgggatttcatcctacggacaccacatcctacaagtgatttcacctaagctctaggagcttcatgtgtggatatgacttctgggtcccattrctctgtccagaccagggggctggacaatggtcccctctcccactgggtgccaccaatgcaacttctctgggagaaggggcaaagttgaaagctcaacatctaaaactttggaagtgccaccaagttctgtcctctcctctcccaaaccctctcagtgcacatccacttccctggaaagagcactgtgggcattctcctccaaagctgctgtgaggggttcctttgcctcccttgtacctctctcctgatatccttaccttcagcctcctttgcttcctcttcttcttcatcttctaaatgaaacacgag

SEQ ID NO: 539675 - DNA, 638 bp, Homo sapiens
ctccctccatggatgtatttacaatgtagagatgctgttaatactgtcggctgctgctacttgagaaagctcaccacacactttccatggggattgggaatggagttgagcagccccatttagtttcaccaagagtagtgggaccttgtgtacttgttttaaagtctcactccctgaaagggccagaactggattctgagtgacatctacccagtgcaatttctccattgaatagaaagaaatgtgcaaaacattctaattatgcttttacaacaagctttttaagaaaaattacattgcaaagacccaatcagtgcaaaacttgccctgaagttccttacagtttaaaatcaccatatcccctctgccccttcagcttccttctgcaatttagggtgctcgtgacgcagaagggttaggggctgcaggaggtccacrtgctttggctctgatcacagactgcagctgtagcttcatctctgtctctgctctacttaaggacagctgccctcagaatgccaggctggaacatctaaattctactaaaatgatcactcactcagaatcaacagctaggaagaggccacagagcagagcccttgttaatttggaacatgccaaactgcaaagatggtcca

SEQ ID NO: 539676 - DNA, 506 bp, Homo sapiens
gccctggcctagatttttaaccccacgccagctttcaggaggcaggtgagagagaatctggctcccctttagcttgcagagacagagagagtgagtgagaattgatgccttcaggraatggccaagctccatccagtatttaccaatgccaccaggtgacaagtgcttgtgcatactcccaactttaacaaaaaatgaattagaggatgctggaatctcaatcagcagccaaggctgtatggttaattaggatttgtattatttttatattagtgcataacatacttctacaaagttggtggtttaacacactcacttatggcaaggcacagtggctcacatctgtaatcccagcattttgggaggctgaggctggaagataacttgagctcaggagttcaagatcagtctggttaacatggtgaaaccccatttctattaaaaatacaaaaattagccgggcatggtggcacatgcctatagtcccagctactccgaggctgaga

SEQ ID NO: 539677 - DNA, 506 bp, Homo sapiens
gccctggcctagatttttaaccccacgccagctttcaggaggcaggtgagagagaatctggctcccctttagcttgcagagacagagagagtgagtgagaattgatgccttcaggaaatggccaagcyccatccagtatttaccaatgccaccaggtgacaagtgcttgtgcatactcccaactttaacaaaaaatgaattagaggatgctggaatctcaatcagcagccaaggctgtatggttaattaggatttgtattatttttatattagtgcataacatacttctacaaagttggtggtttaacacactcacttatggcaaggcacagtggctcacatctgtaatcccagcattttgggaggctgaggctggaagataacttgagctcaggagttcaagatcagtctggttaacatggtgaaaccccatttctattaaaaatacaaaaattagccgggcatggtggcacatgcctatagtcccagctactccgaggctgaga

SEQ ID NO: 539678 - DNA, 506 bp, Homo sapiens
gccctggcctagatttttaaccccacgccagctttcaggaggcaggtgagagagaatctggctcccctttagcttgcagagacagagagagtgagtgagaattgatgccttcaggaaatggccaagctccatccagtatttaccaatgccaccaggtgacaagtgcttgtgcatactcccaactttaacaaaaaatgaattagaggatgctggaatctcaatcagcagccaaggctgtatggttaattaggatttgtattatttttatattagtgcataacatacttctacaaagttggtggtttaacacactcacttatggcaaggcacagtggctcacatctgtaatcccagcaytttgggaggctgaggctggaagataacttgagctcaggagttcaagatcagtctggttaacatggtgaaaccccatttctattaaaaatacaaaaattagccgggcatggtggcacatgcctatagtcccagctactccgaggctgaga

SEQ ID NO: 539679 - DNA, 534 bp, Homo sapiens
tatgcttcctggtagccccgtccactgaggcaggcaacagcgggcttcctcgtcgattatttgttaagggtgattcaatgctgaatgaaacatgacccttttattccacatgtgagggattacatcctcacacacttacatgatcactctctggactcacagaaacaaatatatgtactattactaagttctagattttttcatgaacactgaattgtttgctgacagtgtctatgtgagctttggctttgacagggccatgtatctgsggtggcagatgggaagcattgcaagatgcaaagatctgtaacccacatagacctgtgctgtcctgctcctgttttcaggacagtcccactgagcacccaagcacccaatccagggccctctaagatgggcttttcctgagagggcagcagatgcacagaacagagcaaagcacccagaaattctctctttagacttctgtcctaaagcccatttctttaccctttccctcacccaaatggcccagagtcttctcccgcagcccac

SEQ ID NO: 539680 - DNA, 559 bp, Homo sapiens
gctgcaaagggtgaaaatgtttctctcttctgtattcctctctgctgtttacagttgatgttctctaaatccacctggaatttatttttgagactatagtaagagtctcaatggataattatttattccaaaacctcttcttactattttgatacacctcgtgatcaaacaaaattgcatacacacatatataaatggttctgtttatgaactcttctctatttcatttatctatctatccttgctgaatcaataccacgctgttttaatgtctggctttgtagtatgtgctcatataacaaactccgttcctttatctttctcagaattttcttggctattcatatacagttgcttttctacatctgcattgttatttaaatattccattgtatggatatacaataatttattgaccactrgaatttacaacctttttattgctatgaacttctttgtatctaaaactttgttcatatccatatttatttccccggagtaatttctggaagtggaactgctgggtcaaagaatataaacatatttaaggttttgggta

SEQ ID NO: 539681 - DNA, 567 bp, Homo sapiens
  misc_feature (1)...(567): n = A,T,C or G
cctgaaccgagtgacttatgcatcctgaataccatttgcaccttgtgtccacagatggctctaccacatacaaagggcacatccctgggctgatctcattgtcctgggagcctcgtttctttatttctggaaagcaggcagtgactgtaagtagcttcattgggtttgggtgaagattaagtgagaacaaaatatgactgtgctttggaagctcacatgtgcatttgacataaagggttgtttttccaactgtggggaggtgtgcaaaaatgtgcatttttaaaatgattattagcaaatttgtttctgggtagagcaacagtgagaaattggggaagagagaggagagaaatgtcaagatagcmaggagggagggccagtgctacagataacttggncctagagcaccctggggtgtggccatcagaaaggggtaagacaaagagattccagagagaagctatctctatctagacaggaggctgggtggccccctgtgccccaggcaatgatatctgagcgacccctaatatgattagcttcttaaaagcccttttaaaaatgtgt

SEQ ID NO: 539682 - DNA, 529 bp, Homo sapiens
gtcactgcctccctcctacaggctccctgggtttctgaagccaccttagtcttaacacaaggggggtttcaggcaggtgtctgcacacagccaggcctggggcactcctgagtgtcaagggaaacaggtttgaagtccccatgccattgctgctttcagctcggccccctgaacaggtccttaaatgggagtttgttttctgtaatcaccaccccctggaatctgggcaatcatggtttctgtgggaaccagtctgtctgcaggcccaggaaccatggaagatgaaagcaaagataagttggtctctttacccaggggccagccctcagtgagtgttgaagaagggaagggagttgggggaggcagaggggggcttagggaaggaagaggagaggactgcgcagaggtccagagagggaatacgttttccaggagcagccctgtggtaggaggcrgagggtgcacatatgtgtctgtgtccatcctcattgttggacaagcctttgcctccaggagcccagcaggagca

SEQ ID NO: 539683 - DNA, 571 bp, Homo sapiens
gcagtgtggacccaaactcttctgaggctcagcttctctgactgcatcttttttttttttttttttttttttttgagacggagtctcactctgttgcccaggatggaatgcaatggcgtggtctgggctcactgcaacctccgcctcctgggctcaagggattctccggcctcagcctcccgagtagctgggaccacaggagtgtgccaccacacccagctaatttttgtatttttagtagagacaaggtttcactatgttggccaggctggtttcgaactcctgaccttgtgatctgcccaccttggcctcccaaaatgctgggattacaggcatgagccaccatgcccggcctctctctgcatcctttgatgcttccctttgccctcccaacctcaccaaatgagagagaggcctaagggaattgggagagctgctgcattctgcctaacgagagaaactcctgggaaagcagcrttctgaatgtggggcttgtacagagtcagggccaagggaagtgggcatagcctgcagggctggtctgcttctctctgtaggatgcagggccagc

SEQ ID NO: 539684 - DNA, 418 bp, Homo sapiens
gtgtcatatccactgaagagcatgttgagacattcttcatctatgttactgtattttttgtcttttctgtttctatttgattgtaggatttctgcttctcttcagaaattacccatctgctaccgcatgttgaacctttcacattagaacytctcaggtattaatcacagtcatttcccatctcctgtctgacagttccaaccttggcgtcatgtcggattctggttcggatgcctgccttgtctcctagactgagctctgagctcttcttgtgtttcacatgcctcctgtttttgttattgttgctttgttggaagttgaacatcttatggagggtggtgtgtacggaagtaatttttttacactgaacatgagcatgcctttccttctgctagaccttcagcatggcgggttgtgt

SEQ ID NO: 539685 - DNA, 418 bp, Homo sapiens
gtgtcatatccactgaagagcatgttgagacattcttcatctatgttactgtattttttgtcttttctgtttctatttgattgtaggatttctgcttctcttcagaaattacccatctgctaccgcatgttgaacctttcacattagaacttctcaggtattaatcacagtcatttcccatctcctgtctgacagttccaaccttggcgycatgtcggattctggttcggatgcctgccttgtctcctagactgagctctgagctcttcttgtgtttcacatgcctcctgtttttgttattgttgctttgttggaagttgaacatcttatggagggtggtgtgtacggaagtaatttttttacactgaacatgagcatgcctttccttctgctagaccttcagcatggcgggttgtgt

SEQ ID NO: 539686 - DNA, 409 bp, Homo sapiens
gaggacccaagatgtaagattttcagtatctggacgtagcacgtggactccagaagatgccccactccgagcgcttctgtggctaggaggcgtgtaggcttayctgcttcagcactgggtggggacctgtgtgtgtgtgtacacgtgtgtgtgtgcgtgcacatgtgcatgtgcatgtttctgtctctttctgtctctctctacctctttctctgtctctcaccatcccaggacaggtgggaagtcggggacgggaggatgcacctgtggaatgggccctgcatgccttccctctgggcatcgaggcagagcaaagggagtgggaagaaatcagagagaaagaagaccaggagcagcctcagagccagagctcaggatgagcgcttcctgccaaaccctgggcgagggc

SEQ ID NO: 539687 - DNA, 538 bp, Homo sapiens
gaaaagggtgtagcacctgggaaaggcgatcaactcccagtcagggagcccacggtgataacaccagtcagacgatcacaccatggaagggtccaatgagatccaatggaaagacttagaacatctaaggttgggggaggtgcaaccttctgctattcagcccctctgctccaagcggaascttttttctcaggaggtaatctctaataacaagcagagtgccctctggagcctcctcgctggtatctcagtgcctggacagagggggacacaccacagcacaaacacgtggcacagactcaatcccaacacacagccagtcaacgagcctctggccccttcctctgggtcctgatacagagctggcagcgagggcctctgaagaggttacagggagcccaagggagtgtcaggtagaggcagcaccaggtcccggagggacagatgagggatccctagtaaacagctcgtggacgcacttgactagcagttcgaaagcaaaaagagattcggattacaagagacttttcccttgcaa

SEQ ID NO: 539688 - DNA, 600 bp, Homo sapiens
gctggtgctgcaacttgaacccaaacacagtcgggaggcagaattccctcttcctcagggtacctcagtctttttgctatatgaccttcaactgactgggcgaggccccccacrtgataaagcatgattgactttactctgagtatactgatttaaatgctcatatcatctaaaaatgccatcacagtgacagctaggctggtgtttgaccaaatatctgctatggcctacccaaggtgacacataaaatattccatcacaggccctctcttttagaatccagcgaccatgctatgagccgcctaaccaggcaaaaaggtgaggaggaggaactgtggtcagcactccaacaggacccagcctcccagctgtcaagcccaggcattgagtgacagcacctgcagaaggccctgctcagccccagccctcagcatcacgcctgaccactcaagtctttccagctgaggccttagagactgaggaggggaggccaccccctttcatcctgttcagactcatgacccactgaattcacaagcacaatgaaatgggggtgggtttatggcactacatgttgggatggttcaatacacagtaata

SEQ ID NO: 539689 - DNA, 577 bp, Homo sapiens
atgttgaggcagatggcctctctttaaggaagattcatgagggctctgaggaagaacttcccttctggtcactcattgaatgctgccgagaatgcaggggtggctgggaggccccctgcaggtgagggcatgagaggccatttctccctgctccagagcctgggagaggcgatggtgccatcacracacacctcaggaggccatggtcagcacaggagcgctactacagggcccacggtaaggttatgcagacatattttcacaaggaggttccaggtattgcatgaccttagccctccacaagaggtgggagttgaacatggggagaaatgaccctcctttaagcaaggggaggagaaaagccagcatgagggaagagccccaagttgccaagtcggacgctaatggagagatccacctggaaagaggctgggaagagacagaaagttctggaatgtcagattgaaggacctattattatttctctgtacactttggggagcaattaaaaatgtttgaatgagaagctcttatttttttacatgatggtcgtcgggtgcagccacagaaggagaca

SEQ ID NO: 539690 - DNA, 459 bp, Homo sapiens
tcattggtaacttagccttcagccctgtttccttcctcagaggctgatggggtggggctataagttcccgccttctaatcctgcttggtctttctgatgactagcctccatcctgaagctacccaagggttgccagccatcagtcaagtaaaccaaagattttaggagctgcatgccaggaagctgggacaaagaccaaatatatatttcacaatagcacagttggtatttcctgggacattccccgggactgtcggactaccagggctcayagggcaaatcagacccaaggccccaggggttcagatctgtgctcccagtccccacaccagttcccaggaaccaagtagtgaacccttcctgtgctcagtcaccacagtcaggcctggattccttctgcctccctttcctagccccacccctctctcctattccccttgcctctgggcagactggact

SEQ ID NO: 539691 - DNA, 330 bp, Homo sapiens
ggcaaatggtagacctgggatttgaatgctgcttcttttgaaacctccctcaggagaggggtaaggctacattagctggggtgaaggcagggagaagagttgggggagattaaagaccaagggagtcccatgggcaggagatgacatgggcatgggctagggcatcagtgaagtggggaagggagctagagagacrcattctgtttgcttgtgagccttctgcaaaggctaacttgagccaggcagagctggacattgaggatgcagagatgaacaattgtaatgaatgagctcacagtccaatgggcgagggatctgggagctgacaac

SEQ ID NO: 539692 - DNA, 570 bp, Homo sapiens
cttgggcctgctctctcgcttcttccctgactgactgctttctctcctctggaagggtcatttcccaccacatgaacctcctgtgagattaaagctgaccagccaggaacggagaaaccaggctggagatttctctgtctgatttgagtgtaagcaaggggcagtggaaggtgtcatctggtagggaggaaggcagggccggccctggaggccacaggaggccaaaggaagtgtttgtctgcagccgagttctctattacacagcatcaggtaactgtcactagctctgggctcatgtaaccaagaatagggacattcttggcccagacacatgggaaaccatggctggatgagatgcctaccaccccttgctggtgcctgggaccaagtggaagctcaagatctcatgacattgtggagctgggggctctcgcattagcaaggacatgggcaggacaccccagacgagttagctacctggtgagaagtggcatcctgtggaaacgkggttcttttctttttttttttttttttcctgtaagtaccatcctcagcattccaagcctggtg

SEQ ID NO: 539693 - DNA, 452 bp, Homo sapiens
ctgtcaatcaggttctcaaatacatctgggcacctactggaaaggtaagggatgggttttcctcaaagtgaaaaaaaaaaaatccagaaaacaagatgcagctaggtgccaaatgatgtcatcccagaaggagtagtcagcctgccagactaacattgctcatgagggatccatggcaaaggagacagaggaaggtttccttggagaggactttattggataataatccgaatgactaacatttagcaagcgtttcctaggtgctagacattgtctaaggcgcttacatgactaactcacttaaccatsctatgtggtaggcttctaatttgctcaaggttacctagctagaaacttagcctgacttctaagattttgatttgaattggcccataaagaacaccaatgggtgtttatgtaggacttaaccatgtgcaagtctgagcctctta

SEQ ID NO: 539694 - DNA, 482 bp, Homo sapiens
ggggcatacctcaggcaggctgggggttagggagcccacccytccccactgggctcccacaccgcattgtcactggtcactaaacaagccacttgccagaccccagccacttacctgaaccaagcctgtccttttgctaggctttctaacctgaagtgctttattggggcctgtgggtccagcccagctagggaacaccccagtgccctgcagaaagtggtttgtgtgaatgatgcagaaaaccaagaaggttacaaggcagagcgtgattgattccctggggctttattgtaataactttaatcttctggaactcatctggtatgaatttaggagctgggcggcatttcactgaaattccccattaatgcagctctcactgctctgccggccttggtggttgtggagtttgccacatgtatgattttgccctgggctccttattaatgagccttgaaaagagggtgtggaatacgtgagcc

SEQ ID NO: 539695 - DNA, 531 bp, Homo sapiens
ccagaactactactttcctctttttccgggagagaagacttatgtaaatgrgtttgcaaggctctgctcttgttttgaaaaacacatctgcacatgtccgtgcttgccagaaacctcaaattgttcagccagtctcctgagcactgtagctttcccattttggaaaagcctttggaaaataggagtgaagattgagttgtgttttaaccagggtttctgtactccaaccagaggagtgccggctgaaagaatcattatggaaaggatggggctgaggcagaaactgagccagccattgggatgtcagggctggccctggagggctgtgcgagccctagggctgcagccgggctcctggctccctggcaaggttctggtaatcgtggcttgagaaaggaagtgaaagcttccctttttaagctatgttgtaaactccctcagcaaagttgtttataggaggtggtagaataaatattatttaaggtacagtgtggggagattaggactctaatctcacctgagggaagtgaa

SEQ ID NO: 539696 - DNA, 543 bp, Homo sapiens
gtgctcagtaagtgctagagacaaaaacgcactgcagcctccctgccagcctgatttctggagcatccctgactctcttaatggaaagagcttctcagagcttcccaagctgactagaggagggactgtcatggtcatgggccctgcttccctcttatagttctcttagctggaaggcaggatccttctcctctgagctgcttctgaggccacttatttgtttatttccaaacccaaaaatgcttcttaggttttgctgccacctgacttgaagctctgaccaccccagtgctacttctgctctgccccatccagacatcaagcgagattcattcccccagcctcagacaaaccacacccctatcacaaccgtaactattcttagcrgagcaggaaggggggcgctgccgaatgacctcgctgcctatagagacttcacctccacccacccttcactcacccggtgtcacttcccccttttaataacaacaacactgacaccaagtttcacttccaccacttcctgtgggttttgttcatcct

SEQ ID NO: 539697 - DNA, 682 bp, Homo sapiens
tgaggggtgctttgcacaagatcacacaactagcacgtggctgagcctggactagaaccaagatcttctgattcccagatgagtgctcctttgatgtcataaggctgacaggagtctagatctaaggtcaggtttgctacaaccttgggacaggcccggcctgagttcttctcatgtatgtacacacttgcatacacacacacatgcatgctttaatctggtacaattagatagccctttggaaacttcccacagatgaaggactccagctccagcttcctgctttctgcagctkctagatttccatgcttaagtagttaaatttaggcatggagaagttcatgttgatgggataaactgagatctcagggctggaggaaggacatggcacagggaggctggcccctgcaggcatctgggaaggtgacgctgcactctgaccctcttcagaatcttcctgaacccaggacatagtctcttccagtggcttttgacctgtaccctgaggtgccctggtactgagttcattccctcttaccagccaattcccggagcaggtggggctttctttgatgctgagcagaagggagggaagccagagccagtaaacccgcataatcaggcacaaacatggacaggcatgaactttcctatctgcaccaatcatgtgcttcattatggg

SEQ ID NO: 539698 - DNA, 578 bp, Homo sapiens
catgcagagactccttccagcccctctaacacccctttctcccttttttggaacctcatttattttaggccttgtcatctttagagttctgccccctaagcctatgatgatttatttcactattgtatctgcgagtacacaactgtacatccaagatgtgcctatgcgtacatcttaagttctgaaatagttttgattatctagatatgggattcatgtttatatatgattgatcgttttgctctttatggacctttatctctgaagagctcatagaactttatccattgttttattttaaacaaagaattttagagagaaaataacttgtccataaaatctccccctcagggagaggaaaaagggtatggaggcgagaggtgtgtgggaatgatactccaagttgaatccaggagagagaggtacctcctagttaaaggaggattcaggccctctctacatctacccctggccccctgcccagttccaagcccaggtttttatttttgtttttgttttttgcttagctcactaggragagatggatggtttggagcagaagggggatagccccatcg

SEQ ID NO: 539699 - DNA, 534 bp, Homo sapiens
ggggtggtgaaggctcatttaagaggcctggcctcactgctttggtagaaggctcagtgggtaagagaagctaaggatggactccaacaagcgcttttaaggaaggtctatggctttaaatcttcccgatcacctgttctgattttgtgaagacagttcaagctgaggtaaaggtgcgttccctatttctccaggcagatagagactcctaggaagaaagggaaatgtttggtgtttccgtgaaatttcatgaattcacaccccatgcttttggaatttatgagttctgattgaatagggaaaacagacacagacttcctctgtgaaggttctagaggtgcttactttgtaagtacagagaattcgaactaaaaaacagtggaatttttaagccaagaactcaaagtagtaagatgggcccgttggatggagtgcaayggtgcaatctcagcttgctgaaacctccgcttcccgcgttcaagtgattctcctgcctctgccttctgagtagttgggattacaggcatgcatcac

SEQ ID NO: 539700 - DNA, 527 bp, Homo sapiens
tttgagagcccaagtcattcctcataagcaatgttagccttgctgtcccagcccttgctggaaatgcccacgagggtcagaatgggcagacagactgggcgtggtggctcacacctgtaatcccagcacttagggaggcagaggcggaaggtagcttgagcccaggagttcaaaacctgcctggtcaatatctcaagaccccattctccacaaaaagggggaaaaaaaagaataggcagacagatgccaggtaggggtgaggagtggagttggtcaactccctccctcgccagtcatggttgggggtggggtgggcagcacacsgctggctccttgaccctggcctcccaccaggctcacccattctgtctttccgcctagcagggttgactttctttagatgcctctttaaggctccaggaacacagaactgcagttctgtccttcacagctaagtcagcttggtccacctcacaactgagtcccatacccaggccttttggggcagtctctctagccccaagatt

SEQ ID NO: 539701 - DNA, 656 bp, Homo sapiens
gccatggaaatctgaagattgtacaagtcagagctttttgtaaccttcggagacctgcttttactactttgcgtgttctcctttgccaaactacttctctgaagaggaaggacacagagtaaatctacggaagcagtgaagggaaatggtttccagaaacctttgcccaaatacgtcatactagtttttgtggtcgaatgagctataaaaacttcctcagccagagagcttttattgaccggcactcaatacccatcctcaggcccccacaaagcactttttatggaaattgcgtcaatatttgcacayccttaacgaggccgtgtctcaattcctggtacttcagcatctcctctgagtttctcacacactcttgggtagaaaggggattctgcaaatctagttaaaccaaatcttcagggactgattacacaggtcatggataatccaagccctctttccccctacttcttttcaccttctggcctttttactgctcattagcacctcggccagagacctgggcctgggaaggagtgagtgggtgtggaagtcccatcggcccctctggcttctggccagcaacccttgtgtagcttttgttaggaggagtaacctagagacgaggtaaattgatccctggcatatgtggggtt

SEQ ID NO: 539702 - DNA, 622 bp, Homo sapiens
tgttaatccattaatatcttcaactggactttgatggaaattttcacaccatggaagttggaaaatgctacaaattgaacttctctaccctctcctcacttccccaagggtagttgttcaacatttaccagcataccgctagagggaaccaataagtgtaaacaaataaaactggctactattgttttcttggcaaacagagcctctgggagccaagcagtagcaatggatgaacagcacttaaaaaatccttcaaggtgtgtctcttttctacacccgaaaggacatagtgctgatttgttcactcagagggaagaaccaatatcctttagactctcttgcgtcatcctctggcactgcaagttgaagccaaaccaaggaggtaaaaatccattcatcctcccctctctcatcaactcagtttaggatcttgtttctttgacaacatacctgacactgaaactacttccacttcccacttctccctgctactttgagtgcatccagtaaaacacttccatgcctttctgctctcttggcacactctattgctgtcacyccatatgagcacttgggatagtttccagacgaagcccctggctttagcacacagtcccctcct

SEQ ID NO: 539703 - DNA, 547 bp, Homo sapiens
ctgctgtcccatggccatgtttataaagaaccacctctcttgggcacaaataggcgtcccctgttggagggccagccccttctcacaacacccaatggaaggtggaatgtaagatgaggaatcaaagtgcctaatattagcagaaggaaaagaagggacgaggaaaagtaggctagaaattaatcccagggccagtttgtttttgctgaaatctgaaacaacttgtcattgggggtgggaggagaaagggtatacagaggatctcmgttaaaatttgctaatagagctctctattataaccaagtaactcaaatcttatctatacctttatctattaagttaaacatagaaaattactgtatttataggtcaaaaatggcaaaatgctagcaatttcatacagtttaacctcatatatttattgttagccattcaaatcataagtatacaagcaatagtaacaattatttcacagagtatctgtggtccaagttgtccatttttatctccaagttgatgacgtcaatgcactatttcccattttact

SEQ ID NO: 539704 - DNA, 636 bp, Homo sapiens
aacctcatatatttattgttagccattcaaatcataagtatacaagcaatagtaacaattatttcacagagtatctgtggtccaagttgtccatttttatctccaagttgatgacgtcaatgcactatttcccattttactgatggtaagactgaacaccatgaggtattagctttcagaatttgtaaatccagctaatgacagtgtacagagaatggtttcactctcttctgctaggcatagcttgctagttaacagaaattgtatctttgtccacctctggctccctgtcactcctgaagactcatgtagtgagcttagagccagtgaactgaccacttgtctttaattcaaccagcatgacatctcaagtgtctatctgactttcaatttctatattttcatttggtttccctaaagccattgggtatatttgtccagccaatctctttctactcttycctggcactcttaccagcccccaaaaattttgcaaacccttttgttatccctggcatgggtggcttatgccatttagcagatctatggaagtaatcagtgctggacactccagcaggcactactgcatctacaattcaaggtagctggccctgtgctggattctggcagatgatc

SEQ ID NO: 539705 - DNA, 423 bp, Homo sapiens
gactcctgcttttcatgcaggccatagctggttatcatattctttggcttgtagtcttttatccagtacttaacattttttctgccttatttgttcrccctcccttgtcatgagccttttccaccattgtcctcttggctgtgtggccttgccagagaaaattggcgatcattttgttatctgtggcttttgcccagggatggtgtcatcgaacagagagacgtctttttaatggctaacatattggagtctgaaatatctgcaagataatgaggcctagagggacttgagggacacgtttttgtttctttgagaagacaacgaaaaatggaattaggtaccatacagctccctccacatttaatccagagccagagggctgacagaactttggatttcagtgaagtaagagtatattcttct

SEQ ID NO: 539706 - DNA, 601 bp, Homo sapiens
cacagagttaggtgtctggcagaacattccaaccctcattcaagggctcaaacttggacaatggccatacatggtttccctttttaaaacttgtttttgttattgttaattgttaagccctgggtattctgtgagaaacaatccatctgtttctgcttctttcacacttaacttattgaaaccttttgtaagagcttttggatagtgaaccatccctcagaaccatttccataagccttttaagactgtttattctgaagtaggaagttgctattttgccaaaagaatacgaatcttgggcctgaggactctactgctggacattctgccaatctcataggctttcaacctggccaaagtgtctccccattctgaattggaagctgcagagtttcccccagttctgtgamcttattgatagaacagactcagttttctccatcctcatagcatctgtgagattgatcagcttcttggcaccttcaacttgcataaagtatggaagtaggtgagctcagcatgcattttcaaaatgttcatttccaaataagatttcttcaaacaaggtaactcataagaacacgtggatactcattcagag

SEQ ID NO: 539707 - DNA, 312 bp, Homo sapiens
ctctgtgggcctagggatcagggcttgagtggcaacacccgtccttgagatgatgaattaggcccacatggattaacggaagccctggcccaggatgagggaagaaggaccacctgaaggtgatgggaggyggtgttcctttctttctctagcaaacacatgttcaaagtccttttccatgtccctaaactcacctgtcaagcagaccgcaggataggaggcagatgggagactacaaagttttgtctggccatcaccatcctggccccacctgcttgatgtggctgacaggtgatcctgagatgtgctctc

SEQ ID NO: 539708 - DNA, 532 bp, Homo sapiens
ttggttttcaatcaggagagcacctgggtaggttctggaatggctcccactggtgatttataaaatgaagctgcttttattcaactgcttgagtcaccttttagaatttcttaatgtcctgattcctgctttgcactctcagaaaaggactcctgaagtcaagaactaaatccccaccacacgacatgcacaccctcttcgccatcctccacccttcctccacgccctgtggtgccttccaccatgcagggggatgatggacatggattggacaaacacgtccatctggagaaaggacttcactggaatctggaagtcagattgccaccctctgagactaaaaatgtcttcttacagtggcatcttgtttaactttaaaatggattattgatgcctcagaattctgaaatggtttgaattccaagtccagaaccagcgggcagcccagccagacaccggcaccccaggaggcccccayttggggaatcagacctccctgcctggtggacctgaatcctccacaaggtatctg

SEQ ID NO: 539709 - DNA, 515 bp, Homo sapiens
agctgccagcatttgctgagtgcctactgcacgctgcgtgctttctatgtgacatcactttcccaccacaccctttccagggaggtgctagcaaggctactgtaaagacgaagaaccctaagtgaagggagcataagtaacttgttctctgtcacgcagacactaagtggccaagccaggattgggagctggccctcctgtctgcccccagagcctgtgctcctgaccaggatggagagcctgcctcaggctggatgaggggcagcccccacacccagcctgctgacctccccactgaattcaggtctcctgacggacgctgctctcagtttccagctctaccctttccatggccctaaggctgacatcgccacctctgctttccactcagaaaggctggaggagctgggcactcgagggaccagaggggctacagtgagcagcagagccagcgagtctkgcctaagaccccatcttaccattccctggttggggaaactgaggttcttggagag

SEQ ID NO: 539710 - DNA, 590 bp, Homo sapiens
gctgctgcctcacctgaatgtgtaggaggtgttggagttgctaggcaaccaaagttgacccatggggaaaggccatggaatgggttctggayactgcctgcttggtatagctctgtgaccttgaaaagccaggtccacagccctgacattagccacagatgtctgcaggtctgttctgggagaagcacagggctgagcccctccccatgccctgcctgcaggaagtgcctggtccagtcagagaagaggttacctgaaccataaagcctcatcctcagtctggctgccaacatgaagagctacagggctcaggaggggcagttgggatggctgaggtctgtgtcacgtgggcagggaaagcttcccaaaaaagatcagctcccatctatgggatgcctactgcatgccaggcaaagttctatacactatctcattctttcccccaagaatccaaaagaaaggtatgattagacccagttagaggggaagaaagcagagttcacagaggtggtgatgtgcctaaggtcacatacctagtgggtaaaaagatgggattcaaacccaagcctgtctggctgttagggaagggc

SEQ ID NO: 539711 - DNA, 649 bp, Homo sapiens
gagatccagctgccccctcagcaaagcatcaagcttgatcacataacaatgaatgttggcaagcatggccactgaccaggcagcatcctaagccctttacatgtataaaatcacttcttcccagccacacaccaccacaatcctgtaaatgaggtactatctgtctcattttaagggaaccgaagcacagatcagttcaataacctgcccaagatcacacagtcagtaaggggcaggcccaggattcagactcaggtagcatgactctagaatgagggccctggatggtgacaacacaaagccggagctgacacttgcatttttgttgctacagtgcccagcaggcaccgtggagatgggggcagatgtctggaagcagagaaggtgccgagtggaaagcaggggatgaaggctactttcctcctgggcagccgccrgcgggaccaggcaggcttttctctctcgcccagggtgcggtgtagagcctccactggactccaccacggggaggaagaccgaggctacccagcctcctggctgctggccatggctctagcccacccttgcctgtgtgtcaagagagaatccaaaacaatgttccttttgctgtaaagggcatgattaggacaattggcaaaatagtctacat

SEQ ID NO: 539712 - DNA, 499 bp, Homo sapiens
taactgggcatcctctattttgtttggccacctgaggcccagtccactcaggtgtggacttcaacatgacaagtggagagaaagcgcagttgcagttcccttcactcaccacaggtgggcaaagaaggcctgaaaaggccaggagcctgcgctgctcgggagagaaaaccagaagcccatttactcagagctgcccttctctcccctgctgattccttgtgccctaggtcacctcctgccccttctccttctctctgtccttcttccaagccaccacacccaccattgcccacaaagctgccacagccaaatgggctcttctttgctgaccccagcatgcccaggtctgtgatccagataatgcaggtcaacccrggccaccttcatctgcgacctgaggggcagaagtgggaaggtggccaggtccccaggccaatgcacactccttccaatactggaagatacttccatggctcaccagagcctggccctgagaaac

SEQ ID NO: 539713 - DNA, 260 bp, Homo sapiens
gcattttgtgcctttttgcaatttagatctgtatgaaaactggggtagtttggccaagataagccaccatgttggagatgaaagatgattctgctagagtgccctttctaaaacacagctctgattatgtcacttcagagtaaagtctttgttgatctccacctcctgcaggatcaaaccttattcctggtatccaaggtcatttcccagttggcacagcctaccctccctcactcattagytgtaaaacctggagctgg

SEQ ID NO: 539714 - DNA, 591 bp, Homo sapiens
tacagctgttcactctccccacaaggggctgaaatgattgacccaggatcatatttggggtttgtggtaaagctgtactggcccccaggyttccaggcaagggctttttccaccatgccatgaggatttctatgtcatgatagaatgtctgactagatgacatgacagcaactgccctgaagtcaaaataatttgagatttaaacacacacacacacacacacacacacacaccattttcaagaacatagagatatagactagaaagaccctgggcttcatctttaactgctgtctcttccacacacctgattgataaccacgttccagccctcctatcttctaactatcttttgattccatctatttctttccacctgcactgccattaccacattcctggtcatgcatcttctgcctggattacctcaatggtgacataactggtctccacgcagccatcactgccctcactactgatgctctatgctgtagcctaagtgattttcctaaagtatagatcctgtcatgtcactgccctcctgaaaacatttcagtaggccaggcttagtggctcatgctagtaatccta

SEQ ID NO: 539715 - DNA, 555 bp, Homo sapiens
caaatgtacattaataccaatatttataacaccttgcaaagtacttaataaatattatcctcactttacacataagaaaacaaattaaaaggtcttaagcaacttgtctaaaatcacacacttagaaccaggattcggacaaagatatggcttactccattgccttttttttttaaccctatatgcaaatgtttctacrgtagggaagatcaccattagctcattaactgaccctaaattaataattattttattagaaggttgaaaggccctagaaaaatagcctacattactcaataaaaatttattgaacacttagattatcccaggcaacattctagattccaagaccatagttgtgaactcagatggggatgggataaagggaagaagtaaaagaagagaggaaagcgggaatggaggaagatagatggtcatggtgtacctaaactggaagccttgataaaaagtctactgtgtgacttcaaagaagttcctatgtcagcaactacttattaccttgactgtggcacctttcccatatgataaactgtt

SEQ ID NO: 539716 - DNA, 561 bp, Homo sapiens
ttttttaaccctatatgcaaatgtttctacagtagggaagatcaccattagctcattaactgaccctaaattaataattattttattagaaggttgaaaggccctagaaaaatagcctacattactcaataaawatttattgaacacttagattatcccaggcaacattctagattccaagaccatagttgtgaactcagatggggatgggataaagggaagaagtaaaagaagagaggaaagcgggaatggaggaagatagatggtcatggtgtacctaaactggaagccttgataaaaagtctactgtgtgacttcaaagaagttcctatgtcagcaactacttattaccttgactgtggcacctttcccatatgataaactgttcctatcctgtttctagacccactcatcaccaattttcatgccttagaacaaaaatcaaaacttcagtgtagtcttttattggttgtaattcaagtattaactcatcttctttcatatattaccatcttaaaaaggctctatcaaaatggaaaagccattaagaaagacccaagg

SEQ ID NO: 539717 - DNA, 561 bp, Homo sapiens
ttttttaaccctatatgcaaatgtttctacagtagggaagatcaccattagctcattaactgaccctaaattaataattattttattagaaggttgaaaggccctagaaaaatagcctacattactcaataaaaatttattgaacacttagattatcccaggcaacattctagattccaagaccatagttgtgaactsagatggggatgggataaagggaagaagtaaaagaagagaggaaagcgggaatggaggaagatagatggtcatggtgtacctaaactggaagccttgataaaaagtctactgtgtgacttcaaagaagttcctatgtcagcaactacttattaccttgactgtggcacctttcccatatgataaactgttcctatcctgtttctagacccactcatcaccaattttcatgccttagaacaaaaatcaaaacttcagtgtagtcttttattggttgtaattcaagtattaactcatcttctttcatatattaccatcttaaaaaggctctatcaaaatggaaaagccattaagaaagacccaagg

SEQ ID NO: 539718 - DNA, 437 bp, Homo sapiens
tccaggtacacctgttcaggaggctattagatatataaccttggccttagtagggaagtcagtattgggttgattgattttatttgctttttattatctattcacactttaattcatttcaaagatgatttgggacataacaaccaatatatagtgycaggttcatgactatgccaattgtcatgttgaggtccaaagagagtagatggatgaagagaaagaacactcagggagccttaggcaggtgaaagatgattttattcagcagcagctctcatcaacagctttctcatcagcagcttacttacactgtctctctcgcactgtcctccctgtctcggctgcttgctctgaactgctcccacacacacagctgcacagccggttctcccctgctttcagggtcagcagcttaactctttctctgtttccctggg

SEQ ID NO: 539719 - DNA, 475 bp, Homo sapiens
taacatagttgtttattatcaagtattatgtgctatacataattgtatgagctatatgtttatacaacttttagacacaggtttgtttccaccagcatcaccacaaacacgtgagtaatgtgttgtgctatgcagttatgacagctataaggtcactgtgtgatgggaatttttcagctccaacataatcttatgggaccactgtaatatatgccayccattgttcatcaaaatgtcatcatgtagcacatgactgtgtgtgtgtgattagatagatatagatagattatacagagataaaaagagatataagatatagatcctaccagctttgtgcctctggagaacactaatacagctaataaatagtgtcactaggatttgaattctgtaaagccactgcttgtaactgttaccagaataagctatattaccaacttgcatctaagagtttgtctacagagcaggccatttg

SEQ ID NO: 539720 - DNA, 537 bp, Homo sapiens
cctctaatcctgaatccatttgtgatgtaaactgtgagctactctscacctgtagctaaatgaaggtagagaaaagcacataaacccgctgattgatctttatttaaattattgatgcctgacctcaagtagggaaccctactgcatttctctactccactgatcactcctcttctcaccttaaacttctttccttctctacataaatcagttcatgaccttgtgtaaggaacatggctgcgctgcagccaagcagacataggcaaggtaaacatcctgcatgactcagcgggattgtagcacaggcgcacactatgtagccataacatgggaaggctcatcatttggctgtaagccactattgtctgtaaaaggtataatttccctgctgacactgtacaggcacactcacacccagagaaacagtcagagatgttggtcttgcaagtggacaggggggtgccaggacacagctcagcttgcttgtgcccagagggaaagagttgagctgctaaccctgaagggagagctagccat

SEQ ID NO: 539721 - DNA, 655 bp, Homo sapiens
aggcccactcgcattaggaagggcaacctgctttattcagtctattgatttaaatgttaatccaatctaaaaatacccctgatgacacagcaaggataatgtttgactaaaggtctaggcactacacatcctatacaagttgacacacaaaattaactattgcactgcaaaaataagtttataatataaattgtatattacacaatatattaaaacagtaaaataattaatagtgttgtatttatctcaaagttgaatgataattgaaagactaaataaatcacaaaaatacatattgcatacatgtctgtgtgtatgttcacatatagatgtgtttctttctgtatttacagtcatgtaccatataacaatatttcaaaccacatatacaacaattgtcccataagattataacatcatagttttactgcatcttttttatgtttatatacacaactgcttactattgtgttacaattgcctacagaattccatgaaataacatactgtatgggtttgtagctcagaagcaataggctataccwtatagcctaagtatgtagcaagcataccatttaggtttatgtaagcacactattatgtttgcacaacaaagtcacctaatgattccttactcagaacatatctccatcat

SEQ ID NO: 539722 - DNA, 614 bp, Homo sapiens
tggtcccaagattatacctaacatttgtcacctttctcttccattgttctttctagttttactcatctttggtcagcagtttgactattcttgactgcttgtgtagtagtagaacatgacaatttgcaattgcctgtttaccgttatcatggtgcatagaaataccaagagtcctacccattaatccctaggttcaagaagagtccttcctgtctgttggtctactaatacctttgttaggtgagataaaaagctcaatggatctagtacacagcctcatcttcaagtttagtcaaatatttattaagtgttggaaagaatgttttactttgtagaaatcataaacacaagctgctagaatgtaaggttgtgggcttaagaatttcaaatccaagaaatgtgtcagtgggaataatgatgggcagtcagtactatctttccgtcctgattcccgtacctacatattctagcaccatatgtagaaccatttgcaagtgttcagcaaatatccaacatcttgtaatgtgaaagcccaacaattcaggttgttgtgcctgaattgrcatcttatctgggcctttattaggccattccatcataatcaagtgcatttg

SEQ ID NO: 539723 - DNA, 608 bp, Homo sapiens
atatcttcatagatttatttttttgagtactaagctatgaccaggaaacaaattattttgctttttttctgattttccttaaattgggctttttagctatattatataaagaggttgctaaacatmatttgttctgtattctgaaaagaatgacaaactaattctgaatgaaaggctgatattttttttcaaatttccacattacttttaaaaagccgaatgtactaataatatcacgtgaaaaagtaaaccataacatgatataaaatgtacacaaacattttgtcgaaaaccctattttagggttcatatcagctaaacctcctcaaagcaaacatacccttgatttgtgatagcttatgggatagagggttaaaactggataaatactaaaagtaggggctattatatcaaagaggatttttttgaagttgttattttataaatctaattatttctcccaatttaggagtactttttttttcagttaaggcctcatctaaaaatgactgttactgccctaatacaaagactgtatagactttttatgcttctacagtacatctcagagacctctgtgtgaaagcaatgctctggatgatactgac

SEQ ID NO: 539724 - DNA, 671 bp, Homo sapiens
agctgctataaataataaaatgaatctttagattaatataaagtattatctataagattatatttttaaaagcagatttttaggacatttcatatttgattcttatttgaaaaamatcatatttgtatgcatacacatatgcatacattaacacacagaaagagtacgattgttaaatgtaaatacaaatgatggatattgtttagcactggtgaaatttgtatatttggggaaggattaaagggcaagggataaaggttaactattagactacaagtctatttgaattatttgaattgttttacaaccccggtacttttattactacaggatgaaaaaactgtttgcacattagtatatataatgtaaacagaccatttttgtatatacacaacataaatgcacacatcctctctcagaacatggaaggcatgttgatgttagattactttatagtggtattatgtgctaagtaactattttattagcttagaaattaaaatattatatacagcatgtttttgagaagttattttaaattaccatactgaaaagttttttgaatatataacaattaacaaatacctttataattgaaagtattctttaaaatcatttctctcattcatatccatttgataatgtttcaaaaatttgtttcttctaactta

SEQ ID NO: 539725 - DNA, 619 bp, Homo sapiens
tagaaaaatgtgaggtctagagcttaatgagtctatatagtttaacagaaaaactaggaatgcctgagattggtgacatgcacaatcattcacggtagagtgctgagacacattcgaagctgtcaatgtgtctaaggaaaaaattcagaaatacgaataaaaggtcaaaggatcaggatttgattattaactaagaatcattattggtccccttttctaatcgaattcaacattttagtccattaacaaagcgtgacttaaaatgactgtggagatcatttgcaaactaatatggattgttaaaccatgtaacgagtttatttgttcaagactattctaggaatgacggataatcaaaatgagtgtgtgcttgtgtgtgggtaggacaatgactctaaaatgctgtgaagaaagatttcatgttttgaataatattcatctattaagataacctgcatctatcacttaatacattttaaagcttgattacatgtttgtttttataccgaacagatatcttagcaaagaataggtgtgaagcaaagactgtygttctttcaataaagctttagaaagcactgaaattagcacatgcataccaatttgtaatgacaagaag

SEQ ID NO: 539726 - DNA, 500 bp, Homo sapiens
tttttcatgtggattcagctattctttattaattttcagttatgtgggtcattctgtattaattaaaattctaagtaactttatagatgtttactttgatagagtcaaccttgtctgacaattacaggagagtccactgagaagatcagtggatagaatctactagaaacaattttcaggtaataccaccttaccacgctcattttctactctttcctgctacatagtctgcaactcctggaggtttcaactgttgactataattagatygttcttttctctgtacacctgcaataccccatatagaaatacagaatatcaagaattgggctcactgatgaagggaaatatattggaaatactctctcagagtattctttgataattaatgttaataaacaaaacagcacctaatattttctgaagcatactttatgccaaggccctcgcttcctatgaattattattatttaattctggcaaacagcctatgatttagg

SEQ ID NO: 539727 - DNA, 583 bp, Homo sapiens
ggaaccgtgtgtgtgcatgtgtgtgtgtgtgtgtatgtgtgtgtgcatggatatacactcaggcttaggagaactctgggtattcaccaagtcattcaatatttaacaagtatttatgaactacttaccgtggagaaggcattgttttacatattgagagacatcagttaacaaaataggaaatatccttattttcatggaagttataggggagaacagagaactaaagcttagtgctatgaaggcaactacttaaggsagggtgttcagggaggactgtaggatgaagtgccagtcaagctgagacctgcgatgtgaaggagccagacatataaacacctgggggaggcagaaggaacaacaaagtcaaagagctcaacaggaggaacaatctcggcctgttggagaaactgaaagagggcccgtgtgctggtatatcaagggtgtgggaaaagtgtatgaataattcaaagggtgtttcattaggaaggctattatcaaaaacacaaaagacatcgtgtgttggtgagggtatggagaagaggaaactctagcatactgttgctgggaatgtacatggtgg

SEQ ID NO: 539728 - DNA, 583 bp, Homo sapiens
ggaaccgtgtgtgtgcatgtgtgtgtgtgtgtgtatgtgtgtgtgcatggatatacactcaggcttaggagaactctgggtattcaccaagtcattcaatatttaacaagtatttatgaactacttaccgtggagaaggcattgttttacatattgagagacatcagttaacaaaataggaaatatccttattttcatggaagttataggggagaacagagaactaaagcttagtgctatgaaggcaactacttaagggagggtgttcagggaggactgtaggatgaagtgccagtcaagctgagacctgcgatgtgaaggagccagacatataaacacctgggggaggcagaaggaacaacaaagtcaaagagctcaacaggaggaacaatctcrgcctgttggagaaactgaaagagggcccgtgtgctggtatatcaagggtgtgggaaaagtgtatgaataattcaaagggtgtttcattaggaaggctattatcaaaaacacaaaagacatcgtgtgttggtgagggtatggagaagaggaaactctagcatactgttgctgggaatgtacatggtgg

SEQ ID NO: 539729 - DNA, 555 bp, Homo sapiens
gcattcctgataacgttaaagagggtttttggtctaagtggtctggattggaggcctgtatgcaaggtctttagacgtgaaaggttagctgtagaataatagtccatttcctggggctttttctttttttctagcagtaaccttatttttgtgtatggaatagttattctgaggatatttcctacaagctagatgttattactctggtgtcctcaaaaccagctcarttgtctccagaatgtgtacttagttttgtttgagatggtatatctgccatggttcaattggagaactagaatcagcaggattacatgcatatatgtacatacaaaatgtacatgtacatgcaaacacctgcacatgcaggggtgtgtgtgtgtgtgtgtaccccaagagattcattgcaaagaattgggaaggtggtggctggctaggtaacagaaatacacagcccccatatttgcggtacaggttgttgggaaaggtagggggaaactctaggcatgagctgaagctgtagttcttaggttgaatttcttctcccgggaacttcag

SEQ ID NO: 539730 - DNA, 599 bp, Homo sapiens
tttggctttttcctgcagacccagggcttggcaggaaagacaatgggagtgtggctggtgattttgagcacacagggagacaggtgtcccacttttcatctctgctttccactgattaattggttggccttgagaagttaattaaaatctgccaaatggggataagaatgaagagatttttaccttgcaggaaggtcagatggattagtggtattaacagtacccamgtgaggagctccttcagttgcctggtgagaggtaaagtgtgttgaaataattaattgctatgaaaataccagcattcacaaatctttttctcaaatcaacccagggaggggctacaaagcccagttttcatgggccacagcttgaattggcctatccaaagcccagccattggcaggatctgtttattcagaggagttcttaggacagtcaggagctctacccaggactctcttagaaacctgcaggtggagtgagcatttatccgaagagacagcctgatacataagtggagagagctcctcattcactaaaatatttttaccttggcattgaagttgacaaaactaagagctattaactaacattaagag

SEQ ID NO: 539731 - DNA, 620 bp, Homo sapiens
ctgtctaagccttggcggtcgacagagagaccaatgataagaaatgagaattatattgtgtgggtagaaggtaagactttattgagtagttccaggctgaaactacttagagcccatataggctgtgccttaggggaagatggaacatgagttaaggccaagaagatctgaagtgtttaagagccaatttttatagtctgtaaaggatttgatatggtatttggcataagaaatagtttagtagatgttagctattattacttatggtcagaaatgcaatacagagatgatcaagagtaggctaaaatagatgggagttttaggaagagacaagggagtttgagagaagattctgacttgatttttgagttggcctaaatccttggagacttgcttctaatatatatayactagtcagttgtattcaaaagtctctatagcaaccacttttatcacttgaaactaagtacctctgaatagaaacactcacgcatgattgcatgctcacaggaaaggatataagaagcttcacttattttacaagaaatctaaattttcttgcaggctaatttgaatcttaaaagaaaaggatatttattagatgtctactgtctgtcaag

SEQ ID NO: 539732 - DNA, 620 bp, Homo sapiens
ctgtctaagccttggcggtcgacagagagaccaatgataagaaatgagaattatattgtgtgggtagaaggtaagactttattgagtagttccaggctgaaactacttagagcccatataggctgtgccttaggggaagatggaacatgagttaaggccaagaagatctgaagtgtttaagagccaatttttatagtctgtaaaggatttgatatggtatttggcataagaaatagtttagtagatgttagctattattacttatggtcagaaatgcaatacagagatgatcaagagtaggctaaaatagatgggagttttaggaagagacaagggagtttgagagaagattctgacttgatttttgagttggcctaaatccttggagacttgcttctaatatatatacactagtcagttgtattcaaaagtctctatagcaaccacttttatcacttgaaactaagtacctctgaatagaaacactcacgcatgattgcatgctcasaggaaaggatataagaagcttcacttattttacaagaaatctaaattttcttgcaggctaatttgaatcttaaaagaaaaggatatttattagatgtctactgtctgtcaag

SEQ ID NO: 539733 - DNA, 219 bp, Homo sapiens
acctgatggataaatgccctgtccattttaggacaaaatagcagcagtgtggtagagggcatggagaaaaacagggaaggtggcttggccctctggattgtggataactgatcctactcctcctgcccccaatctgcatcatgatgaatctcagagatgggactttctgggcaaggttctkaacgggtatgctggggcagactgagagagcagcccaga

SEQ ID NO: 539734 - DNA, 660 bp, Homo sapiens
ctggatctcgagtttgggagagaagttgaggccagacctgtggacttggtagatgtcattgaaactatgggagtggatgagatggtccaaaggatatgtagatgcctgggcaacatagggagaccctatttctacaaaaagttaaaaaattagctgggcatgatggtgcatgcctgtggttccagctactcaggaggctgatggggtaggatcgctttgggcccagaagtcaaggctttagtgagctgtgatcatgccactgcaccccagcctgggcaacggagcaagaccttgtgtgtctgtctgtctgtctgtctgtctctctctcactcacacacacatgcacacacacatacacagacatatgaatatgtagagagtgagaaaagaattctccaattcaggcataaaatagcaatttgactatgaaaaaatcatgtagagcaaaatgtgtatatttatcttgttacataaataaatgtagatgaagaactgtgcctgcccacaagcaccattgcacrtatgcctgtgcacgaatgtatacaccctgtgcatgtagaagtactaatgaacatcagcaatgtgtgctggatagtgagccacatgaaacattaggtattcaaggtaataattcccttccttaataattcatgcaagatg

SEQ ID NO: 539735 - DNA, 660 bp, Homo sapiens
ctggatctcgagtttgggagagaagttgaggccagacctgtggacttggtagatgtcattgaaactatgggagtggatgagatggtccaaaggatatgtagatgcctgggcaacatagggagaccctatttctacaaaaagttaaaaaattagctgggcatgatggtgcatgcctgtggttccagctactcaggaggctgatggggtaggatcgctttgggcccagaagtcaaggctttagtgagctgtgatcatgccactgcaccccagcctgggcaacggagcaagaccttgtgtgtctgtctgtctgtctgtctgtctctctctcactcacacacacatgcacacacacatacacagacatatgaatatgtagagagtgagaaaagaattctccaattcaggcataaaatagcaatttgactatgaaaaaatcatgtagagcaaaatgtgtatatttatcttgttacataaataaatgtagatgaagaactgtgcctgcccacaagcaccattgcacgtatgcctgtgcacgaatgtatacaccctgtgcatgtagaagtactaatgaacatcagcaatgtgtgctggatagtgagccacatgaarcattaggtattcaaggtaataattcccttccttaataattcatgcaagatg

SEQ ID NO: 539736 - DNA, 629 bp, Homo sapiens
aggaatatgtaataaaaccatgttcctctgggtttttaccctacctttctttgggagatctcagagtgcttttccagcattatatccattaactgctgagtggtctttgcagcgtggctaagtcattgagtagaactgagtgcgattgattaagtagcagcacaaagaagtggcttttcacatctcttactctttatgccttgtgtttaaagggaagtagaacagcctcgctatgctttcctttatgcagtaacataatagcagcattcattttaaaatttacatttgaaaaaaatctgtatatattgtacagacagccctgaatttttccctctcatattttcctgctgctgcatccttgtttcttggtacccaataatcacctatacttcattttctgttcccaagacccacccatttttaaggttttcggctrgtgtagtgaagatatttgtgtgcttgatctgccttccaatggtctgtttatgatacagtttacaggaatgcgcaccattttaagggaaggaatgcctgaaaacattttttatttttataattttactatgttggtgctactcaccaaataggatgcatgtacatcttgaatatacagcaacattcaccctcag

SEQ ID NO: 539737 - DNA, 637 bp, Homo sapiens
atatgtctcacaaaagaaactacttaggttggaaacaatggaaggttgtgtataattaattcaatcaggtcatgaatatttatgtaacatatggcattttaatttatatgttcccattctcatacttcattactatacagcagcaacaagataaatttcaggttttttgtttttttattaagtgggccatgtctaaaagttgtyacattcctggttgaatattatggacaaaatttccccattaaagtagttttgtctttctcaaggattatcctttagggttgggtggattaaaaacattacattagtgcttcttgagcatacaagtcactagggatcttgtgaaaatacagattccttttagtaggtttgggatgaggaatgaaggtcttcatctctcaaatctcccaggtgatgtggatgctgccagtccatcgaccacactttgagttgggagattctacatcttttgagaaatatccacactgaagcctatactcttaaactttcaaagactctgtgttcatgtctgtgttctgcaagaattttttcttttaagaaataaactgcataaagtaaaatcagaaaaccataacactggttttccaaatttgccacaaatactgtaatactctgt

SEQ ID NO: 539738 - DNA, 637 bp, Homo sapiens
atatgtctcacaaaagaaactacttaggttggaaacaatggaaggttgtgtataattaattcaatcaggtcatgaatatttatgtaacatatggcattttaatttatatgttcccattctcatacttcattactatacagcagcaacaagataaatttcaggttttttgtttttttattaagtgggccatgtctaaaagttgtcacrttcctggttgaatattatggacaaaatttccccattaaagtagttttgtctttctcaaggattatcctttagggttgggtggattaaaaacattacattagtgcttcttgagcatacaagtcactagggatcttgtgaaaatacagattccttttagtaggtttgggatgaggaatgaaggtcttcatctctcaaatctcccaggtgatgtggatgctgccagtccatcgaccacactttgagttgggagattctacatcttttgagaaatatccacactgaagcctatactcttaaactttcaaagactctgtgttcatgtctgtgttctgcaagaattttttcttttaagaaataaactgcataaagtaaaatcagaaaaccataacactggttttccaaatttgccacaaatactgtaatactctgt

SEQ ID NO: 539739 - DNA, 609 bp, Homo sapiens
ttcagaattttgggtagctgcataagctgaagattatggaaaacctgagctgaaaatggcacctggatctgtaacttcttgtcttgaactcttttttgagctttattctgtgagagatcttcccctacagtgattttttctgtttctcctcagtcgctggggtctcagtaaggggtggaggattggtgtaaatgagacagtcacataaattgtctaatttgagcatgccaagtgatttttgtcagcctcttttggtcataaaattttggtatagctattgtgaaatatagtgtcataaatttgtcataagccattaatgaaggaagagaagcagaaatttatttctgtrggaatgcactcaaatatcaagcagatggtgttctacaacatttatttgggaaaatgtgtatctgttacataatctgaaatatgtctttttcacatttaaaaatatttgggtcatgatttagagtttttattggattgttttttaaactgagaggaagaagaaaggtaattgtattttaaaacatttgacatgttactaataaaattttatttctggtgaaatataggtgcctttgttaagtaggggaggtgggatcatga

SEQ ID NO: 539740 - DNA, 562 bp, Homo sapiens
aacaaatcattcttcataggagtctgcagtttttatggtgaaagtgaatgttaaaagcagatcacaataaattaagatgattgaaaggaaaataaatgatagccagaatccttgacactcagccacagttatgagtcttcagtaatcttgtgactttttgaaacagcctgacggtatagcagaaatagcaaggaattcaaacaactaccagagtagacaacacacagcagctgactcacccatatttaccttgttatttggttgttaaaactgagtgtgtggaaaagggatgttgctaatgaactgtgcaatgaccaaaggggaaaaagaaagaagaaaaaaaaggacataaaatatacaaagacaaggctgattgcacaattaaattgaaatatgtatttatttatcacccatcgyaacccagaacaaatgaagtgtgagactcctgtgatggctaggttataatttcagctctcagttccctttacaaacagtgaaaaaaacaggcagttgtgaaactcatagtactctcatggacgaaggctgtacatttcattacatc

SEQ ID NO: 539741 - DNA, 562 bp, Homo sapiens
aacaaatcattcttcataggagtctgcagtttttatggtgaaagtgaatgttaaaagcagatcacaataaattaagatgattgaaaggaaaataaatgatagccagaatccttgacactcagccacagttatgagtcttcagtaatcttgtgactttttgaaacagcctgacggtatagcagaaatagcaaggaattcaaacaactaccagagtagacaacacacagcagctgactcacccatatttaccttgttatttggttgttaaaactgagtgtgtggaaaagggatgttgctaatgaactgtgcaatgaccaaaggggaaaaagaaagaagaaaaaaaaggacataaaatatacaaagacaaggctgattgcacaattaaattgaaatatgtatttatttatcacccatcgcaacccagaacaaatgaagtgtgagactcctgtgatggctaggttataatttcagctctcagttccctttacaaacagtgaaaaaaacaggcagttgtgaaaytcatagtactctcatggacgaaggctgtacatttcattacatc

SEQ ID NO: 539742 - DNA, 467 bp, Homo sapiens
agtatgttaattcatcgaagtcacagaatagaagatcaataattaaaaaacaattgtatcttacatatgaaaaatgagtaatgggaaaatatttttcaaatttttcaaataccacttagaatacttcacaaatagaaacttcttaggtataagtctaacaaaacttgtgtagaatctgtatcctgaaaatcataaaacatgaatcaaaaaaatcagagaagcaactaaaatggaatgtaatagtgaataattctcagataaatagtgaatatttatgtaaaagaatgtgtgtgtgtgtgtgtgtgtgtgtgtgtatgcacatataaacgaagagaaacrattactataaagcattggctcaattggctcacatgattatggaagctgacagtattttatactacagttggcagtctcgcagacccgggagctgagggtatagctctagcctgaattcccaagcctga

SEQ ID NO: 539743 - DNA, 566 bp, Homo sapiens
tctactatcattcaaggcacagatcaaatatctcatattattcttactttctttccatttaacacaaacttccccatcaygtctagcttctggtgagaccctgggactgaaactcagttgatcagtttcagtgcttcacagctatgaagcccagtggacccaaaagtgagaccaattgcaaaggttcccatcctccctgtgtgtcttaacactggatctacataccttattagaaactaatggtgcatttcatgttctccaatttccctgtactaatggtctgctttaggagcaattcaggaaattagaaagaatcacaatgcagaatattctcattcctcaacagcttttatgttatcagggaaatttagctctacccttcaaagaaacaagataaaacaaaatctcagaggatctgagaatgtggttgtgtttgtgtgtgtgtgtgtgtgtgtgtgtgtgtgtacgcacacaattttttttctcatcttagtgtctgccaaatataaatacattcccaggttaccaggtccaagtttagatgcttaatcatttcctttttgcat

SEQ ID NO: 539744 - DNA, 512 bp, Homo sapiens
  misc_feature (1)...(512): n = A,T,C or G
aaaaaaaagtcagccaggcgcggtggctcatgcctgtaatcccagcactttgggaggccgaggtgggcagatcacaaggtcaggagattgagaccatcctggctaacacggtgaaactccgtctctactaaaaatacaaaaaaaaaaaaatagctgggcatggtggtgggtgcctgtagtcccagctactygggaggctgaggcaggagaatggtgtgaacacaggaggcagagcttgcagtgagccgagatcgtgccactgcattccaacctgggcaacagagcgagataacgtctcaaaaaaaaaaaaaaatgttagtcacaggatcctgatccnnnnnnnnnnnnnnnnnnnnnnnnnnnnnnnnnnnnnnnnnnnnnnnnnnnnnnnnnnnnnnnnnnnnnnnnnnnnnnnnnnnnnnnnnnnnnnnnnnnnggttttactttttttttttttttccccgtgtagatcaagagaatagtcacatatggcttccagaactctagttcaa

SEQ ID NO: 539745 - DNA, 558 bp, Homo sapiens
ggttcattctgcttttagccctacccaaaaacatttcattattgagaaaatgaattgtcatttctatttgcagctacagattaaggctagagactctcctagggagcgtgttattcctggctttgcacaggtatagctgtagctgtgacagtgctctatcctcgcaaccagaacatacttagaagattaacacgccatccttcaagaagcatcttctgtaagatagggaccttgtttggttcaatgaacattggtacagaccccagcacagaagagaagcaggtttgcaatacttttcctaaaacaaaacaaaacaaaacaaaatgaatcaatgaatgttaaatagcaatccacggatctattatctttatgtgtctttcattttgaactattcaaagctcttctataagcctcgtttataatttagctgagcgctttctctacctattttctgaccrtatctgtggatttgtgggcagacactctattttggaagatatttacactgtcaatatactttccatttgacactgcctaccttcttccttgcatccttat

SEQ ID NO: 539746 - DNA, 597 bp, Homo sapiens
ggggcttggcaggaggctggggagtgggaagaagaaggaagctggggttttctctttcccgttctctccagmtctggtcttcatggttcctgctcctacccacagcacccaatggttgcactgggccctggcttctacaaggtgaccacgacttttcctttggccacagtgctcctcccttattctttcaacctaaggatgggagcagttacctcttcttcttctgtctgacttctcagtgctgctgtcattggtgtagccaattcgctgtattattttcactacattttaaacatgtatgggtgactttctcccttccttactccctccctcccttccttcctccctttcttccttctttccttttcttttttctttctttcttctcccttttttctttcccccccctaaaaatctctctttcccttccctacccctctccttccttccttccctccttccttttttccttccttcctctctctccccttcctctcctcctccttccctccttcctttcttcctctctctccctttcctctcctcctccttcctttcttctttctcttttatttggactctggtaagtctacatgt

SEQ ID NO: 539747 - DNA, 597 bp, Homo sapiens
ggggcttggcaggaggctggggagtgggaagaagaaggaagctggggttttctctttcccgttctctccagatctggtcttcatggttcctgctcctacccacagcacccaatggttgcaytgggccctggcttctacaaggtgaccacgacttttcctttggccacagtgctcctcccttattctttcaacctaaggatgggagcagttacctcttcttcttctgtctgacttctcagtgctgctgtcattggtgtagccaattcgctgtattattttcactacattttaaacatgtatgggtgactttctcccttccttactccctccctcccttccttcctccctttcttccttctttccttttcttttttctttctttcttctcccttttttctttcccccccctaaaaatctctctttcccttccctacccctctccttccttccttccctccttccttttttccttccttcctctctctccccttcctctcctcctccttccctccttcctttcttcctctctctccctttcctctcctcctccttcctttcttctttctcttttatttggactctggtaagtctacatgt

SEQ ID NO: 539748 - DNA, 597 bp, Homo sapiens
ggggcttggcaggaggctggggagtgggaagaagaaggaagctggggttttctctttcccgttctctccagatctggtcttcatggttcctgctcctacccacagcacccaatggttgcactgggccctggcttctacaaggtgaccacgacttttcctttggccacagtgctcctcccttrttctttcaacctaaggatgggagcagttacctcttcttcttctgtctgacttctcagtgctgctgtcattggtgtagccaattcgctgtattattttcactacattttaaacatgtatgggtgactttctcccttccttactccctccctcccttccttcctccctttcttccttctttccttttcttttttctttctttcttctcccttttttctttcccccccctaaaaatctctctttcccttccctacccctctccttccttccttccctccttccttttttccttccttcctctctctccccttcctctcctcctccttccctccttcctttcttcctctctctccctttcctctcctcctccttcctttcttctttctcttttatttggactctggtaagtctacatgt

SEQ ID NO: 539749 - DNA, 624 bp, Homo sapiens
tgttgtttttgctctttgcccatgtgaggacttttcttttgtttgtggttataaccaaagagcatggagactgttgrtggtgctttgccttatggactgcatgctgcctgagctctaaatagccatcccatctccaatcgctgcttgcgagcttggccagtcacttgcatctattatttcttaatattctacagctcagccctatggcttgcagtcaggaggcggcgtccttaggcccctcttcttaaagatgtttagactgagtaacatttagtgactgcctacgccatgccagctaattttataaaatatcatttcatgacttcccattttgcagataagaaaattaaggctcaaagggtctaaatagctaagatagaaaattaaggagccaggatcccctccagactcagtggctcccacatcctgcgttttccttgctgaccaacactgactctcactgtattggcgtttccacctccgttttatacgaaggaaacagtaaagaaacacagaattcattttatacacctagcttttatttgatggcatctattcagtgaccaagtccaaaatccaacttcatgacagtctttcctctccagcttcttccagccctgggct

SEQ ID NO: 539750 - DNA, 491 bp, Homo sapiens
agcaatcctgcctgagcaagcaagaggttgactgctctgctggacatttttcaagtctaacttctaaggatttttctcctgaagagactgaaagaagaacaatgggggtcaaactgcaaaacacacagccagcaaaagccagtcttttctgtgggatctttgaaagacaatgagaaacgataacacctcagatccctataatacctttcttttgaaaagcccattgctctttcacattttaaaattatattctcttgacatttctataatatagtcatgaagaaatagagggaatttccstaagttttgcaagacaatggcagagccagaatcagactaagctttcttgatttcaagcctaggagggtttttgttttgttttgtttttaattgaactttgtgcctatggtaagattcctttagcatagtggctaaatgcaaggactcgaacttgactgttaaagtttgaatcctggctataccacttacca

SEQ ID NO: 539751 - DNA, 458 bp, Homo sapiens
ctgacatgggaatccttttcttttctttaatatgatggtctcagtcaagatggggacagcagtggtcatggtggggctgtcgcagaggctgtggactcctctctcccctttctactcctagtcattggcctgccctgtctcatttacaatgatcccaaacccatgtatttccctctagctctgcagtatcatcatgacccaagaccccatccttgcttgcctgcctccttgcaycccagcctcccagccacgggtctccctgattcacctctcgcccctcatatctggtccccatccagcagctaggaggattttttttttttttttttgagatggagtctcgctctgtcgctcaggctggagtgcagtggcgtgatctcggctcactgcaagctgcgcctctcgggttcacgccattctcctgcctcagcctcccaagtagctgggactacaggtgc

SEQ ID NO: 539752 - DNA, 582 bp, Homo sapiens
gtaggttccacaggggtgagaggagatagggtaagttcatgggtgatttgtagatcagagaggccctaactcccaagaggcaactcttggacatgcatccacagagacaggcgcagcagtgctcgaaagagcaaaaacctgraagcaacccacatgtccatgaacgggggcgtgcatgaataaacctcagcacagcaactgttagattacatagccaagaagatattatggatttttccacagccatttaaataaatgaactagaaaggtgtaccatgttgcaaatgaatcttagtagtataaaactaagtgaaaaatgttcaaaaaattacataaagcctgatactcattttgcaaaggtaaaaacgttaaaaccaaaagaatactttcgaggaaaacacatagacgtaacaagacaatgtaacatagaaagaaaaaaatgatagatacaggattcagggtaaccattcattaagttggaggagaagcaaaatggcatgatggtggggttggtgaaggtgatgggcaagattctggctgttgtttggggtgatggttctgcaggtgcttattgcattgtta

SEQ ID NO: 539753 - DNA, 575 bp, Homo sapiens
tgagaaaggcttctctgatgtctagctcctacagtacccagcggccatcacactcagtgaccagcagcctcctttggtaacattcagatggttttgcagcagagtgtcaccaactagacactctcccatgaatggctttttggcaccttttctagttacctatgaccatgtcctctaaaataaggtcagatcttgacctaggagcagtggctgttctttatatctgtgactccctgtttctgtctcctgggttgaacctaacacagaatctaaagtacttgctactttctgctcatatgatccagtcagcacaatgtcactgatgtatcagatcagtgtgatgtttacaggaatatcatgatcctcatctctgaagagtatattatggcagaaaacagaattgacatagccctgaggtgagamtgtaaaggtatactgttagccctgctagataaaggcaggtggcttgtggtattccttacaaaattggtatggaacaaaaggcatctgccaggtcagtagctgcttaccaagtgccaggagctgtgtttacttgctcccatatgatgctacag

SEQ ID NO: 539754 - DNA, 535 bp, Homo sapiens
ctgcctgggaatagaagtcaatttttccgtattgatagcagtgaaattcttacagggttaggatacaaaattgaatcaccagtatgatcctgtttttggaatgaaaagccccatagtgtatgtccatatttatttagttactgtttggttgggatttactgtgtgtcaggttgtacactaaatgctttatattcatttaatctcatttaaycaaaagaactccctggaggtaggatctatagtctccttttacatcgctggaaatggaggtaaagcaacttggccaagttcacggagccagtgagtggcaaataagggattagaattcagctcggttttacatcaaagcccattgtctctgcttctgtctctgctccctgctctgaagctctctgtctctctgtgagcacacacatgcctgcacacagaaaaaagacaggaaggaaacacagaatgttgacagtggctgtctgtggatgatggcagtacatgtgattttatcttcttttaatgcctttgtacatattctctatgt

SEQ ID NO: 539755 - DNA, 601 bp, Homo sapiens
ctgggggaatccattgaaaagacacagtgctcaccagacatccccagtggcactcattattgcttactggagtgtcagcttattgagttatgtgtttattttagtgttttttttctaagatgtaatacattattataggaagctgtccttcaacagccagtttggaataattttaattattcaattatctagaaaattcacttttccatgacccaatccatctataattaattttgtagtttcactttttacagtagaagttctcttaatatagttccaagtctgcaaataaagaagcctctctattttcttagaaaaacatcctgacgggtgcccacagcacactgaatatacgtggctccagccgggagggatttacatttaccaaggattggtcatatggacctatttatgccagtcctattgtaattatgtaacmaaattttaaaatatatgtaaactcatgaaaattggtgcaaaaggaaaaagttctcacataaactaaatcggatgccttaaaaaattaaattgctattttttaaattagaagaattcacagggatctagtaagagtctgcattcagtctgttttcttagtgtc

SEQ ID NO: 539756 - DNA, 334 bp, Homo sapiens
  misc_feature (1)...(334): n = A,T,C or G
tgacagtgcctgccgccacagacctctcctctggttccagagtgttccagcctcatgttcactgctcttttgtgatctgaatcaccagccttgaaatgccagagggcagctctctctctctctctctctctctctctctctctctctctcwcacacacacacacacacacacacacacacacaggctgtagggctctatccctcacccaataagataatgactacaccagacgctcccagtgccccattcatatcctgtcacctgtaccactgctgggcacacagcaccttccaacaccagcacctgcattcatttgctcnagggctttcnact

SEQ ID NO: 539757 - DNA, 476 bp, Homo sapiens
ctgtgtggccctgggtacgctttgggccctcagtttcctcatctgtaaaatgggatttctaatcttaaccctcctagactgtcccaaaggaatggtgagaggcaccaatgggatacaatactcggaaggtgtctggtgtgttagaagcaaggccacaggtgacagggttggcagagggaagtgctgaggcctgggctgatagaggaacttgaaaagaagagagtgaaatggacacagagagacaaggctagataatcagacacagagaggtgaaagaatcatagagacagagagagrgcgagagacaaagagcaaacccacagaaacagagagagagagagagagagagatgggggtggtgtggggaagaggctgtgttccaggagaaagaagtcagaggcaaggtcaagctgcttaaggctccaactgcctggagtcctgtggatgcctttctggccagtgaagaggttggcagg

SEQ ID NO: 539758 - DNA, 422 bp, Homo sapiens
agctgtgtggccctgggtacgctttgggccctcagtttcctcatctgtaaaatgggatttctaatcttaaccctcctagactgtcccaaaggaatggtgagaggcaccaatgggatacaatactcggaaggtgtctggtgtgttagaagcaaggccacaggtgacagggttggcagagggaagtgctgaggcctgggctgatagaggaacttgaaaagaagagagtgaaatggacacagagagacaaggctagataatcagacacagagaggtgaaagaatcatagagacagagagagagsgagagacaaagagcaaacccacagaaacagagagagagagagagagagagatgggggtggtgtggggaagaggctgtgttccaggagaaagaagtcagaggcaaggtcaagctgcttaagg

SEQ ID NO: 539759 - DNA, 363 bp, Homo sapiens
tacccagcccatggctctgaccccagttcctttgtggccctggccatgccagccagacctactggcgaggacgaagccccctgtcatctctttgtgtggtgttgtttggaggctgactctctgcaccacaggggccatgggcatccccttcctcacctagggggcatcaataggctcttggggtgcactgccacctctggctacccatgccctgggtgatgggggcaagcccaggggaagcaggccacttgctcaggaccctagactctcagcacggcactcctgatacccaggagcattcaggaggcactgacagttgttggtgggggttggsgggggggtagagggagagggaaatacatt

SEQ ID NO: 539760 - DNA, 634 bp, Homo sapiens
cagaggggaatgggaagatgaaccacggtgggcgggagggcagcatggccaaggagttattctcagagatgaaaactgttaggcaaaatcagcaggatcaaagtaaaaagggtagaggtagctagctggagttaaatagtgattttgaccattttagaagaagtactctccctttgtcttcctgtttcaaccactgccaagaaaataggaaccctgacttratttccctatcatggtttagaagacaaaaggtgcccaggtcatttcatagcccctctcctgagacgttgttatgagctctgttgaacagagcactttgtatggatgagctcaattctcacaaccactctgtatgggagaggttctcatccctgaggaatcacttgacaagggtcacatagtgataggtcatgggtctaggttttgggaggactgttctccatcccttgcccttgagctttgggtagtatcagtaaccgcatccaggagcctctgccttccgtctgcatccacagagccccagctcccacctctccactcaccagccctgatggaataatgtcaattcatgaccttgcgcaaccgtgcacctttcagcaatgatgttgtcacaatttacctgccagctgattgc

SEQ ID NO: 539761 - DNA, 554 bp, Homo sapiens
tgaaaactgttaggcaaaatcagcaggatcaaagtaaaaagggtagaggtagctagctggagttaaatagtgattttgaccattttagaagaagtactctccctttgtcttcctgtttcaaccactgccaagaaaataggaaccctgacttaatttccctatcatggtttagaagacaaaaggtgcccaggtcatttcatagcccctctcctgagacgttgttatgagctctgttgaacagagcactttgtatggatgagctcaattctcacaaccactctgtatgggagaggttctcatccctgaggaatcacttgacaagggtcacatagtgataggtcatgggtctaggttttgggaggactgttctccatcccttgcccttgagctttgggtagtatcagtaaccgcatccaggagcctctgccttccgtctgcatccacagagccccagctcccacctctccactcaccagccctgatggaataatgtcaattcatgaccttgcgcaaccrtgcacctttcagcaatgatgttgtcacaatttacctgc

SEQ ID NO: 539762 - DNA, 577 bp, Homo sapiens
tgctaatacaaggatccagggatgccctctgagaagctctggaccagccgacctctgaggcctccaactctgaccttctaagccaatgacagtccacgtgttaagcacttagctaggtgggtaggtctgagcaagtagaaagaagggttgctcccaggtgttcagaaaaacatgtggtttcccaggtttcatcagaaactcaaggccaggccaggcatggtggctcagatctgtaatctcagcactttgggaggctgaggcaggaggattgcwtgagcccaggagttcaagaccagcctgggcaacataacaagacccagtctctaaaaaaaaaaaaagaaaaattagctgggcatggtggtgcatgcctgtagtcccagctactcaagaggctgaggtaggaggatcacttgagcccaggaggtcaggtcaaggctgcagtgagtcacccactccagcctgggtgacagagtgatgaaaccctgcctgaaaaaaaaaaaaagaaagaaagaaagaaaaagaaattcaaggccaaaatggccttcagaggctaaagctagcctcagaaagactatgg

SEQ ID NO: 539763 - DNA, 577 bp, Homo sapiens
tgctaatacaaggatccagggatgccctctgagaagctctggaccagccgacctctgaggcctccaactctgaccttctaagccaatgacagtccacgtgttaagcacttagctaggtgggtaggtctgagcaagtagaaagaagggttgctcccaggtgttcagaaaaacatgtggtttcccaggtttcatcagaaactcaaggccaggccaggcatggtggctcagatctgtaatctcagcactttgggaggctgaggcaggaggattgcatgagcccaggagttcaagaccagcctgggcaacataacaagacccagtctctaaaaaaaaaaaaagaaaaattagctgggcatggtggtgcatgcctgtagtcccagctactcaagaggctgaggtaggaggatcacttgagcccaggaggtcaggtcaargctgcagtgagtcacccactccagcctgggtgacagagtgatgaaaccctgcctgaaaaaaaaaaaaagaaagaaagaaagaaaaagaaattcaaggccaaaatggccttcagaggctaaagctagcctcagaaagactatgg

SEQ ID NO: 539764 - DNA, 532 bp, Homo sapiens
ggccagttgggaggccagctgagactgccccctagaggcctacagatcctgttgacctggtatgactaagtaatgtggcaaaaactcacatttgaatagaatgcaaggtctacatagcactttcctgccatggctgcttagagattcacgacaagtctgtaagaaagatcatattgtcaggctaccccaaggtcactcaagtagcaaacttgagcccaagtcttctgattttaattcccatgctctttttaaggcacgctacccacacataccaacagggagatscgacctgggcagtaggctgtgagatgtgatgcctaaaaggaagaaatccaatgactcactcagccctccaatctgcaagccatctctgtgcctcactcagatctgcaagcctcactcagatctgcaagccgtctctgtgccaacactccactgggcaggggtcaatgctcgtaggaggataaaaggacaaatagaggccagacgcatttgttcaggcctgcaatcccagcactttgggaggacaagg

SEQ ID NO: 539765 - DNA, 532 bp, Homo sapiens
ggccagttgggaggccagctgagactgccccctagaggcctacagatcctgttgacctggtatgactaagtaatgtggcaaaaactcacatttgaatagaatgcaaggtctacatagcactttcctgccatggctgcttagagattcacgacaagtctgtaagaaagatcatattgtcaggctaccccaaggtcactcaagtagcaaacttgagcccaagtcttctgattttaattcccatgctctttttaaggcacgctacccacacataccaacagggagatgcgacctgggcagtaggctgtgagwtgtgatgcctaaaaggaagaaatccaatgactcactcagccctccaatctgcaagccatctctgtgcctcactcagatctgcaagcctcactcagatctgcaagccgtctctgtgccaacactccactgggcaggggtcaatgctcgtaggaggataaaaggacaaatagaggccagacgcatttgttcaggcctgcaatcccagcactttgggaggacaagg

SEQ ID NO: 539766 - DNA, 532 bp, Homo sapiens
ggccagttgggaggccagctgagactgccccctagaggcctacagatcctgttgacctggtatgactaagtaatgtggcaaaaactcacatttgaatagaatgcaaggtctacatagcactttcctgccatggctgcttagagattcacgacaagtctgtaagaaagatcatattgtcaggctaccccaaggtcactcaagtagcaaacttgagcccaagtcttctgattttaattcccatgctctttttaaggcacgctacccacacataccaacagggagatgcgacctgggcagtaggctgtgagaygtgatgcctaaaaggaagaaatccaatgactcactcagccctccaatctgcaagccatctctgtgcctcactcagatctgcaagcctcactcagatctgcaagccgtctctgtgccaacactccactgggcaggggtcaatgctcgtaggaggataaaaggacaaatagaggccagacgcatttgttcaggcctgcaatcccagcactttgggaggacaagg

SEQ ID NO: 539767 - DNA, 532 bp, Homo sapiens
ggccagttgggaggccagctgagactgccccctagaggcctacagatcctgttgacctggtatgactaagtaatgtggcaaaaactcacatttgaatagaatgcaaggtctacatagcactttcctgccatggctgcttagagattcacgacaagtctgtaagaaagatcatattgtcaggctaccccaaggtcactcaagtagcaaacttgagcccaagtcttctgattttaattcccatgctctttttaaggcacgctacccacacataccaacagggagatgcgacctgggcagtaggctgtgagatgtgatgcctaaaaggaagaaatccaatgactcactcagccctccaatctgcaagccatctctgtgcctcactcagatctgcaagcctcactcagatctgcaagccrtctctgtgccaacactccactgggcaggggtcaatgctcgtaggaggataaaaggacaaatagaggccagacgcatttgttcaggcctgcaatcccagcactttgggaggacaagg

SEQ ID NO: 539768 - DNA, 439 bp, Homo sapiens
tcagaagcaccgacggcggcagaggaagatgggcgaggacatgcacaccatcggctttggcatctatgaggtgcagagcgcaggggctcctgccctcccttccccatgtgttcatctcagcccctgcatggaaagctgamcccagaggcagaactggggatgggatcccagaccgggagcttggccaaggaaaaacaaaactaccagcctggccaggctcaggagtagcccccgtagggaggcccctgcagtggctctgggttgtggggccttctaagcccttcacgggccccccacagccagcctgcagggagttccactctcaaatggcctccacatcccttctcacatcctccaggcctggcattctggtcagcctacccatcttcaaagaacagaatatactgggccacatcaggcaatactgtgagggcaggac

SEQ ID NO: 539769 - DNA, 411 bp, Homo sapiens
ctgcacaggtggcaggaaagatgtgggagatgtttggactgactcaagattggaggtgggcaagggaagggtagctgaaggatcaggggacaagggaatggacagtggggactgaagtggttgcaacacaggaccccagggtccaggctgggagggggtgggagtgaaaggcaggagggatcagctttcgattctgaggaagagagtggtctccagagacgaggtacacagtggagcaggaaggaggcccctcccatccgcagaggccattccaaacctggactactgtgctgayggccctgcatctcctggtgcactttcatctgtgggactgacctagtctctgagataacattaaataaataaggtatatgcttatcagagcaaatttagaaaagactgaacaagaaa

SEQ ID NO: 539770 - DNA, 641 bp, Homo sapiens
acccgctccatccttttgtgcaactggaatgatttgtgtgtcttgggaagttttaaaggtcaccaagatttcctgaacaacaaaaataagcctgtagtaataaagttattacaccacaatcatgctcttcactgtgagctatagcgggtggtcctgcccaggcaggtgatgacggtaaaatggcgcctcctggggcccgtttgatgttgtattggctccaccacgtggcaaaaagcagtattgttatttcaaagcaagaaaacccctaatttagccatggaaaaggaaacctctatttcaaaaggcctttgatgcttttcagcataaacaagtaaaactggcaaaatgtcttgttttggatctcaggcagtcatgactccagatcccaaagccctctggagtctgatactgagttcctcatgaactgacccatctatttatgtatctatctgtctatytatcattatttgtgaccacacataacgtgccaggcataatgctgggtactgaggcttcaaccgtgaacaggatactgtactgtccttacagaggacatagacaatgggcaacaggccattgcaattcactgtggtaagcgctatggagacaaattactgaggatcctcacccagatttgggga

SEQ ID NO: 539771 - DNA, 549 bp, Homo sapiens
tgctctgcagttcccaaggtaccctggacctgagatgttcccactgtctccctgctgatgtgtggtttggaaaggcacctgagctaggaagctgagcagacggaatggcctgccagtggaaccattctccaagaagcagggagggcccttctcctcctttgctgtgttcctcccaatgctagtgggaagcttgaagctcccctcccacaggctcaaatatcccagcaatgctgccctgaccccgtacatgcaatgttttctcctttcctacagtatttactcatacttgcggctggattagattgaagcaatgctggaaagaatatttagtttgtcttcagcaactcacctactgattaccactgctattcctacctcccatccggccactcccttgcaccaggctccccaaatggcattctgtgtgcccagtgacccccacagtacctcccccttcactcctgctctgccagtggttctcaactgggggcattccatgcrccccccaactccgccaagcccccaggggacatttggcaaggtctgcag

SEQ ID NO: 539772 - DNA, 529 bp, Homo sapiens
tttatttgattatagatagggttgtcagatttggccaataaggctgggtgcggtagttcacacctgtaatcccaacactttgggaggccggaggcaggcggatcacctggggtcaggagttcgagaccagcctggtcaacatggtgaaattccgtctctactaaaaatacgtcgtggcaggcacctgtgatctcagttactcgggaggctgagacaggagaawcgcttgaacccaggagggagaagttgcagtgagacgagatcgcgccactgcgctccagcctgggtgacaaagcgaaactccatatcaaaaataaaataaaataaaatgatttggccaataaaacaacaaccctcccaaatgtttaatttgaatttcagataaacaacagatacttttaaagtatatgtagggcccaaatattgcatgggcatacatacttattctaaaagaaaatatgattcattgtttacctgaaactcatatttaactggcaggattagttgggttactatagggagagagcat

SEQ ID NO: 539773 - DNA, 569 bp, Homo sapiens
tcccactgatctcctcaaggacagctcatctctggaggaagtgactcctcccaggcaggtggaggtcatttccctcctaagtcattttagcaacaaatgggcagatcagacctatcattccagtcaactcagaagctttgcacagcctgggagcagaagagcctcctggctcacctgaagttcctcttccccagctaggcaacaccctctttggtgcagccctggccactccccttgccagccttctagggatcgctgcgcacatagagctctgcttacaaagggctttaggctgtcctatgccacccaaatttaattgcaaacacatacaatgactactttccccaaccatttggacaaagtctagtttttaaacctgagttaatgttgctttttctacttcccaaagcctctcacactatgctatctcactgacccagcaaagtcttctctttctctgaccacacaatccttttcacgggaacacaaggacatagacaaacacttcayggtggaaaaccttcctggagtgagtcagccagccctgaggatggtggtgagtcagaaac

SEQ ID NO: 539774 - DNA, 601 bp, Homo sapiens
aacaaatatagagcagcatgcttttctccactccatgggaagtgatcacctcagatgtcagcaccacagggtgctgggagaggagttggccccgtccataattcccatcagcaagctccccaataaatatgtctctaagccagaacagggagcttactaagcagaaacagctacaagacaagcctccaatcccctgccccaaatgccatctaccatccacattttatttttttcatccctaagtccctcccacatcgaaattctagaactgcccagatatatgctcaagttcacctggtaagaaagccaaagtagcactctgccactcagtcttccgaggatgtagtcatggtggtcagtatgtcatttccccaacacatctctggggcagaaaccagtttcccctgtacagttcagtggtggttctctatgtgcaagaatcaccagtgcttgtctaaattgtgatttaggtaaccataggagacatttggctctgtsttgcctctttgttttgttactttgccccgttccatttcttttctcagccagtccaaggataggcttgttaacagggagtgatattgaaagtattccaaaccac

SEQ ID NO: 539775 - DNA, 465 bp, Homo sapiens
ccaacccccttaatgtacccacccagcagtgtcrgcaagctggggacagacatgcagacaagctggtttgcatgaaattctgaaatcttttgaaaatagagacacataggcaacctcaggatggaatttttattctaaatgcctgatccatcttaattgccaaaagtgatactggcaaaggaaaatgaaaaatacaaaaaggcttggatttaggctatctgtgttttcaaatgatttaataacgatgataggcagggatttacaccaacagatcaaaagtgcaacaaacatttatggagccctgctaggtaccaggcaccgtggatatattgatgtgtaagacagtctcatggagcacacagtcaggactcccagagttattaccatccccctccacccacggtagcccccacttcctagaggacaaggaaccaagtgtcaactctctatccatcacaaccacct

SEQ ID NO: 539776 - DNA, 557 bp, Homo sapiens
aggtacttattaaatacctttcccaaagttaaaacatctccaacaaggagctgtctgaggcgccttcgaagttgtgtgtccctgagacacatgcataattaggttaaacatggagctggaagtaaaaaggcaccacacttacccagaacaagaaaaggtcagaacgctacccctctgtgagccctcacacaaaagctcgggaaatggaggctgtggttttcaggcaacggggcacgcgcttgggtgcggcaccccgaatcgttcccgctgcttgatcgtcacgctctgtgagctctttctaaggtacatttgctatattcattaaaggagagaacattggaagcgtttaaaataaaatgccttgtgattttcaaaatcatgaacatttccagcaggctgaagagaaagggctttcttggctgcaataagaaagaatgagaaaaagagaaaacctcctgaaaaaaaagtggcggggggtggtgatggggtccatgtgatgctgaggtttctgtttgttttgctgattttmagtaagcaggatttgtttctttttcacc

SEQ ID NO: 539777 - DNA, 591 bp, Homo sapiens
ctgccacactcagtcccccaccacactgagaatctcccctcctcacagtttccatgcagaccccctgaagagggaggggcccaggtatccctaccttgtcatgtgccatcaataaagtctcctgtactcagccaaaaatattaaataaataatggatagataaattcatatgtacwtaaaaaaataaataccagtaatattctggagacttccaaataggaatttcctttcaaagctgtatctctttaaagctgcatctctagctccttaaaaggcatctccgcttgggtagtgtatcaatcagagtccagttaggagataaaaaccacaccaataatttagataggaaactttgaatgtacagaattaactagcaaaagatgattaattactaaaatgaggaaaaagagggctgtagaggtagagaaatagtaaatgccgaaagctacaacctctagggctatataaccatgaaaaactgagtaactaagattttaaaagagatgccctttccacctctctctgagactgaagtccagatctcttgggagaagatggggctatcagacgaacatgcagtggtagaaaact

SEQ ID NO: 539778 - DNA, 591 bp, Homo sapiens
ctgccacactcagtcccccaccacactgagaatctcccctcctcacagtttccatgcagaccccctgaagagggaggggcccaggtatccctaccttgtcatgtgccatcaataaagtctcctgtactcagccaaaaatattaaataaataatggatagataaattcatatgtacttaaaaaaataaataccagtaatattctggagacttccaaataggaatttcctttcaaagctgtatctctttaaagctgcatctctagctccttaaaaggcatctccgcttgggtagtgtatcaatcagagtccagttaggagataaaaaccacaccaataatttagataggaaactttgaatgtacagaattaactagcaaaagatgattaattactraaatgaggaaaaagagggctgtagaggtagagaaatagtaaatgccgaaagctacaacctctagggctatataaccatgaaaaactgagtaactaagattttaaaagagatgccctttccacctctctctgagactgaagtccagatctcttgggagaagatggggctatcagacgaacatgcagtggtagaaaact

SEQ ID NO: 539779 - DNA, 523 bp, Homo sapiens
acttgccagaaggcccaaggctggagttggcctgagggtttctgaggtgaatgtccatggccttccacatgctgatttactggctgccatatccaaagaaaagccacactgaaataggaagggagggcccttctgctgttatggcsttacagtatccctccagggctctctgttgacaaaacccaacattgagccagctagcaaaggagaaatgtttacagggtctggccagtatctcagagcaagaagcgtggatttaggggctcagatgtgataaactgagaactggcacaagtggtccacttatacctccaattcaacttgctaaaaatgagcaagttgagcaactcattttcctctggttcttctcttactcaacggtatcaccatctccctagctgcaccaactggaaatctgtaaggcatcctagatacttcacttttgctcagatacatatggtcagtcaccagcagagcccggctacgaaaagtgtgcagagtcatgacagaggcattgtcattc

SEQ ID NO: 539780 - DNA, 678 bp, Homo sapiens
aagtctttgaaatctggtgtgagttttacccctacggcatgtctcaattcagaggagccasatttcaagtgttcagtagatacatgtggctggtgactatcaatttgaacagtacagttctacaactataaaataaaaaagtagggtgaaataatacataagtttccttttgctcaaaataatactcaattgtgaagctaatctaactttctaatagctcaccaacgttcatttattctttcatttatttatgcaagagtttgagattgagtgtttcataagtgtcaggcactgtattaagctccaagaaaaggcagacagcttcggaatggttctgtctccaaaagttcaccacctaacatcagaataacaatttataagcctgtaagaacataacagaataagaaagaaagtaacacaaagacacacacatgtgggattaggggacagggtgtatgcaacaaaaagaaaatggccagttccatctaagagagacaggacagcatcccagaggtggtgatgcttgagttcagttagtagagtggtgacagctttcaactcctgcagaggggacagcgtgatgaaaggcaggaaggcatgacacagcatggccccaccagggacctgcaggtcattctgactgaccaaactttaggatgctaggaaggaaagtcacag

SEQ ID NO: 539781 - DNA, 591 bp, Homo sapiens
gccttggaaagctttatgagcartaatactaagaagttcgtactttaccatgtaggctatagaaaggtttacctggtgagaggcagtggttggtatgatcagctttgcattttgaaaagatgatttggttgtaatgtggatcctgagttgaagggacagacacaggggacatagaagacaagttgagatttcattgtaaaatcctagacaagggatgatgaaggacaaaaccaggacagaaacaaaggaggatacaggcacagagcatggcaaaggcaacaagcagctatgcagtgagtggaggaaaagaggcagagaaccaggtttctgacccacataactggaaagataactgggcttctactggccatgacaggaaagacaggagaaggcccttcaaagagaaaaaaaagtctcttctagaaggttccagagagacccatcttttacagaatgcttctctatagcaagtctgcccctgggcaaagaaagtataatgggacctgatcagtttgtccttttaggaaaagctcagggaaagaaaagaaagatacttttttaaggtgctaaggtgagtttcgagccctacat

SEQ ID NO: 539782 - DNA, 615 bp, Homo sapiens
ataagtagcaaactgatgtttgaatctaagtttaaaacaatgtttcttctttaaattttttttttttttttgagacagagtcttgctcttgtcgcccaggrtggagtgcaggcgtgagccaccacacccggcccttctttaaatttttaaatgtaattaattgatactacaactagtcagtgaaagtttgataaggagcatcttatcataacacaattaattaccactaattaattacaaaagaaaaatagtaatgtgacagtgaaaacagttaatcaaagttaataccaccaataatggggcaagctgacatcattttctcctgctgtactgcaatgagatggtcataatagctcttatatagttttttgccaaaaatgcaaaatctgaatctaatcacaaggaaatatccaacaaagccaaattgagggacatgttacaaaattcaaaacatcacataatccaaaagacaaaattttaaactgtcaacatcatgaaagacaaagaaaaactaaggaattgttacagattgagaccaaagagacatgacaactaaatgtactgtgtgaacctagattggatcccagaccagagaatcttctttttctataaaga

SEQ ID NO: 539783 - DNA, 497 bp, Homo sapiens
tgctcctgggcaaatggccaaattaacgtgccagggatctgactgtgaccttgcctgtgtgtgtgtgtgtgtgtgtgtgtgtgtgtgtgtgtgtgtgtccaaactactggggttcctaagagatmgccacctagaaaacaaaagcaaagcaagcaaaaccataaataatcagtctggtctggtggctggaggggactaatgggcagtgatgtaagaaacccataattactgaatcatagctatatttatagttgtatcttctcaaatgctaaagattttacttaacgtattaattaaatgagaaaagtaggcagatgttataacctgttcaaaggcgtcaaagaagaagaaatttatgtggagtaaagaaatgtagaaatgattgtgcaaactggcttggggtggggcaggtgggttggcctccccctaacagaccattgtcatatatatagataagaattattttacattaattcttgtatcttgttatcaatata

SEQ ID NO: 539784 - DNA, 497 bp, Homo sapiens
tgctcctgggcaaatggccaaattaacgtgccagggatctgactgtgaccttgcctgtgtgtgtgtgtgtgtgtgtgtgtgtgtgtgtgtgtgtgtgtccaaactactggggttcctaagagatcgccacctagaaaacaaaagcaaagcaagcaaaaccataaataatcagtctggtctggtggctggaggggactaatgggcagtgatgtaagaaacccataattactgaatcatagctatatttatagttgtatcttctcaaatgctaaagattttacttaacgtattaattaaatgagaaaagtaggcagatgttataacctgttcaaaggcgtcaaagaagaagaaatttatgtggagtaaasaaatgtagaaatgattgtgcaaactggcttggggtggggcaggtgggttggcctccccctaacagaccattgtcatatatatagataagaattattttacattaattcttgtatcttgttatcaatata

SEQ ID NO: 539785 - DNA, 578 bp, Homo sapiens
atggaagcacaaatttctccctaaaatgtaaaagtctggaagaatacataacaaagtctttgccctgtacaaaggtggggggtgcggccgggagcagtggctcatgcaggcaatcctagcactattaggagtctgaggtgagtggattgcttttagttcatgagttcgagaccagcctgggcaacatggcaaaaccccttctttacaaaaaatattagccacgcatggtggcatgcacctcccagctactcgggaggctaaggcaggaggatcacttgcacccggaggtcaagactacagtgagccatgatcacaccactgcactctagcctgggtgacaaagtaagaccctgccacaaaaaaaaaraaaaaagaaggttggggatatatctatgtgttttcctttaaacacttatgtaaagttaagtgcttttacaagaatgtattcattgcaaaatttgctctaaaagaaagaaaccacatttaaaagttgacgtgagttgagtgccatatagtctaaaagatgagcagagctctgtagtcagtggctgggtttgcatcccagattcaccctttac

SEQ ID NO: 539786 - DNA, 640 bp, Homo sapiens
gatagaaaagataagtagaacatggtttaagaaacacaacccacattgctcattcatttatgtgccaactacaaatacctttgtgttatagtagcagagtagagtaattgcaagagactatatggaccacaagcctgaaatatttactatctggactttgaacaaaaagtttgctgttgcctattgaagataatgacgttttgcttctttattatatccacatacctgcagattcagaataagcttgtcaggggccctagcaaagcaatttaaataataaataccaagctgatagtgacatttctcttctctgacaatcccccaagcctggcttcaccactgcatgcttctaattgatgacctctcacttaaatgaacagagcttagaagatatatattagtaaactacataaaatgaagaaccagtagtggaacttcattctaaatgggatattttgacatataatgtctaaggggatcaactgtgtctactctacaactgataaatgaaagaaaatacacaaatacatctaataactctaacaaaaaygtcagtatttaaaaaaactttcaaaaaacattagtaatatctttaaatacttatcaagagaaatcccattatcaaatatttcttggaaca

SEQ ID NO: 539787 - DNA, 611 bp, Homo sapiens
ctggaaattataattctggtaggttaaggcccattgatactaaacrcaaataatttatgttattccaagaaattgcagaatagtaaaagcctattaactcctgatatataacttgattatatatcattgacaatatttgtaaattaaccaataatgaaattattgagctgaatgaaaaataaagtattcaatatttaattaatgacttagagagaaggaaaataaagtgatctataaaagttagagaaaaaataaattgattcataaatgtgtttcaagagtggagatacagaaagtgagctgtcatgcctaatagtacaagcatactacatttttactggaagatagtacaagcaattaatgtcaagctccttgaatcggcaaactgcaacagctagtaaaattccactacagttaaattggagactctgagaataaatttcaaattatgcatattcagaaatcctaacttatgcttatgacactatatttattatatcaattataatgtgtgcataatacgctgcacaatcaacaccataagtgacagtctccagtctactgtcttctcctgtaatcataagcttatacataaaaacttaagaatatta

SEQ ID NO: 539788 - DNA, 575 bp, Homo sapiens
agcacccgaaaagctttcttgaaattaggcatatgartacattggttaaaactcgttttatcctaaaataatatatatcctatagtagataaacttctaatttacttttcaactttcctgtataagtgtgtatattccatcactgagtcagtaaaacttgtttgatgttttacatgatagacaactttctattttaaataataagtaattgttggcaatatcctcaatttatgacataagctaaaagtatgttttattctataaaaaatttcacatatgatacatttaattttcaaaattacaaaatatatatgtaaactttgttcacaaaattattacaaatgctgttttctggtataccataataaatggaatttttaatttttattagtaaatgaattcaaatgttaagaatgctacatatacgattttaaaaagagaaattggaaactaaatatctaaaattttgatgagtttactttaaacaaattgtataatcataattgagagtaaacattcatataatttcaaaactaaggaacatacaccattaaactaggagatcagcttgaacg

SEQ ID NO: 539789 - DNA, 575 bp, Homo sapiens
agcacccgaaaagctttcttgaaattaggcatatgaatacattggttaaaactcgttttatcctaaaataatatatatcctatagtagataaacttctaatttacttttcaacttkcctgtataagtgtgtatattccatcactgagtcagtaaaacttgtttgatgttttacatgatagacaactttctattttaaataataagtaattgttggcaatatcctcaatttatgacataagctaaaagtatgttttattctataaaaaatttcacatatgatacatttaattttcaaaattacaaaatatatatgtaaactttgttcacaaaattattacaaatgctgttttctggtataccataataaatggaatttttaatttttattagtaaatgaattcaaatgttaagaatgctacatatacgattttaaaaagagaaattggaaactaaatatctaaaattttgatgagtttactttaaacaaattgtataatcataattgagagtaaacattcatataatttcaaaactaaggaacatacaccattaaactaggagatcagcttgaacg

SEQ ID NO: 539790 - DNA, 588 bp, Homo sapiens
acagctttctgagtaatgtagtcagctcaacatcaaaagtaggggttgtaggcactcatattgcctttccatgatggcagtctctccagttttcttcccaaataggactcaagatgttcttttgtctccactattctgttgtctacatttaggatctctrtattgctcaactggattattgcaataagctccaactatgtatctatctatatgtaaatctatatatctatctgcctctactgtttgtttgcataatttattatttgcataaccaccatagttagcttcttaaaacatatagtgttgttctgttgcacatgtctttcaacagcctccaatttcctgtagataggatgtccaggcttctgagccaggcaaactagatgcatcaaatgttatttcagttggcctttctaatagtctttgtttattgtatttattttatccttcctctacagttttcctgaatttcttagaatgtgtcattttatccctcaaaggttaattttcaggtggccatgaaaactagagtgacttgagatgcttctctagattgctcttttctctcctgcactgagttttcaagat

SEQ ID NO: 539791 - DNA, 588 bp, Homo sapiens
acagctttctgagtaatgtagtcagctcaacatcaaaagtaggggttgtaggcactcatattgcctttccatgatggcagtctctccagttttcttcccaaataggactcaagatgttcttttgtctccactattctgttgtctacatttaggatctctatattgctcaactggattattgcaataagctccaactatgtatctatctatatgtaaatctatatatctatctgcctctactgtttgtttgcataatttattatttgcataaccaccatagttagcttcttaaaacatatagtgttgttctgttgcacatgtctttcaacagcctccaatttcctgtagataggatgtccaggcttctgagccaggcaaactagatgcatcaaatgttatttcagttggcctttctaatagtctttgtttattgtatttattttatccttcctctacagttttcytgaatttcttagaatgtgtcattttatccctcaaaggttaattttcaggtggccatgaaaactagagtgacttgagatgcttctctagattgctcttttctctcctgcactgagttttcaagat

SEQ ID NO: 539792 - DNA, 588 bp, Homo sapiens
acagctttctgagtaatgtagtcagctcaacatcaaaagtaggggttgtaggcactcatattgcctttccatgatggcagtctctccagttttcttcccaaataggactcaagatgttcttttgtctccactattctgttgtctacatttaggatctctatattgctcaactggattattgcaataagctccaactatgtatctatctatatgtaaatctatatatctatctgcctctactgtttgtttgcataatttattatttgcataaccaccatagttagcttcttaaaacatatagtgttgttctgttgcacatgtctttcaacagcctccaatttcctgtagataggatgtccaggcttctgagccaggcaaactagatgcatcaaatgttatttcagttggcctttctaatagtctttgtttattgtatttattttatccttcctctacagttttcctgaatttcttagaatgtgtcattttatccctcaaaggktaattttcaggtggccatgaaaactagagtgacttgagatgcttctctagattgctcttttctctcctgcactgagttttcaagat

SEQ ID NO: 539793 - DNA, 598 bp, Homo sapiens
tgaagaaaaagaaaacacctggtccagcaaacttccaccaacactttcttccaaatatcctgaagatgacccagactactgtgtgtgggtcccacctgaaggtcaaagtggagatggcagaacccatcttaatgacaagtatggctattgattgcttcagaatcccaaaagaaaaccttgtggaccatgtgacatggaatatttgggataatgtatcaaattgaatggccagagaagtttagatgatcatttgtaagatctggtgacaggcttttygttctgtgttcttggcttcctgaatttatctgcccatatgattctcatgcatttgatatttatgtttaaaagtgtttatatatgtatgtaaaaagggaaccatatgttttgagaatttgtaaagtgagagacatgatcctattaaaaaggcaaaaaaaaaaaaaagacaatcttattttctgaggagaaatacaagccagttgcagaaatttggataagtaatgaggagccaaatgttaatccccaagacaatggggaaaatgtctccagggcatgtcaaagatctttgtggcagcccctcgaagcctacggacttggtgcc

SEQ ID NO: 539794 - DNA, 577 bp, Homo sapiens
tctcctagaatgttcaaaaacttgagggtcctcccagtttcttattctcagatgccatttctcaaagtgatagtgaactatttcctacttttaactgggttttctctgaaatacgtggttagtgtgaagtacagaaactcaatatgttctggtataaatgtaattgccatatgtgcattttaagtcagtggataataaatatgagaagagctgctaaaaaaaattatttccaaagtcctactagaactctctcagggccactaaactaaggttgaaaagtgatcattcagcatgctcaccaatattggggcagctaccttttctccctgaagagcagctaagcttttctcctttagcascttcaagttgcctctattgccttctactatcaggcctcttgctgaactatttttaaattcaaaatacatcctttctcagttgctaaagccctggagaacattgccacaacaagaacacattttttacgtgcattaagaataaaggagcttgtcatctaaacagtgtgaactaggaccaaaataccttaggttcctgtggcaaataagtgcgtacccac

SEQ ID NO: 539795 - DNA, 588 bp, Homo sapiens
cttgggcctcttttggtaagagtactaatctcatccatgagggttttgtcctcatgacttagtcacctcccacaaaaacctatcttttagtactattacattggagactgggtttcaatgcacaaattatgggaggaaaccaacttcagacaatggtgataatgggcacgcatatatatttatgggcatatatatgtatatttaattttacttaatattttgtgcatgtttattttatttaggattgtttgcaagttatctagttagccatactactataacaaatatgtttaaatttaattttcataatttgataggtattattgtctatagaaatttaaaaatggaaattgactaaatcatacattattttattaaaatgttaaatatttgttagtaattatttgagtatacagtttacttaccgtttatatgcttaaccaccacattatggtagcttgaataaattaactcctgaataaaaattataagtgctgggataaaggagaaaaaagttttctccctcatgtgacawttgagagtagtttaattcaatttaacccttgcctttgagtagcaaatgcaaac

SEQ ID NO: 539796 - DNA, 535 bp, Homo sapiens
aattagcagcaaggtgggatttggttaggtctatatgtccaatttacattaagtctaggagtagaaaccaaatatcagagactcatgcaaccatatgtcaaattccccagctttctgagctccttatttaacaatccaggtaatgacaactcaartgtccataattccatacatttctgagggtgcttcaagttcttagacatctctctgtctgaaagaggcatattcctcaagctcacactgctgttatcatcccctcaggtagccatcctgctccaatcccctcagctcactttaataagcttctcctggccagtattgtctgcccaaatttttctcataagtgttaacagaggcccctcccttaactcacaaagcagagctaaagccaagctatagcatttaacagaacttactgaaaacttgaggttatgaaggagaattataatggaaaaaaaaagattataatctcatagagtagccatcactgctccaaagaaggcaatggtcaagagcactggcttaagaagtggac

SEQ ID NO: 539797 - DNA, 535 bp, Homo sapiens
aattagcagcaaggtgggatttggttaggtctatatgtccaatttacattaagtctaggagtagaaaccaaatatcagagactcatgcaaccatatgtcaaattccccagctttctgagctccttatttaacaatccaggtaatgacaactcaaatktccataattccatacatttctgagggtgcttcaagttcttagacatctctctgtctgaaagaggcatattcctcaagctcacactgctgttatcatcccctcaggtagccatcctgctccaatcccctcagctcactttaataagcttctcctggccagtattgtctgcccaaatttttctcataagtgttaacagaggcccctcccttaactcacaaagcagagctaaagccaagctatagcatttaacagaacttactgaaaacttgaggttatgaaggagaattataatggaaaaaaaaagattataatctcatagagtagccatcactgctccaaagaaggcaatggtcaagagcactggcttaagaagtggac

SEQ ID NO: 539798 - DNA, 535 bp, Homo sapiens
aattagcagcaaggtgggatttggttaggtctatatgtccaatttacattaagtctaggagtagaaaccaaatatcagagactcatgcaaccatatgtcaaattccccagctttctgagctccttatttaacaatccaggtaatgacaactcaaatgtccataattccatacatttctgagggtgcttcaagttcttagacatctctctgtctgaaagaggcatattcctcaagctcacactgctgttatcatcccctcaggtagccatcctgctccaatcccctcagctcactttaataagcttctcctggccagtattgtctgcccaaatttttctcataagtgttaacagaggcccctcccttaactcacaaagcagagctaaagccaagctatagcatttaacagaacttactgaaaacttgaggttatgaaggagaaktataatggaaaaaaaaagattataatctcatagagtagccatcactgctccaaagaaggcaatggtcaagagcactggcttaagaagtggac

SEQ ID NO: 539799 - DNA, 478 bp, Homo sapiens
cttagtatgtagtaagtccccagaaaatatttgatgaattaactaattaattaattcaaatatctatatggaagttggagctgatgttgagagactgaaaaagaatggatggctacaagtcttacaaggaggaatacctcagaggcctggaacacrgagggtagggaggattaatactaggacaaggaataaaaaggaagaagctgtcttgggttaatgcttggtcttcaactccagggattcttatttgacctttgtgtatcttcctttaggactagggttcataattttgtcttatgcaaagacaaagttaagaacctcttttggcagcctgatggagcctatgaacccttctcaaagcaatgtttttaaatgcataaaatacatagaattgcaggaaattaattactctaaaataaaattatcagaatattttatattttgtgatataatgtacatatttattaaaatgtagcag

SEQ ID NO: 539800 - DNA, 409 bp, Homo sapiens
tgctaaggccatatacaagctacttcctaggcccaktgaatctgaagcgggtacagtgggagaataagcctgggccagccaaagctgtgctaagggccactccgatccggcctttggaggagccctgtcttagagctgctcagagcctttgtgaatgagatgctgaggagcatctggaattccccagcacccctgagtgtggaccttggctggttgctctcaacctggctacagtaaagaaaggaaaaaaaaatgattttaaaagaaaatacccatgatatatgcaacaacacagatggatctcaaaaataattatgtcaagtaaaaaaaaaggcagatttttttaatgagtacatactcatgattacattaaggtaaaactcgagaaaatgcaaattaacctatagtg

SEQ ID NO: 539801 - DNA, 409 bp, Homo sapiens
tgctaaggccatatacaagctacttcctaggcccattgaatctgaagcgggtacagtgggagaataagcctgggccagccaaagctgtgctaagggccactccgatccggcctttggaggagcyctgtcttagagctgctcagagcctttgtgaatgagatgctgaggagcatctggaattccccagcacccctgagtgtggaccttggctggttgctctcaacctggctacagtaaagaaaggaaaaaaaaatgattttaaaagaaaatacccatgatatatgcaacaacacagatggatctcaaaaataattatgtcaagtaaaaaaaaaggcagatttttttaatgagtacatactcatgattacattaaggtaaaactcgagaaaatgcaaattaacctatagtg

SEQ ID NO: 539802 - DNA, 465 bp, Homo sapiens
tgctaaggccatatacaagctacttcctaggcccattgaatctgaagcgggtacagtgggagaataagcctgggccagccaaagctgtgctaagggccactccgatccggcctttggaggagccctgtcttagagctgctcagagcctttgtgaatgagatgctgaggagcatctggaattccccagcacccctgagtgtggaccttggctggttgctctcaacctggctacagtaaaraaaggaaaaaaaaatgattttaaaagaaaatacccatgatatatgcaacaacacagatggatctcaaaaataattatgtcaagtaaaaaaaaaggcagatttttttaatgagtacatactcatgattacattaaggtaaaactcgagaaaatgcaaattaacctatagtgtcagagagcagatcactggttgctggggggtgtgaggtcagaggaaaggattacaa

SEQ ID NO: 539803 - DNA, 528 bp, Homo sapiens
catgctggggctgagtaaccacacccttcccggctgcaacttgtrctaagaatggacaatagctgtctaaatcccacaagcccccaaagaggctgacagatattgcagccatgattgcaacaggaagtagagaagggtggtgggtgggcagaatattaacagaaccagcccttgccaactgggcaacgtcacagactgtgccatggcaaggcatgcatctgtttctgtgcactctttttaagatttttctccagctctatgcccctgtcatttccacagccatgtctcccgaccccagtggcctgaactcttctaatggtttgctcttcgaatggcttgtctttcttaccacaaaagaaagcgatttgatcttctcattggagaataaaatatgagacaatgggccccctcctaggattcgtcttggaaaaaggctttgacaatactaacacaaaagagcacatccatatgtgccaagtttctctgcatcactgtggcataagcagtgacagaacctctaatttttaa

SEQ ID NO: 539804 - DNA, 581 bp, Homo sapiens
tcccttcttgctagccttagtctataaaagacttggctgcttcatttgtaaaatgaagrtgatactaataggacctacctcattacgttgtaagaaaggtaatataaagcagaaaacaggggaggagggaaggtaatccacattaaatacttggcgtggtgtctggcttccagtaagtgtctgataaatgcagttatcagtgtggcttctaagatgatgacagtaggtttaaatggaacaagaactcttagagaagccagggctcaatcatactggtcttttcattattgcacttatttatgtgggcagtgtccttggtggtatcactgtaaggaaagttatagcaacgacttttagaactaagaagttaaattccacagtgggacgtgtcatgctatgtaactggacaggaggcccatcaggtatgcaggatgcatttcagtaatgtcttagtaaaatgagtgtgccttctgctgggatgattgggtgcaatgacatgtgcatgatacatatgaaagactgaatgttatcatttattcatcaaaaaacatgctgttagctagccagaatacagatactgc

SEQ ID NO: 539805 - DNA, 571 bp, Homo sapiens
atgagaaaggcaggaccacaagaacctctgccaattgacctgcatggaaaacaaagttgggcactgggagagctgaagaagcagagaaagtcagggttggttagaaggaagaagcagcatttagagttcagttgagtcatttcagtgggtaaatgctagaagagccagaaccaagctctctggaccctggcccagcaccatcccaggacagtcctcgtgaggacagcatttacagtaccttgtcctagagatcagggatggatggccccctggccttattgcttcataggtatccatttcacttgtgttagattttgagggaggggggttatctctgttttttgcaagtacaagagatttttctaaaacacttacttggcatcagtgttagaggggcgttggctcaaaaaagccatgaaggcgtagctttgtgataacagtagttggcaagatgataatgtccagatcatacacaaayattagctccactgaactctgatctcctcagaaccagagtacctgctttaaagggacatgagccaatgagaaatcatgcagatgaaggcagcaa

SEQ ID NO: 539806 - DNA, 495 bp, Homo sapiens
aaaattgttctcttcctcctgagcctttaaactgaactgaataatttctttctcctttctgcagagaaacactgggtttccatacgcattgactgaaaagttgtcttagttccccatggtccacaccctcttccacgcccagccacacactccacctgccggggcacccctccctttggagaaccacacatgttcggctttcaacctgctgctacagcacccttcacagaaggggccttggaacaaaagcccagctcagcacagcccaacgggacataaagtacttgagttattcattacttgagttggaggaggtcacagagcaggaagcgcactggaaagcaaggggaaaggtggcagagagggtggggaatgcgtcagggtgaccttctaggggctgatgggaactcagagtcctggtatggggtgggtatcagagtgggaaggtgacaaagtcrtagcaacagccccaaggttagccaaggtcaaatggaa

SEQ ID NO: 539807 - DNA, 616 bp, Homo sapiens
ataattaagctagctacttagctcttgccatgcctcaggcactgtgcttaacactttcccatatcgctccttttatccttgcaataatgtatcacttcaattttatgactgagggaacagccctggagagaacaagtgacttgcccaaggtcacccagctagcatgcatgttctgaagctgggaaggtgaatgtaggtctttaccagcttgttctgtgtgatgaartggttagatgagtggtacaattccagatggtctagagtggcggggcaagtggagtctgagatgagctactgagataaatctggttcctatagggctgagatcatgttttccagcagcaatcccaggactgggtggaaacctggaggttttcaggaagcctggaggaggctggcttaggatgagctgctgcattggctgtgcagacgtgaccctcaggacttcatctgaacctgtgaagagtttccatgcagggaaggggggatgagtagagctagggacctaaaatttgagaggggaagatattccccagtggaagacagtaaatcaaagactagagaccaagcatcagtctactgggtgtttgctacacctctgaagagctaaggtagg

SEQ ID NO: 539808 - DNA, 616 bp, Homo sapiens
ataattaagctagctacttagctcttgccatgcctcaggcactgtgcttaacactttcccatatcgctccttttatccttgcaataatgtatcacttcaattttatgactgagggaacagccctggagagaacaagtgacttgcccaaggtcacccagctagcatgcatgttctgaagctgggaaggtgaatgtaggtctttaccagcttgttctgtgtgatgaagtggttagatgrgtggtacaattccagatggtctagagtggcggggcaagtggagtctgagatgagctactgagataaatctggttcctatagggctgagatcatgttttccagcagcaatcccaggactgggtggaaacctggaggttttcaggaagcctggaggaggctggcttaggatgagctgctgcattggctgtgcagacgtgaccctcaggacttcatctgaacctgtgaagagtttccatgcagggaaggggggatgagtagagctagggacctaaaatttgagaggggaagatattccccagtggaagacagtaaatcaaagactagagaccaagcatcagtctactgggtgtttgctacacctctgaagagctaaggtagg

SEQ ID NO: 539809 - DNA, 616 bp, Homo sapiens
ataattaagctagctacttagctcttgccatgcctcaggcactgtgcttaacactttcccatatcgctccttttatccttgcaataatgtatcacttcaattttatgactgagggaacagccctggagagaacaagtgacttgcccaaggtcacccagctagcatgcatgttctgaagctgggaaggtgaatgtaggtctttaccagcttgttctgtgtgatgaagtggttagatgagtggtacaattccagatggtctagagyggcggggcaagtggagtctgagatgagctactgagataaatctggttcctatagggctgagatcatgttttccagcagcaatcccaggactgggtggaaacctggaggttttcaggaagcctggaggaggctggcttaggatgagctgctgcattggctgtgcagacgtgaccctcaggacttcatctgaacctgtgaagagtttccatgcagggaaggggggatgagtagagctagggacctaaaatttgagaggggaagatattccccagtggaagacagtaaatcaaagactagagaccaagcatcagtctactgggtgtttgctacacctctgaagagctaaggtagg

SEQ ID NO: 539810 - DNA, 616 bp, Homo sapiens
ataattaagctagctacttagctcttgccatgcctcaggcactgtgcttaacactttcccatatcgctccttttatccttgcaataatgtatcacttcaattttatgactgagggaacagccctggagagaacaagtgacttgcccaaggtcacccagctagcatgcatgttctgaagctgggaaggtgaatgtaggtctttaccagcttgttctgtgtgatgaagtggttagatgagtggtacaattccagatggtctagagtggcrgggcaagtggagtctgagatgagctactgagataaatctggttcctatagggctgagatcatgttttccagcagcaatcccaggactgggtggaaacctggaggttttcaggaagcctggaggaggctggcttaggatgagctgctgcattggctgtgcagacgtgaccctcaggacttcatctgaacctgtgaagagtttccatgcagggaaggggggatgagtagagctagggacctaaaatttgagaggggaagatattccccagtggaagacagtaaatcaaagactagagaccaagcatcagtctactgggtgtttgctacacctctgaagagctaaggtagg

SEQ ID NO: 539811 - DNA, 628 bp, Homo sapiens
ccagattggctgtagagacagtccggggattcagttttctaagactttgtaaagggagcagattctgagtgtcggagggtgtgaatgtgaccctgcctgcaggcagggagatttattccttgctaatctcagagcctgagtctgggagctggaggcagaaggtgagtcaaaggtggctagtttccagaaagtgcaaaggcgccttttttctgtgcctctccccttactttgctaggtaagttgataccaacccacagatgtaaaacaaaaataaacaaacaaaatccagaaatatcttaggtcctacagagtggcacttaaaggagaaatttctatctcatatatgtgcgtatgcatacatatgtgtgtgtttatgtgtacatacacgtgtgagtatgtatgaattcatacctctgtgtatttttttttaaattggaaattacttttcaactcggaatgtataggagacacatgatttgtgcatggctacatttaaaagcatttctttgcttcctgtgcccttctcagtcatatgggtaccttcctggaggtttccatgggaaatgattcctatttagagatttgatctagtgattyatcagatgtattaaatgacaggtgcaagcag

SEQ ID NO: 539812 - DNA, 620 bp, Homo sapiens
ctgaaatttcctttcgtcctaatgatcccaagagctatgaggcatatgtactgaacatagttaggttcctggaaaagtacaaagattcagcccagagggatgacatgatttttgaagattgtggcggtaagtagactcattgtagatgtctgtggctagttttctttctctttaactcttatttcccacttctattttttgtttaatgatcgagagataatcctgaaataatgaaagattgaactctggccatatttagacactttttttaaaaaaagcaggaagacacaatgaaaaacagtacagcytcaagtatgactgttttctgcattggaaaggtgtcttactttaaaacactcctaggtactattttttactattcagagccaagacagcaattccggttttctttctcttacatccgttgaaaagtacagctacttatttccttatcttcccccaaaaagttctccctatagaagagtgcacagggccttctctcatcagaaagaccttttggtgtgattagctatcactgcactggcattcatgaaggaggatgtatggtcagggtatacttttattgatcctggttgggatagataatgaaatatgtgtta

SEQ ID NO: 539813 - DNA, 398 bp, Homo sapiens
tgctagccatgctgttggctttttgtattactgcaacttataatggataaacattactctggatcactgaaaaatgagcaaattgccattgctcaccatttggtgagattatattctccataagaatggaaaatttatcgttgttgtctgcttttgtaaagctggtcatttcatcctctcctccagatcatgaattaatgctgtcctttccccttaagcctggcttcttctggcaggtttccccctaatcacccgtatatgagcrttggcattacgagtgttgtttctaattttgatagaaattgactgcagtatattgagttatgtgaacaaactcatttcatttctgaaatctggcacttttgttcattaattttctattgaatgctattaattta

SEQ ID NO: 539814 - DNA, 398 bp, Homo sapiens
tgctagccatgctgttggctttttgtattactgcaacttataatggataaacattactctggatcactgaaaaatgagcaaattgccattgctcaccatttggtgagattatattctccataagaatggaaaatttatcgttgttgtctgcttttgtaaagctggtcatttcatcctctcctccagatcatgaattaatgctgtcctttccccttaagcctggcttcttctggcaggtttccccctaatcacccgtatatgagcgttggcattaygagtgttgtttctaattttgatagaaattgactgcagtatattgagttatgtgaacaaactcatttcatttctgaaatctggcacttttgttcattaattttctattgaatgctattaattta

SEQ ID NO: 539815 - DNA, 595 bp, Homo sapiens
gtccctccagcctggactgttcttttttaagatcttcacaaagctagattcttcttatcattcaggtttcaacttaagtagtacttgataccatatcacctgctttgtttttaccatagaactcatcactaccctgtcttttatcttttgatttaccagttcatttttccctctctccactagaatgtaagctcctcttgagagctcaataaatgtaattgttggaaacatgagtaaatgatgaatgaatgaatgaatgaatraatgaataaatgagtgagtgttacatgtagaaattaaaaacaaggcagcaaaatgttaaccgtggttatagatgttttattctttatgcttatctaaattttttaaatttcttgacataaaaatatatgcttttgtaatcagaaaaagatctgaaaaaacctatatttttaaagcatggctgaacccacacaacagttgggagaacatagtgaaaaatatcaagaaccaaacttaaatatagttttggagaaaaggaataatgcagaatattgtttacagggtatgtctggtttttatttatgtttttggatggagatggtctcattttggc

SEQ ID NO: 539816 - DNA, 629 bp, Homo sapiens
ttgttaaaaaatgtcattcatttggataattctttttctcaagtcctcctctacatttgatggcccccaagtaattgtcatgagcatctcttctactatcaaaatgtcactacaatggatgataaattggataaaaacctacccttggcataaagggaagrtaaataaacagaatagaatatagacatatctctcaccattaacacccatatctgttttgtgctgatttggagcatactaagccagagttgtccgcactaatctaaagggcaaggcaaagaaaaatgcagtgacgccagacacattgggaactataatgtttgctggaatatgtccttcaatgaaggagtccttggtcaaattctcagttcctgactcatcagcttattcccttaatagcttggagccaatgattctttctggagcatgcgaaatctgtctatggaggtcagtgcaaatggaagcatatgaggaaatatactcccatgccttaatttttattttttctggctgaacatttgttcttgtcttagaatcaggagagctaatatcacaggaagtaaaagctatttcctagactggtgtgttgcccaataccacatcctgaagtgctgagaagagaaagaaca

SEQ ID NO: 539817 - DNA, 629 bp, Homo sapiens
ttgttaaaaaatgtcattcatttggataattctttttctcaagtcctcctctacatttgatggcccccaagtaattgtcatgagcatctcttctactatcaaaatgtcactacaatggatgataaattggataaaaacctacccttggcataaagggaaggtaaataaacagaatagaatatagacatatctctcaycattaacacccatatctgttttgtgctgatttggagcatactaagccagagttgtccgcactaatctaaagggcaaggcaaagaaaaatgcagtgacgccagacacattgggaactataatgtttgctggaatatgtccttcaatgaaggagtccttggtcaaattctcagttcctgactcatcagcttattcccttaatagcttggagccaatgattctttctggagcatgcgaaatctgtctatggaggtcagtgcaaatggaagcatatgaggaaatatactcccatgccttaatttttattttttctggctgaacatttgttcttgtcttagaatcaggagagctaatatcacaggaagtaaaagctatttcctagactggtgtgttgcccaataccacatcctgaagtgctgagaagagaaagaaca

SEQ ID NO: 539818 - DNA, 292 bp, Homo sapiens
gcaatttcctttcctttaataaggggttggaaagcatctgattatatcaggaagaggtatgtcagttttcaaggtgaaagaacacttgcttcttttatagataatgaaagaaataagatacattactgaaagacggagggcacagccattaaaaatagccaggaagggtgggacatagtctgttacaggttatctcaatgtaaattagcagagtagggtaacaataccagttttctcttttaccacttagttyagcttttaagatagttttatttttaacattttctatgct

SEQ ID NO: 539819 - DNA, 635 bp, Homo sapiens
atggtggctggaagccagagaagcaatttcctttcctttaataaggggttggaaagcatctgattatatcaggaagaggtatgtcagttttcaaggtgaaagaacacttgcttcttttatagataatgaaagaaataagatacattactgaaagacggagggcacagccattaaaaatagccaggaagggtgggacatagtctgttacaggttatctcaatgtaaattagcagagtagggtaacaataccagttttctcttttaccacttagttcagcttttaagatagttttatttttaacattttctatgctaaaacaactaatagtacaatatttgtcacttagaaggtcttaaattttatttccctatctcagacaaatattaaatgtttataataggatttrcaatatgaatataacttatatttaacttattttaccccgtactttagaattttgtttaatagagaacatcaaggcttctagaactagcagacataagaataatagctagtgaaattacctttaattgttgtgaatctaagataaaagaacatacatgaaatatgtccaaactttataggatattcaaataatatttattgtgtacccttttccacatatcctgtacag

SEQ ID NO: 539820 - DNA, 635 bp, Homo sapiens
atggtggctggaagccagagaagcaatttcctttcctttaataaggggttggaaagcatctgattatatcaggaagaggtatgtcagttttcaaggtgaaagaacacttgcttcttttatagataatgaaagaaataagatacattactgaaagacggagggcacagccattaaaaatagccaggaagggtgggacatagtctgttacaggttatctcaatgtaaattagcagagtagggtaacaataccagttttctcttttaccacttagttcagcttttaagatagttttatttttaacattttctatgctaaaacaactaatagtacaatatttgtcacttagaaggtcttaaattttatttccctatctcagacaaatattaaatgtttataataggatttacaatatgaakataacttatatttaacttattttaccccgtactttagaattttgtttaatagagaacatcaaggcttctagaactagcagacataagaataatagctagtgaaattacctttaattgttgtgaatctaagataaaagaacatacatgaaatatgtccaaactttataggatattcaaataatatttattgtgtacccttttccacatatcctgtacag

SEQ ID NO: 539821 - DNA, 481 bp, Homo sapiens
agtctgggacctggaagctttacaaaagatattgggtaataaagacttggagacttacatgtttaacttccttatccagagtgatctgatgggcatatttattatgatgatggtaaagatattaagttcaaattcaacccccatctgagaggactggaagactgtttaagttgtcagggtagcctgacaatgaaccagggctgcatacaaaccattagtgaaaactgcaaagatacatgtaacacacaggcaaatatacaaagagaaccttgtatggagtgtaaaagaagcatacgcctacaaactgctggaggctttgaaagcaatttaccgagaaagctttttacagtggcccactttggagccatcgataattaactaaacaaatatttcagagtgtatccaactrgtttcagccaatttccttagggagttgtgatactttaaattccatataatgatactgttggatcagtgtctt

SEQ ID NO: 539822 - DNA, 504 bp, Homo sapiens
gcccagtagtttctcacttgaagaaaattaatcagtcctatagcaaagagaagtttgaggataggatcttcggggccatgtttttcagatggtctcaagggagccacaattgagatagaagtgagacatttagaaaagaactttggatatggcaattattatacagaactgaacagaaagcaaaagaatagaaacctaatacacacttgatggaagaacatgaacagggacaaaaccaaaaagaacctttcactgcataagtgaagtgaaataatctttagttaaaataatcttgagtgcccccctaatgtcttctcaggaatatttaataattgctgtgaattagtaactgytctttttttcttcttaatttttgcaaatagtgttcccctccccccctcccccccgccccatgctgttgtcttgtctgtggagcaagaaataattggcttttttagttcatagatcactgaacccacagaaacctcattccagatctgatgg

SEQ ID NO: 539823 - DNA, 506 bp, Homo sapiens
aagcttgggtagctgaatgacctattcttgactttacaaccacagaagggcagagttgaggcttgaacctgtgactctggactcatggggatcactctggcctcttccctaggctgcctgtctaggggagatgtggcaaattacagagatgacataatggaaagcaaatctgggttgggtattggaagggaccttgcgcaatgaagggatgaagactggaatgttccaagctagccaccattttggaccttgcctgcattggttagacatgcttattcctttactctcccctgaagatatgtaccacccttgccctcatcgcagccccccaccccccttaacccctcctcacttctaccttgatgggttcccccggmcccacaaggaagccttttctttctcaattttgagaacattggagattaacaccagggccctttctctgtttcccaaaattgctgggtgtgcaaattcttcaaattctaccttatcctctggtttggacc

SEQ ID NO: 539824 - DNA, 491 bp, Homo sapiens
taggatcatgacagctgcagtgttgaaaaaaacagtagtgtggcaagaatgaaagcaggagcctaattcagaggcwgtcgcctaatccagatgagagaggacggcagcttggataaggatgggagtagtggacatggttggattctggggatatttaggagatagagatatttaggagatagagatagaatttcctgttgtattaatgtggactgtgagaacagagagaacagagagggagtcaagggtgactcccaggtttatggcctgtgccataaccctgatgggttaccatcgcctgagatgggcaagacacctgagtataaaacctttcagtgtccctgacagattttgcatgagtgtgacgtgaccaggagaccaaaggagaggccctgaagatcacaggggtgtctaagggagtggtgtcttggccttgtggcttccactacagggtctaaggtttggaatttcattatgggaaatgtttattt

SEQ ID NO: 539825 - DNA, 602 bp, Homo sapiens
gtttcccttgctgacagcacatcctttgtgaggccctggcgtttcctcctccttcctaagcacttcccctgagactttccacggatggcagtggggcagcaatgagcagagcagatgctcagcccttctctttgttagtggaggtgactgtcccagtgtttatgacacccatggaagttggcaagaatatgaaatttggaatgtaagaattttaggctggatgatgtctttgggatagttttacccaaatgaaccttgttttgccagaggcaaacttggaagtcaaacaataaagctaccagytaaagaggcactttatgaggataagatggtaaatctgagattaggacacagatcttccaccatttagaccagcattgtctgctcttctaggtcattttgggagtcagcaagacaggagcaggcagggattctgccccataaaggaagtatggggaaaggcttccccctgcatgtaggattaaatccatgtgagctggtctctgctcacctgtccagtctcattttgcacctctcttccccttgttaacaaaactctagccatcttgacgttcatttccaagctccttcaaacttctgag

SEQ ID NO: 539826 - DNA, 625 bp, Homo sapiens
cagctgcccgcatgtcacgttcaaggctgaaatccaccattctcaccaatcccacttactctcaaarcctgcccttggggaagatctgaagccgatcttgatgaatcatatcattctagacagagtatttgctgattgactaactgaatgaacataatagggactcaataagcatttctagcacataatagggactcaataaatgtttgctgattgactaaatgaatgaaaggcagacaggttttctgaattttctagtagttaaccagccaactcttgtaaaaaggtggcttgagactcctataagtaatcacacaatcacattttgtagcagattggtgctagctagggaatgacggtgtgtccaaaaggcaatgaattaaaaccctgctttggcatatcccctttcagaaataggagcagtctttcaagcaacttgaaaaataggcttcagtaaaagtgtaagaaaatatgtgcaattagacacaatcagtaaagttgtccttgactgatgtctacatttaagagagtttaattaaattatgaaaaaggccgttctgatagaactgtcagtctggcttatcatgtatgtacataaactctgcatggggttttccttcaagac

SEQ ID NO: 539827 - DNA, 554 bp, Homo sapiens
tcccacacagtaaagaggagcaaagcatcctctgtggagtggaagagtgtaagcaagggtaattcctcctgatgttgcccttctgcacgacatctcttcgaattgcttatgaagaaatagcaccagccttgcacctggagtttccaactttccagcagaaccatgtagggtcagctcgtgggtgacatcccgtatatacctgaatagcctgccctgctaccatgggccagcgttcatggtatctgggctcaggctgacttgctatgtttcttacaggtactcatccactaaatagactcctggctaccagattcacttcgagaaaaagttttcggttgtcttttagcgctcatttttgaaagatggtcyacctggtgcctactcctgggcgctggatgaagtccaggggatgacagcaacatgaactcgctgtggataacaagtcctctgttatgactggatgcgtttgcagtgctataaataactctatcaatattgtgataatggcactttaaagaggtctattttacaagtgctgaatgtaagagagacca

SEQ ID NO: 539828 - DNA, 497 bp, Homo sapiens
tggagacccacacagccaaggaggttgagaaatcacaagggcaagttcctgttttccagagttgtccagaactggttccatcaagagttgtattcccttgttatctgctgcatacatcaagcgcacgaacacacatacactttcttttttttttttttttttgagctggagtcttgctctgtcgcccaggctggagtgcagcagtgccatctcagctcactgcaacctccgcctcctgggttcaaacaattctctgcctcagcctcccgagtagctgggattacagacactcaccaccatgcccagctaatttttgtatttttagtagagatgggggtttcaccatcttggccagagtggtctcgaactcctgacctcaggtaatccgcccgcctcagcatcctgaagtgctgggattacaggcgtgagccaccrcgcccggccaacacacatacacttttcaacagctaacaaagtggtaaaagaagggcagttta

SEQ ID NO: 539829 - DNA, 472 bp, Homo sapiens
ctgatcacacatttctgtgtcagcatgagacaagcaaataaattgctgaagtgaagcatcacaattcctgattctaaataaaataattctctcaggggttttcttttcttcttttcttttctcttttcctttcttttttttttttttttgtgagagtctcgctctgtcgcccgggctggagtgtagtggcgtgatctcggctcactgtgcaagctccgcctcccgggttcacgccattcccctgcctcagcctccggagtagctgggactacaggcgcccgccaccatgcccggccaatttttttgtatttttagtagagacggggtttcaccgtgttagccaggatggtctcgatctcctaacctcgtgatctgcccgcctcggccctcraaagtgctgggattacatgcgtgagccactgagcccggcctcagaggttttgtttgtttgttttttgtttttttgagacgt

SEQ ID NO: 539830 - DNA, 503 bp, Homo sapiens
ctatatttcagcaaagaaagactttttatttccatttaaaaacaaattacaagcagcagtaaataacttcaggctcacaggggtaaagtaacatccccaaagcttcatggctaacatgtcgtgaggctgagattggcttctttgcatttcttattttaaagcccaaagtcttcattctgaccaactrtgcccccatggggctctttttttactcttcaggaagaaaatgtgacttatgttggccagaacattttctattaaaaagaacagattttcctgagctaacctacatttgagtcttgcattggattttggttggcattttaacatagtgtccccaaggttcagatcagaatcaacaaatattgtaggctgagttctgggcaccagggtaggccttttcacattcatacatttaaacaagtctacaacaagcctctgggtgagaatttgtatctccctttcactaaacagtaaacaggggaagaggggtcaagtcaagg

SEQ ID NO: 539831 - DNA, 394 bp, Homo sapiens
gtttggctagagtcctgaggaaggtgarcagatcacttctgggtaatgaactagataattgctttaaatctgttttgtgatgaggccaatgagttactcaggcaggagtcactcatgatgtgttaactcatggtgcatcttctttgaggccttggggtattgaatagcattagaggtgattctgaatcccctgcaggactaacttgccagacaagagaattatctcagtgggctagagtttactgagcatctactaattgaaaaagagtctcataggttcataggttatcctaagcttaaaaacactcaaccagtaagggtattttccttaacctacctcatttagcctaaagtgtctgaaaatttggtagtagagtgggtgtgctttaatact

SEQ ID NO: 539832 - DNA, 430 bp, Homo sapiens
cattttctcttcatgtaagaaggcttactgtaaacgtttatcatctctttgcctggtccatgattcctgcaaaataagaaacaaacgggagaatgtctcctctgagactaacaagaaaagtctgactctatccaatcggtctaaagatacaccacccacagcagcagctcccataggacagggttataccagcagggctgtcattgtgtgggagcagggcagagaacactcacaacagaactgcaatacgcatctaaatggaatgctgtgggaatttatcagcaatttctccaattagagctggagccttggagcttagcwctgaatccccccgccggggagcagtatcagtactagctaaatgaatgatagagttgtcctaaacactcctgacatgcagagtttaagacatgttcagactttaacccaa

SEQ ID NO: 539833 - DNA, 679 bp, Homo sapiens
tgcattcggcaaggagtagtagtggagactgactgtccaagggccatagggaattttctgggataatgcacatactctgtatctctatttcaggggtatgcatttcttagcacacattaaactatactattgagaattgtgcattttactatatataaagttgttcttaagtaaaaacagtaaaaagggaaaaaaagtggtcaagaatttaacacacaatgtgttaggatagttatgatgggaaaaaaagattgtgttcattctgtgaagcaagtattgtggatatcttagaaaaggtgatatttcttctggcccttaaaaattataasggattctggaccacagacattgtgggaaggaaattccagtaagatttatgtataagagtaagcaaaggtataattacagaagtatgtgggatattcaatgagcaacaattaatttcttttagctaatgagtaaaaggaatgatgaagccagatggttgaggaattcaaagggaagaagattggattttattctataggtaattgagggacacaagtgattttgcacaagtgagtgaaatgatcagaactatggttttgaaggtataatacaaatgacaaagtgaatgaataagagaaagagaagaaattgtgaggctcttgaaatattccatctagataaaatgaataca

SEQ ID NO: 539834 - DNA, 661 bp, Homo sapiens
ggtgagggtggactgtaccagggtggtggctattccactgagccatgccatagatgccaaggccatgcagagatggatatgcattaagacagtgtaatggagaggacggcagacagccacatagcggtcacaggacatcasagccgggaggacgcactcagtggatcccagggcatgggagttgtaaaggtgaaccaaacagccaccataggcgatagttttcatgggttcccacaggtttaccaggagctggggaataacactgctggtgaagcagcggtacaggaaggagagatgagaaaggaagaaatacatcggcatatgaagcttgggttccagacgagaaaccagaatgatggtggtattccccaaaatagttagtaaatacagaatcaatatgagcacaaatagaaccttctgtaactgaggataatcagaaaaccctaaaaggatgaaacctgctaggttgctctcattggtatgtctcaccatccccatatgtaaagtgtgttccccaaggctgaggcatagctgagaaagataacacatcacatagggttaaatgagtgacaatgtcacctgcctacccaaaaaagtattgtatgttaaatgcttagaagctatgtctttacatccagtgacttagatctatttattttcc

SEQ ID NO: 539835 - DNA, 523 bp, Homo sapiens
cctaggacatctgaagccaatgcaattcctgtctgaaagcattttattctctatgtttgggaagacattatttttcacatttacattgttttctaagttttggaagaaatctttttttttttaaattcaactctgaacatgccactcaccattttatagagtctgtcacagattcttatatatgtaggtagaatatgaacactaaakgagtaaatgaaacccttgtaaggttctatttttgagaggcgttttaagcagcttggagcatcctgatacaatgagaagttttgcaagctaattcttaaactatttagctaagtctttatgataattaaagaaaggacatattctaaaacaatttctcatacatgtcaagcattcccataacttggtaaagtatgttaacctaaatttagttgactgtcttttaaactccaacttttgcatatttgatatgaaaggaaaaattttgaaaggctggcaggcaatataaatacttgcatcatcagtattttgatacatt

SEQ ID NO: 539836 - DNA, 523 bp, Homo sapiens
cctaggacatctgaagccaatgcaattcctgtctgaaagcattttattctctatgtttgggaagacattatttttcacatttacattgttttctaagttttggaagaaatctttttttttttaaattcaactctgaacatgccactcaccattttatagagtctgtcacagattcttatatatgtaggtagaatatgaacactaaatgagtaaatgaaacccttgtaaggytctatttttgagaggcgttttaagcagcttggagcatcctgatacaatgagaagttttgcaagctaattcttaaactatttagctaagtctttatgataattaaagaaaggacatattctaaaacaatttctcatacatgtcaagcattcccataacttggtaaagtatgttaacctaaatttagttgactgtcttttaaactccaacttttgcatatttgatatgaaaggaaaaattttgaaaggctggcaggcaatataaatacttgcatcatcagtattttgatacatt

SEQ ID NO: 539837 - DNA, 523 bp, Homo sapiens
cctaggacatctgaagccaatgcaattcctgtctgaaagcattttattctctatgtttgggaagacattatttttcacatttacattgttttctaagttttggaagaaatctttttttttttaaattcaactctgaacatgccactcaccattttatagagtctgtcacagattcttatatatgtaggtagaatatgaacactaaatgagtaaatgaaacccttgtaaggttctatttttgagaggcgttttaagcagcttggagcatcctgatacaatgagaagttttgcaagctaattcttaaacyatttagctaagtctttatgataattaaagaaaggacatattctaaaacaatttctcatacatgtcaagcattcccataacttggtaaagtatgttaacctaaatttagttgactgtcttttaaactccaacttttgcatatttgatatgaaaggaaaaattttgaaaggctggcaggcaatataaatacttgcatcatcagtattttgatacatt

SEQ ID NO: 539838 - DNA, 523 bp, Homo sapiens
cctaggacatctgaagccaatgcaattcctgtctgaaagcattttattctctatgtttgggaagacattatttttcacatttacattgttttctaagttttggaagaaatctttttttttttaaattcaactctgaacatgccactcaccattttatagagtctgtcacagattcttatatatgtaggtagaatatgaacactaaatgagtaaatgaaacccttgtaaggttctatttttgagaggcgttttaagcagcttggagcatcctgatacaatgagaagttttgcaagctaattcttaaactatttagctaagtctttatgataattaaagaaaggacatattctaaaacaatttctcayacatgtcaagcattcccataacttggtaaagtatgttaacctaaatttagttgactgtcttttaaactccaacttttgcatatttgatatgaaaggaaaaattttgaaaggctggcaggcaatataaatacttgcatcatcagtattttgatacatt

SEQ ID NO: 539839 - DNA, 518 bp, Homo sapiens
tggctgatgaaggacggaagtggatgtgggctttcagccatgagcagttggcaataacttagaagtagagcctgggtgcggagaaggagcaagtagatttgcaatttttcaacctctcctaggtttcaggagttcatgagtgtaaataagttcatgaatgtccaggcatattcacatgcatagctccatgtctccaaatcttcacttgcttgacaagatcttaatcccatgtttctcttgtctccttaaattcctcctcagctatttctgggtgtccttggaatggtgatgtctcaacatgggcttgggaacacgtttgctcctcttctttccacttgagtccaggggccttgccatggcctctgcacttggtgctctttgaaagacatgattcctgtgcacccaacagacccctrtgaaacaggaataaaaatgtctcataggatgtcagtgaagattcaataagatagtgtttataaagcactgagattaaataagaatgtttgattcctactaaa

SEQ ID NO: 539840 - DNA, 518 bp, Homo sapiens
tggctgatgaaggacggaagtggatgtgggctttcagccatgagcagttggcaataacttagaagtagagcctgggtgcggagaaggagcaagtagatttgcaatttttcaacctctcctaggtttcaggagttcatgagtgtaaataagttcatgaatgtccaggcatattcacatgcatagctccatgtctccaaatcttcacttgcttgacaagatcttaatcccatgtttctcttgtctccttaaattcctcctcagctatttctgggtgtccttggaatggtgatgtctcaacatgggcttgggaacacgtttgctcctcttctttccacttgagtccaggggccttgccatggcctctgcacttggtgctctttgaaagacatgattcctgtgcacccaacagacccctgtgaaacaggaataaaaatgtctcataggatgtcagtgaagattcaataagatrgtgtttataaagcactgagattaaataagaatgtttgattcctactaaa

SEQ ID NO: 539841 - DNA, 619 bp, Homo sapiens
ctggcatctatctcctggctcagtggtttggctagttccctaatccatgcaacttttaccttgcaattgcctctctgtggcaaccataggctggaccattttatttgcgaagtaccagctcttctcaagttggcttgtgtggacaccactgtcaatgaattggtgctttttgttgttagtgttctgtttgttgtcattccaccagcactcatctccatctcctatggcttcataactcaagctgtgctgaggatcaaatcagtagaggcaaggcayaaagccttcagcacctgctcctcccaccttacagtggtgattatattctatggcaccataatctacgtgtacctgcaacctagtgacagctatgcccaggaccaagggaagtttatctccctcttctacaccatggtgacccccactttaaatcctatcatctatactttaaggaacaaggatatgaaagaggctctgaggaaacttctctcgggaaaattgtgattcctatggacatgatttgcaaggaattcattataagccaggtagcttattcagcttctatttagtcaaacccatagttctaaatttcacatgaactatattactgctcacttatttt

SEQ ID NO: 539842 - DNA, 597 bp, Homo sapiens
tatgtaccaggaactatgggattctgttgccttcatctcttttctctcacaggggctctccctgctccctgccaaggtggtggtgcctgtgtggtagaagggaagagcgagttggggctgcacaggcacaatctggaaatgaccagaataaaaatgccccagcccaaccagcaagcaggactccccaatcagatttttatttctaggcaatgctgctagggaaaaactctttcccctggagaaatcaaacaaaaacacagcttggratgattcatacaaaggttctcaaacttagctgtactttttaaatcatctgggaagctttaaaaacctacttatgcctgggccccaattaaatccaaacatcttggggtagaaccaaggcacttatagtttttaaaagctcccaaagtgattctaatgtgtagccagggttgagaattactgatttacacagtcctgctcttcatatgcagtttaggcttgtggttacagttacttagctgctcacctgtctgcactaatatatacactactatgctttgctgctgggaaagaaatatggcaaggatgaaaaccagttctctcggtaaacac

SEQ ID NO: 539843 - DNA, 597 bp, Homo sapiens
tatgtaccaggaactatgggattctgttgccttcatctcttttctctcacaggggctctccctgctccctgccaaggtggtggtgcctgtgtggtagaagggaagagcgagttggggctgcacaggcacaatctggaaatgaccagaataaaaatgccccagcccaaccagcaagcaggactccccaatcagatttttatttctaggcaatgctgctagggaaaaactctttcccctggagaaatcaaacaaaaacacagcttgggatgattcatacaaaggttctcaaacttagctgtactttttaaatcatctgggaagctttaaaaacctacttatgcctgggccccaattaaatccaaacatcttggggtagaaccaaggcacttatagtttttaaaagctcccaaagtgattctaatgtgtagccagggttgagaattactgatttacacagtcctgctcttcatatgcagkttaggcttgtggttacagttacttagctgctcacctgtctgcactaatatatacactactatgctttgctgctgggaaagaaatatggcaaggatgaaaaccagttctctcggtaaacac

SEQ ID NO: 539844 - DNA, 602 bp, Homo sapiens
tgtagaactcaggggaaatgttctctctaatgagggacagagaagaaatgactagcaggaaatgggtttctctcctgctcaaaagtcagacacattgaagacaagatcactacttttagttcactcccctccccttctccattcaaaaactgtcactgctctgatgatgtcacccttctcccaaatgtatttatatgcacaaatgggtgtttatgaagctttcagattctctttactggtagggaacgtagttccttatcaggacaacaaagattgacatttgacagacagcaggaaaaacaagaattaaagcagcaaggctttctaattccctctaaaattattggctttttcttacaagcaagrctgccagagtttgcaattgttcagaaattgcagcaccgagagagtcttctgactgcagcaccatctcagaagctttttttgcccaggccagcctatgcccacagctgcatttctcacttcttctcaaccagctcctctcacccacctcctctgagctagtcgctcatgacccctgggggccagctagtgtaccaacaagaagcctagaaaagcttagggaaaagtctgtggttaat

SEQ ID NO: 539845 - DNA, 601 bp, Homo sapiens
acagggaatggtgagccacccccaagtgccttccactgcacagcgaccctgtccagtagtgtcctggaatctggaaatcagaccaatcccagtagtcaccctgcttccagtggtgttaagcaatgggaaggggaagaagtgaagaaggtgtgtgtatatggggtggaggagtagaaggaggctttagagatttccctcttccctttaggcttcttggggaccttagaaattatctagctcaatccatatattttagagatgagaaaatatgtttaaattaggtgaatcctaccaactgagccaggattagagccaaggtytttggtctggaaactcttccagctttgctaaaccacttctatatgtgaaagccgcaaaggccattataaatcccaagacatagaagagttctgcatgggtccacctcccagtctggaacacattttaggaacccattataaaaacaaatatcccacgaactgaccaaatatcacatagtttaatagtcatgacattgttgtaggatgtaaatctgtatatttataaggacttttttttttctgaactcatcatagcatcctgaacattgtggagaaaagtt

SEQ ID NO: 539846 - DNA, 660 bp, Homo sapiens
tgcacagggaatggtgagccacccccaagtgccttccactgcacagcgaccctgtccagtagtgtcctggaatctggaaatcagaccaatcccagtagtcaccctgcttccagtggtgttaagcaatgggaaggggaagaagtgaagaaggtgtgtgtatatggggtggaggagtagaaggaggctttagagatttccctcttccctttaggcttcttggggaccttagaaattatctagctcaatccatatattttagagatgagaaaatatgtttaaattaggtgaatcctaccaactgagccaggattagagccaaggtctttggtctggaaactcttccagytttgctaaaccacttctatatgtgaaagccgcaaaggccattataaatcccaagacatagaagagttctgcatgggtccacctcccagtctggaacacattttaggaacccattataaaaacaaatatcccacgaactgaccaaatatcacatagtttaatagtcatgacattgttgtaggatgtaaatctgtatatttataaggacttttttttttctgaactcatcatagcatcctgaacattgtggagaaaagttaatacattatagctacagatggatatcttttccaaagtcaaagtggtttaaacttt

SEQ ID NO: 539847 - DNA, 601 bp, Homo sapiens
acagggaatggtgagccacccccaagtgccttccactgcacagcgaccctgtccagtagtgtcctggaatctggaaatcagaccaatcccagtagtcaccctgcttccagtggtgttaagcaatgggaaggggaagaagtgaagaaggtgtgtgtatatggggtggaggagtagaaggaggctttagagatttccctcttccctttaggcttcttggggaccttagaaattatctagctcaatccatatattttagagatgagaaaatatgtttaaattaggtgaatcctaccaactgagccaggattagagccaaggtctttggtctggaaactcttccagctttgctaaaccacttctatatgtgaaagccgcaaaggycattataaatcccaagacatagaagagttctgcatgggtccacctcccagtctggaacacattttaggaacccattataaaaacaaatatcccacgaactgaccaaatatcacatagtttaatagtcatgacattgttgtaggatgtaaatctgtatatttataaggacttttttttttctgaactcatcatagcatcctgaacattgtggagaaaagtt

SEQ ID NO: 539848 - DNA, 660 bp, Homo sapiens
tgcacagggaatggtgagccacccccaagtgccttccactgcacagcgaccctgtccagtagtgtcctggaatctggaaatcagaccaatcccagtagtcaccctgcttccagtggtgttaagcaatgggaaggggaagaagtgaagaaggtgtgtgtatatggggtggaggagtagaaggaggctttagagatttccctcttccctttaggcttcttggggaccttagaaattatctagctcaatccatatattttagagatgagaaaatatgtttaaattaggtgaatcctaccaactgagccaggattagagccaaggtctttggtctggaaactcttccagctttgctaaaccacttctatatgtgaaagccgcaaaggccaytataaatcccaagacatagaagagttctgcatgggtccacctcccagtctggaacacattttaggaacccattataaaaacaaatatcccacgaactgaccaaatatcacatagtttaatagtcatgacattgttgtaggatgtaaatctgtatatttataaggacttttttttttctgaactcatcatagcatcctgaacattgtggagaaaagttaatacattatagctacagatggatatcttttccaaagtcaaagtggtttaaacttt

SEQ ID NO: 539849 - DNA, 434 bp, Homo sapiens
taatgattaagctcagggattctgaagctgtaacacctgggttcaaatgtttggctctgcctccaactagcagtatgatcttgacaagttatttaacttctctgtgcttcgattttctcatctgtaaaaagtggatgaaaagaatagcgcctatatcatagtttccctatgaagacaaaataagttaaaatgtgtaaagcatttagaaccatgcgttgtacacagtgagtgttcrgttaaagttggctgttattgattatggatttgttgtgttgtgggtctgctgatcatcctgacttttatccttaatgcatcctcacagacaaataactgtggaattctacaatgaaccatgtatttaacattagtttgaggattgtatgacctgccctagtccacaagttgccaggacattgtgacatgctcccacctct

SEQ ID NO: 539850 - DNA, 635 bp, Homo sapiens
ttgtatgagtaaataaaatagttggagaaagtagtgctacaggaaagaataataaaaacatggacttaarcttagaatctcctttctagtctcttgcttctaggactcctagatcccatcttctaaaatagaagaaaagaaagtaaggcacttactagcatgaaccagaaggagtctgtgttagacaagtaggttaaagacaaaaaggcagggagcaccatactgtcttttgtaactgggaacagagagatgagtctagggaatcaaatcagcttaaagactgtggttcttgtggccactaccattttcttcagcttccatcatagttcttgacctctttattctgttgcctccacacagcagagggcaagactgatgagaactccaggatagtataattatagctcccaattgagaggaaagagtatttctcttactgtttgcatataaaatcctaggagataactccagttggtctaacttagccaattcttccaaataggccttaagctgcaagaaagccggacatttcctcaactaagaaactgcagcaacacggtgggacaaaaaatggataataacctcctagaaaggatcactgtggagatcaacataactgagacttctggagacag

SEQ ID NO: 539851 - DNA, 606 bp, Homo sapiens
ctagcatgaaccagaaggagtctgtgttagacaagtaggttaaagacaaaaaggcagggagcaccatactgtcttttgtaactgggaacagagagatgagtctagggaatcaaatcagcttaaagactgtggttcttgtggccactaccattttcttcagcttccatcatagttcttgacctctttattctgttgcctccacayagcagagggcaagactgatgagaactccaggatagtataattatagctcccaattgagaggaaagagtatttctcttactgtttgcatataaaatcctaggagataactccagttggtctaacttagccaattcttccaaataggccttaagctgcaagaaagccggacatttcctcaactaagaaactgcagcaacacggtgggacaaaaaatggataataacctcctagaaaggatcactgtggagatcaacataactgagacttctggagacagctgcaaacaaggaagggcaagagctatttattggccatgcagtggttgccagcacatccccaaagactggctctgtggaggactctggtgatcttcatgcctgagacctccacagccctgtggca

SEQ ID NO: 539852 - DNA, 635 bp, Homo sapiens
ttgtatgagtaaataaaatagttggagaaagtagtgctacaggaaagaataataaaaacatggacttaaacttagaatctcctttctagtctcttgcttctaggactcctagatcccatcttctaaaatagaagaaaagaaagtaaggcacttactagcatgaaccagaaggagtctgtgttagacaagtaggttaaagacaaaaaggcagggagcaccatactgtcttttgtaactgggaacagagagatgagtctagggaatcaaatcagcttaaagactgtggttcttgtggccactaccattttcttcagcttccatcatagttcttgacctctttattctgttgcctccacacagcagagggcaagactgatgagaactccaggatagtataattatagctcccaattgagaggaaagagtatttctcttactgtttgcatataaaatcctaggagataactccagttggtctaacttagccaattcttccaaataggccttaagctgcaagaaagccggacatttcctcaactaagaaactgcagcaacayggtgggacaaaaaatggataataacctcctagaaaggatcactgtggagatcaacataactgagacttctggagacag

SEQ ID NO: 539853 - DNA, 635 bp, Homo sapiens
ttgtatgagtaaataaaatagttggagaaagtagtgctacaggaaagaataataaaaacatggacttaaacttagaatctcctttctagtctcttgcttctaggactcctagatcccatcttctaaaatagaagaaaagaaagtaaggcacttactagcatgaaccagaaggagtctgtgttagacaagtaggttaaagacaaaaaggcagggagcaccatactgtcttttgtaactgggaacagagagatgagtctagggaatcaaatcagcttaaagactgtggttcttgtggccactaccattttcttcagcttccatcatagttcttgacctctttattctgttgcctccacacagcagagggcaagactgatgagaactccaggatagtataattatagctcccaattgagaggaaagagtatttctcttactgtttgcatataaaatcctaggagataactccagttggtctaacttagccaattcttccaaataggccttaagctgcaagaaagccggacatttcctcaactaagaaactgcagcaacacggtgggacaaaaaatggataataacctcctagaaaggatcactgtggagatcarcataactgagacttctggagacag

SEQ ID NO: 539854 - DNA, 659 bp, Homo sapiens
gaccttagaatgctttcaaattctgatttactcctacattgatacagaatgccctcacaatattttayagcttttatctttaaacaaagctaaaacttatctgtgacataatctccacatttatttctaaatggtctatgctatgtgtttaaagcaaccatcttgaaatttctagaatttattttggaataagaaaaattatttataagtctggtagaatgatatgtaaataatttgtggatgatataatggactttagcaacttggggagaagggttgggggttggggaggtaaagaataaaaaacgacacatttggtacaatgtacactgcttgggtgatgcgtgcaccaaagtctcagaaatcaccactaaataacttatccatgtagccaaaaactaactgtacccccaaaactattgaaataaaaataaataaaacgatgaaaaaagaattaatttccggaagctcagtgatttgggaaattaataggactatgtgatgttcaaatttcatgcattaatttggctaggctgtggtgcacagttgtctggtcaaatactagtctaggtgttgctgcgaagccattttgtagacatgactaacatttgcagttatagctgactttaagtaaaacagacgataatatgtgtgagctt

SEQ ID NO: 539855 - DNA, 611 bp, Homo sapiens
acaatattttacagcttttatctttaaacaaagctaaaacttatctgtgacataatctccacatttatttctaaatggtctatgctatgtgtttaaagcaaccatcttgaaatttctagaatttattttggaataagaaaaattatttataagtctggtagaatgatatgtaaataatttgtggatgatataatggactttagcaacttggggagaagggttgggggttggggaggtaaagaataaaaaacgacacatttggtacaatgtacactgcttgggtgatgcgtgcaccaaagtctcagaaatcaccactaaataacttatccatgtagccaaaaactaactgtacccccaaaactattgaaataaaaataaataaaaygatgaaaaaagaattaatttccggaagctcagtgatttgggaaattaataggactatgtgatgttcaaatttcatgcattaatttggctaggctgtggtgcacagttgtctggtcaaatactagtctaggtgttgctgcgaagccattttgtagacatgactaacatttgcagttatagctgactttaagtaaaacagacgataatatgtgtgagctttatccaat

SEQ ID NO: 539856 - DNA, 611 bp, Homo sapiens
acaatattttacagcttttatctttaaacaaagctaaaacttatctgtgacataatctccacatttatttctaaatggtctatgctatgtgtttaaagcaaccatcttgaaatttctagaatttattttggaataagaaaaattatttataagtctggtagaatgatatgtaaataatttgtggatgatataatggactttagcaacttggggagaagggttgggggttggggaggtaaagaataaaaaacgacacatttggtacaatgtacactgcttgggtgatgcgtgcaccaaagtctcagaaatcaccactaaataacttatccatgtagccaaaaactaactgtacccccaaaactattgaaataaaaataaataaaacgatgaaaaaagaattaatttccggaagctcagtgatttgggaaattaataggactatgtgatgttcaaatttcatgcattaatttggctaggctgtggtgcacagttgtctggtcaaatactagtctaggtgttgctgcgaagccattttgtagacatgactaacatttgcagttatagctgactttaagtaaarcagacgataatatgtgtgagctttatccaat

SEQ ID NO: 539857 - DNA, 542 bp, Homo sapiens
gaaactaaaaaaataaatttagaaagtaaccggaaggtatgctctgccawtttgggatttttagctatctttgcattaactttgaatagaattcaaaatacctgggaaaagagtgccagattggattagcttacttcaccctttcaagataaggaactcagggaacattgaattatagtaccaccaagagtaaaagaatgagaaagagttcgtttcccaaaacgaatttcactgcagttaagaaaattgttgtttggtagcccaaaacagcaaatctccactaatcttgttgtttagtgttgactaccgggcacaaagccaaatatttgagcatatttatacctttgaagagctgagtctagatcaatattttttccatggcgttgctggtcagaaagtatgtgtttaactttgaaagagaaggaaagcaatattgctctgtacatagctcattttttttcctttcaaagttctttaaaagcattaatgcattaattttcaccaatactccaagaaagaagaaagtgttattattctcattt

SEQ ID NO: 539858 - DNA, 594 bp, Homo sapiens
ttgcgttgttaaattagggaaataatatgggatttaaattttaattaaggcaaacatctgagccaaatgttatgcagcttattaaagtaatatttatgaactgattgtgggataacagcagttaattactgcagctcacattgtaaaaaatatcaaagtctaagctttctataaatcataataatgaattttattcactyattcattcactctcttgcttactcaatttaaaaagactgttttctataatgaaatgtgctctcttaacattaaaatgagcgattgtaatctagggttacctcatgcttatcaaaagcactatttaactctttaaatcatctttctatttcaaaaggtctgcttttttgccagactttaaggtctgcttttcattcatttattttttcattcactcattcatcaaacttctgttgaataccaactttaagcaaggcactatttgagttgagataaaagagtaatacatttgtcaagaaatgacatgcacatagttactctaaagcacactagatcttgaagttgtataagaaataattaaaccaaaaccaaaagatacttgaattcgcaggaaga

SEQ ID NO: 539859 - DNA, 476 bp, Homo sapiens
ttaatttttatagacatatattcttattgttttatgtaagaactgaaaacaatatttttagaagaattttgatgagagatttgattgaatcgtatttttattttggraaaattgtcaagaaaatatgaaaatgagggttatttcttatgcagagaaatctgtgtaaagctatctgaacaaccattctgtatatatgggtatcttatcttttgcatttggataactagatttttttttctgataatttttcacgtatttttaaagatttctccatttctgcattctttcagcttactttgatatattctcttttaaatcattttctagcatttcatagttatttttaattgaacatatgaccagttttgtatttgtgagtgttggtttaagaccagcaaatcactacttttagcatgcccaatgattccaagccagcttcctcttgtactggcattagtttcaagtctcctcaatct

SEQ ID NO: 539860 - DNA, 650 bp, Homo sapiens
gtggtctatgagtaattacctaagttcccattattttgtagctcagtaccttgtccactttggtcaccatcagaaaatttttattcgtgcgttttcttgtagtgtcttagtaagttccataaaggtaaggaccatttctgtcttttatactgtctcccctagcacaaggaaggcactcaataaatatttgctagaagaattaataaattaaagcaagtatgaataagtgaatgaacaaatgacttcagtctaggttaagattttggaagaagggtacttctggtgataattccaggaagtggcagtagcagcagcttgatggacaggargcaacagtcagtaagactgaaaccagggagtgtgtaggccaagatttggtactggttttcctcttggggtttcaggtttttcaagatgatgatgggacataggatgaaagtgatagtcagtcaatgtcaaaattgtcagtgataatggatccatagaaaacagcaaccaggaaagacagagggttacactagcctcataggaaaggaggtctaatctgaagagtaaggtagtttgaagcaataaagaggagatttctgcctacggtccccatgccctgtggttacacagagcctagggaaaagaagatctgaaggagaaca

SEQ ID NO: 539861 - DNA, 588 bp, Homo sapiens
cacagcaaaaaaaataaaagctactataaaatgcaccagatgtgaaacagttaatatctttcctagcaagttcaaaataagtcataattcctttataaaacatataaatactaaatatctccaagtcataattcctttataaaacatataaatactaartttcttgtgtgtatatattaatttcctaagttatccatatgttaactaacagtgagatacaaacagataacactaaatgaataaactacacaacgtatacatttacatacttttgtgcattacttttcttaagaggtaatgttaaggaaatacataccaaaattataagtgcttggattaaaaaactgctcgggaggtggatatgaaggagggactcctctatttaaacttctctcatgtactaatatatccaagatgccatgtggagaagtcctacttacaacagactccaatgaccacagtgcaaaataagagcaattatgtagatattctcctgacctaaaagaaaatttaaaacattactaagtcattggtcagctacacatacaaatacaaagagaaaggagagagaaaaaaaaagaatcatac

SEQ ID NO: 539862 - DNA, 654 bp, Homo sapiens
aacggttagctcatttacatacaactatatgttcattacataaaactttacatattatctccacattgaaatcttttaatcaagcaactatcattacaataataatagtcattcagtggcgtgaacctgggaggtggagcttggagtaagccgagatcatgccactgcactccagcctgcgtgacagagcaagacttcatctcaaataataataataatagtcattcagtaaaagccaccaccatggtatgtgcttgaatgttatctcatttattccttatcacacctcaatgtagagataaggcagctaaacctgaatactgtttaaccttcccaaagtcaaaaagtagcacaggcagaagtagatcccaagcctgtttaactccaaaactcatgctttaactactaaggcttaaacgatttaaactagaagttatggcagttataaaatagaacatattattctatccctaaagagttcacagtccaattaagaaattaagacataactagcataatgataggaagtctcagaacctcttctccgcctattagtcatgtttggatttyaccctgcctgcaatgtaaagtcatagaggtgactatctgatttaaatcaagtcagtaactatctgatttatgcatgtttttaaa

SEQ ID NO: 539863 - DNA, 576 bp, Homo sapiens
atcttgatcttcctggaagaaagtcctccagctgcgatctggagcagagacagaaccctgtgttactggctctagctgtccagagtggaatctccaccttcctgagctggcagggaaaggaaaggaatgatcttgcttcaaataccacaaactcttttcttaccaaattttagtacattttcttgaatagatgcttttttttttctttttgagacagtctcactctgtcgcccaggctggagtgccgtggtgcaatctcagctcactacagcctccacctcccaagttcaagckattcttatgccgtagcctcctgagtagctgggattacaggcacctgccatcacacacacataatttttgtatttttagtagagacggggtttcaccatgttggccaggctggtctcaaactcctgacctcaagtcatccgcccgccttagcctcccaaagtgctgggactacaggtgtgagccaccgcgcccggccatgaatagatgtttcttcatgtgctgtttgtccttaggaccattaaaaagtgtttttttttcttcattttcattttttaatggata

SEQ ID NO: 539864 - DNA, 606 bp, Homo sapiens
gctgccaagtcaattccaaccaacagaagtagctgagactggattaatgattttggggggaayatcagcttcaatgcaacaaaattctgttaaagcaatatggattggtgtccaggaaatatcagaaactcttgtgctttgtcaacaacttggctattaggctgacagccacctggatttctctttaaggagttccccacatgaaaaatggctcctcagaacatctgactcttagattgaccaaagttctggtcaggaagaaacctctgtctttgctgacagtttccaaaatataaatacagaggcttgaggataggaaatcttttcattttttaaagctgtgtattgaaagagaaaacctgggactcttccctggtgacgctactggaaacttttcagtgcttttttttttttttttttttgcagccccgttggagccagttttcagcttggatttcaggagagcttctaaggaagaataagcatgcctatctcccagtcttcccatttgtgtcctgggcctcttatggctttggtctgtaagcagcagagactggctcaggctgataaaggagagaagaaatttattagatggtatcggccagc

SEQ ID NO: 539865 - DNA, 606 bp, Homo sapiens
gctgccaagtcaattccaaccaacagaagtagctgagactggattaatgattttggggggaatatcagcttcaatgcaamaaaattctgttaaagcaatatggattggtgtccaggaaatatcagaaactcttgtgctttgtcaacaacttggctattaggctgacagccacctggatttctctttaaggagttccccacatgaaaaatggctcctcagaacatctgactcttagattgaccaaagttctggtcaggaagaaacctctgtctttgctgacagtttccaaaatataaatacagaggcttgaggataggaaatcttttcattttttaaagctgtgtattgaaagagaaaacctgggactcttccctggtgacgctactggaaacttttcagtgcttttttttttttttttttttgcagccccgttggagccagttttcagcttggatttcaggagagcttctaaggaagaataagcatgcctatctcccagtcttcccatttgtgtcctgggcctcttatggctttggtctgtaagcagcagagactggctcaggctgataaaggagagaagaaatttattagatggtatcggccagc

SEQ ID NO: 539866 - DNA, 606 bp, Homo sapiens
gctgccaagtcaattccaaccaacagaagtagctgagactggattaatgattttggggggaatatcagcttcaatgcaacaaarttctgttaaagcaatatggattggtgtccaggaaatatcagaaactcttgtgctttgtcaacaacttggctattaggctgacagccacctggatttctctttaaggagttccccacatgaaaaatggctcctcagaacatctgactcttagattgaccaaagttctggtcaggaagaaacctctgtctttgctgacagtttccaaaatataaatacagaggcttgaggataggaaatcttttcattttttaaagctgtgtattgaaagagaaaacctgggactcttccctggtgacgctactggaaacttttcagtgcttttttttttttttttttttgcagccccgttggagccagttttcagcttggatttcaggagagcttctaaggaagaataagcatgcctatctcccagtcttcccatttgtgtcctgggcctcttatggctttggtctgtaagcagcagagactggctcaggctgataaaggagagaagaaatttattagatggtatcggccagc

SEQ ID NO: 539867 - DNA, 504 bp, Homo sapiens
ccaagtcaattccaaccaacagaagtagctgagactggattaatgattttggggggaatatcagcttcaatgcaacaaaattctgttaaagcaatatggattggtgtccaggaaatatcagaaactcttgtgctttgtcaacaacttggctattaggctgacagccacctggatttctctttaaggagttccccacatgaaaaatggctcctcagaacatctgactcttagattgaccaaagttctgstcaggaagaaacctctgtctttgctgacagtttccaaaatataaatacagaggcttgaggataggaaatcttttcattttttaaagctgtgtattgaaagagaaaacctgggactcttccctggtgacgctactggaaacttttcagtgcttttttttttttttttttttgcagccccgttggagccagttttcagcttggatttcaggagagcttctaaggaagaataagcatgcctatctcccagtcttcccat

SEQ ID NO: 539868 - DNA, 539 bp, Homo sapiens
ggggtctcagcttctcaggtaaccatctacacacaaagtccagttggaatatttacagagagagttggtaaagtaggggggaaatggtrcctgtggggtagtgccaaaaggcagggaaatataggatggtacatttgtgggaagagttaagtctgctcctaaattccctggcattgctgtctcctagctaatgagcaagcattgtaaaggagtccatctttatgtgggaatagcatgcaggaaaccctttctctttgcaaattgctattctgccatcagacaagcagagtaagaaataatgtttctcccagcattttaactcttttcagcccaacaatcctcagtattttaggaagaaatattttagtttccttcagtggaaaggattacaaacatatgccttgaaaggtcaagattcatacaagtaaattaaaacaaaataatttttatatgtttctctcccagactaaagataccctttaggaaaaggaatttcctgatggattttaagaacttgaactctgtttcaaactctgatg

SEQ ID NO: 539869 - DNA, 339 bp, Homo sapiens
tggtacatttgtgggaagagttaagtctgctcctaaattccctggcattgctgtctcctagctaatgagcaagcattgtaaaggagtccatctttatgtgggaatagcatgcaggaaaccctttctctttgcaaattgctattctgccatcagacmagcagagtaagaaataatgtttctcccagcattttaactcttttcagcccaacaatcctcagtattttaggaagaaatattttagtttccttcagtggaaaggattacaaacatatgccttgaaaggtcaagattcatacaagtaaattaaaacaaaataatttttatatgtttctctcccag

SEQ ID NO: 539870 - DNA, 632 bp, Homo sapiens
tgcctctattattctctggtgctatagtcagtggtaattaggggcagggaagatgtagagagatacttataccccaaaatgacttagagagaaatcgtttgcttgtagcacgagcccaactggaaaaaaaaaaaaaaaaggctaccttatttttttagaagtccttggattctgggatattatttgtgtatcaccattaaacccctgcttttgtgcagcttgtatgtaacttgcttcactaagtaagccattattttacaacccttgcttgcctcaaaagcacctgagaagctttctaaaatacaattcctgggctgcaacttagatttacagaatattctctttctctctctctctctctctctctctctctctstgtgtgtgtgtgtgtgtgtgtaaaccgctcaggtgattctgatgcacagctcactttgggaactgcacaaaagtttgttgtaattcttccacttttgtgatcttaattgagtggaggattacaaaagaccgagtagaaagacagaaggtgtgggaagtgaggcttgtaattgagacattaggattttatagctattcgatgaagataatttcatgacagtgtcaaaaagcctgtatccgatcactgagatgtctct

SEQ ID NO: 539871 - DNA, 441 bp, Homo sapiens
aataaaaagttctcatgtggatgagagcaattaccttctaattgctctccctgmgacaagtctaacctgtcacatacttaacctccacacaagaccatggcaatctgtgatcacgacctgactccccctgtgcccccaccttgcatgctaagtcatccactgggcaaagcccaactctgccacacaagcctccctaccttgaagacttgcttttcgctactctcctccatcttggaacctattgccaggacctcctttcttctgggaattgctaccccgcacacatccacatggttaccatttgagctgtggtgtctgtgtaacctttggccacagttggttggttctgggatgggcacttgaccaaatagggaccaattacagtcccttctccacatcacacctcccctactacagttggttggtccagaagtcagaact

SEQ ID NO: 539872 - DNA, 574 bp, Homo sapiens
tgcagggatttgggaaggctgcctggaagcattttataggtaggatttgaacaggtcaagagaatagtgcttctaggctgagagaacatcaggaaccaaggtataatgattttttttaagtgagctctgttaggagatctcagtggttcattttggaggagtgtgcatgaaaagaaacaacaggagatgaagttggaacacagtttggggccagatgtcaagggtctctactgctggatgaatgaatgtaagttttaatttatagctactgaagactcttgaaccgggaaccatccctrtcagagcatggactggagaggggacaccaaaagcccaggcaggtgattgcatgaggcatgagataataaggcctctagcaggatggagacagtagaaattgggaacaggatctatttcaggaagattaatgagcaggtgtgttcaataagatgagttagcaagccagagtatatctgcatgagataaacagcccacttccaatttcatggtgtgccttcgaagcacacagtagaactttggctttacttttgaggcaaattcactgcggttggcc

SEQ ID NO: 539873 - DNA, 651 bp, Homo sapiens
catggttgtgtctttttaaaaatatattgagaactkggtctaatctttctctccctctgtctctccactccctatccatttataggtactgaaatgtggcagtaaccagctaaattagcaacttaatttctttacccaacattatgttttggagatctatccatgacatagaatgatagatatacatacagtccattcctttttaactgctctataatagatcattgaatgactctaccagattttatttattcatttccctatgatggacatttagattgtttctagtttttttcctaatgcaagcaatgtagctgtccatatcctcataccaggttcctaagagtggttgtatgatttattcacaattacttattttctcagtccttgtcactgagcaatgggtttactgtctaatgtacatagaagctaatactatggtaccagccttggggaaaaaaaagctttattgcaaggttgactggcaaggagacaagaggcaatgttgaaatatgtctccccaagcaggggtcttgtggaaggttttatagggagggattaactatgaggaagaaaggaaaatgcaaaaagtcatgatttgtttgggtttttcagagacgtggtgcctggcccctggctcttaagttcaga

SEQ ID NO: 539874 - DNA, 553 bp, Homo sapiens
gctggatacgctggacaaaggaatgattcatgtctcaggcaggacggagtgagatgcccaggacagagcaggacagcatgagatttcatcatactgctcagaatgatgtgcaatttaaaatttatgaattgttcatttctggaattttccacttagtattttcatactgtggttgactgcgggtaactgaaactgcagaaagcaaagctgtggatagaggaactactatagacagataatttctatacaaatggtaagagataacagaggggccattcattgcaggacactgatgaacctcacagaggaaggggctttagagctgggattggaagtgacaataacaaacacatattgccagctctgtatcgggcattaccctaagtgctttatgattaggagctcattttrtcttaaccacactgccatgagataaaaatctttataaattatggagatggagtcttgctctgtcacccaggctggagtgcagttttgcgatctcagctcactgcaacctccacctcctgggttcaagagattccccccactc

SEQ ID NO: 539875 - DNA, 608 bp, Homo sapiens
agaataatatcggtgaattgcccccatgattcaattatctccacctggtcccgttcttgacacgtagagattattacaattcaaggtgagatttgggtgggcacacagagccaaatcatatcatccattttgtactttataatgtttttaacccaaattaatttgatcttgtgatattttctctttaatgtatgggcccagcattttaaaaagatcttattgagctcttttagtattttgacttggycctccaggggtttctccattcacactgtcctagcttcatatcccctacaggtctgagcagcttgccttccaaatctttatccaagctgaatcacttagcagagcattgtgatggacaaagctcgtggtaggctgtaagaaattgcctctccagttaaaactaacccattttcatctgaggcagattccttcagagtcatgtactaaggcttggttgaatttcacaacataacatagactggggaagaaatggactttactagaaaatgaagcaaacgtacaaaatgagagttaacaagggaaggcagggctccctctctcccactatcctcatgagaggtgggtggtgccagggcattaca

SEQ ID NO: 539876 - DNA, 548 bp, Homo sapiens
atttgtgaagttctgtttaatgagggttatcaagtcgcttcttaatggcatctgtcggactcctagccccctctgctattcatacaggcccaaggcctcccattatatgccccatgatgcagccggatgggccccctctttgatctgggcatctctgccctcatacgtggtgggcagtcccaccctcccccactgctctgggagctgttccgtcccagcccctccatgtcttatctttctcttccactttctgttttctctcctgtcctctcttcccatcatcccattgcttctgttttctgtcttccttcccagcctcctgcctcttccttctttgtcacgcattcamcctgtctctcatcaacactaaggccagcacgtgtcaccaaactgcctcccatcagaggcctctgacattctccaagtcctccttcaacatgttgcattctgacagtatgagatcctgaattataaacattacccacccactatttattaatcgcacttttatcttttggcctgaaactttgtctctcacctgctaccag

SEQ ID NO: 539877 - DNA, 387 bp, Homo sapiens
accatgcccggcctcagtttatttattagtagcatcccttttcactcttggaagtgttctggtttagacggtcagttttgtagtcccctcaatatcaagtttttcattatctgaatctcccacttctccagctcttcagcacatccactcagcagcttatctcctgctcatctctccctgggcttcctcctcccactggagcaggatggctgtagcagatrttccagaagcaacatctaggaagtcacatccagataggacagtgtctaaaggatggaaacaactgttttctctgtgtctatttcttaggaatgggaatgtctttcccagaagtcttcaggagacttcccttcatgtctaactgagaaggattgagtcacttgctct

SEQ ID NO: 539878 - DNA, 602 bp, Homo sapiens
tgctacagatggaaagaccaggtgtcagggatggtgctacttgagccattagaagggattctcaagctctctttagctctagtttatttcagacttagaactgaagagatccatttgagccactgggtgcagtttcttgacataagtaagaatctatctggacactttcatatattccaaacttgtgaatatcactataaccattcatttcctaaacttgaattgacaccaaccatctcaaaaaaaaggctgttttgcggactaaatacctcaaaacttcactaaaatgctgatgacaggtacctgggacaactcacttatcacmtgaagtgctcccttctgccccacagcctcactgccttgaatctgtgctaagttgctaaatatcttacgaaatactaaattactgaactcgcgataaagtaccgaatatcttgaacctttgaaggcatttgggaatagtcagtactataaatgttaaaactttgggtctcaaaagtaaactgcatcggaatgggatattattaactgggaaatgaaggttcttttcttccaaataagaaaatataacaaaatctaaacaaagcagttaagaagccagc

SEQ ID NO: 539879 - DNA, 602 bp, Homo sapiens
tgctacagatggaaagaccaggtgtcagggatggtgctacttgagccattagaagggattctcaagctctctttagctctagtttatttcagacttagaactgaagagatccatttgagccactgggtgcagtttcttgacataagtaagaatctatctggacactttcatatattccaaacttgtgaatatcactataaccattcatttcctaaacttgaattgacaccaaccatctcaaaaaaaaggctgttttgcggactaaatacctcaaaacttcactaaaatgctgatgacaggtacctgggacaactcacttatcacctgaagtgctcccttctgccccacagcctcactgccttgaatctgtgctaagttgctaaatatcttacgaaatactaaattactgaactcgcgataaagtaccgaatatcttgaacctttgaaggcatttgggaatagtcagtactataaatgttaaaactttgggtctcaaaagtaaactgcatyggaatgggatattattaactgggaaatgaaggttcttttcttccaaataagaaaatataacaaaatctaaacaaagcagttaagaagccagc

SEQ ID NO: 539880 - DNA, 608 bp, Homo sapiens
tggctattggctcatctaggatggatgtggcactgatgaatggggcaactttgctgtgttctgtttcatcctcctgcagactaacctgggtatgttttcctggaaattgcacaggaacaagaccagaagccagaatactcaaacatttttcaagccactgctgaaatcatgtttactaagtctcattggccaaagcaattcatgtggccaagcccagagtcagagtgggagagcacaaaaaattagatggtaaaggtctgggatgcaggtatcggagaagaatcggagtcatttttttttttcatttkgctacaaatatgaacatggaaaagtatacagcttaaatgttcaattttatgaattcataaactgaacacatctaaacagtacctggattaagaaacagaactataccagcactttagaagctctcttcatgctcccttccagtaacttttctcaccaccccgcaaaggtagccattatcctgctttctagcaacatagattagttttgcccatttttgtactttatataaatggaattagatgatgcataaatactctttgtgtctggcttctttcactcaacattttgcttatgaaatt

SEQ ID NO: 539881 - DNA, 561 bp, Homo sapiens
ttgtgtctggcttctttcactcaacattttgcttatgaaattcatcctactgttgcatgcagttgtcaactattcattttcattgttgtatattactttgtttgaacattttatttagccaatctactgtagatgggaatttgaataatttctagtttgggcccattatgaacaaaactcctataattattcttatataaaacttttggtagagataagtactcagttcctttgagtatacacttagaagtggaacttcatatgtgtagcatatgatatactattctgcataataccamaaattttttcaagtactttaccattttaccatcccatagcagtatatgcaagttccagttgttccatgctatattttgattcttgagggtgctttaattttgtcctcttcatagcataagggtacatttgtgaaaatgcttgctctcctcccttcataaaagttccatgtgcatgggtttttctttataccttcaataggaaatatgatcaaacatccttaaaatcaaagaattattggctgaaggagcccagtgccttgtt

SEQ ID NO: 539882 - DNA, 613 bp, Homo sapiens
ataggattgttgaaggattaagtgaagtaatgtatgtcaaattcttggcacccaatggttgcttaataagtgttagctattattattatgacttagatgttgactgtttgatgtaaccaatacaggtagatagaactctaaggttccttataggtgaagactatgataggtccattggcatattaattaatatttgttaaatgagtaaatgatggagatgccctttttatacagttaactttcaaataagaagttttaaaaaggtccagagtggtttgttctttcaaaaaatatatataattcttttttaaagagatggagtctcactgcatcacccaggctggagtgcagtggcatgatcatagctcgctgcaacctacaactcctggtctygagcaatcctcctgcctcatccttctgagtagctgggactatagtcacatgccactatgcctggctaatttttttattttttattttgtagagatggagtcttgctttgttgcccaggctggtctcaaactcctggcctcaagtgatccttctactttggcttcccaaagtactgggactacaagtgtgagccgctgatgtttagcttctggaaatattt

SEQ ID NO: 539883 - DNA, 668 bp, Homo sapiens
tgtttagtagcatgccatgcagaggaaataggatgcggctgtgggaaacaatgaatttggaatattaagatcwgggttaaaattctggcttgacctgaggaaattatatagatcatctgaaactaggaggctggactggaaggtgtgagtatcctgttatcacagactaatgcaaggccactactagctaactcagcaattgtcaacagccatcagagggtacagaaaagcttttgtgtgacccctcaacatctacctaattgaactgatgtgaaagtcttgtcacagtgaattagaaatggaccatgtatgatctaacttcataataagctaatttcatttatatcttaaatgtctaaatgagatgttagtcttatcactttttaaattctatattctaattaccattactagctcccaccaatacctccgtttctttattattaaaatgtccccaacttcaaaggcaggcaaactgaggcaggaaatgaagatgtactaagtcagtatcagaatgagaagaagcattcatgaggttggtcctaactacggggcctttggctattaccagatgctttcatgagaagtcccatcatatgaatctttccaacagttgtatgaaaatatttaattttgctgcctatatcagaaaaaaagcaagtattgat

SEQ ID NO: 539884 - DNA, 503 bp, Homo sapiens
aataatgcagtaccatgatagttgattactgttcacaacttttagtacatctggtagtctgagcctttagatactgcatatccatttcctagttgaattaacttttatttcatgtcttttaaactgggttcttgccttttgactggattggtaagttactggaccatctaagcctttttccttatcagaaacagtgtctttcttcctctgtattgtgaaatgagtgcaaatagcctgaatgtattagtccgttttcacactgctgtaaagaactacctaagactgggtaatttataaaaagaagaggtttaattgactcccagttctgcatggctggrgaggcctcaggaaacttacaatcatggtggaaagtgaaggggaagcaagtcgtatcttacatgacatcgggagagagagtgaaagagtgaggaagtgccacagtttaaaaccatcagctcttatgagaactcattcactatcttgagagcagcatggggaagatg

SEQ ID NO: 539885 - DNA, 607 bp, Homo sapiens
tcacctggaaactttttgtgccaatgttattttagatttatgctaataaaaatttattccagttttaagactttaaatcctcctacatttacttgccaaatacaccgtgtgagttcttgaacaagttgcctccttgcatcagtccattttcatgctgctgataaagacatacctgagactggggaatttacaaaagaaatagtttcattggacttacagtttcacatggctggggaggcctcacaatcgtggtggaaggcaaggaggagcaagtcacatcttacatagatggcagcggcaaaatgagagcttgtgcagaaaaactcccgtttttaaaaccatcagatctcatgtgacccattcactatcacaaggacagcacaggagagacctgccctcatgattcaatcatctctcactgggttccttcccacaatatgtgggaattatggaagctccaaggtgagatttgtgtggggacacagggctaaaccatattgttctgcccrgcccctgtaaaatctcatatctgcacatttcaaaaccaattatgccttcccaacagtcccccaaactctcaactcatttcagcattaactcaaaagtc

SEQ ID NO: 539886 - DNA, 557 bp, Homo sapiens
ccatgagcccatccctctgaggcaccaatctttaacatgtgtctagagggtcccctgctggaacctagcagtctcgggcatggwcacaaccacaataaaaataggaaaggtcaagaaagactggcctttgtctctggccacttctagcagcttcactgcctcccaagtgattgtaaaatcattgagtctgaacaaactaccgcttgacagtgcatgccacccaggattctgtaccatggccagcacgaagctaggaattaataataactgtgagtgattatcacggaaactgtctctaggaaaaatgaccaggtttttaccattcaaccttggggagataaaatcaggcatagcagaaaaaggacaaatgatctaagagcaaatgcaggactccagatccaaagagcattcttgaggcccgattatacacctgtctcatctccctgtctcagaggcaggtgacgagaaggggaggaggtatctccatccagcccatcaaccaactccaaaccctgtgctcattctagaccctccccaacacctccttgcccttattc

SEQ ID NO: 539887 - DNA, 653 bp, Homo sapiens
gatagatgaatggatagatgaaatgtaaaatatctatataatagaatcttactcagccttcagaagaaaagaaattctgcattatgctaagtaaaagaagccagtcacaaaaagacaaatactgtatgattccacttacatgagataactagagtagtcaaattcatagagactgagggaaggggggaataagagttggtatttcaagggtctaragttcagtttgggaagctgaaaaagttctggagatctgtcgtacaaaaatgtgaatatacttaacattactggactacatactaaaaaataggatggtaagtttcatgttatgtgctttttatcacaataaaggaatggaagatgaagattccatagtggtcagagagccttggtggagtggaataaatccaacaggcacaggcatctcccatggtgcctttcctttcaaatgaaggcctgtattcaacagacatacctctcttccattagcatgacttctggatcttcttaatttatgatcctgctagtgagctttacttcagggtaggaggctaaggaggcagaagtgtatgagacaagaattttcccaccagttgtcttccaattgatactgagaaattttctactcccgctaaagaacagcaaggagaaatttg

SEQ ID NO: 539888 - DNA, 642 bp, Homo sapiens
tcagagctgctgcctgagtgtgctctttgagctgcactcctgcctgctagtaagtttgtgttagagttgttgccctaagtcagaagttttgcatttagggacaagagtacaggattgcagccctccttaaaatggccccagttttggtatcccagcccaaacctatctgtttcagattgaatcatgtgcctcaatttcagcatgaactgggactgatgctagactcagagagatgactcttactctgtgtctattggttgtgcatttcagccatgcattggtctcattctatagagtgttcaagaaaaagattgataccatgtgcaatatgcaggcccatcaggtggtcatgggtgattgctggtgtgaggaagaaaataggcmgtcactatgtcaagtgctgaggtcacattcttaaaagaagttggctcattaggaccctaagtgcttctagtgcaaaaaagatcctgatcctcagaattatgaggagaaacacccatgacacccccgtgacagaaacccttatgaaaagcactctaaatgtttttcccctacccctcttaaagagccagaggacaccatcaccctattggataattgtaaaatggaccaatgaagactctaggtcctattgagagccac

SEQ ID NO: 539889 - DNA, 606 bp, Homo sapiens
tcctgaacctttgaagttggattcagagaaggaagcttagagtaagaataggtattatcatccccattttccagctgagaaaacagaggcttggcaagattgttacttgcccaagatcagacatctagtaaaccaatagagtagatctgtgttactctatacccatggtcttaatcactataccatactgattcctgatgagcactgaagagtagaaggaagtggtatgatatattggatggaaagttatcctaagtttggagtctggcaaggaaaaaggtaccaactgctgcctaaaactttctgccatctccttattgagtaagatgttttcctagatgaattgtcctggggtgcaccattagactatagaatctggaattttctttgattaagtcattgaaccataatatcatctgaaaagtttttaataatatgaatgtcartgaaatcatgtattaaagaaaaatttgctcataattatatcatcctgaaatataaaggtgccttcttttatgtatgctctgctctatctggtccacatatttatgcttatattatgttcacactggtatgatacctgggaatcatttaaggccttttatc

SEQ ID NO: 539890 - DNA, 619 bp, Homo sapiens
gatctaaacctccctgtaccttagtcctatgagatcatgactagagtctgcctgtatgtttttcagccaacagctacatggaatcaaagtgtcaggctgtcatccaagaactgcgtaagtgttgtgctcagtatcccaagggaagatctgtcgtctgttcaggatttgaaaaagaagaggaagaaaacctaacacggaagtytgcatcaaagtaaagttcttctgaagtgctgctccatgtttccaccaaatgaattttttttatcctcctgactcttcaggccaggtagcagcaaatagcaaatgaaaaagtcagctacaaaagttaatgaatatgccatctatgcagaacaggcagaaatataaacacattaaaagacaaatatgtagaatgtaatatactgagctgctaaaataaacctgtttaagagaaaaatttgggttttgtactaaatgtattttaagactattagatatagggtattaatgaattctcttgaagttcaagccactagtgccattcatcaaatttaagtcatatgaggtatgttaggtgaaaggactcacttccagcatcacaattttgacgcccttttttttttttttttttttttttttt

SEQ ID NO: 539891 - DNA, 490 bp, Homo sapiens
ctgctctggagaaatttctactcggtccttcctcttatcagaacgtcgtaagatgatgacagaatgaatgtgaacaattctgacggcatcaacctaaaggaaaatccacagaaatggttacttacagctctctccaataacacatcccccttcaactatagaattgcattttattataatatcagataaaatattccattttagaaaactgacacttttctcacgaataatgaaatgtttcaaataaaagacacccaacctcaatatatacatttcagacacaaaaatataaaatatatatgctaatatttaaatcaaggaaggacttttaggatgatcaactagtaattatttgacttacaactatgtacaaaacactgtattgcacaaaggaatataaatcagagcactgacaaagggttcaatgtgctaacgacatggttgagtggcaagytgtcattcatgaaactccactaagataatgtagtaa

SEQ ID NO: 539892 - DNA, 583 bp, Homo sapiens
agacaaaaatgcctgtctttatgaagcttatgttctattgggagaagacaggcagtaaacaaataagtagaatttatttttttatcagatggaaataaagcagacacacaggatgaacagtgatagggtgtagagggttacaattatataaagtgatcagggattgcctgaagggaacaacccattctagtctaagtaatttgagacatgctgtattatggacattgtgttttacrtcaagaaggaaccaagacagattcaagaagttgccttctcctatgtcctccctctcacccaagaatccttgggaatccagaaccggggtgtccagtgtgatagccactagtccatgtgctacttaaatttaaattaataaaattaaataaaacttcaaaatcaatttctcagtcatactacctacacttcaagtgcttaaaagctacagggctaatgtctactatattggacagcaaagagaacctttccattattgcagaaactcctgttggttagagctgctcttgaatgaagtgggacagtatcttagacaaggaaaatggcttaacaatgggcacaatgacct

SEQ ID NO: 539893 - DNA, 690 bp, Homo sapiens
agctgtttttataactattacccattctgtatttctttgttttccttattaacagaggcaatgtgtccagctataaacacattctaaggctccatatgaaatatcagaaactctgagagatcttccacttcctaattcagataatacccctcctacttgatgaaatgtggaggcaatgcttgcaggtacaaccgtcatgttatagccrtgagttgacaaatataacagtgacatggtaaaaataatagagcagaaaaagagtgcccagctcccaggcacatcattagaaagctggcctgctctaactgcctccatctagatcttttgtaggtggagaagacaaacccctttagtttaagctactgctaataaggctgtttgttagctgtagctgaatgcattcctaacagaaatagttatattattttcattcttcattggttcttcactgataactttataagtataataaaataatacactgtaggaatacatgtgagtataatgatacacttaaatctcttgtttcttgttttatcttcattagacaatatcttatgactgattccactctttaattatgtgtttactgttatattcaaagagatgctggaacgaggaagaggttaaagagagattatttgccatcttgaactaggaatatcacatctcttttgtatacttaattgg

SEQ ID NO: 539894 - DNA, 446 bp, Homo sapiens
tttttataactattacccattctgtatttctttgttttccttattaacagaggcaatgtgtccagctataaacacattctaaggctccatatgaaatatcagaaactctgagagatcttccacttcctaattcagataatacccctcctacttgatgaaatgtggaggcaatgcttgcaggtacaaccgtcatgttatagccgtgagttgacaaayataacagtgacatggtaaaaataatagagcagaaaaagagtgcccagctcccaggcacatcattagaaagctggcctgctctaactgcctccatctagatcttttgtaggtggagaagacaaacccctttagtttaagctactgctaataaggctgtttgttagctgtagctgaatgcattcctaacagaaatagttatattattttcattcttcattggttcttcactg

SEQ ID NO: 539895 - DNA, 516 bp, Homo sapiens
ggtatttgaatcaaaattgcatgaaatctatagattactctgggggaatattggcatctaaacaatattaagtcttccacttcatgaacatggaaggcctttccatttatataggtcttctttaatttagttcggcaatatttgcagttttcagtggacaactcttacatatcctttgttaaatttattgccaagtattatattctttttgatgttattataaatggaatatttattttaatttttttgaattgttcatggctagtggtctttgttttctgttcctataacagaccaccacagagtgggtaatgtataaagaaaagaagtttatttagctcacagttctggagtctgggagctccaacaatacacaaccagcatctggtgagagtgttcttgctgcaccatagcatgattgaaatctgcacactgtgtatagggcaagtacaaaagagccagaaagagctggataatgyctaaaaatatgtgagatgagaatagaaagtttgaaag

SEQ ID NO: 539896 - DNA, 496 bp, Homo sapiens
tctaaataaatatccccaaaatattcattgcaagatggccagtatctcatccagaatgcataaatgtatgaagaaattgaatattaataatagcaagaacataaaaactaaggaaggatgsagaagtgtggtgggcagaattctaagatgatccctgttagtttggtaaggttgccataataaagcaccacaactgtaaggaaaatggatgtgctgcagtcaagaataggcctaggtaaacatccattgcagcatgactcagcaagtttggagtgcaggcacacaactctgctcattatataacctgtttgtgtaagctcatacttggctctgagccacaattgtctgtaaacgctataattgtgctgccaacactgtacatagggcttgtgaccagagagagagagggaaaagctgctgaccctctaagggaatgctggccaccttgtaggtggatggaggggagccaggaacgggcgagcataggggaatgcag

SEQ ID NO: 539897 - DNA, 496 bp, Homo sapiens
tctaaataaatatccccaaaatattcattgcaagatggccagtatctcatccagaatgcataaatgtatgaagaaattgaatattaataatagcaagaacataaaaactaaggaaggatgcagaagtgtggtgggcagaattctaagatgatccctgttagtttggtaaggttgccataataaagcaccacaactgtaaggaaaatggatgtgctgcagtcaagaataggcctaggtaaacatccattgcagcatgactcagcaagtttggagtgcaggcacacaactctgctcattatataacctgtttgtgtaagctcatacttggctctgagccacaattgtctgtaaacgstataattgtgctgccaacactgtacatagggcttgtgaccagagagagagagggaaaagctgctgaccctctaagggaatgctggccaccttgtaggtggatggaggggagccaggaacgggcgagcataggggaatgcag

SEQ ID NO: 539898 - DNA, 533 bp, Homo sapiens
ataaaaataaaatagttatgctatttacaagacacacctgttgaaataaggyagtgtaaatataaataaaagggtggaatatttatcatgtaaatgccaaaagaagacaaaaaataaaacctacagttaatatcacactcagtggagaaactgaaagcttttcctctaagaccagaaataaaacaagttgcccagtttcaccgcctctattaagcacattacaaaaagttttagccatagcaattatgcccaaaaaatagacatcaaagttggaaagcaagaagtacaattatctcctttcacagacatgattttatatgtagaaaaccctaaaatctttctctctcctctctctgtctccctctctctctctgtctctctctctctccctctctcctctctctctttctcacacacaccacacaaacaaacacacacacaatggttagagctaaaataaattcagaaaagtttcagaataaaaatcaccatgcaaaagccatttgtttctatatactaataatgaacaatca

SEQ ID NO: 539899 - DNA, 533 bp, Homo sapiens
ataaaaataaaatagttatgctatttacaagacacacctgttgaaataaggcagtgtaaatataaataaaagggtggaatatttatcatgtaaatgccaaaagaagacaaaaaataaaacctacagttaatatcacactcagtggagaaactgaaagcttttcctctaagaccagaaataaaacaagttgcccagtttcaccgcctctattaagcacattacaaaaagttttagccatagcaattatgcccaaaaaatagacatcaaagttggaaagcaagaagtacaattatctcytttcacagacatgattttatatgtagaaaaccctaaaatctttctctctcctctctctgtctccctctctctctctgtctctctctctctccctctctcctctctctctttctcacacacaccacacaaacaaacacacacacaatggttagagctaaaataaattcagaaaagtttcagaataaaaatcaccatgcaaaagccatttgtttctatatactaataatgaacaatca

SEQ ID NO: 539900 - DNA, 533 bp, Homo sapiens
ataaaaataaaatagttatgctatttacaagacacacctgttgaaataaggcagtgtaaatataaataaaagggtggaatatttatcatgtaaatgccaaaagaagacaaaaaataaaacctacagttaatatcacactcagtggagaaactgaaagcttttcctctaagaccagaaataaaacaagttgcccagtttcaccgcctctattaagcacattacaaaaagttttagccatagcaattatgcccaaaaaatagacatcaaagttggaaagcaagaagtacaattatctcctttcacagacatgattttatatgtagaaaaccctaaaatctttctctctcctctctctgtctccctctctctctctgtctctctctctctccctctctcctcyctctctttctcacacacaccacacaaacaaacacacacacaatggttagagctaaaataaattcagaaaagtttcagaataaaaatcaccatgcaaaagccatttgtttctatatactaataatgaacaatca

SEQ ID NO: 539901 - DNA, 449 bp, Homo sapiens
tataatcaaagaaatgctcctatgcaggcatattccctttccattctatgaacacacacacacacacacacacacgcacatattattcatttttagaaatgagcctaatcatatatatataatacatacattatatatatatatacaagagacacagctttaaattatacagaatgacagtttaytaagttgtcatagagcctgctatctgaggggaagaatattggattctttctatagccaaccaaaaaaataaaaaataaaaaacaaaaaacagaaagcccctccctctaatgtttttcatttaagtcccaactgtgctgtagcctttaactgtgtaagacagcaagacagcacattttgtagattaaaccaataaactcacaaacataaaagaaacaaatctcataattgcggatttcaattaaaggaagggggatcaacgcaaa

SEQ ID NO: 539902 - DNA, 623 bp, Homo sapiens
ctgagtcagctcctctctctctctctcccgcgctgacgtgaccacgtagcctaggcctcaggatgcgcacccgcgggctcagtccccacgccgcgctgccttcctcsctcctcacccattgggttgggggtgggggaggcacaagaccccgcccttccgctctggcagcggctgcggagggatcaatttttgtttttgttgtgattgctcgtgaagacttggtcataaattctttgcctaggccaatgtctagaagagtatttcgaaggcttttgtctaggatttttatagttttaagtcttacatgtaagtctttaatccatcttgagttcatttttatatccggtaagaggtagggatccagtttcattcttctgcatatggccagccagctatctcagcaccatttattgaatagggagtcctcttttccctattttttaattttgtcaactttgtcaaaggtcagttggttgtaggtctgtagctttatttctgggttctctcttctgttccattggtctatgtgtctgttttgtaccagtaccattctgttttggttactgtagccttatagtatagtttgaagtcagccgaggtgatgcttccagctttattctttt

SEQ ID NO: 539903 - DNA, 623 bp, Homo sapiens
ctgagtcagctcctctctctctctctcccgcgctgacgtgaccacgtagcctaggcctcaggatgcgcacccgcgggctcagtccccacgccgcgctgccttcctcgctcctcacccattgggttgggggtgggggaggcacaagaccccgcccttccgctcyggcagcggctgcggagggatcaatttttgtttttgttgtgattgctcgtgaagacttggtcataaattctttgcctaggccaatgtctagaagagtatttcgaaggcttttgtctaggatttttatagttttaagtcttacatgtaagtctttaatccatcttgagttcatttttatatccggtaagaggtagggatccagtttcattcttctgcatatggccagccagctatctcagcaccatttattgaatagggagtcctcttttccctattttttaattttgtcaactttgtcaaaggtcagttggttgtaggtctgtagctttatttctgggttctctcttctgttccattggtctatgtgtctgttttgtaccagtaccattctgttttggttactgtagccttatagtatagtttgaagtcagccgaggtgatgcttccagctttattctttt

SEQ ID NO: 539904 - DNA, 477 bp, Homo sapiens
ctgcaatgtgagacgtgactttcactgtctgccatgattgtgaggcctcctcagccatgtggaactgtgagtccattaaacctctttcttttgtaaattgcccagtctcggggatatctttatcagcagtgtgaaaaaagactaatataactggcaaaactattgaaataaaaataaaaatttaaaaattgtttcaccaaatattctgacaagaagtaacactgagtagaatctcattggagaaaaacatccaccaggaaattcctccccaccttgaaatagacacttgtgcagctttggctcatcaaaaccctaacctgttggtaggagcagcaatgctgggtggcagatctggtgtctggcaggagatggcacctgctagggatgaaagtgagcaaagcaggagaagagaaaaagaastgttgacagtacagctgagcagagttttcctgagtgcatgaatgaggcatgctctgc

SEQ ID NO: 539905 - DNA, 615 bp, Homo sapiens
ctctggtgtttgttttctgctrtttaggctatcaaagttagttagtgactcacagcaaaaagaagatactgatattttcttgggttttgtttataatcatgttttgagcttatatagacatgctctttcttaaaattcatttatttgcttttcatccatggaaaaccagttttttttcaatgagttataaagtatttaataagaagagattctgatttaattatatccagagatggctttggatcatgttatttaagatggagaatgactatttagaaatattaatgtttggccgggtgcagtggcacacacctgtaatcctagtactttgggaggctgaggcaggcaggtcacttgaggtcaggagttcaagaccagcttggccaaacatgttgaaaccctgtctctaataaaaatacaaaaaatagccaggcatggtggtacacacctgtaatcccagctacttgggaggctgagggaggaaaatcacttgaacctgggaggaggttgcagtgagccaagatcatgccactgtactccagcctaggtgacaaaacaagactctgcttcagaaaaaaaaaaaaaaattggtgtggtagtgcatgcctgtagtcc

SEQ ID NO: 539906 - DNA, 556 bp, Homo sapiens
ttcagttgaggaagcagcatggggctatatcctattcactgccaaccttaatgaaattgagcagtctttgtgtttctaggtcattccactggtgatgtgagatcccccacccttgttcttctctaggaaggatcttgtatttgtcaatggtccttcttcatgtttttaaaaatcttttctatgtgtacttagtggttacattttagatacctcttactacctgcattttgtacagtgaaatctgcttatttttgtagtaagtgattttagcatccttaaaaaatgcagcaaagatataaaacctgggatttttaaatggggcaagcatagggaaggtagatggataygcagatggctttgttcagagaggacttctgatttgtggatatgtactgagctgttgcagcagtggccaaggcaatgtgtaaggtgttacaagaccaagtgagaggactccaagaagctcaagtccaggaggaggggaggaggtggcaaggaagtggcaggagcctaaagactcccaggtagaatcaggataggagattacaggcagaga

SEQ ID NO: 539907 - DNA, 620 bp, Homo sapiens
ccaagtgcaggttattttctctacatttggctatcagcttaggaatagaagctcattacaagaaatgctcaagtctccttttcttcctggcacagctacctctgcagtgaaccgaagaccatgcaaagtttaggatttggccaaaccaaagaaacattgtggcattttcatactacgatgaaaatacaagagggatccattctgatggtcgagttgatgggcattcccatggccttgccagaaagacagactgcatcttcaactctaaatgacttccattgtagtgaccattacctccaagcagatatcctgccctgattgtyccaatagggtatcctcaaataagactgggaagtgtcagggaaaacagactcctttgatataagtcatttttaggggggaaaaaatcaatgtcctagttttagtttcagataaatcatgagtcaaaacatgctgtttagttaaaaaaaaaaaaaaaaaaaaaaaaagattcaccataatcaggaaggcaaagcactccccaagtacattctagtatgtatctttgtgttttcatgtgagtgagattcccactaagtctaaaaaagggagaccacctcttctgtgtcctgccaactccc

SEQ ID NO: 539908 - DNA, 620 bp, Homo sapiens
ccaagtgcaggttattttctctacatttggctatcagcttaggaatagaagctcattacaagaaatgctcaagtctccttttcttcctggcacagctacctctgcagtgaaccgaagaccatgcaaagtttaggatttggccaaaccaaagaaacattgtggcattttcatactacgatgaaaatacaagagggatccattctgatggtcgagttgatgggcattcccatggccttgccagaaagacagactgcatcttcaactctaaatgacttccattgtagtgaccattacctccaagcagatatcctgccctgattgtcccaatagggtatcctcaaataagactgggaagtgtcagggaaaacagactcctttgatataagtcatttttaggggggaaaaaatcaatgtcctagttttagtttcagataaatcatgagtcaaaacatgctgtttagttaaaaaaaaaaaaaaaaaaaaaaaaagattcascataatcaggaaggcaaagcactccccaagtacattctagtatgtatctttgtgttttcatgtgagtgagattcccactaagtctaaaaaagggagaccacctcttctgtgtcctgccaactccc

SEQ ID NO: 539909 - DNA, 524 bp, Homo sapiens
tggccacctgcatctttttagctgcatttaataattcagcccaggatgaatttgcatgattaacataaagcctcatagttttatttgctttcagaatttaagtactgaaaccaccaccattgttttcattttcggaggttgtgatcacaacacaaaacttgattctagaatgagtaatttcttttatttttttttttaagaattattttccagtaccactctccatggaataaaaggagttgcaaacatggcctttgtagatgcagggaaacccacgttccttttagagctgatgttaacccatgagaagcgaccacccctcgacgacttctccttcacggttcccayccaggagcacggccaactctcccccggaatccataacggctcacgcaaatagatttctttccgttcctcctcggagggctctccacatttatctgctcgagacgtggcagctccagtaagtctttaaaacagcagctctcccagattccagcaatagattaatgacgtcatcctca

SEQ ID NO: 539910 - DNA, 647 bp, Homo sapiens
ctgcatcctgcacgatacgctttctggttaatgttcatctttctggccttgaattcaaaccatacctatgcttagaatgaattgatagacctttccttttattctgctagggctaaaggtttatgatattgataatgtataacaacatatgccagtccaaaatatctattctaaataagaagagaatcaggaagagaagaggccacaggcctcttaggaatcgtattaggaagagaaaggaaatttcatgtgacatttggaaaagtaaatgctgacttgcttataayaaataattgaaataatattggtattcaggactgtacaaggctttacatcatagacagtgtgttttccattctgtacctggaacccaaagaagcaatgggcattgtgagaccagtcctgactgtatatgattaggagacagatgcccttccccacgggctgccctatgtgtccagtggggctgcagaaagaatgatactaacttcacggccaatactttattgcgttgataagaccatcttgcacttcatgttttgaagtttaaactgtgcagcagcatctttaaaaacaaatgacctaaaggtggggttttagttcttgagctccccagtgcggaagcctcctacaggccggcatgtgct

SEQ ID NO: 539911 - DNA, 647 bp, Homo sapiens
ctgcatcctgcacgatacgctttctggttaatgttcatctttctggccttgaattcaaaccatacctatgcttagaatgaattgatagacctttccttttattctgctagggctaaaggtttatgatattgataatgtataacaacatatgccagtccaaaatatctattctaaataagaagagaatcaggaagagaagaggccacaggcctcttaggaatcgtattaggaagagaaaggaaatttcatgtgacatttggaaaagtaaatgctgacttgcttataataaataattgaaataatattggtattcaggactgtacaaggctttacatcatagacagtgtgttttccattctgtacctggaacccaaagaagcaatgggcattgtgagaccagtcctgactgtatatgattaggagacagatgcccttccccacgggctgccctatgtgtccagtggggctgcagaaagaatgatactaacttcacggccartactttattgcgttgataagaccatcttgcacttcatgttttgaagtttaaactgtgcagcagcatctttaaaaacaaatgacctaaaggtggggttttagttcttgagctccccagtgcggaagcctcctacaggccggcatgtgct

SEQ ID NO: 539912 - DNA, 541 bp, Homo sapiens
tccttgtggtttttaatttgaagtttgtttatatgactgacatcaacaagaatacagcagaaactcccaacaggaagaagctgtgtttggcytgcatcagtaatttaggattttaagatatagtcaaaaccttcagaaggatggctatccttttttcttttctttttgcaaatgtaatttttcacaaacaaaatataaaagcggtgagaaatgttatgagtaagttctttttctaaagtttagactggagaataattttagtgatccaccaaattatcaaaaaacaattaccaaaccaaaaaaccctctaaaaagttattcaaagttactgtcctctgcattaagaacacagacatggggagagcaaagaggcttgaggctacacaatcttcaacccatcagggttctctcccaagggaaagcctagacctggccgtccatgcctccgatccagacagagcatcccagatagggcccaggttccttaaaagcaaaagcaaagctgggtcacctggagaccttgtctgggaggaggcagaag

SEQ ID NO: 539913 - DNA, 541 bp, Homo sapiens
tccttgtggtttttaatttgaagtttgtttatatgactgacatcaacaagaatacagcagaaactcccaacaggaagaagctgtgtttggcctgcatcagtaatttaggattttaagatrtagtcaaaaccttcagaaggatggctatccttttttcttttctttttgcaaatgtaatttttcacaaacaaaatataaaagcggtgagaaatgttatgagtaagttctttttctaaagtttagactggagaataattttagtgatccaccaaattatcaaaaaacaattaccaaaccaaaaaaccctctaaaaagttattcaaagttactgtcctctgcattaagaacacagacatggggagagcaaagaggcttgaggctacacaatcttcaacccatcagggttctctcccaagggaaagcctagacctggccgtccatgcctccgatccagacagagcatcccagatagggcccaggttccttaaaagcaaaagcaaagctgggtcacctggagaccttgtctgggaggaggcagaag

SEQ ID NO: 539914 - DNA, 541 bp, Homo sapiens
tccttgtggtttttaatttgaagtttgtttatatgactgacatcaacaagaatacagcagaaactcccaacaggaagaagctgtgtttggcctgcatcagtaatttaggattttaagatatagtcaaaaccttcrgaaggatggctatccttttttcttttctttttgcaaatgtaatttttcacaaacaaaatataaaagcggtgagaaatgttatgagtaagttctttttctaaagtttagactggagaataattttagtgatccaccaaattatcaaaaaacaattaccaaaccaaaaaaccctctaaaaagttattcaaagttactgtcctctgcattaagaacacagacatggggagagcaaagaggcttgaggctacacaatcttcaacccatcagggttctctcccaagggaaagcctagacctggccgtccatgcctccgatccagacagagcatcccagatagggcccaggttccttaaaagcaaaagcaaagctgggtcacctggagaccttgtctgggaggaggcagaag

SEQ ID NO: 539915 - DNA, 568 bp, Homo sapiens
tcaatgagtgtcaaccgtccatgaataacaattgttgtaaattgtcgatgaattgtgcttgatttttcttaagtgttgatttaacgaagatcttcttcaggatatatttacatatatttttaaatttctgttgcaaaactttgttctgtatgtcatttagtttctttgaataaggatgtaagccatgaaagattcaattagatttttttttttttttcgagacatagtcctgcgctgttgccgaggctggagtgcaatggcacaatctcagctccctgcaacctccgcctccygggttcaaatgattctcctgcctcagcctcctgagtagctgggattataggcacccaccaccatgcctagctaatttctgtatttttagtagagatggggtttcaccatgttggtcaggctggtctcaaactaccgacctcaaatgatccacccgcctcggcctcccagagtgctgggattacaggcgtgagccaccgagcctgaccccagatattttttcctctattaaaacttgctcatttctttaggtcgtagaaagcttgaaggaaactta

SEQ ID NO: 539916 - DNA, 633 bp, Homo sapiens
tgtgggaattagatagttttttttttattttcaaaattttcaccaactattaggggtgagaaaagagcaaaaatagggagtttatttttaaatgtgctatgactaaagaatgaaataaagatgaaaaatagttaaactgaataataaatcagaaattgggaaatctgaacatcaacctattacctgttatgtttctttaaaaattatgacttttcttctctactgaactttaatttttgaaatatgctcttcatactataatccaaccaagcaaacttacattcctttctctaaattgtttctttgaattattctttatttgtaagacatttttgtaaaaatgttcctgtcactcaaaagccacttaaccatataagtgtgtgtatatgtgtatcaaacactcacacatacwtgtgtatggtaggccttttaagcattcacattcatgaaatttcattacataggaatgttgagtgtgtgtgtgtgtctgtgtatagcattatatcagaagaaagctcaagaagcagacaattattctaacagaagttgaatagtgtgattgttctgctcactagtgttgactagaaaatgatacagaatttacctgtttttcgacccatttattctggagca

SEQ ID NO: 539917 - DNA, 633 bp, Homo sapiens
tgtgggaattagatagttttttttttattttcaaaattttcaccaactattaggggtgagaaaagagcaaaaatagggagtttatttttaaatgtgctatgactaaagaatgaaataaagatgaaaaatagttaaactgaataataaatcagaaattgggaaatctgaacatcaacctattacctgttatgtttctttaaaaattatgacttttcttctctactgaactttaatttttgaaatatgctcttcatactataatccaaccaagcaaacttacattcctttctctaaattgtttctttgaattattctttatttgtaagacatttttgtaaaaatgttcctgtcactcaaaagccacttaaccatataagtgtgtgtatatgtgtatcaaacactcacacatacttgtgtatggtrggccttttaagcattcacattcatgaaatttcattacataggaatgttgagtgtgtgtgtgtgtctgtgtatagcattatatcagaagaaagctcaagaagcagacaattattctaacagaagttgaatagtgtgattgttctgctcactagtgttgactagaaaatgatacagaatttacctgtttttcgacccatttattctggagca

SEQ ID NO: 539918 - DNA, 640 bp, Homo sapiens
ctgaatctactcttactatcaccttatgatttagtaaaaggccaactcacccacctagagatatcatgctgattataggctctgccttattgcaaatcggcagcacatatacttcaaaggacttgtgcaaaacactcattcttataatcaggaggtacagctggcccttcctcaacattgttttagacaactcttgtatgacctaaatcctgaagatctgatattcyggaagaaaatcctgaggacagcctataaaatcctatgaataggacacataagtatatgagcaaagctccaagaggctggtcttcggaatgacaactatcagtttaggagacacagctcttctcatgttggtggaaggacattcttcctagagacttcaaactgagaatactcagtttctccagaagcagccacctttaggctcatgtagaaactatgtaaagtttctgcccaatacccagaaaacaggattcagagtattatgtacagaaacagcagagtattatgccttaatgtgtgttaatgttctttatttttataactattttttcttctctttgttaatttatgtttctgacttgcagggaacactagttagctcttaactatgatgccttgaagcccttttacttaa

SEQ ID NO: 539919 - DNA, 357 bp, Homo sapiens
  misc_feature (1)...(357): n = A,T,C or G
ntgnaggagagagtaagattttgcccatgacagtggggtgataaacattgnttggactttttgntaattttaataaacagtaagtagttgctgcttgctgaaagcacatggagrggtatttaagtgccctggtccatggtggtggaggctgagttgataaggaagccagggatcagacagcccggcaaagtgaccatggtgatgatcaggtgcagagtgaattgtcttcatcccagtgacataatccaagatagtttccatgagcattttcctgtgcatgaaaatcaattgcaagtagaaaagaagctgttgcttctggagatattgattaaaacattgtatttacatgtagttatt

SEQ ID NO: 539920 - DNA, 583 bp, Homo sapiens
tgctggtgctgctgaagtctagagagtgtgccgccagcccaggccaaaattgacgcaaaatacagacatttttaaactgagaaacaaaataagatgcactccgttttaaggaagcagaaattatgaagagatacaaagtcaccaaaacaattttgttgattaattgtaaaatgtgccacagaacagtaaatatgatggtaaaacgagaagcttccttgagcaatgagaaacaattttactatcctaagatcaggcccagcrgggaaaacaccacagggtgagcctctgagttctgcaggtctggctccaaaggccagagctcagcactgattttcctaacacctacatctggacagtcagcagttatttactcttcaaaggacatgagcaaaacaaagaaatgcttctctctactaacaatgttgcttaatcagaaagaatctaaattggatttcaaaagtttctggtcttctctgtaaagaatggattttgagaaatgtctattgcgatttctaaactaaagctagtcaaaaaaacaattcgtttcacgtttatttattttccaaatacatggaaaccagat

SEQ ID NO: 539921 - DNA, 599 bp, Homo sapiens
cattggccacgtgcccaggttttgcatcacaagggatcttggcaactttaattagactcagataaatctgctttcaattataggaaaattaaggggtggatcaaggcaaattcagggtggattatttagaactctctaggaaaaaggccataacttccaggttgttggcaaagggggtggtaacttctrggtcattgtcatggcatgtgtaaactgtcatggtgctagtggggagtgtcttacgcctatgagcaaggagggcagctagggatcactttcatcatcatctgctggttcctgccagtttcttcactttatcctgtctggaccagatcttgttttgtgaccaggaagtaagtcttgccggtctcttacctcaatcttacatataagaaactctaaagaatccaccaaaaaaaaaaaactgttagagcttatcaacaaatttagtgaagttacaggatatgaaatcaacatggaaaaattagtaggatttcttttcactaacaacaaactttggaaaagaaatcgagagaataatcccatttataataactataaaacataaaataggaataaatttaatcaaggaggtgaaa

SEQ ID NO: 539922 - DNA, 599 bp, Homo sapiens
cattggccacgtgcccaggttttgcatcacaagggatcttggcaactttaattagactcagataaatctgctttcaattataggaaaattaaggggtggatcaaggcaaattcagggtggattatttagaactctctaggaaaaaggccataacttccaggttgttggcaaagggggtggtaacttctgggtcattgtcatggcatgtgtaaactgtcatggtgctagtggggagtgtcttacgcctatgagcaaggagggcagctagggatcactttcatcatcatctgctggttcctgccagtttcttcactttatcctgtctggaccagatcttgttttgtgaccaggaagtaagtcttgccggtctcttacctcaatcttacatataagaaactctaaagaatccaccaaaaaaaaaaaactgttagagcttatcaacaaatttagtgaagttacaggatatgaaatcaacatggaaaaattagtaggatttcttttcactaacaacaaactttggaaaagaaatcgagagaataatcccatttataataactataaaamataaaataggaataaatttaatcaaggaggtgaaa

SEQ ID NO: 539923 - DNA, 554 bp, Homo sapiens
gggctgaactgctagaggtgctcagagagactagaatagagttcacaatagatgccatttaattttatattttacaaatattttatcactcataggacacagcttgataaccatcataatatgtttttattgatgagtgaatggataggtgtgttttttttaatcatcgtaagtttatgttttgcatgggctcattctgttctcctggaaatcagaagaacaatagggtacacaatgatcccatctatccctgccaaaccttggcctgtgatttatctaccatrccccatgctgaaaaatgtgctcagaaaactcacatattctgagaagtattctcagaaaactaaaagtataaacttattctcagagaccaggtaagaaatgggttgtttggggtcgtttcattctaatctctagtataatgactgagtctaaattctggttttcatagtttttttttggtttgtgcatgtgcgggtagtctgagacagactatatttggatttaaaaaggatttctgtgtatcaaacaagacaagtcggtaaccataacga

SEQ ID NO: 539924 - DNA, 554 bp, Homo sapiens
gggctgaactgctagaggtgctcagagagactagaatagagttcacaatagatgccatttaattttatattttacaaatattttatcactcataggacacagcttgataaccatcataatatgtttttattgatgagtgaatggataggtgtgttttttttaatcatcgtaagtttatgttttgcatgggctcattctgttctcctggaaatcagaagaacaatagggtacacaatgatcccatctatccctgccaaaccttggcctgtgatttatctaccatgccccatgctgaaaaatgtgctcagaaaactcacatattctgagaartattctcagaaaactaaaagtataaacttattctcagagaccaggtaagaaatgggttgtttggggtcgtttcattctaatctctagtataatgactgagtctaaattctggttttcatagtttttttttggtttgtgcatgtgcgggtagtctgagacagactatatttggatttaaaaaggatttctgtgtatcaaacaagacaagtcggtaaccataacga

SEQ ID NO: 539925 - DNA, 554 bp, Homo sapiens
gggctgaactgctagaggtgctcagagagactagaatagagttcacaatagatgccatttaattttatattttacaaatattttatcactcataggacacagcttgataaccatcataatatgtttttattgatgagtgaatggataggtgtgttttttttaatcatcgtaagtttatgttttgcatgggctcattctgttctcctggaaatcagaagaacaatagggtacacaatgatcccatctatccctgccaaaccttggcctgtgatttatctaccatgccccatgctgaaaaatgtgctcagaaaactcacatattctgagaagtattctcagaaaactaaaagtataaacttattctcagagaccaggtaagaaatgggttgtttggggtcgtttcattctaatctctagtataatgactgagtctaaattctggttttcatagtttttttttggtttgtgcatgtgcrggtagtctgagacagactatatttggatttaaaaaggatttctgtgtatcaaacaagacaagtcggtaaccataacga

SEQ ID NO: 539926 - DNA, 449 bp, Homo sapiens
cctagtttagaataatgtattctggtagagtcatactgctccttccaaagagacacctcttagctgcctctcatctccctaatagcaacagacttctgtacaatgtaaaaccagttggttttctgtagttttgagcctaattttgctttgcctctttacaagggggagatctgcctttgcaaacatgaaggatagaggggctttatctgctttgggaattaaatggattaaaggtgctgtgaggctgatcttgcagttctccccatacctgtctgtccctggccatgtcctgtggggaagcaatgatgttcagagggttctcayttcaacaaggtagtggaatttctcctcttcttctagtttgttggtggccaagtgactgtttctgcagaatcccaagcctttggtctccactggccaaaagccaggcatggaccatggtcttaaag

SEQ ID NO: 539927 - DNA, 565 bp, Homo sapiens
tgacagagtgaaactcagtcttaaaaaaaggtgcaactatcattctcaaaaataaatgaagctgtcactcattcacaaggaaatgtgtcacaaaatgtgtcacaaggaaaataagtatttgtttccaaagacaaaagttgagctttcctgaggactttgaaaaacttgttccttctactgtaagcttgacagcttctcaatacttaaagatgttttaaaataagattggtggttaaatttaaaaaagtgatttctgacacaataaaacataaaccaatattttctaaataactaatgcataatattataaatgcaagtwtgtggggaaagaacaatttattgtgcaagaaagatcagtgagtactgatggaatacatttgctactatgtaaaatgccactataactaatttaagaaacaagcacttgtaaagttttgatttagtattaaagaatacccaaactgtcttaaagctttaaaaatacaccttttaccaactatatatttgcatgaggctaggtcatcttattgcttctttaaagcaaattgcaaagaaagagagaatc

SEQ ID NO: 539928 - DNA, 590 bp, Homo sapiens
tgtgaaaaatgcagcttctctaaatgcagtatggtatcctggatttgatcctgggacaggtaaagaacatgagtggaaaacctgatgaagtctggagttagtagtaatgtgtcaaccttgactttttagttttaacaaatgtaccatgtcaacacgagatgttcacattagtggggaactggtaagggcatacagaaactgagttattttggtgactttttctaagtttctttttataaaacagccttttgggccccagaactaatgaatctcaattcctggggctgaggcctgggaatctaaaattgtaacagataccctaaatgattcttagattcaaattgaaatccttgtcaatttccttttatttcttgtctgaacagttgcttctcccttgtttcacttatyttaacctgagttaatccttgaactcttctgaatcctaggatttcagtactgttatcggtttttcccagatgagaaaactgaatagtaagaggtggagtgtccaggatcatagagctcataaaaggtgaagctgggacttatattcccaatcagcctggctcccaagtctatgcttatagccg

SEQ ID NO: 539929 - DNA, 627 bp, Homo sapiens
actatgaaaaggattatctgagtaccaaagctcaaatttactttgactttttgggttattttaatgtctgtaatacagacaccagtgaaattttactctggtagagcatgaactaacacttttacattttcaatacaaagaaaagacaaagatctgaaatatgtatttgaaccaagtgaaacagtcatttttgtagcacaaaagcagttgcctattggcagtttaatatagtttattttgagatgaactatctaatcttagggctcaatgtttgtagagaaattttsctggtcttttattcacattttctttttacgtaacctagatgcccatacgttactgaaatcaaacaacactaaatcctgattttactacaactcaaggttcagtttttttttttaatgtagttttcccacatttccaaatacactattccttggtttaaaaaaaacatgccaaagccaatcttaaccaaaaaccaaattactcttgattctgtattcaggttatgcagtgtttctggaaactaattttgcgcagtgtgctggttagctagaatcttttatcacccagccctttccctaaccacatttaagatttctgtggcttcattttttcctcacacag

SEQ ID NO: 539930 - DNA, 599 bp, Homo sapiens
ttattcttattgtaagattacatagagagttgtgtccactaaatttgaaagtaaatgtcctgcatcaaaacaacaaaaatgaaaaccacagctatcttttataagctccattctttattgttttacaaatattatctaattgaattcaccaagcaatcaaatgagataggcattattattaaaatacccattttatagaggggtataaatttataaatcagaattaattttaattaataaatgggaacactgaagatcagatgagttgtgacatttgttcaatgtgaccacaactactaaactattagtcaatcaaatgtataaatgacaaagcctatgatctttcccctgtartacatggatctggaataacactgcaaatttgccttttctataaaaccaagcgctgagaactaaatataaacaaaatacacaattctcacctgagccaaataacaacagagaatttgtatgtatcctaattatgctttcattaatttatacatgttttatttttccctatgtcctcattaaaaatagacaaactagatggtaggaagtttgcataatatagtagaaatatgtataagccctcagga

SEQ ID NO: 539931 - DNA, 667 bp, Homo sapiens
ccaggcaaaatgaaaactaggaaatgctatgatgttattttcttgggttaaaaaaattgttaagaaattttaattaaatagtccatgttcgggccacatgagtattagatagttgcatcagacttttatatgggagtgacattgtcaaaaacaggattcttctgggtttcaggcatagccctgtgttaccaagtagatgctgactgtttgcatgataaatgaataaacagtctccttcagaagacttgaagagggaatggagacttgcctaggactgtagggatgggcaagaaaggacaagtaggcttagagagccagggaagatggagaatggaaaagatggcggagcctgggaacaagaggtgctggaggcagggggccatagaggactccaccaggctgyggacttccttaggacaggtaagaggtattatgggccaaaacatgcagtggttataatagaaaatgttaataatatcatttacaaatgaatcataaggatggctatgaaacaaacatggcaaggaaacgttttataagtttgatgtaacaaaagcccttgtctgttggttaaactgcattgatcggatcagttaggaagaatattgcagaaaaggaatgagtgggctaccaggtagcgcctggagacctgagtcacacatggata

SEQ ID NO: 539932 - DNA, 454 bp, Homo sapiens
tgccaaatgagtgtgccaaaaatttgaaaagactaaattttcatagytgtttggactttagaatagtgggtaaaggattttagatctgtacaagaacaattcattgcagcatttttttcctgtaattttcatggaaatttagatagtatctgtctgctaatagaaaatagcacttgaaagtgacattgaaaatggcatttgaagggttgatataattcagactactttggttaatgtttctgttcctttaataagctccaatggagatcagaaataagaacattttgaatgtttttttctacattattttttctggtcatttgcccagttagatgatggagtatggatcatacttaggagaatatgtgcagtttgctgaagtgttctaagttcttcactcatccatatggctaattaacccaaacttgggcagaggtattaagtcatttccttc

SEQ ID NO: 539933 - DNA, 368 bp, Homo sapiens
cttcactgcttctctatgaggatttttctctctctggttttctgccctgccaactctagcctttctaaaatcccgastctttctcctcaacttagggattgtggtggagtcttttgaggtcctgcttttctgtgccatggcaaggaagctcactcagtgtgggtctggccctcagcaggatgctctgggctggtgatatacatttgcaggttaccaatatgtacagcgaggggtgccttgggagtaaattaaagtccctcaggaaaggggtacagagtgagaagagaaaatcctaagatagagccctaaggaacatggaaatatatgtaggaagtgaagtgataagtctattataaggattttagaga

SEQ ID NO: 539934 - DNA, 531 bp, Homo sapiens
gctgaagatcttcactgcttctctatgaggatttttctctctctggttttctgccctgccaactctagcctttctaaaatcccgactctttctcctcaacttagggattgtggtggagtcttttgaggtcctgcttttctgtgccatggcaaggaagctcactcagtgtgggtctggccctcagcaggatgctctgggctggtgatrtacatttgcaggttaccaatatgtacagcgaggggtgccttgggagtaaattaaagtccctcaggaaaggggtacagagtgagaagagaaaatcctaagatagagccctaaggaacatggaaatatatgtaggaagtgaagtgataagtctattataaggattttagagaaatgcccctaagccatttgtagtctagagtttctgatatgattccagagtgtagtcattatccagaaatttgataagtcaccagatgagattactctgggtctactgggtgacctgcttcctttgggaacatcactaggagatcaagataacag

SEQ ID NO: 539935 - DNA, 546 bp, Homo sapiens
ctttaatagagtcactccttgggacatgtctgtgaactgcactcccaacttggcactcctctcaaatgtgatttttgtttgtattctaccagaagatacttggatacagttctatctctaaaagtaagacagatgaaatattgagtttgaagtatactgaaggtgggactccatcaggaggtgacactctagaaactcatacttgccatttgcatgttgaaggcactcctgagttgcttggaagctacagagaagcttagacttcgctgagcatctcmaactatgaactgcagagtgtgggctgaacattatatcaattaaccaaaaaaaacagtgccacatgtattttatttactgacataaatagctacttgtattgtttgtatggataccctttggtttcagtgactttcaatattatgtttgtgaaacataatattttatttgcttatttttcaaaaggtcataaattatcttagatttctgaaaccactacactgccaatcttggaaaacaagacacaggattgtggttcttagaaaatga

SEQ ID NO: 539936 - DNA, 543 bp, Homo sapiens
ctgaaattatcatctctcatagagacctgaaagttcaatatatagtctttcctattagagtaggaaactgatacccattagtaatgtcaatttatagtcagggataatttagtaagtttcatatagtttaattgtaaattgtccaattgcatcagyaaataattattaagccatgttagcaatgaaataggtgaaataaagatataaaactttgaaaagaaagtaaatgggatataataggcatatgagtaatatgaccttgttgttctttattttaccaaggaaactggttataatttagattctttataagagtctgttatataactacagagtaatatagaatatagaaaaactgagaatatcctcatataaatctcattcttgatttaattttccacttgtgcaaatcatattttccaaccatctcaaatatgtcaccgagtcttgtcaagtctgcctactgagtatatctagaatacattccatcatttctttatctccactgctgcctacctatccaacctcatccccaagtcctct

SEQ ID NO: 539937 - DNA, 543 bp, Homo sapiens
ctgaaattatcatctctcatagagacctgaaagttcaatatatagtctttcctattagagtaggaaactgatacccattagtaatgtcaatttatagtcagggataatttagtaagtttcatatagtttaattgtaaattgtccaattgcatcagcaaataattattaagycatgttagcaatgaaataggtgaaataaagatataaaactttgaaaagaaagtaaatgggatataataggcatatgagtaatatgaccttgttgttctttattttaccaaggaaactggttataatttagattctttataagagtctgttatataactacagagtaatatagaatatagaaaaactgagaatatcctcatataaatctcattcttgatttaattttccacttgtgcaaatcatattttccaaccatctcaaatatgtcaccgagtcttgtcaagtctgcctactgagtatatctagaatacattccatcatttctttatctccactgctgcctacctatccaacctcatccccaagtcctct

SEQ ID NO: 539938 - DNA, 511 bp, Homo sapiens
ttccaggccaattatatcaagtctccacagatgattccaacgtgcagccaaagttggaaaccactggcttggcaggagggagaggtgactttgacttaagttggtagggaagtgtttatggagaaagtagtttctgagtaggatttgaaagatgggctgaattttgataagaaaaaacttagaagcatttaaagtgatataataataccggtttcagagactaaagagtagttaatacagagggagagcgaatcagaagtataggatgacattacaaatcagaaataaatttaaatttcaaattctggccctatcatctactacctgyataaaggtggccaagttacctcatctctaaatctttttatttccatctataaaatgagaaataaaagcacccactgataaggtttaataaaggtcaaatgaaaaaattcatagaaagcacttccatcaatgtcaggtaatagaaagtgctcaatacatggctaataccaaaacatttttacca

SEQ ID NO: 539939 - DNA, 511 bp, Homo sapiens
ttccaggccaattatatcaagtctccacagatgattccaacgtgcagccaaagttggaaaccactggcttggcaggagggagaggtgactttgacttaagttggtagggaagtgtttatggagaaagtagtttctgagtaggatttgaaagatgggctgaattttgataagaaaaaacttagaagcatttaaagtgatataataataccggtttcagagactaaagagtagttaatacagagggagagcgaatcagaagtataggatgacattacaaatcagaaataaatttaaatttcaaattctggccctatcatctactacctgcataaaggtggccaagttacctcatctctaaatctttttayttccatctataaaatgagaaataaaagcacccactgataaggtttaataaaggtcaaatgaaaaaattcatagaaagcacttccatcaatgtcaggtaatagaaagtgctcaatacatggctaataccaaaacatttttacca

SEQ ID NO: 539940 - DNA, 511 bp, Homo sapiens
ttccaggccaattatatcaagtctccacagatgattccaacgtgcagccaaagttggaaaccactggcttggcaggagggagaggtgactttgacttaagttggtagggaagtgtttatggagaaagtagtttctgagtaggatttgaaagatgggctgaattttgataagaaaaaacttagaagcatttaaagtgatataataataccggtttcagagactaaagagtagttaatacagagggagagcgaatcagaagtataggatgacattacaaatcagaaataaatttaaatttcaaattctggccctatcatctactacctgcataaaggtggccaagttacctcatctctaaatctttttatttccatctataaaatgagaaataaaagcacccactgataaggtttaataaaggtcaaatgaaaaaattcatagaaagcacttccatcaatgtcaggtaatagaaagtgctcaawacatggctaataccaaaacatttttacca

SEQ ID NO: 539941 - DNA, 454 bp, Homo sapiens
tcaccaaaaggtgacttttttwaaaaaaaatctgctacaaagatgataaaatacagatatgttctcacttctagaaagggtaatgtaacaatatattgtgtctgtatctcagccctaggcctgtcttcaaaatacataccagaaattaagccccttaaaaatgtccacttattatttgttttgtaaacctagtggcgaatgatatttccgatcccaatataatgtttaagaaatagttgttgaacagatgctggggtatagtattttttaaattttattttactttaagttctgggatacctgcgcagaacgtgtaggtttgttacacaggtatatgtgtgctatggtggtttgctgcacctatttgacccattctctaggtttcctcccctcgcccccactccccaacaggcccagtgtgtgttattcccatcactgtgtccctgttcaactc

SEQ ID NO: 539942 - DNA, 354 bp, Homo sapiens
accaaaaggtgacttttttawaaaaaaatctgctacaaagatgataaaatacagatatgttctcacttctagaaagggtaatgtaacaatatattgtgtctgtatctcagccctaggcctgtcttcaaaatacataccagaaattaagccccttaaaaatgtccacttattatttgttttgtaaacctagtggcgaatgatatttccgatcccaatataatgtttaagaaatagttgttgaacagatgctggggtatagtattttttaaattttattttactttaagttctgggatacctgcgcagaacgtgtaggtttgttacacaggtatatgtgtgctatggtggtttgct

SEQ ID NO: 539943 - DNA, 354 bp, Homo sapiens
accaaaaggtgacttttttaaaaaaaaatctgctacaaagatgataaaatacagatatgttctcacttctagaaagggtaatgtaacaatatattgtgtctgtatctcagccctaggcctgtcttcaaaatacataccagaaattaagccccttaaaaatgtccacttattatttgttttgtaaacctagtggcgaatgatatttccgatcccaatataatgtttaagaaatagttgttgaacagatgctggggtatagtattttttaaattttattttactttaagttctgggatacctgygcagaacgtgtaggtttgttacacaggtatatgtgtgctatggtggtttgct

SEQ ID NO: 539944 - DNA, 599 bp, Homo sapiens
ttcagaagggcttttctttttcactgtggaagatccccagtgagttacaccctgtctgcccctctccttagctgtgagtgttctcatcaataggacatggcaaaggtgatgggctaccactcccacgattatgttcagccattcaaagctttgctttagctggccaggcagggtggctcatacctgtaatcccagcactatgggaagctgaggtgggtggatcatttgaggtcaggagttcgagaccagtctggccaacatggtgaaaccccagctccactaaaaatacaaaaattagctgagtgtggtggtgggcacctgtagtcccagctactcgggaggctgaagcaggagaatcgcttgaacctgggaggtggaggtttcagtaagctgagatcgtgccaatgcactccagcctaggtgacagagcragactctatctcaaacaaacaaataaaaaacaaaataaaaccttgccttagttgactggagtcagagagtctcttgctggcctggaagaaacaaacagcaatggtgtgaactgcctatgaatatgaagccatgtgcatataactacaggctatctctaggatttgaag

SEQ ID NO: 539945 - DNA, 599 bp, Homo sapiens
ttcagaagggcttttctttttcactgtggaagatccccagtgagttacaccctgtctgcccctctccttagctgtgagtgttctcatcaataggacatggcaaaggtgatgggctaccactcccacgattatgttcagccattcaaagctttgctttagctggccaggcagggtggctcatacctgtaatcccagcactatgggaagctgaggtgggtggatcatttgaggtcaggagttcgagaccagtctggccaacatggtgaaaccccagctccactaaaaatacaaaaattagctgagtgtggtggtgggcacctgtagtcccagctactcgggaggctgaagcaggagaatcgcttgaacctgggaggtggaggtttcagtaagctgagatcgtgccaatgcactccagcctaggtgacagagcgagactctatctcaaacaaacaaataaaaaacaaaataaaaccttgccttagttgactggagtcagagagwctcttgctggcctggaagaaacaaacagcaatggtgtgaactgcctatgaatatgaagccatgtgcatataactacaggctatctctaggatttgaag

SEQ ID NO: 539946 - DNA, 502 bp, Homo sapiens
ttggtccacaggtcttagtttcctgatacctgctttagctcagtgttatttatagcacctggttcatggaatgtctattaccagtctagaatgtgataaggagctttttccagaatgtaaatctgtatagtgtttctttcattgaggaagtcttgcaatatatgtgaaaatgtgaaaaatatgacagttgaactaaatacttcttcatgactatgtaggttgatttatattctgcctcaagctccttgtstctccatgtactgcgaaaagatttttttggccagcactggtccctggaggacactgagtagcactgctcaagcttatttttctgtatatccatctctgaaaatgttgcaattcatgattaagttaaatttaaactttttcttccccaaatagagaataattcttctactacttattttgttgctgtggttggaactatagctctgctgaagggcagaaacaggagttgtgccagccatcccttctttagcag

SEQ ID NO: 539947 - DNA, 502 bp, Homo sapiens
ttggtccacaggtcttagtttcctgatacctgctttagctcagtgttatttatagcacctggttcatggaatgtctattaccagtctagaatgtgataaggagctttttccagaatgtaaatctgtatagtgtttctttcattgaggaagtcttgcaatatatgtgaaaatgtgaaaaatatgacagttgaactaaatacttcttcatgactatgtaggttgatttatattctgcctcaagctccttgtgtctccatgtactgcgaaaagatttttttggccagcactggtccctggaggacactgagtagcactgctcaagcttatttttctgtrtatccatctctgaaaatgttgcaattcatgattaagttaaatttaaactttttcttccccaaatagagaataattcttctactacttattttgttgctgtggttggaactatagctctgctgaagggcagaaacaggagttgtgccagccatcccttctttagcag

SEQ ID NO: 539948 - DNA, 506 bp, Homo sapiens
gcctcaaggaagtttatgtatcacagaacttgtacttaattattttctttctgggagaaattcatgaagatacattcagctacagggcagaaaagagactggaggaaaggtgcattcagttaacggctattgggtctttggaaataaatccagtgtttgccatatctttcagctttgtccagggaaaatgtatgactgcagatatcacataagtttgtaggtatctcagtgctgaatataccatggaataattttcccacrgcacagccagcaaggtaacaagagtctcttggaatatcagaatcatgaattatcaatggttgcatgaaggacttagtggacctgcttgagggtagtatcatagctttgcacacccaagcatgttgatgaagggattttaaaagttagtgtatttacaatgaaaatgggaaagcagatgtgaagaccagtgatctagaagaggtctcaccataggaagaagaggtatattgaatgtggacctgtca

SEQ ID NO: 539949 - DNA, 603 bp, Homo sapiens
aagggatattatgtacctcccacaccacctagaacagtatcttgtacacagttcatgttcaacaattatttgtggagtggaattgattatgctatctagcctttaggaatatgtcagccaatcttgggaaagggtgagatatagatttcaatagacagatgcctatcttctagtcaccatagttttgttaagatcagggaaaaataaaaacaaaccacagaaaaccatcttggcagtgacaacactggcaaaccttatactagatcaagatctttcaaatttttggccctgacccagaataagaacatttacatgactcagcacacacatacatctatagagatctataattaaaataaacagtttattcttctctatgctacctgtgaaataatctactgtttccttttctatttcaatgtttaagaaatgttcaatttttaaggaatttttaaggactaaagacracatttcccaactcctttgtaggaccattcacaggttacaagaataaccaaattatttcacaatagatggtttggaaaacaactcatttgagcaagatcataattgaccactagtcctgtggcagccttataggcc

SEQ ID NO: 539950 - DNA, 578 bp, Homo sapiens
ttgtgaatgtatatacataaatggctccttacttttctacttctgacctcgacgcttcgtttttgagggaattcgttttttgaggggtcctttgatacggagcccacacgtagtagacctgcatgtcacacaggggctagattccaaagtcagtgtgtaatgcagaaattgrtaacagtcacagtttcttgaaaatccctgagcttgttatttggtatatattaccctaaagtgcttaatgtactctatgtataaatgtagactatattcagtaatccactgcatagattttatataatagaatgtatatacaagttaaaagttttggctttttacttatatatttttttctttatttttgtctagtccatatagccaagtttacttttgttgaataagtaggtcacagcgactcatgtaggagtcgccatacagacaactcccccaaataattcccacctaataaattacctcttcaagattccctttcagcaactctattcgggcatgataaaacaacacgagtgagccctgcagagcaaggaagaaaacacactgttcaacagtcaacactggct

SEQ ID NO: 539951 - DNA, 423 bp, Homo sapiens
tcaacataaccataagagttggaactacattaaaggcctgawacaaatcattaagacaaatgagaaccctccctataaactgaatgtttgtgtccccctaaaattcatgtattgaaacctaatctccaatgtgatggtattagtaggtgggaactttgggagttaggttatgaggttgggagccctcatgaatggatgagcgcccttataaaagaggctccagagtactcccttgccccttccacgaaggaaggacacggcaagaagatggcagcctatcaggcataaagcaggcccttaccagccaccaaaagccatcggcatcttcgtctaggacttcccagtctccagaactgtgagaaataaatttccattatttataagccatccagtttatggtattttgttatagaagcctgaaca

SEQ ID NO: 539952 - DNA, 423 bp, Homo sapiens
tcaacataaccataagagttggaactacattaaaggcctgatacaaatcattaagacaaatgagaaccctccctataaactgaatgtttgtgtccccctaaaattcatgtattgaaacctaatctccaatgtgatggtattagtaggtgggaactttgggagttaggttatgaggttgggagccctcatgaatggatgagcgcccttataaaagaggctccagagtactcccttgccccttccacgaaggaaggacacggcaagaagatggcagcctatcaggcataaagcaggcccttaccagccaccaaaagccatcsgcatcttcgtctaggacttcccagtctccagaactgtgagaaataaatttccattatttataagccatccagtttatggtattttgttatagaagcctgaaca

SEQ ID NO: 539953 - DNA, 608 bp, Homo sapiens
tttcctcactattctgtgattactatgatcacaaacatttttggtgtgatactatgaaaatgaactgagcttataagataygttttctagaaaataaagattcaccttttatgcaaaagtatgacttgtgtctgtgaccaccgacagctttactgtcttctcctttgttaattaataaaaacaataacaaccataagttaataccaactatgtgtcaggcaccataggaagcacctttacgtatgttatttctgatatttataaacttcttatgaggcaagcattttgctacctcattttgcaaatgaaggaacaaaagcttagaaacaaaaagtagtatgtccaaggtcagtcagcagagttaagattagaatctagacttatgtgagtctgaattttgtgttcttctcatgaggttacagagcctttcaatactatagaagaatatttctactatgtcattgctattttacagaatacggataacctcaaatacgtaatacataatttcatgggtaacttaaaaaaatctggtgattataaaacagcactgtccagtagagttttctgtgctgatggaaatctgtatctatgatgtccatatggca

SEQ ID NO: 539954 - DNA, 650 bp, Homo sapiens
tctttttgcttaagttgcctgatattttactgaggtttctgaatctagaatatctgtctttcactattccagaaaaatgtaatttatattgttttcaaacattgcctctccttattcgcttcttctaaaattctaatgaaatatatgttagatcttctagcactagcctccgtatctcttaattgtgtatattttccatttctttatcaattccggttatattaatcagacattaactcctattcactaattcttttcttcagcacaatctaatctatgttaaagccatccatttttggtttctgttttttgaaatagacttcatgatttagagcaatattagattcacagcaaaattgagcaaaaagtattgggagttcccatttgtcccctgtccccatacatgcacagcctcctccactaccaaaatgctaccaaaatcgtrctgaaacaattgaggaacctacattgacacatcattagtacccaaagtccacagttcactgcaggtttactcttgatgttgcacaatctatgggttttcagaaatgtacaatgatatgtatccaccattatagaatcatatagattagtttcactgtcctaaaaatcctgtgttccacctattaatctctccctcccctttaaac

SEQ ID NO: 539955 - DNA, 652 bp, Homo sapiens
agcataatgagtatagcattgcttgttcctccattccaaagattgattggaatgctctttcagaagagtgatggcttactaatctcattactattatttttaatatttcatgtcttccccctagaatacttatgaaaatacttcaacaaggctttcaaggaaagttatacactgatattctgtggttatcacaaattataagagttgatgttcaccttagtacttgtataatagaatcagtcatgaatgttctatacagcaattttgctcattaaattaaacagttygtttcccaaattttacgcttcatagaaattgcttttctgcctaatgaatcctgtcgtcaaccgagcaattaacttgtccattgatattctgagaattgatctgtcatagcattaggttttcttctgatagattaaatattgttgattaaaaaatctatagttctgtaattatgtttcctcctaacataattacactcaataacagggatgacttgaccacttaattatttggagagctttccataaagtatcttatgccatgttattttcctttacaaagaacaaaacattgtctatttaatattataataagtatcagttttagaatattcttaacattaaacagtttgaatcatatatgcctt

SEQ ID NO: 539956 - DNA, 638 bp, Homo sapiens
tggtgactatagtcaataagactgcattgtgcttttcaaaataactaagagagtaaatttcaaatgtctcatcacaaaaaataataaggtgatggacatattaattagcttgattgaataatttcacattgtatacatataacaatgcatcacattgtaccccataaatgtatacaattataatttgtcaattaaaaactatattaataaattaaagtaaataaatgaagatgttctgagcttcttgactgagcctgatgccacagtagaatgaggcatgtggggttcttgggtctgaatattttttatctgagcaggttaggaatctctggggactaaaaggtgawctgtggtagctaatctccaaaaatgatctgtggcttgcagtgaccactagaatatggtggaattggcataatgccagtctttgcctttaagaggactagcagcttctgtttcatctgtcttgggtcttttgattttggaaacttactgtccatatgcaaagtctagctaccctactagagacaccatgtgcgaaggcccatgcaaacaacatgtgaaaagtagaggtactgcaattatctaggaggagagacccaaacatttcagtgtctcatttgagccccaagataacg

SEQ ID NO: 539957 - DNA, 448 bp, Homo sapiens
tgagcatggggacctgggtcttcgggcagttataaatggaagccaatgggacctgcaggaagtcatctaggtttagatcttgttatgaccaagactgggactagagtctatctgwcgcatcctccagtaacaacatccgtgagaaagccggcccaggaaaggcaatgcttacccatgctcatgcttcaagtagaatagagctgaccattgcacaatatgggtttgagaggcataggtccacttagaagtggctttttcaataaaaattgcattgagtgtgcctgccttccctttcacctcttcaaccctcttttgcctctgccacccctgagatagcaacaactcctcctcttcctcctcaaggtaaagatgaggatgaagacctttataatgatccatttccacttaacgaacagtaaatacactttctcttccttatgatttttct

SEQ ID NO: 539958 - DNA, 303 bp, Homo sapiens
cctcaaagaaaataggctttaaaaagactgcttaaaatgatattaaagtgcgtaaaaattttactaartaatacccaatgacaacatgcagttggatttccataagccttaccaatttacggacagtttctcttaaagctttctcatcctcaatcataatggccatgtctttctgaacagttgaagccactacaacatctaatacatcagccttggaagccatcttgcagatcatctcatcgtgggaaaacacacaatatcgatgaagcaagcgataatgctccacacactgtcggcctaatg

SEQ ID NO: 539959 - DNA, 303 bp, Homo sapiens
cctcaaagaaaataggctttaaaaagactgcttaaaatgatattaaagtgcgtaaaaattttactaaataatacccaatgacaacatgcagttggatttccataagccttaccaatttacggacagtttctcttaaagctttctcatcctcaatcataatggccatgtctttctgaacagttgaagccactacaacatctaatacatcagccttggaagccatcttgcagatcatctcatcrtgggaaaacacacaatatcgatgaagcaagcgataatgctccacacactgtcggcctaatg

SEQ ID NO: 539960 - DNA, 329 bp, Homo sapiens
ggttcctttcccactttagacctcacccgccagtcctgaattcaccgtctcatttatgacgggcacctatctgctccacagaggatccccaggaamaactggtgttggggacgcggcaaaataaccctggtaacctacccactttaccgaggcactggaagcctgtggttttccagatgaatcatatttcaagtgcagtagatccctgacgtcctggaagtaaatttcgaagaaaaactttttttttcccttcagtttagggattttaatacccttcctaccaccatcatcgcaagtgagaaagttgaaaaaaaaatttatttcggtaa

SEQ ID NO: 539961 - DNA, 608 bp, Homo sapiens
ctgctttgggttctcctgaattgccttttaggtgaaaggcatttgtgtttcttggtagctggttcctgctgagtaaggcgggacaggctctggcttcccaggtgagactggagaggccaaggcaatccttcactcctggagagctggggaggagcccacaccactggggcaattgagaccccgtcccctcccctcccctcccctccactccactccactcccttcccctctctccatctccaggacccagcagcaaccctttttactccaggtttctcattcatccaaacatttactgagctcctgagtgctaagcacctgagaggagggtctcagtgtcagtgtcacctcctccacgaagctttggagctctccctgggaataagtaagctcttctctggttattatrgttcaaaggaaggtgcacagacggtggtgccactcaaacttgggttttaattccagcgctatttactagctgagagattttatgttatttaacctctctgagccagtctctccacctatgaaacagggattccagctagcacacagggttggcactggggctaaagggagttctccatgtaaggcaaatgagagacact

SEQ ID NO: 539962 - DNA, 464 bp, Homo sapiens
aggggtactcagctccatctccaaagataaacctactccccacaagaactggcctttaatgtggtataactgttccgctgccttcttgtctgtgctaatataaatactgagtaccagcatgtccatttgaacatgcaggagggttaatcctgcttcctaaagcctcaaatacatgcctcctgcttagttcactttgtatcacatttcctaagctcccttttcccccagttttgggacactgtgcttacctccaaaaatctcatctcttccctggcattctccctaggctctgttttgcccaggggctcccgctttttcttgctctagargagcagtattcaaccttttagctatgatgacacataacaaaagatgcttatgtactaatagttgaaatctgcctttttctcattcaagaaggcatacaaatatctgagagtgactttgttgtatggctacccttg

SEQ ID NO: 539963 - DNA, 464 bp, Homo sapiens
aggggtactcagctccatctccaaagataaacctactccccacaagaactggcctttaatgtggtataactgttccgctgccttcttgtctgtgctaatataaatactgagtaccagcatgtccatttgaacatgcaggagggttaatcctgcttcctaaagcctcaaatacatgcctcctgcttagttcactttgtatcacatttcctaagctcccttttcccccagttttgggacactgtgcttacctccaaaaatctcatctcttccctggcattctccctaggctctgttttgcccaggggctcccgctttttcttgctctagaagagcagtattcaaccttttagctatgatgacacataacaaaagatgyttatgtactaatagttgaaatctgcctttttctcattcaagaaggcatacaaatatctgagagtgactttgttgtatggctacccttg

SEQ ID NO: 539964 - DNA, 515 bp, Homo sapiens
tctctctgttcataacttatcctcttcaatagtttgctatattaattttcctcctgagtaattttggtatcattatatttctgcttatttcacatgtcagtgtttataattgaatgcttaatgctatctctgagtatgaatttgttaaaataataggtaccatatacctgatgaatatgaattgaagtaatggtaaatatttctccaatagacataaaaatgtcaactttgaatatctctaatgcttttcttttaatatattaaactataataatgtgaataagagacctatgtacaataatgttaaattttcacacactttctatattttctcatctttcctgcttttctctttctctcttactacctttacaaaacataagtcacaaatttaacatatttgttatcagtaaggatactaacagggaagmaattctagaaaaggataataaaataactacagttccagtaattcatcaagtaaaataaatagttctctataggtaattaagaat

SEQ ID NO: 539965 - DNA, 387 bp, Homo sapiens
ttttattccttggtcatgtcgtttctatatagagatttmatattgcttttttaattgtaagagataacaacatgtataaagagtgggtatatttaatgagacttagttatcaatcaaatcagataacaaattaatgttactaaaatattaggagtaaaagttactaaagacaccatagcttgtgtaacttttgaaaaaaatacttgaaaaaaaaccagaatctataataaaatatactaacaagcagaaaagcatttaactctctcatttttaatgttaccggctcattttataataaggattctgaaaccatttagagaaagcactcataaaattatatagggtttttaaagttgaaatcctaaaacttttgacttcctgtcacac

SEQ ID NO: 539966 - DNA, 601 bp, Homo sapiens
ctgggtagatgctaataccctgcacagacatggtaaagccttggtgcaggcccttaatcctattagatttgtagatcttaaccagacagtcaccaaggcttctgaattcccttttagctccagctttacccacatccactggtagattggtacagacaaaatcaagagggtacacaaaacacaaggatgtggccccagcgcacgcctgatgccaggttccttgcaacatagtgctgaaagtgggtcctcttgtccacactacccaggaagatctgctagtacttatttcgaaggcgaagttgagagccyctgggtggggaaatatctgatgacattggccaggttaccacgccagaaggacaggactctctcctccttgggaatacagaccacacagtctataatgtgcttgtactgcttatctgtggtaatttccttggtggcatgctgcacctgcagcagcagcttgagccactcgataggtgctcctgctgccttagagatggctgtgaccaccccacctgccagaagtccctgttgaaggacacagcatcatctgtcatgttgaaaggaaaggggaggcaggctgctgcgagatggg

SEQ ID NO: 539967 - DNA, 601 bp, Homo sapiens
ctgggtagatgctaataccctgcacagacatggtaaagccttggtgcaggcccttaatcctattagatttgtagatcttaaccagacagtcaccaaggcttctgaattcccttttagctccagctttacccacatccactggtagattggtacagacaaaatcaagagggtacacaaaacacaaggatgtggccccagcgcacgcctgatgccaggttccttgcaacatagtgctgaaagtgggtcctcttgtccacactacccaggaagatctgctagtacttatttcgaaggcgaagttgagagcccctgggtggggaaatatctgatgacattggccaggttaccacgccagaaggacaggactctctcctccttgggaatacagaccacacagtctataatgtgcttgtactgcttatctgtggtaatttccttggtggcatgctgcrcctgcagcagcagcttgagccactcgataggtgctcctgctgccttagagatggctgtgaccaccccacctgccagaagtccctgttgaaggacacagcatcatctgtcatgttgaaaggaaaggggaggcaggctgctgcgagatggg

SEQ ID NO: 539968 - DNA, 616 bp, Homo sapiens
catcacgctacttcactccagcctgggagacggagcaagactctgtctctccctctaaaaaaagaatcttctattaggttattaataagtacctgattcagaaactattgaagagagaataattttaccaaacctcttatcctattgtaatttagatatgttcatgtagttataggccaattatctatgtagactttctttatcgctatcacatgataattattttactatctactgaaatttctacatattacattgttgttattcttaatcaaattaattttaagttcattkcatttgaatataatcataattattaaaattgctatacatcacttacaatttactaatgtgttatgaaattttgtatagttatagagtaactattttatactttagaagaaagaatttaaaaataacatagcaatttttttctcatttgtcatggaaaactatttagcagctagttaacaatatgtaatgaacagaaaagatgaagtcattctgaatattgctggagtatttaaacagaatttgtaagaacacagataatgatagtaggatgaagcgactaatataatgtgagattcaagaattcaatggcaaaaagaaatgg

SEQ ID NO: 539969 - DNA, 488 bp, Homo sapiens
gttccatcattaaagactcttgtagaacaatcctatgtggattatatttaagacaactgtaatttgttgaaattaatcctctcattcaggggagatgaaagctgttataaaggtccttttttctgtttaattagtccttgttccaaatcctccacayagccctgaaaaatctatttgtacgttagtaaaatccaataaaattaaggggtggagatgagggattggaggaactaaaacctgtaaagaataggcattaggagagtagataatagagtcatggatctttctaaaagtcactgtgttttggtgtagaggatgctttggagaggaattggcatacaaccagtcctgactcagtttcaggttaagggtgatagatatgtgcttatacagctattgattaagccttttaaaaagtatgatgttaataatttttgttaacactttccttatctttcaccttttaaaacatgtagctaaattacaaa

SEQ ID NO: 539970 - DNA, 645 bp, Homo sapiens
ctacgtgaacttgattatccacatgttcttgcagcatgtggaagccaaaacacatccatgttaggtgaccacctaacatcacgagaggatttggagaatttagagctcaaggcacatgtatttcactaagtagaagatattcaaggtggttttgtaaaggtagacttacaacttgaaagaaaatgcactgcagtatatggggttatgttcttaacatagctaaaggccatagctgatacctagtgacataatttcacactatcagtagaagaggacaaaatgatattgacattttaaaaatacttaaggtcaaaaattaaaaaaaakatatctgagatgtcattattttagagacaatctttaatattttctagcaagaccatccaaactgaattatcttttaacacctaaacatggtaatacctacaagcaaaatctaaattaataagtttataattgaatatcataattaaaaagcagtatataaagaggtataaaatatgacatggttttagataaaaataccttctaaataatataataaactaacttaaaatgtttaaagaaaatagctaaaccaaatgatagcctggtggcataaagtaacttaacaattaaaacatagctttaatataaaattttaat

SEQ ID NO: 539971 - DNA, 452 bp, Homo sapiens
tagtttttaatgtacatgtgtacattacaggcagtggaatgtaaaagtaaattacatcttagagagtgacactagataaacagttgtagatagtaaaaactgggaaagaactccatacaccaaccagttaytatagccacagagaagtagaattaaccatcactaaaataaacagactctgaagccaaagggagaggcacacatccagtgtgctgacaaacaccaaaagtgagtgaatagaaaaacaaaactaataagaaagataaaaagctggacttctgggcaaaaaaaagaatgacagcttggagaaggttacattaaatttaagttccagtaaagaaatagaactttagaacataaatttaaactatatatatgtatatatataattttttttttctagatgaagtctggctctgttgcctaggctggagcgcagaggtgccatatca

SEQ ID NO: 539972 - DNA, 692 bp, Homo sapiens
tgttgctaagagagggaaagcttccccttctccaagtggccatgttcccaagtggaggtgaatagaggacaagagggggtggatgagggtgatgagacccagattctgtagagccaggacctattgatgagttagtaggtaataccagcgtttttcataagacagatccaacagtgttcatccaacagtgggaatcattatgtgctgtggtctggctgagagaagcattccatttttttttaaggttagaaataattagaaatttttttttaaggttagaaatattttttttctaaccttaaaaaaaaagatatattttttttaaggttagaaataattagaaatcaacataaacagaaaatgtgacagtttaatggtaatgaatccgcatgagtgctccataactackaacttcacattcttgaatgaaacaaacttcagtttgtgctaaaaacaaactccactttgttatattgtgaataaacttggatatttgtgctacatagcatgctaaagtagcatatctgatggctgaggtcttagcataagtaaacagcaagtgagagacttgtggtatttcaacaagcactagaagatgtaccaatagtgagtataccatttttaaaaactccagctttatgtatcacatataaaattctgagcaaggaaaataagtgatttttttcctagat

SEQ ID NO: 539973 - DNA, 692 bp, Homo sapiens
tgttgctaagagagggaaagcttccccttctccaagtggccatgttcccaagtggaggtgaatagaggacaagagggggtggatgagggtgatgagacccagattctgtagagccaggacctattgatgagttagtaggtaataccagcgtttttcataagacagatccaacagtgttcatccaacagtgggaatcattatgtgctgtggtctggctgagagaagcattccatttttttttaaggttagaaataattagaaatttttttttaaggttagaaatattttttttctaaccttaaaaaaaaagatatattttttttaaggttagaaataattagaaatcaacataaacagaaaatgtgacagtttaatggtaatgaatccgcatgagtgctccataactacgaacttcacattcttgaatgaaacaaacttcagtttgtgctaaaaacaaactccactttgttatattgtgaataaacttggatatttgtgctacatagcatgctaaagtagcatatctgatggctgaggtcttagcataagtaaacagcaagtgagagacttgtggtatttcaacaagcactagaagatgtaccaatagtgagtataccatttttaaaaactccagctttatgtatcacatayaaaattctgagcaaggaaaataagtgatttttttcctagat

SEQ ID NO: 539974 - DNA, 312 bp, Homo sapiens
aaagataatgccaagtgtttcataagaaataaaatgaaaaatgcaacagattatgaggattcaaacaagcacattttgttattatgattgtacctcgttctcccttctgacacttcttcctttgcactgtacactttcttgtctcatttgttgggggacayaggttaccctttgctgaaggatgctgtattatttctcggacccgtgtttcagtccctcttttgaagccacatgtttttcccttcttcgtgcatggactccaaggattccattcactgacctcacagtgcactgaaacagaacagaagaaac

SEQ ID NO: 539975 - DNA, 614 bp, Homo sapiens
tggcactgtcaaatcccctttacaagccagatgcagtgctgtgctcctgtagtctcagctactcaggaggctgaggcaggaggattgcttgagccccagagttcaaggccagcctgagcaacataacaagacctcatctcttaaaaaaaattcccctttacagaaaaagagagaaaaactgtacaactgttattttgctgtaataagtctgctattttaaaaggatgtcccagcctaggaaacatggaaaaaccccatctctacaaaaaaattaaaaatyagctgggcatggtggcatgtgcctatagtcccactactcaagaggctaagtaaggcctgagggttgcatgagcccagaaggtatgcaggttcacaggagctgcagtgaaccatgatcacaccactgtgctccagcctggatgacagagtgagaccctgtctcaaaaaaaaaaaaaaaaaaaaaacacaggatgtcatttggaacttattttcaaaaaatacatgtttgtaatggtttttatcatcatagtagaatattagaatattacctacacatcatttggcaattgaggaagttgctttttccttttctgtggatattttgtctccaccca

SEQ ID NO: 539976 - DNA, 572 bp, Homo sapiens
gtgggcctgagtgcagcctgatgaatccttgattgtaactatatttttgtccagaaccatggcatgcaattcttgtcaaccctctgggattggtttcaaagtgataactttgaaaagagaaaatgggggtatgttggccaatgaggccacagcgagcctgacctcacagggccttgtgtagtaaagggttaatcttacccaaagagaggtctggccttggctctctgctcctgggaggtgatctctgtggccttgcaatgtcctgtctggtaaaagtgtttttttttaccttggggccttggggtacactggattgtgaaacaatatgatgggggccttaggtcatgtcatatcagtttgatttctggagaaagttttgatttctggaggaaaacaaaacatcagccaygaagacagtcgacaatatctatgtagtgagcctgaagaaaagctctagataccaaggctcagatgacctttcctggttggccatactctgtgtgcaacatcatgcatcgtggctgggagaagacagtgctatttgttgctccactgggaaaggacccctggga

SEQ ID NO: 539977 - DNA, 497 bp, Homo sapiens
ggggtatataaagtgagtttsctaaaagctgtgtaaatgaggggctccaaacctgccgtcatgtatttcaccctttatgacctaatgaatatgttatattatcacgagcctatcagcttgaaactttgcttttgctctgagtcccccgaggcaaacagatggatttttaaatccttcctcttaaagtcttactggatggcaaagcctttgcttaaatgtggagcctgaaattatcccgagttctaaagcatccttcttggctttgaaggagctgctttgactctatcctaaaggtttgcttttttttttcccttttaaatttttccttctctaggatatgatgctagaagggacctcagggatgattccaggccagaatgttgacggctcccaaccaaagagaaaaattcagattatagtgagttttcttaagaaactacatttattcatttaaatgactgatctttactttgaagttttgtttttctcccttgttg

SEQ ID NO: 539978 - DNA, 569 bp, Homo sapiens
ctgatagcatatttagcagtgaaagactgagtgctcttcacttacgatagggaacaagacaagaatacttaccttcatcacttctactctacactatactggagaccctagctattacaataaggcaagaaaaagaaagaaatatagattgaaaaaaaaagaagcaaaacttttttatttgtacacatataattgtgtacatagaaaatactaagaaatctaccaaaaaaaatcccagtagaaaaaaatacatgaatttaacacaatcacagtttataaagtaaatatacacaaatcaattttacctctatacacttgcaatggacagttaaaaatgaaataaaatatacaactccatttataataccagcccaaaatgcaaaattcataaggasatatttaagaaaatatgtgtaagacctgcacactggaaactacaaaatattgctgaaagaaactcaaaaagacttaaattgggaataacctgcaaaaaataaaaataaaaaaaaaagaccaaagtgacaccttcagtaacctagaatagagaaaattgaaataatgaatttgtg

SEQ ID NO: 539979 - DNA, 222 bp, Homo sapiens
ccctcactttggctcaagtaaactcttcaaattatattttgtgcatcagcctcttccttttaggttggtagcatgtactctttcctcaagaggaaccataatttatcagtttccttaataagcctacaaaattgtgtatctccacactccctctgctacagtttgaagatgttccytccaaaattcaggtgttaaaactaaatggccagccgggcttggtgg

SEQ ID NO: 539980 - DNA, 445 bp, Homo sapiens
ggtcctctcctggtccaatcaaccacaratgggggctgaatcatgcgatgccaacatggcagctcccaaagacattggattggcccagcttggtccactcctggtccaatcaaccatggataggggcgggatcatgcagtgccaacatggcagctcccaaagaagaggggactggcctgtgaatgggatgagacacccccaatcccccgcccccagatgatgaaattcagttatcctacttccctctgccacaaactacttttgctccttggttctacaactaagaggacacacgctgctccggtttgaatgtcccctccaagattaaggttgacaatcctgcatgtggcagtattgaggggtgatgcctttaagaagtgctcataaggggctcgctctgctctcgtgaacagattaatccatttatggattaatgagttatcat

SEQ ID NO: 539981 - DNA, 445 bp, Homo sapiens
ggtcctctcctggtccaatcaaccacaaatgggggctgaatcatgcgatgccaacatggcagctcccaaagacattggattggcccagcttggtccactcctggtccaatcaaccatggataggggcgggatcatgcagtgccaacatggcagctcccaaagaagaggggactggcctgtgaatgggatgagacacccccaatcccccgcccccagatgatgaaattcagttatcctacttccctctgccacaaactacttttgctccttggttctacaactaagaggacacacgctgctccggtttgaatgtcccctccaagattaaggttgacaatcctgcatgtggcagtattgaggggtgrtgcctttaagaagtgctcataaggggctcgctctgctctcgtgaacagattaatccatttatggattaatgagttatcat

SEQ ID NO: 539982 - DNA, 631 bp, Homo sapiens
atgttaattgctttttggggacatctgttcctagcacagtgctcagtgaaatcccttgggtttatgagtacctgacttggagaagaattataagaaacaaaatttgggggagaatttaaaatgtcattatttactttacaaaaawgttttaaaaattttactctgaaaggcttcactgcaggtttgctttaaattgctaagttttctagtcctgtagtcatctaatgagactataaatcagtttacaactgatactttagaagcatattttttgagtaaggtaagggatatagaacatgcagcatgacagtcccctatctcctgctctgggttgcaatggtctctttctccgagtccgaacagtcaccttgacaatccttgatggcagtagggagcatttaatccaactgtgaaataataaattagctgtggagtcaccaccagaacagggaatcctggctttatgcacctggctagtttgcactccctgtgaaaccatcacggttccttctcattgcagctgagctttctgaatcttttaagaactgaattgatgggatgtggaatttgatagccgataaattaaggatattggtaaatgtagcaactctattagaagatagcatttcca

SEQ ID NO: 539983 - DNA, 631 bp, Homo sapiens
atgttaattgctttttggggacatctgttcctagcacagtgctcagtgaaatcccttgggtttatgagtacctgacttggagaagaattataagaaacaaaatttgggggagaatttaaaatgtcattatttactttacaaaaaagttttaaaaattttactctgaaaggcttcactgcaggtttgctttaaattgctaagttttctagtcctgtagtcatctaatgagactataaatcagtttacaactgatactttagaagcatattttttgagtaaggtaagggatatagaacatgcagcatgacagtcccctatctcctgctctgggttgcaatggtctctttctccgagtccraacagtcaccttgacaatccttgatggcagtagggagcatttaatccaactgtgaaataataaattagctgtggagtcaccaccagaacagggaatcctggctttatgcacctggctagtttgcactccctgtgaaaccatcacggttccttctcattgcagctgagctttctgaatcttttaagaactgaattgatgggatgtggaatttgatagccgataaattaaggatattggtaaatgtagcaactctattagaagatagcatttcca

SEQ ID NO: 539984 - DNA, 643 bp, Homo sapiens
ctggggccagtgctgtggcccttaccctggtcatctgtgacactgttttctcttttttgctcgaggctctgtttattagactgccatgtctgtctctacattaatattggccgtgtctccatggacctgttccaaggaatggaaagaagctgatactcatgatctaaaattgaaaaaaaaaatgttagtgttaagcattttgagttaaatatggagctttgtgagtggttggatgcatagtaaatactgtggcaagatggaaagagtgagggcagctcatcctctgcatgtcaatgttctctttggaattccctcacgggctcagttttgacaggttaccatgtgcrtttttcagtcctctctgtgtgtctttaagacccagcagacctaccttctccctgactcatggaatattagtcctaaaagggagtcacaaaactgagtccagtgcactgattacattcttagggaaactgagacccaaaggagcatgtgtcttgctaagatcactcatcctttattggtgcagatgggatgaaaacccacatctcgcagtcttcagttgggcttcacctttgctacaatttgttagttttttaaaacagaaattatttgaaagattttactgtcaagctaatttcct

SEQ ID NO: 539985 - DNA, 551 bp, Homo sapiens
gatgactggttcccaagacttttcactcaggccttggttaccagctcatgttctcagccagtcacgtgaagaaggccaatggctctgctcatcaaaaatgcaatttcccacacatggaggrcaatagcacaaaactattctctttcattgccaaatgaattgtgtttggtaatctgaaagcatcataaattatagagacacagacccgaggaggattatgccttctatgctggctgtgatacacagagagccttgtgtggatacaaacagggctggcggctcctgggtacacagaaaaggaatgcagagctcaggagctgagtccatcatatggccttcagctttgcgtcttttgttcctctatctgttccaccaaaggacatcctcatcctatataaacatatggatacatgcgcagtaaacaattccattggatcaccccctttcactatatctcctctgttcaagaacccacaatgattccccactaccaatcacatcaagcctaccatcctttcttgagttaaggtaccatgttgaattgaaaagag

SEQ ID NO: 539986 - DNA, 623 bp, Homo sapiens
actttgtctcgcctctattcccatcatctgatatagtacctggcaaatgacaggcacttattaaatgcttgttggatggctgctggattgcatcattgctggttcagtggacgaagacttctgttttggggcttaaatttagtgacagttctgatgcaatgggttgattaaaatgctcccaaaccatctttttgttttgagaggcaggaatgtgatgtgactcatatgatccctgttatatatttttggctttctgttctttggtctagaagggatcaaagtgaagagcgtaagtttaagtatctctgtaatttaaggcaagttgtacattactggcttctgggtgttactaaggaacaattgtgtggaactgttctatccttttgttttacttttcagtatsaataacatcagccatttcactgaatcattaaaggcaaaatgtgaaagggaaggggagcctttcatccttcaaagtattcagagggcaaggagtagagtgatggatatgctagctagctcagtggtttcagccagtggccagaccatcctggagatcactgttattataagggacatatgtactttcatttgaatgattaccatttctccaacatatttgc

SEQ ID NO: 539987 - DNA, 600 bp, Homo sapiens
tcctaaaagaaacctaggaaacatcattccagacaatggccttgggaaagaatttatgactatgttctcaaaagcaattgcaacaaaaacaaaaactgacaagtgggacctaattaaactaaagggcttctgcacrgcaaaagaaactatcaatggggtaaacagataacctacagaagggggggatatattcacaaactatgcatctgacaaaggtctgatatccataatctttaaaaaacttaaacaattaggtttgctatgtcagaaagtagtgtcagcacaacctggcagcacacgtcagcacctctttttccctcctctgcccctcctcctgcacaatcctttagtcaccaactactgttgatcctacctcccaaatgtctctaaaatctatccacttctgtccatctctattgctccttcttagtcttacctggatgcaaatgcattaattaaaaaagggagtatttgtcttttgcttgttcaattatttaagtttcttaaagattctggatattagacctttgtcggctgcacagtttgtgaattttttctcccattctgtaggttgtctctttactctgttaatagtttctc

SEQ ID NO: 539988 - DNA, 562 bp, Homo sapiens
ttctcagaaatgtctcttggacagtgctgctccaaatcaatattcaaaccatagctgaggatcacttttagatgggaagatcatgaaacagcaatttaaccatttatataaaaaatcaggcacaatttaaaaaaagaaagatacagttgtgcaaaacaatttattctcttgcaacataatacgatcagagacaacattttttgttatataccaaagaaagaacacaacaaaacttcctagatacatggctgggctcgtggctcatgcctcccagcactttgggaggccgagacaggtggatcacctgaggtcaggagtttgagaccagcctggccaacatggtgaaaccccatctctactaaaagtacaaaaattagccagtcagacatggtggcaggtgcctgtaatcccagctactcaggaggctgaggcataagaattgcttgaatctgggaggtggagtttgcagtgacctgagatcacgccactgcactccaacctgggtgtcagagcaagactccatctcacamaaaaaaaaaagacttcctagatacagtaagga

SEQ ID NO: 539989 - DNA, 470 bp, Homo sapiens
ctggggcagggcgccatctttacaggatgctcatttgcagcaatattgccaagccactggtcgtttaaatgagtgtcctggttatcatcagatagtgtttcrtttattatatctattacatggtccacattaggaagcactactgtaatgaaacaaacactgatgctctgttcaagtcaagttaaaggcaaagctttttgttgttattttagtaaaactctgcttttttctttctttcttttttttttttagatgtaatcttgctctgtagcctagactgtagtgcagtggtgtaatctctgctcacggcaacctcctcctcccaagtttaagtgattcccctgcctcagcctcctgagtagctgggactttggatgtgtgccaccatgctcaactaattttttgtatttctagtaaagacagggtttcaccatgttgtcaaggctactctcgaacccctgacctcaggt

SEQ ID NO: 539990 - DNA, 564 bp, Homo sapiens
aactctctctgagattccgccatcaagccgtccctctgaagtcaagctgcttctcactgatgttaagctgcttcttctcttctctccttctttgctgctctgcttccagtgaagcctggggttcctatgggtacaggatgggggcatggtgggggtcaggatggttttggaaaaggcaacattcgagcaggaaaacaggaatgcatgttcttgctttgggccactggtccaggcttgagggtgggtgagcctctgccagggaccctaccctcttctcccagtatttctctgcctcctgcccatatcaccatctatctaataactagatattagactgattgttggactgaactattttctcccactgtgattattattatttctgttcccaagattttctgcactggacatcaagtatttgaattgcstcctagcattcaacaaggaaatgctttgcctgcaacatgaagtgttagaaatgttctctcaaaaccttctcagcccttgggttatatgaatctgtggatcaggtcaccaaaattcagagtgaggccttagtgactg

SEQ ID NO: 539991 - DNA, 592 bp, Homo sapiens
tctagcatcctcctaaaaattaactggatactgattatggctgggaggtgggttaatctttatttgaacaggtaaaatgtagtcttgatagctcagggattaaaaaacacatatatatgggctctctatagatgttaaataaacatctgatcacgatcattttgtgttttcttttacccttgggtaaaggataaagaacattcaagtttcttcaaatgtgtccaaaatcagaagaggggaggaaatgggaaaggggtccttggaggaaatgttctgagttggttttggtggaaaagccaacacatggaagcccagagcaccatgtggctccaatcagagcatggtggctgtgagcacgytgtttttgaagccgaattgcctttctgtgtgtgtgggtacgtttggcatgatactgttccaaagcatttgtttaagacatttcaaacatagtaatttaatgagtggcaataaaaatatctttattcaagcaatggctctgtttattggtatggcttatatatgtattcatagtttgtggttttctggatgtgaaacaatttgagttctgagtattattgcggaaccatgagcc

SEQ ID NO: 539992 - DNA, 610 bp, Homo sapiens
ccaaccttccattctacctcacgtttatctctttctaccaaactgtaagcttcttaccttgccttcttatagattgtgaaatgtttattgaataaattcttggacttttataaagagataaagcatttcagcaacatcttcaaaaaatgcatatgccgacctatttgatttagtatgtatgcagtgaggccaggtgtggtggctcctgtctgtaatcccagygctttgggaggcagaagtgggaggatcacttgaggccaggagttcaagatcagcctgggcaacataggaagaccctgtctctacaaaataataataataataataataaataaataataaaaactagctaggcatggtggtatgtgcctgtgatcttagctaccaggctgaggagggagggattcttcagcctgggaatttgagattttcattctgtgagctatgactgtgccactgcactccagtctgggtgacagagtaagactctgtcttgggaaaaaataaaacaaaacatatatatgtatatatatatatgcagtgaagctatccacatgagcctgacttcttattgtaaagatctaatagattcatagcttcagatataatc

SEQ ID NO: 539993 - DNA, 620 bp, Homo sapiens
taccctaggctgatctaattgaagaagaaaattttgtgtatgtagcaaactagatagactgcatacccttcaggtaatctttcctacytattattattttgaaaccaagcttttgaaaaatgttgaacaatgtcccacagtcctcctcctgcatatcacttggggacctatttaaaaacgcatcaccccaagggtaacatatcagaatttctgagtgaatatcctagtatctgtaaagctcctttgggcagctagagttggttaccatcgttgctaagtatttgaccctgttagcttattgtttatgtgcttcctccactgccttctgtgactctgaaccctcttggcttgtttctttacttttctcaaaggtacttctcagatgctgccacttattctcgtgccctaaatagttgtgacattttcttagttttgttcttcagtttcacactcagtgacacaaacaggtatatacagttgatatagtttggatgtttgtccctgcccaaatctcatgttgaaatgtgattcccagtgttggaggtggagcctggtgggagctgattggatcacttggacagatttatcatgaatggtttagcgccatcctcttggtgctg

SEQ ID NO: 539994 - DNA, 170 bp, Homo sapiens
aattgaagaagaaaattttgtgtatgtagcaaactagatagactgcatacccttcaggtaatctttcctacctattattattttgaaaccaagcttttgaaaaatgttgaacratgtcccacagtcctcctcctgcatatcacttggggacctatttaaaaacgcatcac

SEQ ID NO: 539995 - DNA, 491 bp, Homo sapiens
gggtgacagactgcagttggagcagcatggtcccctccatggcccccagctcctgggagtgtcctgctaagaagaggtaggacactggtaggaatcaaagaacaatgatgcttactggagcccctccaaatgtattcctgtttctcccagaggacactaccctgtcacccaggagagtcacttcttttagaggagaagacctcccactgtaatgtaaaacagatttgcaagttttctgctccaaaactgcagcaccaaagaaaatagcgaccaaagttaaactatgcaggcagcaatgcagtttcaggtcacccactcagrtcaatccatttcattggactcctgaaaacggattcctcattcctgaaatgaatttttctattgctgctgtgaagcaagtcagttcctagctaacaagaattcaagattcattttctctgcagtttctaagcaagctctacctgatggagttttgaaattccaacaacctt

SEQ ID NO: 539996 - DNA, 491 bp, Homo sapiens
gggtgacagactgcagttggagcagcatggtcccctccatggcccccagctcctgggagtgtcctgctaagaagaggtaggacactggtaggaatcaaagaacaatgatgcttactggagcccctccaaatgtattcctgtttctcccagaggacactaccctgtcacccaggagagtcacttcttttagaggagaagacctcccactgtaatgtaaaacagatttgcaagttttctgctccaaaactgcagcaccaaagaaaatagcgaccaaagttaaactatgcaggcagcaatgcagtttcaggtcacccactcagatcaatccatttcaytggactcctgaaaacggattcctcattcctgaaatgaatttttctattgctgctgtgaagcaagtcagttcctagctaacaagaattcaagattcattttctctgcagtttctaagcaagctctacctgatggagttttgaaattccaacaacctt

SEQ ID NO: 539997 - DNA, 648 bp, Homo sapiens
taattggctatcaactacttccaatcttctgtcagttttgttgtaagcaaaatcattggtaccatttgatctgcaaaggatttacaactttctcaaattttgggaaacacagcaaaaatgtataayaaaaattatgaaatcactattaagtatactcctactctttcatttagaggcaatttgtttaacaagatacatttagaagggatgggaaaattaaaatatatcaatatgcttttgataagataacattactgataaaaatactttttactacgtgctttaaatatccttaatcaaattgagctgctgactgaactcattaaattttatggacaaagccctttctacatcctaaatagtgaagtcaatgttcactgtcaaatacattggctaaatgagatttgctttctatcacaaatacctaactttacatttcagtttgtaattaaaaatacgttatttcacacatgtgcgagcttccttgggctgctgaaataaagcaccgcaaactgggttgcttaaagcaacaaaagtttattgtctcactgttctggaggctggaacgccacctcaaggtcaaggtgttggtaggccaggctccctctgaaacctgtcgagaatacctaccttttcctagctactggt

SEQ ID NO: 539998 - DNA, 557 bp, Homo sapiens
ctgactcaagcatcactgatgtttatttcagaggctggaggtccagcctgcaggagctacagggttttgagaggttcagactgctgtagccatgggcaacattacagtcatgcacatgacaggaacctaatacagccatcgttccaagtggctggcgttgttagctctaatctgctcaaatgtcctttgtaattagtaatttgataacccctggtcttaaaggaatgtacttggaaggtaaaaccccaactccttcaaggcaggttctggaccccaggtaactttttgaaagaatttttgtattcatcttgctttgacttgatgtaagatttgattttgytcaaaatgagtgattgtttaaaagtcctgccatgtggaacggcagttcattggaaaagtgcgattctctgtgtgagcaaattgcctgtgtctgtcttcgagctttccatttgcagggcttgtggagcagcagttaaggtgtcttgatgattaagttacctgtggctggcccagctcggccgagggggctccccattagggacaaatgctgtaaggat

SEQ ID NO: 539999 - DNA, 540 bp, Homo sapiens
ggctactgagtgctcgggaggtgctgtctgtcaggggctttctggaggcagcgtgtccactacccacaccactgctgtgcctgcagtagaaccagatcaagaatccttcccccaaagaacaagaggaattcttttctactcatttccttgtctgtgacactcaagtgtctgaggattaccctgccttctcacagaaggttacaaacacgcactcaactccatacacattttggtttccacacaaaatggtttttcctgttatctggtaaaagagtctttgagtcttacctcagggaggtctgggtctaacgcttagacccacattccacaagactaggtcaggagatctggttttagygattgctttataaatactgtaccttctcctgaggtttgaagcttagatgttcagggatagaggagctgatgattaaggtgggggtagaggttacaggaaatgctgagaataggctccccagatgcttaaaggacttgtcattttatagaattaatacaatttgctgatctttagagaatttt

SEQ ID NO: 540000 - DNA, 540 bp, Homo sapiens
ggctactgagtgctcgggaggtgctgtctgtcaggggctttctggaggcagcgtgtccactacccacaccactgctgtgcctgcagtagaaccagatcaagaatccttcccccaaagaacaagaggaattcttttctactcatttccttgtctgtgacactcaagtgtctgaggattaccctgccttctcacagaaggttacaaacacgcactcaactccatacacattttggtttccacacaaaatggtttttcctgttatctggtaaaagagtctttgagtcttacctcagggaggtctgggtctaacgcttagacccacattccacaagactaggtcaggagatctggttttagtgattgctttataaatactgtaccttctcctgaggtttgaagcttagatgytcagggatagaggagctgatgattaaggtgggggtagaggttacaggaaatgctgagaataggctccccagatgcttaaaggacttgtcattttatagaattaatacaatttgctgatctttagagaatttt

SEQ ID NO: 540001 - DNA, 679 bp, Homo sapiens
agtacaaccattttagaaaactgtgaatatctaagaaatctgaacataaacttaccctacgactaggtaattctacgccttgaaacccatacatatattcctcaaaagcattgtacaggatgttcctggcagtgctatatttaatagtcaaaacactggaaacaatgmaaatatccaccaacgggagagatggatagttaaattatggcacagtcacacaatggaatagacgacagcaaacaagcaaacaaacaaacaaaaaccctatcaatacttgcaacaatgtggaagaatttaacaaacattgttgaatgaaagatctagatacaaaatagtacatattaaagattgtcatcgttttacagtgatatcagggattgcagagctgccacctctcgctagagctggaactcaccggatcccgtgcccattgccatcctgtgcagggctccaggagctgtcttctgccggctgccacctttgcaggaagaatcccatgcacctgccactgcgacaggtgctcctgccagacctgcagctttccacagtcccctgctactgcccctagcagggatctacagccctgcctcaccagaggtgccgtcagaaagagaatggctcccaccttctcctgcctaatgcaagagtctcaaattggcagaagctaatggaaccccag

SEQ ID NO: 540002 - DNA, 679 bp, Homo sapiens
agtacaaccattttagaaaactgtgaatatctaagaaatctgaacataaacttaccctacgactaggtaattctacgccttgaaacccatacatatattcctcaaaagcattgtacaggatgttcctggcagtgctatatttaatagtcaaaacactggaaacaatgaaaatatccaccaacgggagagatggatagttaaattatggcacagtcacacaatggaatagacgacagcaaacaagcaaacaaacaaacaaaaaccctatcaatacttgcaacaatgtggaagaatttaacaaacattgttgaatgaaagatctagatacaaaatagtacatattaaagattgtcatcgttttacagtgatatcagggattgcagagctgccacctctcgctagagctggaactcaccggatcccgtgcccattgccatcctgtgcagggctccaggagctgtcttctgccggctgccacctttgcaggaagaaycccatgcacctgccactgcgacaggtgctcctgccagacctgcagctttccacagtcccctgctactgcccctagcagggatctacagccctgcctcaccagaggtgccgtcagaaagagaatggctcccaccttctcctgcctaatgcaagagtctcaaattggcagaagctaatggaaccccag

SEQ ID NO: 540003 - DNA, 600 bp, Homo sapiens
tggagtatgggaggaggtgtgtgtgggcacttccacttcccattccaggtggaagttcagaacacctggtcacctaaaaggagtgcagcataacatgtatgtaacaatcaccctatgtttcaatgtacagtttttggtccccagtcgaaacattctaccacatgtaactttaacatttacctttgacaagaactaaaagtagatctaccattccattcatcaatcccctactggtatctactcaaaataaattaaaaaaatcactatatcaaagagaaatctccttgtgcatgttcatcacagcacagttcacaattgcaaagatatggaatcacctaagygcccataaattgatgagtggataaagaaaatgtgatatatatatatataatgtctcacagaatactactgaaccacaaaaattagcactataaggtcttttgcagcaacttagatggaattggaggccattatcctaagtgaagtaactcaggaatggaaaactaagtatcacatatctcataagtgggagctaagttatggtatgcaaaggcatacagagtggtataatgaacactggagactcagaagggaagggtg

SEQ ID NO: 540004 - DNA, 679 bp, Homo sapiens
gaagacaatgaggcttagagaggtccagctgtgggcctaagatccacacagctactagacagagagtgaagattccgggctgggaccaggtgattccaaagtccatctgttttcccgtgctccagagttcctcaaagggtgacttatccgtgacctccctgcatctaaatcacccgggggtgctgtcaactgcagattcctgggctgcctcccagacttaccaaatctgaatattaatgaggaatacaagataaggggaagaggggacttggccacagacttatctaaccagctcttcctggcccaaatccagtcctttcgcttacacgctgaagcttttgaacctcagagcatccccaccttcccttggcttggccatcttcagacggggttattagacccccggggttctcarggaatatacaaccaattatggttttaagaaaacgtcaatcccacatttaccctttcctaaaataggtcttgaaaatggaggttctcctttcttttccccttctttatctaacagaaaaaaaaagacgcatctcttactttggtatattgctctggggtgtgaagccagccccacatgaggaatgactggaaaagtccatattgctgttgagaaagtgaatgactttaatgattgggtgattgggttccaatttctttttcaatt

SEQ ID NO: 540005 - DNA, 476 bp, Homo sapiens
tttagagggaaagtgattgaaatggaagacaggcaaaggaagtccaacatacatactattggggtccctgaatttggaaaccaaatattgaaagagaactaatatttaaaactatattccagttaaactttctggaaagaaaagaccctacsttgtataggaaagagctcccaggctacctgggataattgacccaaaatgatgaattctgatacctacctatttaaataaaattgttagattttaaagataaagaaaaatattcaaatgctgttcaaaaaaatatcaaattgcttacaagggcaagagaatttaactagcaacaggcttctaaatagtaataggcaaagagaagcaaaattgaatagcattgtcaagaaacttaaggaaataaattataagcccaaattgtgatttttcagtcatgctgtccttcaaatatcaaagccacaggaaaaattttaaacatgcaacaa

SEQ ID NO: 540006 - DNA, 589 bp, Homo sapiens
aggaaggatcagtcaacccttaacacaccttaattaaacagaagcagagcctgtggtgtccaagacttgggcattatttatccataaggggccctgcaggatgatgtcagcctgtccagtttcaagaatatttctaagtgaaaaaagaatatatttttagctggatacaatagggattttaaatccgcatgtatytcactccaattgtggtttcagcagctttgagttccttcaggtgctttgaggtccctggttacttcgctttagacattttaacttcagctaaaataactccactaactccagcacgtgccctacacattattttatttcacaaagctgtggctgattctcccagggattttgctttgaaggattgttaaaggtttcagggatactgaaatgattcattggtgaaaggggcaggcaggtggtacaatgggcagaggcggggcttggtgccatggaggcgtatgtccagtgctggctttgcccaaaggggcgtggcgtcagctccttccctgtaacggaggttgtaatactgacccgatctatgtgataggtggatgtgcaggagagccatccacat

SEQ ID NO: 540007 - DNA, 589 bp, Homo sapiens
aggaaggatcagtcaacccttaacacaccttaattaaacagaagcagagcctgtggtgtccaagacttgggcattatttatccataaggggccctgcaggatgatgtcagcctgtccagtttcaagaatatttctaagtgaaaaaagaatatatttttagctggatacaatagggattttaaatccgcatgtatctcactccaattgtggtttcagcagcyttgagttccttcaggtgctttgaggtccctggttacttcgctttagacattttaacttcagctaaaataactccactaactccagcacgtgccctacacattattttatttcacaaagctgtggctgattctcccagggattttgctttgaaggattgttaaaggtttcagggatactgaaatgattcattggtgaaaggggcaggcaggtggtacaatgggcagaggcggggcttggtgccatggaggcgtatgtccagtgctggctttgcccaaaggggcgtggcgtcagctccttccctgtaacggaggttgtaatactgacccgatctatgtgataggtggatgtgcaggagagccatccacat

SEQ ID NO: 540008 - DNA, 589 bp, Homo sapiens
aggaaggatcagtcaacccttaacacaccttaattaaacagaagcagagcctgtggtgtccaagacttgggcattatttatccataaggggccctgcaggatgatgtcagcctgtccagtttcaagaatatttctaagtgaaaaaagaatatatttttagctggatacaatagggattttaaatccgcatgtatctcactccaattgtggtttcagcagctttgagttccttcaggtgctttgaggtccctggttacttcgctttagacattttarcttcagctaaaataactccactaactccagcacgtgccctacacattattttatttcacaaagctgtggctgattctcccagggattttgctttgaaggattgttaaaggtttcagggatactgaaatgattcattggtgaaaggggcaggcaggtggtacaatgggcagaggcggggcttggtgccatggaggcgtatgtccagtgctggctttgcccaaaggggcgtggcgtcagctccttccctgtaacggaggttgtaatactgacccgatctatgtgataggtggatgtgcaggagagccatccacat

SEQ ID NO: 540009 - DNA, 539 bp, Homo sapiens
ggacctgctttgtgtctggtgrgcacaggcatttcagcagtgtctctccctccatggcatgcctttgctgtatattttaattcttgtctttgattaaacattgatcataatgcatgagttcctgatgtttcgtgacatgagaattctgcagttaccgctgaaaaattttatgaccatgctctgcagaggaattgatcatacagggtttactagcctggaagatggatgactcgcagcggcacccaatctggcatcaggagctcaaggagaggcgtttcatgaagcgccgtgagactgcgcccagccacccactgtcctgcttcctctagaaaataagatatagggctcaccgggctaaacgttctgtcatttctgtgttaacgtcacacatgactgtagaatactgagtttcatttgactcccaggaggtatacattttggactcttacatcccatcctccatttgtgtcaaggtcaaactatattattactcaactagtacacagtacttgactaactttgatctgggagtgaagaaa

SEQ ID NO: 540010 - DNA, 599 bp, Homo sapiens
gatggaccactgttcttgacagggtttccacctgttttgataggaattaaggagttttgaaagcatttaaaggtattcttcagttagtcctttatttcctcaactctaaaacaccctttattgtaccaagacagaaaaaaatgctaattaaaccctgacacaatgtattcttattactgaagaatttttatttcatacttgttgacagagctctttagacggattcggatatagaagttttaatcacatattactcatatattcaaaaaagggaaaacagaggtaaagtatattaaaggtattcccaaactgtcttcaaattcagagtttgactcttctgaattatttttcaactcagagtcatgtatatccatgtttttccacagtgttttcttctgtgcctgaagtggactagtgagtcaggatatttccaggactattgcacgaatgtcaytggcattaaattctaagtaattgacaacttttggctagttttatgtcttctcagtcttcccagaaaatgtcaatggaaggatttcaagcaacaattagagctcctatttttttctaatggctcttaaatgttttgttggctgaaa

SEQ ID NO: 540011 - DNA, 478 bp, Homo sapiens
ccaagggccactgaatgttcccgaatgcccctccccagaggagtcctgggcagggagtagggcattcaggaaagctgaggcccagcgacaggtaggcgctggcctgaggtcccacagcgcaggcgggtccgaagcccccagtctgggttcaggcctcccccgccctgcggcgcggcctcgtggcgtccccagccctccgttcccggtcgctgccctgcagggacttgcccagcggggacrcgccgggcctccccgaggtctgcgcccggctgcagccgcgggatgaaaggggaatccaccgaaacccgcctccctcccagctcgcccgccccacccgcaaccggatctggctgggggcggcgggctttgaagtccgcgccagcggccccagcgctcggacggctccggagactccgggaggccgacttgaaagggcaagccgcgggccggtccagccttcccgggacagggccgggga

SEQ ID NO: 540012 - DNA, 684 bp, Homo sapiens
taaaatgggaataacagaagccgtccctgggactatgagatcaaggtgctcaagaaaagtggtgtctgctgaggggaaaagccagtcccaaaaggttgcatactctcattctgtttatttgtttttgtttttgagacagggtctcgcccygtcacccaggctggagtacagtggcgcaatatgggctcactgcaacctccacctcctgggctcaagtgatcctcccatctcagaccctcaaggagctggggctacaggcacgtgccaccgtgtccggctaatttttgtattttttgtagagacagggtttcaccatgttgcccaggctggtctcaaactcctgagctcaggtgatccgcctgccttggcctgcgataaaattgcacagaagtaaatacacacacgtgaggatacggaaaaccggggaaacctgagcaagagcagtcagaccccggctgtgatggcgcccagtagttctgcgagatgttaccattggggaaactgagtgaaggcgggtacctgggatccctctgttttcttttttgttgttgttgttattttgagatgaagtttccctcttgttgcccaggctgggtgatccacctgcctcggcctcccaaagtgctgggattacacgcgtgagccactgtgcccagcctctctgttttatttcttctttttttt

SEQ ID NO: 540013 - DNA, 591 bp, Homo sapiens
taaagaatattctgggcttaagaaaataataataataaaactaagaaacactctgtgtgatagagcccagttaagactcagtctcagggtaaagatcataccaagggtgtggccatcacgccctttgttgaaacctcagaaaagcttgcaggcccacagttctgtctagaaagccatgtctagaagaaagttaggtgtgtctttttttttttttttgagacagagtttcgctctgtcgcccaggctggagtgcaatggtgcgatctcagctcacggcaacctccgcctcccgggttcaagtgattctcctgcctcagcctcccgagtagctggggttacaggcatgcgccaccatgccyggctaattttgtatttttagtagagacagggtttctccatgttggccaggctggtcctgaactcccaacctcaggtgatccttccaccttggcctcccaaagtgctggaattacaggcgtgagccaccgcacccggccttgggtgtatctttggcaaaaagagctgagtgacaacaattgggcaaaagttacaaagttttaaagagggtggcactgtccgcagagctgtcag

SEQ ID NO: 540014 - DNA, 604 bp, Homo sapiens
gctgcaactcccacgtaagagggtcaagccccccttcttcccgcctcacctccacttgggtgggaattagactctgggttcttttctttccttcctttccggagtcactcacttctccacctgggtatttcagccccaagatagaggcctcaaaaatgtggaaaaagaacaagccactagctcactctcagagcctcaccaccctgcaaaaggacatcgattatcagggcacaggggagcatgccatgggcacctgagccagtcctgggaccaggcactagcaggacaagctggtctggaactgggcagcctccacatctgcttccaacctgctgtgtggcccttgacaacagaataagaataatcgctcctgtccttctgagggttggaagggaaaacatggaggctttagacagtgagagcscttcagcccttcagtgacagggcatagaaagccctgggggaggagaaggaagggcaggggaggagagggaagggaggggggaagaggaagggactgacttccttgagtacttactatgtgtctgcaaggtagcaggtgttcccatctcttcatctcactggattccccaacaactctatg

SEQ ID NO: 540015 - DNA, 499 bp, Homo sapiens
tggggccgaaggcagcagggctcgggtggctggttgctggctatggctgtgccttcarcctggcccaagccatctgggtatcctgtgctttgctggaaagacatgggaggaggaggaggaggcagaaggtgagaaaggacgaaggaagaaaatggatgtgtagaggagacctgaacttctttcatccccaaacaccaggttctcgccagtaatcagaccagtcggcaaaaagacacccacgggtgaagagttgtgggacacggataagatggagggaggttcctggtgccagttacatctccggctgcagtgcccagtgggtcccatccagtgtagggtgtgccctgaggaagctgaggggtctgaggaggagtcaggagagaaagattcctactcattctgccaatccatggtggggggatggagagatagggcaaacctcagcctgcctgagccaaccttgtctcctttccattcatccaccctgccacccactacc

SEQ ID NO: 540016 - DNA, 612 bp, Homo sapiens
ttggcccattgagggtaaggataccacagacaaaggtgctcaataaatgtctgggttacattttagtcacgcaccaggagcagaaaggaggaagaggcctttttgagaagggttccttttctttgtctctttctctatctcctgcccctgccggtgccgccacccctagtgtggaagctcgctgtggacaaggtcagactgcctggggctattccctccactggggcagggtctgtgacagccgcagttgccccaggatggctgggcagggtcggctcctgcctggatggctgacgtctccttccagttctttgttcagtttccagggggaccggggatggggaaaggcaggcagcacagcccrcggacctgcagggccacagcagagaggcgctgcttcacgtccccctgggcctccgtggccctggccctgcacacagcacggctgcctcctccctccgacttatttccggtcacctggctggtgggtccctcggggcagagcgcagggtccccagctttgctcctcgctctcctcccagctcctgcctctcctctttctggctgcctcagtggctgctcaaggtcaaggaacaaacagataaacccttt

SEQ ID NO: 540017 - DNA, 521 bp, Homo sapiens
ctgcccgggaaggtttccagatctccctgagcctcagtttccccatctgtaaactgggtggtggtggcttcgtcccccgctttgagaggacagcaggagaggcgtcctgagaagtgagttcgcctggaagctgccgggctgtagtttgcgttgataccaccgatcttcccggtcactctaggagacgggccatatccccgttttacaaatgaggaaactaactcagcgaggggagacgccgtgtccagggacacacagtaagcaggtggcccaggaggaccccagaacccggctggaggtggcggtggggggcgaggggtgcctgcggaaggagaggaacaggagcagcgggaggtcagcgctggcacctgcagccctgtcagcctgcgggggtgcggargtttgggaggtcttagcagagtggtgctgacagatcgtagagcgtgggtggaggtcagggctccccagccctcgctgagccattggctcggcagcctcctggttggagaggaagagtgggg

SEQ ID NO: 540018 - DNA, 636 bp, Homo sapiens
gaatggtggggtgggagaggagagtgaggcagagttggatggagatgagttttcagggtgtgcagggtaagaaggagacagacagggaaaaagctagactgagccccagcggacaggggtgaggcggggaccaccatggtggggatgtggggacagggtgtctctttggaaggtgttrcgacccccctgacagccaggtccccagcatggggggccaatctggatcctgaccgggtgggcctagcactggcgcccccactcaagtaggaaccctcgagaaaccaaggggagaggggagtgggaggtgggcttcgggcttctgggcctggaggatgggtggtgggggtgagggtggaagccctgaccccagcctggctggggttgccctggcaggggcggaagctgccaccgcagccctgggccagccccacctctcccaacaaaggcccagcgaggagagggcgtgtttgttcaggctggaggctggtggggggcaggaagcggagtttcaaagcggtgtcaccctttgttaccccctcttcagttccacctcccgccccaggctgcattccagaaccggagggggtcctgccctgggagaaatccgcttagccagaggctcgggttacatacagc

SEQ ID NO: 540019 - DNA, 495 bp, Homo sapiens
ttctggtttacagccttgagtagggcccagcaccgcgggtaggctcgggtgtcccactctccagcaccgggggtcctcctctctggttgggctgtgggttgaggggctctggaccagacaccggcctaccccgtgagcctcctcctatttttctttctctttctctctctcctctccctctgttcctgtgtgtctgacagcctctctgtcacgcacacacattgtattgcttctgtcagtagactgaatgcattcggtgccacctagataccarccaggtcctgggccttgcactgggccctggacggcacctgggctgagccggaaacagcccctgccctctgagaactcaggccctggcaggcagagtggaggctgcccagggaggagggtaaaagctgaactctggagtccagtcagtagctttgggtttaaattccgcccttccacttcctggctgggtgtgtccttgggcaaattatacttggaacctca

SEQ ID NO: 540020 - DNA, 588 bp, Homo sapiens
tggcatctgcaagctgtgggactctgggcaatcttcatctctccgtgcctccctgttctcatctgtaaaatgggaagaatgattgcacctgcttcataggaccagagtggggattccatggattcatgcctgacatgaagagctcagcccagcatccctagcacatagtaagtgctcaataaatggtagccccttcccagcatggacttaactcctgtcctgagccggttgtggaggccccatacaagataaagagaagaggcttgttgtctttggggataaggctctattcattttctgatcaacaatgtgtattcttactgttgaatcaacagtattaaataaaaaagaaaaaaatcaaaatgacaatgtgtattccatctccygtcaaactgggccccctatacttctggcctcctcaccctgcctctctgctgggcccagagcccccttcctgcatccaggaagctcactctagcagcgtcctggccacaccgcatcttctcacagtttttgagcttggaaggccttagggaatatggggtccagtccctccgcaagtacccacgtatggaactggggctcaag

SEQ ID NO: 540021 - DNA, 561 bp, Homo sapiens
ctaagaggaagagccacggtctaggtctatctgatctggggtctcagctcctgatcctgaacccagtgtctacagagcagagagaccctccctctcagctcctgggtgagctggccctgctgggatactgtgtgcactggaggtcatgcttccccttcctgtcacccaccagttctccttgggctgtgggagcttcaggtscagaggggaaaatttagagaggggacatttctgagcccaaattggctggcactgccttaggaaggggtggaacacagacgcctgcctgagcctccaggaagaaccccaccactccccactggaggcagatgttgccatggtccctggaggcagccgtggggtgagggtgcaaggcccccaatgtcactcttgtctcttcctgggctacaagccctgaagacaaggctgctttcctgttctttctttgaaaggagggcagaactctgaggtcttcgctacactgggctgtgaggccccgagaggacgggctgggagttgctgtttcttggtgcttctcctcatcacctagagggtgtgggg

SEQ ID NO: 540022 - DNA, 559 bp, Homo sapiens
cttgtgaggaaactgaggcctagagcagataagtcacatgcccaaggtcagatagtgtaataaatggcagagccaggagttgaaccctacaggttgccttccacgggcatgcgctgagcccccacatggtgctgcctcgctccaggggcaggaggtgccgtcctgggctctgcatgggcatagaaaaatggatatgacaggttgtggcccttaagtagtttatgagcttgtagaataaaataagtctgaattatgacagcccaggcgaatatttgacccctttccctccaaaacacatttagagtatgagaaacttagcatctagcctatcacataaactgaccttagaggttaaaygggattcactctgctgtgtaggaatcaagcagacacaggcccatgtggcagagtggctccatgacagcaccacagagggtcccagctccctcctgccccgctgagcagccactgccacagaggatccagtggatgttcctaaatttcccagaacctcaacagaaccttttctagttttatttttatgtttttgctattcccc

SEQ ID NO: 540023 - DNA, 559 bp, Homo sapiens
cttgtgaggaaactgaggcctagagcagataagtcacatgcccaaggtcagatagtgtaataaatggcagagccaggagttgaaccctacaggttgccttccacgggcatgcgctgagcccccacatggtgctgcctcgctccaggggcaggaggtgccgtcctgggctctgcatgggcatagaaaaatggatatgacaggttgtggcccttaagtagtttatgagcttgtagaataaaataagtctgaattatgacagcccaggcgaatatttgacccctttccctccaaaacacatttagagtatgagaaacttagcatctagcctatcacataaactgaccttagaggttaaatgggattcactctgctgtgtaggaatcaagcagacacaggcccatgtggcagagtggctccatgacagcaccacagagggtcccagctccctcctgccccgctgagcagccactgccacagaggatccagtggatgttcctaaattycccagaacctcaacagaaccttttctagttttatttttatgtttttgctattcccc

SEQ ID NO: 540024 - DNA, 530 bp, Homo sapiens
tttatcccagagaagaaaccactcagatggcctaacttcttaattctctcctttgaagttgcacaggacaactctatttttatttttcttaatatttttttcttatattttaagagatgggatctcgctatattgaccaagctggtcttaaactcctggcctcaagcaatcctcccatcttggcctcccaaagtgctgggataacaggtgtgagcccctgtgcctggctctacttttcttcatatttaaaggcttgaactgtgtggccatcaggatagacataggaagtcacaaggaaattgattgtatctatatccagccagggctgcctrtcccttgctagaccatgggaaaccatcacagaaagtgtccaagcagaagctgggccttgtgtgtggaggtgaatggtggtgggataggggttaagccctggatcagatattggtctacacgacctctggggttccttttaaacccaagactccatgattttataatttgtccatcaaacttatttagttctttaacag

SEQ ID NO: 540025 - DNA, 348 bp, Homo sapiens
gcaggcgactggcttcagcacctacgttgcctctttggataccttcctctctgtccctggagacagcacccattccctctaccaacccagtaatctttactgtgacacatgtgcccccacccctgccttgctattggtccccaaggttagacattttgctagaggggagcgtcagctcttaagggcctgtttcagactttgggaggaagagggagagtaaaaagaggaarggacagatggcaggggaaatgggaaggagagggggtaaggcacatgggaggcaggagggaatgcggtagcggccctctggggtctggaatatgctcagaagtagggtggctgaacaga

SEQ ID NO: 540026 - DNA, 348 bp, Homo sapiens
gcaggcgactggcttcagcacctacgttgcctctttggataccttcctctctgtccctggagacagcacccattccctctaccaacccagtaatctttactgtgacacatgtgcccccacccctgccttgctattggtccccaaggttagacattttgctagaggggagcgtcagctcttaagggcctgtttcagactttgggaggaagagggagagtaaaaagaggaaaggacagatggcaggggaaatgggaaggagagggggtaaggcacrtgggaggcaggagggaatgcggtagcggccctctggggtctggaatatgctcagaagtagggtggctgaacaga

SEQ ID NO: 540027 - DNA, 627 bp, Homo sapiens
gaatttggcttggttgatctatttaccatgggagcttaaacacagaaatgtgtgtgtatatatatatatatatatacataaaaccattacagatacatgccattgaggaaaattcacactcagggaaaaatgatgaccagaccagagaatttgcaaagaatgggagacacccttattagacacacaaaccaataaaagaagtcttcttagaagaaacatctttagaatgggaatatcaatgacagattcataatttgatatattattatttgattatttgatgatagagatcttgttaaagtgaataatggctttgaatttcatttgccaagtgggaggtctaagagataaaggagttttattgtttttgtttttcatcaagagtgtattgaaccccttactggaggggcccaattaatagctccacctcccctaccagatgcaatacacaccattgctctgggatttcatgggtttttttctkttcttttttgtttttttaaagaggggttggtaaggagggaatgtgtatttgttcttttgtggtaatgggtggcttgggaattcaggtgggtcttgaagctgttggtgataggtacggagtacgggagagggttgctacatgat

SEQ ID NO: 540028 - DNA, 622 bp, Homo sapiens
cccctgcataataaatgaacattgcaaaaaaaaatcttgcctttgaaaacctatgacttttttttacaattatacataaakgttatgtgaatgtttttttctgttaaactaaagttctatttatcttctccaatactgccaggatgattctttttcttccacagattgaaaggtaagagtaagagggggtcctcgtaaggctatggcaagagtaagagggaagtagtgtcttagtttcctgttgccgctataacaaattatcacaaagttagcggcttaaaacacagatttgttctttcacaattctggaggtcagaagtccaaactcagtttcactgggctgaagtcaaggtgtcagcagggctggttccctacaaaggctctgaggggcgaatctacttacatacatttctcagctcctgaaactacatgtatttcttggatgggagttccttccttcatctgcaaagcatatcggtcccatccctgcttctttcgttctatcaccaactcctctgactctaattcttcctgtatccctcttataaggactgttgtgattccatctggccctccagatcatccagcatgatcttcccctcttaagaccccttaatcacag

SEQ ID NO: 540029 - DNA, 606 bp, Homo sapiens
ttgtaacacatgtttattccctctacagcagcacttcttagatttaaatgtgcaggtaaaccacctgattatgatcctggttctgtagatctggggtggaccaaacctaacaaactcccaagggatgccagagctgccgytccagcctggaagcacatttggaggagcaaggctctgaagaatgcccagctctcttaaacctggcttgtacatacaccttgacacccttcactcctcttgtttgtctaacttcaacctctctgtaagaggcctcagtttaggtattccctcctccaagaagctttccctgattgcccatcataggttaagctcaggcctcaattctcacaacgttttgtgcttccctctgtcccaggtaaacaaacaaatatgatatcgtgtgatgtcttccccactcaactcttgagacagggactccactcctgttgcttccttatccccatagtgtcaggcatgtaatgggcaccttaaaacatgtgtttgaatgagggtctctgaactctgactccttattcattcatgtagcccattgtggggggcactgcctcagaccttggtggaacggaactaaattcaaatccttaa

SEQ ID NO: 540030 - DNA, 622 bp, Homo sapiens
agctggcttcccccagggcaggtgatcaagagaaagcaagaggcaccaacacagaaaagtagtatttataacctaatattagaagtgacatatcatcacttctgccatataccactggtcccacccagggacagtgtgggaggggactacacaatggagtgagtaccaggaggcaggaccactggggaccatcttggaggctgataacctgttatggctttcctccaggaagtcctccctgaccatcccctcacagagatctggccttgtgtgtgcccttcacatggtacttcacagattctgtcagcaagagccatcagaactagggggagggaggcaagccacacagtagggaggagacagcagggtgaggtcttagagactaaacagacaggccctgagaagacatcaggcygaggatcacctgccatggagcaggcatggcacatgctccccagacagttcatttagcttttccagctccacatagaggtaagaattcttgaacttgttaagcctcagttttcccatatgcacaagagaggtaagttacttgcctaaagtcacagcagagagcccatgccagggctggaattcaaacccaggcctgtctgatgcctgt

SEQ ID NO: 540031 - DNA, 519 bp, Homo sapiens
agattttccatgagaaatcattaggcatccaccttacagtcctggtttggttccttctaacttctttttgtttcctaatcttaagaaactttttaccttaagttaaagtatatagctatttaagatttcctaatcttaaaaaaatttttcttcagttgataatatgaaaaagattgcactgacatagttaaattcccaagaccctcagttctttatgaatgaaccaaatggctgcatgtcatggtctatcaacgtgacttgaacttaacggaactcatattgaaaaataacgtttatattttatgtttttacttgttaattttatttttccacaaatttggaagtcccttgtacatacaataagataaatatgcaaagtgaccacggtcttcatttctataattggttaagatgctattcataattgacatctatggttaaaatgctattcaccattgatatctatgatcttatttttccataatccmttttatattttcatctttctcagtcagaact

SEQ ID NO: 540032 - DNA, 618 bp, Homo sapiens
tttcttttttaaatttaaaaaaaatttggaaaatttttgtgagtacgtactaggtgtatatatttatggggtacatgagatgttttgataaggcatgcaaagtgagataagcccatcatggaaaataggatatccatcccctcaagcagtcatcctttgagttaaaaataatccaattacattatttatgttattttaaagtaaacagttattattgactatagtcaccctattgtgctattagatagtaggtagtattcgttctattttttttttttttttttttggtatccattaaccatccccaccttcctcccatccctccccaacgactcccctttccagcttctggaaatcattcttctaccctctatgtccatgagtgagaactcatgcatttttttttaactcttgaaaaggaaatagtcctctattatcatccctttaaactctacttctttaccattttcttcactttttccttctgaaatgcctrttgacatggaagcccttctcattatatataccacgttcattttatctttcatattttgcatctctttatttctcttcattgcattccagatgattttctcaggtctacatttaagttactca

SEQ ID NO: 540033 - DNA, 617 bp, Homo sapiens
tagtaaaaagatggtaacaaataatgtttattgcattcttagaaaatatatgtttcatatgtactaactcctcacaacatctgtcctaaattggagctatttttgttaccagcaagttcaaggaaaaagcaaagacagaatgaaaggttaaataacttgccttaggttagagtctgcaagtgttagagatgggcttacaacccagttgatctgtctgagaggctgcagtcccaaacatcatgctctgaatgattaaagtagttttatttccaggcggaagctgaaggtaaaccatacatgattctaycaatgttcttaaaatatacggataaatactagtgagtctgagaacacatcattggtttcataggcaatctgcgtgagaaataaacaatgtaaacgatgaatcaaatctttctcttatttgtttgcaaagccataaagtcctgggaaactgaagttaggagtctcaggctctagatgtaagattaatagtctcttttttgagattaagattttacctcggaaatgttctctccaagtctctgctttgatttgattaatctgtataaccaggattatttaattatcttctaaaaattgcatatgcaactttt

SEQ ID NO: 540034 - DNA, 638 bp, Homo sapiens
gtgatggagaaaaaagcaggaataatttggcattaaactaaggctgagatgtattaaaattgagccagtgtggagaagctggcctaggaccttctctgtagcatttatagccaagcarttaacctatatacccacccttgggtaataggttctcctctcttatagtacgtgccacacttccaagtgtagactgatgataatgaagacattggaataatgccctttgagagttttgccttagattgggaaatgcaggtctcaagattctcagacaaaatattttcttctagggaagagtacattttaatgttgtttccctgcccaaaaagataatgatatatataaatcatgggtatggattacaaaacgataatgtattcctacagtatttttcacaaagacactagaaaacattttctgttgaacagtattctggttttatccatagggatgaatctcattctctttaaaaattgtctggctaacagccaggtgcagtggtgcagtctgatagtcccagtgactcaggaggctgaggtgggaggatcacttgaatccaggagtttgagaccagcctgggcaacatagtgagacctcatatctacaaaaaagaataatagcaaaaaaagcaaaatcag

SEQ ID NO: 540035 - DNA, 417 bp, Homo sapiens
tggacaaaataaaccttctttccacaaagcagcycagagaccctgcgctaaagggagcagccagcggtcctgggattccacagcatttgttggttgagagcgagccagagaagcagtcactcaaggctttagtttagaacattctcaaggactgaggaggaggagcaagcaatgccccttgctaaacctctcccccatacattattcctgtgacaggaacttttgcaaaacagtaaaatttacaagatgtttagctgggcaaggacctgttttcaattctgcattttttccagtctctccgaaaggatgactgaccaggctgcttgaaatctgatgctgcgaagatattttcttgtgaaaccatgagtttatctgaaattggccactttgttaaaagagactctaaaaatatttgga

SEQ ID NO: 540036 - DNA, 389 bp, Homo sapiens
ttacttcaatagccaataatccagatcagggtaataaattatggttcacgcacttaaggaaattatggtctcaaagcagctaatgtatttttaaatcaaacaacaagattgaaacaacagtrtgttcagcgtgattctaatttttaaaaaattctccatacacagatgaatatatgggaaaaagcctggatgattgtacttacattgaaatgaaagagacagtgtatttttatatatacacacgtatgtaaaaatcccggggggggggggggggtcacctttcagacttgtaccatgattgcttctggggacgaaggaaactcggaaagtgtaccctttactttctatttctctcttttgaattttcacaatctgattgtattgctgca

SEQ ID NO: 540037 - DNA, 523 bp, Homo sapiens
tgtgtggctgctcctacagagcccggccgccctgtagacagagagcagcagctcagggyagttttgcagtcatatttatactcacttttaactgcatgcagattaagggctggtttatgcagggaagggataataactttgggatcattggatgctatggaaaggggagataatgcccaggtgttgccatggcaacagtacgttgacatagcacactggtgggcaggtctgattgaaagttgctttcaccctgtccctattttagctagtcctcagtctggtccggtgtctgagccccacctctggagtcgagtgccacctcctacctcacacctgtggtcatctccccagcagcctgatgtgtggttcagaaggtgggcacagagctggtgctttggcctttgcctgctctgggctagacctctcttcctttcaagaccccatgggactgccgtgggcccctcagaggccagggaggccacggagctccaagccccgggcttagcctgggcattctttcatt

SEQ ID NO: 540038 - DNA, 523 bp, Homo sapiens
tgtgtggctgctcctacagagcccggccgccctgtagacagagagcagcagctcagggcagttttgcagtcatatttatactcacttttaactgcatgcagattaagggctggtttatgcagggaagggataataactttgggatcattggatgctatggaaaggggagataatgcccaggtgttgccatggcaacagtacgttgacatrgcacactggtgggcaggtctgattgaaagttgctttcaccctgtccctattttagctagtcctcagtctggtccggtgtctgagccccacctctggagtcgagtgccacctcctacctcacacctgtggtcatctccccagcagcctgatgtgtggttcagaaggtgggcacagagctggtgctttggcctttgcctgctctgggctagacctctcttcctttcaagaccccatgggactgccgtgggcccctcagaggccagggaggccacggagctccaagccccgggcttagcctgggcattctttcatt

SEQ ID NO: 540039 - DNA, 523 bp, Homo sapiens
tgtgtggctgctcctacagagcccggccgccctgtagacagagagcagcagctcagggcagttttgcagtcatatttatactcacttttaactgcatgcagattaagggctggtttatgcagggaagggataataactttgggatcattggatgctatggaaaggggagataatgcccaggtgttgccatggcaacagtacgttgacatagcacrctggtgggcaggtctgattgaaagttgctttcaccctgtccctattttagctagtcctcagtctggtccggtgtctgagccccacctctggagtcgagtgccacctcctacctcacacctgtggtcatctccccagcagcctgatgtgtggttcagaaggtgggcacagagctggtgctttggcctttgcctgctctgggctagacctctcttcctttcaagaccccatgggactgccgtgggcccctcagaggccagggaggccacggagctccaagccccgggcttagcctgggcattctttcatt

SEQ ID NO: 540040 - DNA, 523 bp, Homo sapiens
tgtgtggctgctcctacagagcccggccgccctgtagacagagagcagcagctcagggcagttttgcagtcatatttatactcacttttaactgcatgcagattaagggctggtttatgcagggaagggataataactttgggatcattggatgctatggaaaggggagataatgcccaggtgttgccatggcaacagtacgttgacatagcacactggtgggcaggtctgattgaaagttgctttcaccctgtcccyattttagctagtcctcagtctggtccggtgtctgagccccacctctggagtcgagtgccacctcctacctcacacctgtggtcatctccccagcagcctgatgtgtggttcagaaggtgggcacagagctggtgctttggcctttgcctgctctgggctagacctctcttcctttcaagaccccatgggactgccgtgggcccctcagaggccagggaggccacggagctccaagccccgggcttagcctgggcattctttcatt

SEQ ID NO: 540041 - DNA, 625 bp, Homo sapiens
cttgagatcacaggctggcacctaacgtggagttatcattcacacacccagaaaggcaacagccctgtggcactgttctctggcctccccaggtttcccacagcaaatgacaacagcagcttgcagtgtgcctgtcctgtgccggacctggactctcagaagtggctggggaagtagacagcattttctttttcttttctttctttcttttttttttttttttttttgagacagggtctcactctgtcgcccaagctggagtgcagtggcacgrtctcggctcactgcaacctccatctcctgggttcaagtgattcaggattacaggtgcgtgccaccacgcccagctaatttttgtatttttatttagtagagacagggtttcaccatgttggccaggctggtctcgaactcctgacctcaggtgatccaactgccttggcctcccagagtgctgggattacaggcgtgagccactgcgcctggccagcattttctttttaacaggtgaggaggtgaagggcattgccaggggtgtacagaattaaacctacatcccacagactccaaaatccatctatattccactctactgctaagccaactactgattcactcaacagat

SEQ ID NO: 540042 - DNA, 625 bp, Homo sapiens
cttgagatcacaggctggcacctaacgtggagttatcattcacacacccagaaaggcaacagccctgtggcactgttctctggcctccccaggtttcccacagcaaatgacaacagcagcttgcagtgtgcctgtcctgtgccggacctggactctcagaagtggctggggaagtagacagcattttctttttcttttctttctttcttttttttttttttttttttgagacagggtctcactctgtcgcccaagctggagtgcagtggcacggtctcggctcactgcaacctccatctcctgggttcaagtgattcaggattacaggtgcgtgccaccacgcccagctaatttttgtatttttatttagtagagacagggtttcaccatgttggccaggctggtctygaactcctgacctcaggtgatccaactgccttggcctcccagagtgctgggattacaggcgtgagccactgcgcctggccagcattttctttttaacaggtgaggaggtgaagggcattgccaggggtgtacagaattaaacctacatcccacagactccaaaatccatctatattccactctactgctaagccaactactgattcactcaacagat

SEQ ID NO: 540043 - DNA, 612 bp, Homo sapiens
aaaactttatgtccctttgcctccatttcctcatttgtaaaagggagattatcgtacatggtatctatctcgcctataggttgcatgaagaataaacaagataactatagattgcatgaagataattcttgtaaagaaaacttactaccacatagtaaaggcacaatatatgtagctagtattccttccaatactattttctgagtgccttctgtgtgtttggtgccatctgccctgtgtctgccttcatagagcttacaccagggatgtgggctatggacatagaaacaggcaaggcaacaaataacataaataaacaagatgattacatgttgtggtcatagctatgtccaaaaccagcaagatgctgagacagagaactgcatggacaactacttgcaaatgtccggtttggaaagcctcactgtggaggtcacatttaagtgacagatgagaagaagccagygagaaggacagtggggccgcagccgctcatttcaaacatgaaggtgcacgtgcctcctgcaagatccaactcagcaggtccggggtggccctgagtgtctgcatttctttctttccttctttcctttccttcttctttccttcctt

SEQ ID NO: 540044 - DNA, 487 bp, Homo sapiens
tggggaaggggtgcacaggtaaaggatgcctgccacacgtatccccctccccaagatcaccctggctgcaataagccagaggtggtactctggtctgaagacagaggtataagccaaggcatatatccactcaggcagctcaagcacaagcatttgcagagcccagatccttgaactcgtgctgtgtccaagtgagtgaaagcatgtcarcagcatttctgacagcctaatctcatataatctagtgaaagaaattctacaccaggcagcaggagtgagctgcttgcaaggctgctctcagaaccagatctggccatgacgactccataaacatgaattctggagcttctcagggcatctggttgaccctacatatgtgtgagagatgggtaggggtaagagagagggttggagagcaccctgaagaggagaaacagcaaatgggacccacagggaaaggacttggtctggagctcggttgccctac

SEQ ID NO: 540045 - DNA, 503 bp, Homo sapiens
ctgtctctgttacaggtcagttttcatcattccacatggaaccgctgtggcagacactgagaacttcacagatctgaaccacctttcrgcaaagcagggatgcccaggtatcagccattgtcagggttctgcctctgggtctggagggctgctgtgtgggtggctctcattccccaggacaattctccaagaccaaggtggccatgagccaccaggaggcaacagtcagcagctggggaccagtaggctgacccctaaaggggatctgaatagagccatctatgcacacccatccccttgtcttcccagtaaatggcccgcggccccacctactcacctgggtaaacacacacctcgactcctgtgcaccttggtaaacacacacctgtccgtccaggtaaatgccccactcactcacctgtgcaccttggtaaacacacacctgtccgtccaggtagatgccccactcactcacctgtgcagcgctcacctgactctagagc

SEQ ID NO: 540046 - DNA, 499 bp, Homo sapiens
gctgtcacccggccaaggcgggccttggagccaaaagggagatgcacaccttggtgggctggccaacgggtctggatgagtggaccccctgccccgccagccttcctgggtaatcagggaactcagagaaggatgttcctgccccmtcctgacccagaccacttgtggaccctgacagccagtgcagccctgggtgccacccacacactgagcttgggttgcacggcaacatgcatgacacacctgtccccatcaagcagggtcagggggcagcctgcagactgggtggacgctgacagcagctagcagcccccttgcagacgctccatcttccctttggggtccctgtccaggtatagccccctaaagacctctgttgaccaactcactgacagggcagatgtgacaccacctgctctcaattcatcctcactcttcatcttcagtcctctctcactaggcggcagagggagggactggacctatacaggtcccaggt

SEQ ID NO: 540047 - DNA, 490 bp, Homo sapiens
gtgcatatataacttcattctttttttttttttttctttggtaacaaaagatggagaggaaaggtgggaatgggtcggggcaagattgtcttaactcgttctttttttttttttttttttcctcaaatggaatcttgcttttgtygcccaggctggagtgcagtggtgcaatctcagctcactgcaacctccacttcctgggttcaagtgattatgctgcctcaacctcccaagtagctgggatgacaggcgtctgccaccatgcccggctaatttttgtatttttagtagagatgggattttgccatgttggctgggctggtctcaaactcccaacctcaggtgatccgtctgccttggcctcccaaagtgctgagattacaggcatgagccactgtgcctggcctaactcattcttttttagaaatctttttactttggaaatatttcaaacctacataacagtaggttgacttggcaagtggaaacc

SEQ ID NO: 540048 - DNA, 511 bp, Homo sapiens
tgctcctcattgcttgcattactgcctgagctccgcctcctgttagatcagcagcagcattagattctcacagagcacaaaccctattgtgaacagcacatgcgaggatctgtgttgcatgcttcttatgaaaacctaatgcctgctgatctgtcactgtctccatcatccccagatgggaccatctagttgcaggaaaataaactcagggctcccactgagtctacattatggtgagttgtagaattatttcattatatattacaatatgataacagtagaaataaagtggacaataaatgtaatgcacttgaatcatccccaaaccacccccgacctgtctgtggaaaaactgtcttcgatgaaaccagtccctggtgccaaaacagctcgggactgctgctctgaggaacatccctggacctaaatctgactggcagtgcacagcccccagggggcatggcctacctgctggatgtgggcaytgttgggtccattaataaaatcttct

SEQ ID NO: 540049 - DNA, 578 bp, Homo sapiens
ctgaaatgattttcattgaaaaacaaaaataagaaggcatctgcaaatttctctgcattatttacaggagatttcataatgcaacaggtaaatctggggaaacttctgggaggcagaattttctttacaaagggccatctaacagaacagccactggctattcataatatgagaaaaatccatcagtcctgatttctggaagcacaggtacagagagccataggtttcatctatcttgtgaagagtctaggtgttctgggggcatagtagcatttttgacacctgttataatgacatccatgatgcagatgttcacatcagactctcagcacgctgtgtggaaggttagcaagagtacgccaggcagatgtactgcaccgtggggagaaaggcccatgagtttaccattgggtaaatttgaaaatcgcacttcccaaaatgaagtagtcactaaaggatctctggaggggaaaatgttctaacttgcaccgagtcagggacccayatattggactttcacccaggtgtagaatgtcactgatgaagtttaaagactactgtggctctggttcccaaag

SEQ ID NO: 540050 - DNA, 406 bp, Homo sapiens
tttgaaatagtgcctggctcagaccaaagccttggaatttggcctctaaagacttraagtctctgcattcctgattttttcctttctgtattcccaatacacaggattattctgtctctgtagcgctaagatgccttaaacatagcagcgatttgagagggttttgcacttgctctgcagattaacctcttccagtgtgaacatgtcactgtctacgttaaccactgtctggcaacccgcatgagatatgcacactgttgtctctatttctcatctctcatttatttttcaacccacccagtctggcttctcctcccattggtctactgtgaatgcttttgctaagttcacccaggagctcagccaagttaagtccagtgtgcattttttcaacttgcaccttact

SEQ ID NO: 540051 - DNA, 406 bp, Homo sapiens
tttgaaatagtgcctggctcagaccaaagccttggaatttggcctctaaagacttgaagwctctgcattcctgattttttcctttctgtattcccaatacacaggattattctgtctctgtagcgctaagatgccttaaacatagcagcgatttgagagggttttgcacttgctctgcagattaacctcttccagtgtgaacatgtcactgtctacgttaaccactgtctggcaacccgcatgagatatgcacactgttgtctctatttctcatctctcatttatttttcaacccacccagtctggcttctcctcccattggtctactgtgaatgcttttgctaagttcacccaggagctcagccaagttaagtccagtgtgcattttttcaacttgcaccttact

SEQ ID NO: 540052 - DNA, 511 bp, Homo sapiens
gaaggggtgaaggaaggagagaatgcatggaaagatgatttatttgatgatgctgtgttgcaaagccacagtcccacaagaggccacaaagagagaaaaatggcaggatgaaggcaaaatacaagttgagatgcattcaggaggtgaagcgactgagagggaactgactgttggccttggcattgcacgtcttctggatagcgttgtgggcaatggtgctgccaggcaggactcccttcatttctctcaggataacactcctgaggccaacggggagactggagccacccacatcccaaaagcatccagagaagtggatgcaatctgcagagcagccttgctctcacacctttgtttccttcgaatggttgacccatcctggctactctaacgatgctgccttgtgaaaataaaaacttaaaaagacaatactttgtgttgcctcaagatacaaggcagtggcagtggctttaatttcaggraatcaggtccctagtatgtcagtcactga

SEQ ID NO: 540053 - DNA, 624 bp, Homo sapiens
accatacattggttacataactgtgtataaatacctttacataagtataatatacaatgtatatataggcacatacctgggcatgcacatgtgcaaaatttattaattgatatgcaaatttctataaaaatagacaactattctcaagacttgagttcttgacactgtgaagaactgatataaactggattctgtttaaaaaggggagggggaatgacatctaattcttctgacaagtttaaatttacatatatgcacagttcagtgcattctacaaactcattcatgcaacagatttttttgaggggcttactatatgccaggaaccrtgctagccttggcgatgtagttaaaaaagagagctggaagaaaagggttttaggtagataataaaacatctggacttgatcctaggacaatgggaaatcattgatgactttgggcaaagaattaaaaccaacagatttgcatttcctaagagattactgagcagtgtggagcattggtcaaggaagcatgggagactagagctcaacacggctggagcaatgacgttgagaggccagaagctggtacaattatggcttggagagtttaccagattggaggaagagctgaacccag

SEQ ID NO: 540054 - DNA, 552 bp, Homo sapiens
tattttaaaagtaaatacttttaaaaagaaaagaaatatggtgtgggtatttaagtcatccataatttagctatctagcaggaacaacaacacatatattactgtatttcattacactctctctaactagtaaatacctatrtactatgtaggtaggtagacagaatattctaaataaacttttatttataatatttaaatactttaaggtttatcacatataattaaatattttaaataatagagcatgcagccaaaaaatagatccacataaatatagtcaattgatttttgacaaagggataaaggcaatacaatgaaaaatagatggtcttttcaacaaatggtgctgttaacaactaaccatccatttctgtgcctagattcatttgttgcaaaacacaggaatctaggcacagaccttatgcccttcataaaaaactaactcaaaatggatcacaggcctaatgtaaaatgtaaaactgtaaaatacctaaaagttaattcaatatttattatttaaggataattttaggattactaaatatttgt

SEQ ID NO: 540055 - DNA, 552 bp, Homo sapiens
tattttaaaagtaaatacttttaaaaagaaaagaaatatggtgtgggtatttaagtcatccataatttagctatctagcaggaacaacaacacatatattactgtatttcattacactctctctaactagtaaatacctatatactatgtaggtaggtagacagaatatwctaaataaacttttatttataatatttaaatactttaaggtttatcacatataattaaatattttaaataatagagcatgcagccaaaaaatagatccacataaatatagtcaattgatttttgacaaagggataaaggcaatacaatgaaaaatagatggtcttttcaacaaatggtgctgttaacaactaaccatccatttctgtgcctagattcatttgttgcaaaacacaggaatctaggcacagaccttatgcccttcataaaaaactaactcaaaatggatcacaggcctaatgtaaaatgtaaaactgtaaaatacctaaaagttaattcaatatttattatttaaggataattttaggattactaaatatttgt

SEQ ID NO: 540056 - DNA, 610 bp, Homo sapiens
aaagcagtctggtcatatctgaaaatttgccattccaatcaaagcctaggtaaaataaccagtgtctatgattgtgtccttagaagcagaactttaattccagctccatcaagtgtggaattggttgcttgaacaaagtatgaatctcaaaccaaaattaggaagatttgaaatctgagaggagactcaccagagacccctgctggctcagcgagattgggtgaatggtaccaaggctccaattataatatcagtaaatggaggctcgcttcaggtcacttcatggttgccaaaatgtcaactggccaggagacatagggcagcagcagcccctagaagacagcacagagcaygtgtctctatgccgggggagcctgcaaggctgggccaggatcataaggtttctccctcactaagggacaacgcaggggcctagggacaagaatacaaccagaaaccccagggacctgcgtacctccttctttttctcctcctcaggttggggccagccatcccccctgctggtgatgatacagtcagccctgcacctcagtggagcagagcacagcatagttcactgaggcagagctgggctggactaacagctaaa

SEQ ID NO: 540057 - DNA, 593 bp, Homo sapiens
tgttcaagtgatcctcccacttgagcctctcaagtagctggaaccacaagcacacaccatcatgtctagctaattttttattttttgtagagatgaggtctctccctatgttgcacaagctggtctcaaactcctgggctcaagtgatcccccgacctcagcctcccaaaatgctgggattacagaaatgagctaccaaacattacttttaaatacagtttgacaaatgccattctatatcctacaattgtgstgaagattatttttctggccagaggcactatctgtagagtacaatttgacctgtgttaaagcccaagggtataataacaatgcatactatcactgcactatgatatatttttaaggattggatgagaacttgattaataatatagcaggaaatgatttcaaagtttgccatcaaattgtcatgttcttcagatatttattatatttcatgttcttatataatatgttctgtagataataataaaatagaatatgaatgcttttattccattttatccattcttctaaaagctaaaatttatcaaaagttaaaatttgaaggttttaataaaatgtaaatg

SEQ ID NO: 540058 - DNA, 593 bp, Homo sapiens
tgttcaagtgatcctcccacttgagcctctcaagtagctggaaccacaagcacacaccatcatgtctagctaattttttattttttgtagagatgaggtctctccctatgttgcacaagctggtctcaaactcctgggctcaagtgatcccccgacctcagcctcccaaaatgctgggattacagaaatgagctaccaaacattacttttaaatacagtttgacaaatgccattctatatcctacaattgtggtgaagattatttttctggccagaggcactatcygtagagtacaatttgacctgtgttaaagcccaagggtataataacaatgcatactatcactgcactatgatatatttttaaggattggatgagaacttgattaataatatagcaggaaatgatttcaaagtttgccatcaaattgtcatgttcttcagatatttattatatttcatgttcttatataatatgttctgtagataataataaaatagaatatgaatgcttttattccattttatccattcttctaaaagctaaaatttatcaaaagttaaaatttgaaggttttaataaaatgtaaatg

SEQ ID NO: 540059 - DNA, 424 bp, Homo sapiens
ctgtgggagctcttcggggttggctaaattccaggattcagggttggcaatctgagaagcctctctagcttttggttctgaattgatcatcacaaaaaactgaaggtttaactgaataaattcagagtctgttgtttcasgtgcaacttattcctactaagtttaaagatataagcacaactatcatactttcagtttctccataatcaaaagcaatacaaatgcagaattttaatctttatggagattttcatctccatgcactgggacttggtgatttacacatgtaattcccattaacactaataagagatagactgtgcacaccaatccccctgtgtcaaatgagaactgtatactaataaatacatttttaattctgattttatgcagatttaatgtaatattttatagaacacttaga

SEQ ID NO: 540060 - DNA, 607 bp, Homo sapiens
gtacatgctatttatccctgacattgccgtaagtcttcattgagcagcactcttttcagaaaccaagcacttaaatcttccaagctgtttcaatacttggcatcattrctaaaaatgtcaatgatgatgacagccggtgtttgttgtagttagagccataacaaacacatttcaattggctattaaaaatatacatatatcattgatttttctaaagccctggatgatgtccagctgagattttctgcatgtggatattcattttgttactttttgaagtccatatttctttctcaccatgccattttaaatggtaatgtcagccatagcagcagaaacaagaacaacagcaataatacctaccatttactgtatatctactatgtaccagacactagatacttttgcttacttcaattgcccattacaacaatatcataatcaatattagtattattttaataacctctgtcacttataaggtggaattttgtatatttattgtgacccttcatatgaattaattaataacttattattttgtgttaaaattattttcctggcatccttcttcctcctttcacccttctttttttcggaatgagaa

SEQ ID NO: 540061 - DNA, 392 bp, Homo sapiens
ttgttgcttcattttatttaattttttataggttatagcaaataagttttgtagagccctaactcactgttcaatgctgatcccaaattgggtattactgttaatataaaaagataaaactaaggttgaaaaatatctgtacaatttgctactcgcaccaagttattaagtgcctgagaagtgatacaaactacttagcttttgcttttccaacttgctacaatagttacaaagataatcaaatcctctgtctacttctttattccttagcaattcattcacttttcattggcaagctcattccaaaraaatacttagccaatttacatagggatgcaacatacttctttattacagaataactaaaggatatttaccctgggattctttct

SEQ ID NO: 540062 - DNA, 502 bp, Homo sapiens
ctgttacatattttgagtaaacctgagttaataagaggatataacgcaatgagtaatcttgagtgtatttagccatttaattattttgagcaaggtaggggattggaggttataaatgaagtgtatttaggcaaagaagggataaatgtatctttatctgatcttttgcctagactctatcatcacaaaatgtagcaccattagaatggataaattttatttagcctgtatattttttaaaaagactattttatagggagaattactcttccaaacctcagaatcttgactttaattygggtcaggctgaaccatttgtctattttgaacaattcctcaagggtcatttaaattaattaacattttatgtgaaaaaaatcaggaataactgagaatgactaatccttcactataaaatgacctatgtggtttattaaaccgtgaactgaaacataaatgtgtaccaaaaacataactaaagtgtggttccagttttcattgc

SEQ ID NO: 540063 - DNA, 502 bp, Homo sapiens
ctgttacatattttgagtaaacctgagttaataagaggatataacgcaatgagtaatcttgagtgtatttagccatttaattattttgagcaaggtaggggattggaggttataaatgaagtgtatttaggcaaagaagggataaatgtatctttatctgatcttttgcctagactctatcatcacaaaatgtagcaccattagaatggataaattttatttagcctgtatattttttaaaaagactattttatagggagaattactcttccaaacctcagaatcttgactttaattcgggtcaggctgaaccatttgtctattttgaacaattcctcaagggtcatttaaattaattaacattttatrtgaaaaaaatcaggaataactgagaatgactaatccttcactataaaatgacctatgtggtttattaaaccgtgaactgaaacataaatgtgtaccaaaaacataactaaagtgtggttccagttttcattgc

SEQ ID NO: 540064 - DNA, 234 bp, Homo sapiens
gacctttggattgttttcctcttttcagttacwatgagcaatgctgctatgaacatttgtatacgagtttattccatcctttttgaggcctagctctgtagctgctgggatggtaggtccatgtgtctgtacttcctactgcatttttactgtaaattctcatcgtatgaagtaatttacgggtatcctttatcttttgaactttaaagagtcacactggtgaaagcatacctt

SEQ ID NO: 540065 - DNA, 496 bp, Homo sapiens
aaaaaagagaaggagaatatatattagaataatatttcaatattttaccacaattaaggtattattctgcagcagattataacaaagttgcaaattttaattcctagaaccacaaagaaataataataatgaatgaacagagaaatataaattgtaaactaaaaaatatttatttaacagaaaggcaataaagtagaaaccaagaaataaagatataagattgagaataaacagcaaaaaaggcagttatmaattcaaccatgacaataatcatattacatgcaaatatactaaacacccaacttataaagcacctgcaataagtgacaaaattgacaaattgaacttaattaaaatgaaaaactttttcatttcaaaaaaacaatattaagctaatgaaaggacatgccaaaaagagggagaaattacttgaatatcatatatctgaaggacttgtactcagaatataaaaagaacacataaagctcaataagaa

SEQ ID NO: 540066 - DNA, 498 bp, Homo sapiens
tgaaaggcagtcaactccaaactcttttaatggcataaactgtaaggggaaaataaatactttttgagaaagtatatgtaatgtgtgtacatatgtgtgtgtgtatttcttttcaagttatacaaattaatataataacaaaacagcataaaataaacacaaaagagaaatatcaaaggaggtaagaaataaaacaaacgatactttttttttttttttttgagacagagtctcactctgtcacccaggctggagtgcagtggcgcgaccttcgctcactgcaacctccgcctsccggcttcaagcaactgtcctgcctcagcctcctgagtagctgggattacaggcgcccgccaccatgcccagctagtttttgtatttttagtagagacagggtttcaccatgttggccaggctggtctcgaactcctgacctcgtgatctgcccacctcagcctcccaaagtgctatgattataggcttgatccactgccccca

SEQ ID NO: 540067 - DNA, 583 bp, Homo sapiens
gtggggttgtctaatctactgtcatagacatataatcataaatgctgaggtttcacaatgttttgttatgcagcattattgtggcaataaataacaaatcccactcctagatgcttccatagcactcttcacaacctcctcatagtatagttacatagttgtatagttatgtagttacatagtcatacttttacatgaactaatttgtctctattctcccctatgcatttagaggaaaataatcacctrttatttaaatttgtattctgagcacctaagaagatgccagttgtatgtgggcactcaatgtatgtctagggaagagaaggtatgaggacggattcacctcccaactgattccactattatctcagaccacaaggagccttccctatgttgtgaaagttcagtgggcacacaaactagatactgttagagcagattaaaaccttaagcatataggctttaatatatgcttattatatgtatatagctgcctgttggatgagcacagatggccacaaattcatgtgatttgtgggcataatgttaacaggaaagagtcaataattgcagcactttg

SEQ ID NO: 540068 - DNA, 643 bp, Homo sapiens
acccataaaacattactgaggtggcataagtgacagcctcacagaactggtgatgaggacagaacagagctttgcatgaactgcttctaccagggaaattaaaaagcattacaggagggaggggtgaattcagtgcattttaatccagatcggagattaagccataactcttcacacttataaatttgttctttattacttttcataattaaggagaattagctaaacatgataaattggttctgatgtgaaaactagtgtaaccaactayacagcttactactgactggtagattcatacagtgaaaatctaatatgatttttaaatggaatggtaattacattctatgcataaaatgtagtgaatcttttgatatttaactttgaatgaacagagaaatgaaagcagctatatagccatctgaaatcattactttttgaacttgaaagagatattgacaacatcataacaacaactcaaacataatttgcagttggcacaaatctctacttacttcaaatgtgatttaactcaacctggaaagtgaggagtaaggaagcttaggatatgaaaaagtttgcatctctctggtaaatgtgaaattcttggaaattttctaatccatttctcatctcaatcatg

SEQ ID NO: 540069 - DNA, 706 bp, Homo sapiens
agctgtggtgaacattgcccagccaccagcccctagtcttccacacccccaaccccaggatttaggccacacatattcacctcaatgggaccaccctttcctttcatgacaactccaggattaatccactatctttctcatgaccctcagaggatgggagctcatgccagaaaacataggaaaccctagcacactatcaacactctggggctctatggaagaaagaacacttaaaaatccgaatcaatgaatcttggaataaatgtgttttycttaaaaaaaaaaaaatcatactgtaaatggaataaaacacgtttctgtgtcacattttgggccaagtttataacctctattccaatgcttactttcctcaattcaactcaataaatacatgttgaatcctatgaaagatttatcatttattagagacatgaatatagaaatacatgaagaattccagcccagaataattatctcttcttaaaaccctcatctcactctggatatcagtattatcacttaccataatgttttaaaattagcttctatgtgttaatgtacctgacaaaactgtaaactcttattcatctttgtatcgctataaccagagctataccagtgtcaataaataagtgtactaaataaatgaataaaacatgaaaaagtaaaaaatacctaataatttattaaagcagaaaaccattca

SEQ ID NO: 540070 - DNA, 594 bp, Homo sapiens
gattttggtagacaggtagagtgaaaggcgaaaaccaaacaaagaaaaccagaaacataggtgagatgggaagaactgaatgtggaagtaaagggacttttctttacctgatcacacattgtctttaagtgcttttgtcagttttgctttacgtattttcttctgctggagttttatttttatcctacttattctctactttcttctggttatttttmattctctagagaatgatgattaaaactgattttacagagcaagtatttgtcgtattagtccattttcttactgctatgaagaaatacctgagactgcataatttataaagaaaaagaggttcaatggactcacagttccacatggctggagaggcctcccaatcacggtaagaggtgaaggaggagcaaaaccacatcttacatggcagcaggcaagagagcctgtgcaggggaactgccttttataaaaccttctgatctcatgagacttattcacgtcacgagaacagcattggaaagacccgcccccatgattcaattacctcctaccaggtccctcccatgacatgtggggactatgggagctacaatttaa

SEQ ID NO: 540071 - DNA, 594 bp, Homo sapiens
gattttggtagacaggtagagtgaaaggcgaaaaccaaacaaagaaaaccagaaacataggtgagatgggaagaactgaatgtggaagtaaagggacttttctttacctgatcacacattgtctttaagtgcttttgtcagttttgctttacgtattttcttctgctggagttttatttttatcctacttattctctactttcttctggttatttttaattctctagagaatgatgattaaaactgattttayagagcaagtatttgtcgtattagtccattttcttactgctatgaagaaatacctgagactgcataatttataaagaaaaagaggttcaatggactcacagttccacatggctggagaggcctcccaatcacggtaagaggtgaaggaggagcaaaaccacatcttacatggcagcaggcaagagagcctgtgcaggggaactgccttttataaaaccttctgatctcatgagacttattcacgtcacgagaacagcattggaaagacccgcccccatgattcaattacctcctaccaggtccctcccatgacatgtggggactatgggagctacaatttaa

SEQ ID NO: 540072 - DNA, 555 bp, Homo sapiens
tttaccagctgcacctaaaaaatatgaggctttaggatcttgttaagtttgttaatatttttaaaatgtgcatcaaaatgggatatactttagacattttgatcatgggttaattttttattaatgtaataagtcatacttgctttcattcaacattgaacaatttaactttcatttaatggtaacttactagaaatagacaraatatatatggcagttatacaaacaatattttgtatgataatacaattagagaacatataaatacagcactcattatgtttacattttaggattttattaaacatttgtagaattgaataagaaatgttaacaaatatttacactgagtattgttactaattaattttcaaaattataaatgtttttctttcatcattttgcttttcatttttctctattgcacagaagatttttatctgtcgcacagaataatgattcttacagtctctgatttggttgatggggtgtataacatttgactgagtgagtctttgcagatgtttatatggacggaagctagattatagtatt

SEQ ID NO: 540073 - DNA, 463 bp, Homo sapiens
gcccccttcccatcttgtctttgcgtgcaaaacaaaatcctgaatatgtgggtataaaaagtactcttataagagaaaaattggaaacttttgcaaaaagagattggaaaggtgtcacatcttgtggcatgaggatttgtgggcatacacttgaactttgtgctgtgagatatccacagaacttcagtagcttaagagaacagtttagatgtcatcttattcatctaccatagaacttcttcttcttttctgagatttctagacagtaacttttacagctctaataatgcagttatctcccaattgtttggayttttctaatagatacaaagcagtatttcaccagcagatgctactgcagttcatacggtgatttcaaactaagaatccctttaaagttatgcaatactttttttttttggaaatagggtgaaagtactttaagattaaaatcctatgaaat

SEQ ID NO: 540074 - DNA, 463 bp, Homo sapiens
gcccccttcccatcttgtctttgcgtgcaaaacaaaatcctgaatatgtgggtataaaaagtactcttataagagaaaaattggaaacttttgcaaaaagagattggaaaggtgtcacatcttgtggcatgaggatttgtgggcatacacttgaactttgtgctgtgagatatccacagaacttcagtagcttaagagaacagtttagatgtcatcttattcatctaccatagaacttcttcttcttttctgagatttctagacagtaacttttacagctctaataatgcagttatctcccaattgtttggatttttctaatagatacaaagcagtatttcaccagcagatgctactgcagttcatayggtgatttcaaactaagaatccctttaaagttatgcaatactttttttttttggaaatagggtgaaagtactttaagattaaaatcctatgaaat

SEQ ID NO: 540075 - DNA, 509 bp, Homo sapiens
gagcaagatgtccacctgcagcctaaaacttcacctaaggcctgatgttccccagggcctacagagcctatgtatctacctagggacttgtgtccaggtggggcctgaattccacctggggcctggaattaacctgggacctgatgtccacctgagacgtgggtgttcctctggagtctgatatctatctggggcccgggtgtcctcctgtggtctgatgtccacttgtaggctggtgtccacctggggcctgggtgtccacctaggaacctgatgtatacctgaagtccagtgtctacgtgggtactgatgtctaccaggaaagtgatataaacctggggcctgatagccacctgggccctgagtgtccacatatgttctgatttctcttttggccttagtgtagggcctgagtgccacctgcttcctgatgttcaccaggaacctaggtattcacttggggcttgctgttcacctgggrcctaatgtccatgtgaggcctggtattc

SEQ ID NO: 540076 - DNA, 559 bp, Homo sapiens
gccctgaagcctaggtgtcaacccagggcataatgtccccttggggcctgctgtccacctgcagactggtgtctacatagggcctggtatccacctggggtctggtgtctgcctggggcctagtgtccacctgaagactgagtatagacctcagatctgatgtatgcctggggcctatttatccacctggggactagcattcatctggggcctcatgtccacttaagccctgggtgtcaacctggtgcctaatggccaccagggatctatgtactcacttggggcctggtgctcccacagggcctaggtataaacctggagaatgatgtgcaggtggaggtggatgtcttcctgggtgctggtgttcacctggggacaagggtctycctggggaccagtgtttatcgggagcctcatatgcaccttgaacctgctgtctacctagggcccgatgtccatgttaaggctgggtgtccacctgggacctggttgtccacttggggcctaatgtccacctaagacctagtgttcacctagggcctgggtgtccacctggagc

SEQ ID NO: 540077 - DNA, 635 bp, Homo sapiens
attcaaaagcaacatagagagactaaaacctgtactgaagaaggaaaatcaggtcattacccatgagattgcttcagttcaaaaagagaaagcaggagtaggtgtgaaaatgcacagattactgaaaagtggaatgtggcgttaaatcaaatcttacaacatggaatcacgttttactttgcattaggttcctatgctcctagtatcaaaactaggaggtcctttgagctactaacttagtaaaaactaaaagtcaaacatttcactaatagacctgcctctaagtataaggttgaggcagaagatatacaatcatagaagaaaagacaggagttaataccgctttccccaytgtaactggaaagtgtcataaatcctacattagtttctcacctaacctccctatatttagtcattccagtgccccaaaattgaagaattagtctcaatttctactggaatataaataacacatcagcttctagccagataattacgtccttcctgaatatgttgcaaaagtgttattcattgtggagaatgcagaattataaaatacaacccgactctcaaattacttataatctggttaggaatacctaactataaaaataaacacagttgtgggtctcagc

SEQ ID NO: 540078 - DNA, 469 bp, Homo sapiens
gcagcatgccacagaaaggggccagcggaactcaacygtccaaagaaatgtccaaactgcttctgttacgtaaagccaatgtcactttccttttttaaaggaagccctggggtgtaatcctgcctgagatgagtccactgacacgacaaaaatctaaaatgtgtaactatttggaggaaagtcagtgtgtatcttccacttgaaaggtataattccttaaaagggacataaaaatattttttctattgtatactctaacagtcaataactcacaaggaaaccgaatagagagcgaaagatggagcactctggactaatgtgaaaaacaaactcaaggccgggcacggtggctcacacttgtaatcccagcactttgggaggccaacaggggcaggtcatgaggtcagcagttcaagaccagcctggccaacatggtgaaaccccgtctctactaaaaatacaaaattag

SEQ ID NO: 540079 - DNA, 469 bp, Homo sapiens
gcagcatgccacagaaaggggccagcggaactcaactgtccaaagaaatgtccaaactgcttctgttaygtaaagccaatgtcactttccttttttaaaggaagccctggggtgtaatcctgcctgagatgagtccactgacacgacaaaaatctaaaatgtgtaactatttggaggaaagtcagtgtgtatcttccacttgaaaggtataattccttaaaagggacataaaaatattttttctattgtatactctaacagtcaataactcacaaggaaaccgaatagagagcgaaagatggagcactctggactaatgtgaaaaacaaactcaaggccgggcacggtggctcacacttgtaatcccagcactttgggaggccaacaggggcaggtcatgaggtcagcagttcaagaccagcctggccaacatggtgaaaccccgtctctactaaaaatacaaaattag

SEQ ID NO: 540080 - DNA, 469 bp, Homo sapiens
gcagcatgccacagaaaggggccagcggaactcaactgtccaaagaaatgtccaaactgcttctgttacgtaaagccaatgtcactttccttttttaaaggaagccctggggtgtaatcctgcctgagatgagtccactgacacgacaaaaatctaaaatgtgtaactatttggaggaaagtcagtgtgtatcttccacttgaaaggtataattccttaaaagggacataaaaatattttttctattgtatactctaacagtcaataactcacaaggaaaccgaatagagagcgaaagatggagcactctggactaatgtgaaaaacaaactcaaggccgggcacggtggctcacacttrtaatcccagcactttgggaggccaacaggggcaggtcatgaggtcagcagttcaagaccagcctggccaacatggtgaaaccccgtctctactaaaaatacaaaattag

SEQ ID NO: 540081 - DNA, 700 bp, Homo sapiens
ctgcatgatggtaacattttataactttagtatctgagactagtgatacgtaggtactgggcacttgaaatgaggttggtgcatgaggaaccgatacttaacttttttttttttttttgagacagactttcgctcttgttgcccaggctggagtgcaatggcgcgatcttggctcgctacagccttcgtctcccgggttcaagtgattctcctgcctcagcctcctgagtagttgcgattacaggcatgcaccaccttgcccagctaattttgtatttttagkagagatggggtttctccatgttaggctggtctcgaactcccgacctcaggtgatccgcctgcctcggcctcccaaagtgctgggattacaggcatgagccacagcacctgaccttattttttattttttgttaacttggatttaaatagccacatatgactagtggctaccatattggacagcacaacctgagagggagggcagaatgggacagccccaccccgtagccaggacagggagggacctgcacaggctcagagcaggggtcatggaaagtttcctagaggagtggggacttcagttgggccttgaagaatagacaggggagggaggaggcactgtgggctgcagaagaatgtacctagagctacagggagtttccatgtgtggagggctggggacaggataccagcccag

SEQ ID NO: 540082 - DNA, 624 bp, Homo sapiens
ctctgggaccccagggcagggtcttctggatcctgaaaacagggtgagtggcaaaaagcgagggccgcctctcacctacctccctggggtggcatcatggaataaaatgggctttcagcaagtgggctggcgggaatcacagtcaagccatttcctagctgtgtgactctgggcaagtgacttaacctttgtgagccttggtttcatcatctgggaactagggacagtaaacggstatcttgtagggctaatcaaaggatgagacccactaatgactcaaaggagaagcagttggcttagctaaatgggattctgaccccaaccctgtacctctcagcttcaggtatccaagcaaattctccctgccccctcctggacacagcttgctttctgcagttctgtcattaatatttcatttctttagcaaaggctttttgtccctgggacactgctattcgctctggagaagaaactgttccgtgttccttcgtgcagaaggattccttagctccttttctgagagcagagcattaggagccaaaagcaaacaggtattgtggtataaatttgggacccagcagtgaaataggcctgagttcaaatcctgactgtgcccagttcttc

SEQ ID NO: 540083 - DNA, 626 bp, Homo sapiens
agctttcaaagtattgtcaccatgaatcataytgagaaactcattgtaagtcatgatacggtaaatgtgtgtaaaaatatttccaaaaatacaattgcaattacaacctgtgtcacacaatattaattgctattccagcgtctctggtctattagagttcactggaaggaagagagggagggaggaaagtggtatagctcacggagctgttttcaggaccactcgtggctcatggcctacaatttgaaaaaccactgaatgtgccagttctgagccatctctcagcacttggaattcaccagtctcactacatatcccatcatctataagcaggtgacccagcggaagaatggcacagcctactgaagacaacagttgtaaggcaacattctgaaagatggagttctgtctcacacaacacagcacatgctttgactcacctgtctccccaaagtaagaagacattggtccagaaatcaatagaagaagtaggagtggcccctctcactattaccctaataacccactctaaaaatttttggttttcatccctgctagtacagaggtcctgattttaagggagctattaaagggaggcagcaatgtttccagtgaactggaaggtg

SEQ ID NO: 540084 - DNA, 626 bp, Homo sapiens
agctttcaaagtattgtcaccatgaatcatattgagaaactcattgtaagtcatgatacggtaaatgtgtgtaaaaatatttccaaaaatacaattgcaattacaacctgtgtcacacaatattaattgctattccagcgtctctggtctattagagttcactggaaggaagagagggagggaggaaagtggtatagctcayggagctgttttcaggaccactcgtggctcatggcctacaatttgaaaaaccactgaatgtgccagttctgagccatctctcagcacttggaattcaccagtctcactacatatcccatcatctataagcaggtgacccagcggaagaatggcacagcctactgaagacaacagttgtaaggcaacattctgaaagatggagttctgtctcacacaacacagcacatgctttgactcacctgtctccccaaagtaagaagacattggtccagaaatcaatagaagaagtaggagtggcccctctcactattaccctaataacccactctaaaaatttttggttttcatccctgctagtacagaggtcctgattttaagggagctattaaagggaggcagcaatgtttccagtgaactggaaggtg

SEQ ID NO: 540085 - DNA, 626 bp, Homo sapiens
agctttcaaagtattgtcaccatgaatcatattgagaaactcattgtaagtcatgatacggtaaatgtgtgtaaaaatatttccaaaaatacaattgcaattacaacctgtgtcacacaatattaattgctattccagcgtctctggtctattagagttcactggaaggaagagagggagggaggaaagtggtatagctcacggarctgttttcaggaccactcgtggctcatggcctacaatttgaaaaaccactgaatgtgccagttctgagccatctctcagcacttggaattcaccagtctcactacatatcccatcatctataagcaggtgacccagcggaagaatggcacagcctactgaagacaacagttgtaaggcaacattctgaaagatggagttctgtctcacacaacacagcacatgctttgactcacctgtctccccaaagtaagaagacattggtccagaaatcaatagaagaagtaggagtggcccctctcactattaccctaataacccactctaaaaatttttggttttcatccctgctagtacagaggtcctgattttaagggagctattaaagggaggcagcaatgtttccagtgaactggaaggtg

SEQ ID NO: 540086 - DNA, 644 bp, Homo sapiens
caaaccaaatgtgaaagaatggacaatgagtgaggttagattagttggatatttatttaacaaaataaatactaatcacaaaacctrcttcatatctcactcagtaatgaactctaaatgttttaaaaattaaatatataaaactataattttttttaaaatatagtagaatatatgtataaccacaggttgagggatgcctttttaagtcttctcaaccccttaaaaaaacaaacaaaaaaattatgaatatgaggacatcaacacagaaacagataaatgggcaaataagtaggaaagaacaaatgaaccaatagaaggaaagaaaaaaagaacagtaggggcaacaccctgctcttgttcttactgatgtttcttccattaaccatgctctagccaggacatctgtgctactggaccccaattctagaattctgttcactcagatattctcgtgaatatgttttatatttcaatcttttttctgctctaagctaatattcaaagagagatcttccctgattaccccatctaaaatatcattcttgtttttttctttttaatcccctatccaattttcttttattgtctggaactttacttgtgttgttatataattatttatttataattgtcttccatat

SEQ ID NO: 540087 - DNA, 644 bp, Homo sapiens
caaaccaaatgtgaaagaatggacaatgagtgaggttagattagttggatatttatttaacaaaataaatactaatcacaaaacctgcttcatatctcactcagtaatgaactctaaatgttttaaaaattaaatatataaaactataattttttttaaaatatagtagaatatatgtataaccacaggttgagggatgcctttttaagtcttctcaaccccttaaaaaaacaaacaaaaaaattatgaatatgaggacatcaacacagaaacagataaatgggcaaataagtaggaaagaacaaatgaaccaatagaaggaaagaaaaaaagaacagtaggggcaacaccctgctcttgttcttactgatgtttcttccattaaccatgctctagccaggacatctgtgctactggaccccaattctagaattctgttcactcagatattctcgtgaatakgttttatatttcaatcttttttctgctctaagctaatattcaaagagagatcttccctgattaccccatctaaaatatcattcttgtttttttctttttaatcccctatccaattttcttttattgtctggaactttacttgtgttgttatataattatttatttataattgtcttccatat

SEQ ID NO: 540088 - DNA, 644 bp, Homo sapiens
caaaccaaatgtgaaagaatggacaatgagtgaggttagattagttggatatttatttaacaaaataaatactaatcacaaaacctgcttcatatctcactcagtaatgaactctaaatgttttaaaaattaaatatataaaactataattttttttaaaatatagtagaatatatgtataaccacaggttgagggatgcctttttaagtcttctcaaccccttaaaaaaacaaacaaaaaaattatgaatatgaggacatcaacacagaaacagataaatgggcaaataagtaggaaagaacaaatgaaccaatagaaggaaagaaaaaaagaacagtaggggcaacaccctgctcttgttcttactgatgtttcttccattaaccatgctctagccaggacatctgtgctactggaccccaattctagaattctgttcactcagatattctcgtgaatatgttttatatttcaatcttttttctgctctaagctaatattcaaagagagatcttccctgattaccccatctaaaatatcattcttgtttttttctttttaatcccctatccaattttcttttattgtctsgaactttacttgtgttgttatataattatttatttataattgtcttccatat

SEQ ID NO: 540089 - DNA, 593 bp, Homo sapiens
gaaggggaaaagtcttactctctcactctaaagaagccagcatcttactctatcaaattcctaacctcattcaccttctgtctctgccttcctagaatcaattgaatttattctaagaacatggtacacttcargatatttactcttaaatcattgagataataaaaaaactttttaaaaaaattttacttaaatttctgggatacatgtgcagaacgtgcagatttgttacagaattatacatgtgcaatcttacttaaaaaaaaaaaagctagatgtgattctccaagggagaaacaaaaccctttaaggtttcaagcaagtaaccagttctgagtcaggactcttctggttggcagcttccctggaatatgattgcagtgggaactgaaataactggatacacagaactgcaatgccaaggcgtttgaacatgttaacaatgaatgaggaagatcattctcccaggggtaagaattcttgtattgtgttctggtatctggacaaagaaaattgaacctcagcattcaaatagaagcatccgatgatttcatttcaaagcagaattaaaacattccaggggttgtgcaaag

SEQ ID NO: 540090 - DNA, 431 bp, Homo sapiens
aggtgggggcagggtagctgcacagcacccgggggcctgtagctgaagcagtcaaaccctgcctgagagagcacagcaaaagccttggcttcccactcctccacaccaggactgccgagtcagctttggsggggtccctggaagtgccccacctccctgttccttccctggcctgcagatggtgggggcaaaggcagcagtggtggaagcgacggagggcctatctgtggcctctggatgttgatctggagctgcggtgttcaggcagtgaagggctgctgcgctgggggacctggttgtgggggtgggtacccatttggctggacacagtggaggcaggggattccgccttgcattgtttgcctgctcctttatactatggccaggtggacgaagatgcccggctttcattccttttgatccccaagcaa

SEQ ID NO: 540091 - DNA, 613 bp, Homo sapiens
cttttctataaatgtttaaatatcctttctctaaaactctgggtacatgcttcacactcaaatatgtgccattattttaattttgtagatgataaaagaggtgcacaaaagattaggtaacttacccaagctcatccagttattaagtggcaatggaagtatcatcaggacactgtagaaaataagaaaattaaagcaatgtagaggtattatttagaggaaatgtgattttagaaaactgttaaatcaagtttagcttaaagctacctccatacataagttcagcctaaaggtttctctgtacgttgtgaactataacttaaatgacattgtaaacagcctaaagtcyactcttgtgccaatcactgagttttggccaatcaaatgtggccaactgttcaaaccatgttcaaataaaaaaatcaccaagctaaacttaatctggctgtttctgtacctcacctccattttctgtaagtcacttttttttttctgtccataaatcctcttccaccatgcagcttcactggagtctctgaacctactttggctcaggaggttgcccgattcatgaatcattcattgctcaattaaactctgctaaatttaattc

SEQ ID NO: 540092 - DNA, 613 bp, Homo sapiens
cttttctataaatgtttaaatatcctttctctaaaactctgggtacatgcttcacactcaaatatgtgccattattttaattttgtagatgataaaagaggtgcacaaaagattaggtaacttacccaagctcatccagttattaagtggcaatggaagtatcatcaggacactgtagaaaataagaaaattaaagcaatgtagaggtattatttagaggaaatgtgattttagaaaactgttaaatcaagtttagcttaaagctacctccatacataagttcagcctaaaggtttctctgtacgttgtgaactataacttaaatgacattgtaaacagcctaaagtccactcttgtgccaatcactgagttttggccaatcaaatgtggccaactgttcaaaccatgttcaaataaaaaaatcaccaagctaaamttaatctggctgtttctgtacctcacctccattttctgtaagtcacttttttttttctgtccataaatcctcttccaccatgcagcttcactggagtctctgaacctactttggctcaggaggttgcccgattcatgaatcattcattgctcaattaaactctgctaaatttaattc

SEQ ID NO: 540093 - DNA, 263 bp, Homo sapiens
aactgaggcacaaaatgtttaacccagggttgcccagcccatcagggaagctaagggctcgggacacagtctcctggtcagacacccggtggtcttccctggccccacagataaaggcttcccacrctgctcaaccaaggctcacatggcaccacgaacccaacccctaggcctgtatgaccctggagacagccacgtggtcccgctcccaactcctcacatgcaggccatcactttccctctctgtgaccatgacctgggca

SEQ ID NO: 540094 - DNA, 531 bp, Homo sapiens
gagtgaaggattcatgtttcaaaaatctaggaagggaaaagaaatgaggatctgattagaccgatcctaaaaagccattttactaccccctgagaaactagggccaccatggtagaataaaaatatttaaattattcttccaagcatttacctaaggactgtggaagaggccaaggatgtggctggagaaaaacagggcaagtggaggtattggagggacccaccaaaatgaaaagcagcctgtccagagctgtaggagttgaaacagttttctggratgatgatgacaggctatgaaaaggacaggaaggtacctgatgggcgagaagcttaaggcaacaaccgggaaactaggaaaccgttggcccaggttttgtaccaattgtgctgaggtcatccaggcaaaacctcaagaatgaagacatctaatttcaagaagggacaaagggatccccaataattgggaagtcacatcacaccttgttcttggctaatacacaacagaaggtgaagtatgttttccaaatgccc

SEQ ID NO: 540095 - DNA, 698 bp, Homo sapiens
aattcccaggaaaaaggcagccaggaggagtgaaggattcatgtttcaaaaatctaggaagggaaaagaaatgaggatctgattagaccgatcctaaaaagccattttactaccccctgagaaactagggccaccatggtagaataaaaatatttaaattattcttccaagcatttacctaaggactgtggaagaggccaaggatgtggctggagaaaaacagggcaagtggaggtattggagggacccaccaaaatgaaaagcagcctgtccagagctgtaggagttgaaacagttttctgggatgatgatgacaggctatgaaaaggacaggaaggtacctgatgggcgagaagcttaaggcaacaaccgggaaactaggaaaccrttggcccaggttttgtaccaattgtgctgaggtcatccaggcaaaacctcaagaatgaagacatctaatttcaagaagggacaaagggatccccaataattgggaagtcacatcacaccttgttcttggctaatacacaacagaaggtgaagtatgttttccaaatgccccttgtaatgaaacagttattgaatgtcttcccaggacaaactgggaaggagagcacccatctaccgccgttcccgcagtcctgcagtcctgcaggtgggccagtcctgccaacactccagctcccctcacagagcataaa

SEQ ID NO: 540096 - DNA, 605 bp, Homo sapiens
accttggcctgtgctcagcgagaatctcgttaggtcagtttagccagaatcctcccttacccttcatgttccctcatagtcatttcctatctgctaacccccatcctcctccttgagtrtaattaccacttccttgtgctggattcagagttgagcacaattgctctctctcactgtaagaactacttgcagtgctcctagacctacatatgtgaacctgtttctttaacagtgactcacctgtctttttctcctttcaacttgacactagctgaggcttatccgcatcaaagtggagggactggccccgggggatcctcagggcttcaccttgatggcctgcaggctcacattccactttttctggtgccttctggctccgagtccagtttgccacacaagtgatggaggttggaaggagggatgaggtgacagaggtgaaggagggtaaattcttttctaagccctacttgcctgacatgcatttaggtttttagaaaggaacctgaccccaccctttattttctatctcccacttccatgactagccttacctgtaaaaatggggcatagaagagcccccatctcctagggcagtgtttttg

SEQ ID NO: 540097 - DNA, 605 bp, Homo sapiens
accttggcctgtgctcagcgagaatctcgttaggtcagtttagccagaatcctcccttacccttcatgttccctcatagtcatttcctatctgctaacccccatcctcctccttgagtataattaccacttccttgtgctggattcagagttgagcacaattgctctctctcactgtaagaactacttgcagtgctcctagacctacatatgtgaacctgtttctttaacagtgactcacctgtctttttctcctttcaacttgacactagctgaggcttatccgcatcaaagtggagggactggccccgggggatcctcagggcttcaccttgatggcctrcaggctcacattccactttttctggtgccttctggctccgagtccagtttgccacacaagtgatggaggttggaaggagggatgaggtgacagaggtgaaggagggtaaattcttttctaagccctacttgcctgacatgcatttaggtttttagaaaggaacctgaccccaccctttattttctatctcccacttccatgactagccttacctgtaaaaatggggcatagaagagcccccatctcctagggcagtgtttttg

SEQ ID NO: 540098 - DNA, 605 bp, Homo sapiens
accttggcctgtgctcagcgagaatctcgttaggtcagtttagccagaatcctcccttacccttcatgttccctcatagtcatttcctatctgctaacccccatcctcctccttgagtataattaccacttccttgtgctggattcagagttgagcacaattgctctctctcactgtaagaactacttgcagtgctcctagacctacatatgtgaacctgtttctttaacagtgactcacctgtctttttctcctttcaacttgacactagctgaggcttatccgcatcaaagtggagggactggccccgggggatcctcagggcttcaccttgatggcctgcaggctcacattccactttttctggtgccttctggctccgagtccagtttgccacacaagtgatggaggttggaaggagggatgaggtgacagaggtgaaggagggtaaattcttttctaagccctacttgcctgacatgcatttaggtttttagaaaggaamctgaccccaccctttattttctatctcccacttccatgactagccttacctgtaaaaatggggcatagaagagcccccatctcctagggcagtgtttttg

SEQ ID NO: 540099 - DNA, 653 bp, Homo sapiens
gctctaatatatatttaatcagtgctcttcaccactttaaaaagataatagcttatttactctccttctactataatttggtcttatttatagaatatgttgaggaattgaaaacaaagatctagacttaaaatccaattagctccctcccgtaaaaaaatccctcccgtaaaaaaaggctatatcttaatttagagtaattgaraaatgatgcaggtcttaaagagtacaacttaaaaaaaaatcagttccgataaggtatatttctatagcatcttaacagtaacatgtttgtaaacatatttccccagagttctcattaggtagcaagaaaagcgatcacctaccaaccactgcacacttgtatgtcatcagagaagccaaagcttttacttcatctacactcacatcagtgctataacggatacctggtggtgttttttaaaaaatgtgttggggtgggtgagaaagaaggggttatatttagaacaaatttcaataagtttcaaaaaagaaagctacaaattgaaaatatccactttttacattttatacccaagctatgtccaaaagcacttgaagcagctcatacatcagaacaccataaaaaatgaatataaaacattttaaaaagctgctaataacagtaacta

SEQ ID NO: 540100 - DNA, 653 bp, Homo sapiens
gctctaatatatatttaatcagtgctcttcaccactttaaaaagataatagcttatttactctccttctactataatttggtcttatttatagaatatgttgaggaattgaaaacaaagatctagacttaaaatccaattagctccctcccgtaaaaaaatccctcccgtaaaaaaaggctatatcttaatttagagtaattgagaaatgatgcaggtcttaaagagtacaacttaaaaaaaaatcagttccgataaggtatatttctatagcatcttaacagtaacatgtktgtaaacatatttccccagagttctcattaggtagcaagaaaagcgatcacctaccaaccactgcacacttgtatgtcatcagagaagccaaagcttttacttcatctacactcacatcagtgctataacggatacctggtggtgttttttaaaaaatgtgttggggtgggtgagaaagaaggggttatatttagaacaaatttcaataagtttcaaaaaagaaagctacaaattgaaaatatccactttttacattttatacccaagctatgtccaaaagcacttgaagcagctcatacatcagaacaccataaaaaatgaatataaaacattttaaaaagctgctaataacagtaacta

SEQ ID NO: 540101 - DNA, 577 bp, Homo sapiens
cctaaacacctagctagaaaaacctcagttccagtgctacaacagtgctagcttttctaacatttttaaataaccctgcttttaacccaataaaattcaactacagaactaagaaataaatattggaaatccactttaaaataatgaggagaccactgtgattgagaaaaagaaaaagacaaacgagagctggaaagcacactgattttgtagaaacagaaataagccgtgcaggtgccacactggcagcagtgcccgcgctggggccayggatcaaggaggcatggaggacaggactcttctgcttggtacaatgaaaaaatggtattctttttattctacatattgacaatatgcatttgggcctttattataagtacaagagaaaaatcttcaataaataaaagctgagtacattactttttttgattaaaaaatagattaggaaagaataatgagagttcagagcaaagactcctgcctcactgatgcctgaaaaccgtggctgccaccaaggtcaacacagacagcgtctttgtcatacagcacaccctcaactccagaaacaggcacataa

SEQ ID NO: 540102 - DNA, 362 bp, Homo sapiens
acaggcatgcaccagcacgcccggctacttttgtatttttagtagatacagaatttcaccatgttggtcagggtygtctcaaactcctgacctcagatgatcagcctgccttggcctcctaaagtgctgtgattacagacgttagccaccatgcccagccttaaggcagatcttttgaaccagactattgaaatttaacttaaatgtcagaaatctttaaaaggtggacacgctaagctaaacacttttctggataaatttaatactcaggaaaatagaagagatttagaaaatccacaaaaagaggtccatgctaccaccaccaggtccacattgtaatttaaagcaatcaagagagacat

SEQ ID NO: 540103 - DNA, 362 bp, Homo sapiens
acaggcatgcaccagcacgcccggctacttttgtatttttagtagatacagaatttcaccatgttggtcagggttgtctcaaactcctgacctcagatgatcagcctgcctyggcctcctaaagtgctgtgattacagacgttagccaccatgcccagccttaaggcagatcttttgaaccagactattgaaatttaacttaaatgtcagaaatctttaaaaggtggacacgctaagctaaacacttttctggataaatttaatactcaggaaaatagaagagatttagaaaatccacaaaaagaggtccatgctaccaccaccaggtccacattgtaatttaaagcaatcaagagagacat

SEQ ID NO: 540104 - DNA, 362 bp, Homo sapiens
acaggcatgcaccagcacgcccggctacttttgtatttttagtagatacagaatttcaccatgttggtcagggttgtctcaaactcctgacctcagatgatcagcctgccttggcctcctaaagtgctgtgattayagacgttagccaccatgcccagccttaaggcagatcttttgaaccagactattgaaatttaacttaaatgtcagaaatctttaaaaggtggacacgctaagctaaacacttttctggataaatttaatactcaggaaaatagaagagatttagaaaatccacaaaaagaggtccatgctaccaccaccaggtccacattgtaatttaaagcaatcaagagagacat

SEQ ID NO: 540105 - DNA, 564 bp, Homo sapiens
gtaatgttatatttatgtgtgtgtattcatattaaaatataaacttaatgagtacccagtacacattaggccctcaaaaaatatctggtgaatgatataagaaaaatgacaaactagaaatgaataagccattgatacatttattaagtaaygcaattttatgtaagtacataaaattttgagaaatcatggtgcttctagatatttctctacccattttctaaatctgtgtcttcctactactttttatacagttctgacgttaagaattgagggacatagatggtgggtaggcaaaaaggaaacaaagctaaaataaaataactataaatgacaacattagcagtaagaataaaatcttgaaaattatagacatatattaatttatataaaaactctaccgattaaagataacgatggtctgttccctatttcaacactatttagtgtagtcattgccactaaagaagagcttatgcatataatttcatcaataaatcctttccttgtcttcctgtgctttgtgatagctttgtgaaagcttttcaacctaaaggtttacaa

SEQ ID NO: 540106 - DNA, 564 bp, Homo sapiens
gtaatgttatatttatgtgtgtgtattcatattaaaatataaacttaatgagtacccagtacacattaggccctcaaaaaatatctggtgaatgatataagaaaaatgacaaactagaaatgaataagccattgatacatttattaagtaatgcaattttatgtaagtacataaaattttgagaaatcatggtgcttctagatatttctctacccattttctaaatctgtgtcttcctactactttttatacagttctgacgttaagaattgagggacatagatggtgggtaggcaaaaaggaaacaaagctaaaataaaataactataaatgacaacattagcagtaagaataaaatcttgaaaattatagacatatatwaatttatataaaaactctaccgattaaagataacgatggtctgttccctatttcaacactatttagtgtagtcattgccactaaagaagagcttatgcatataatttcatcaataaatcctttccttgtcttcctgtgctttgtgatagctttgtgaaagcttttcaacctaaaggtttacaa

SEQ ID NO: 540107 - DNA, 642 bp, Homo sapiens
ctgggcatgcagggcaggcctaaagcctgtattcacaggggccagtgtgaatcctgggtccataaagctcaatctggtgctgcactgggccttgagcctgagtcttaagggactagcctggtgctagaatgagcctggcacctggattcaaggacgcaggcttggtgcctgggatcacgaaggtaggcctgaagactgggtctgcaggggcaggcctggagtctgagacaaccagggatgatcctggagcccggatccgccagggtgagtctggaggccaagtctgctggggtgggtttggaacctgagtccatggatggtgggcctgggtcctgggtccactgcagcatggagccatggagactagtatgtgtacatatatattaggtctacataaactatcaatcaagttaaagggcataatgacatttttatacrtggtgtattcataatttcctactactgttgtaataaactaccacaaacttagtggctttaaacaacacaaatttattctcttacagttctgatcagaggtcagaaatctcaaatcaagatgttggcttcaggggagaagcttttccatgttcttgaagctgcctgcattccccggtttgtggccctcttcctccatcttcaaag

SEQ ID NO: 540108 - DNA, 571 bp, Homo sapiens
ggacttactattctcctcttcaactatatcctacaaggctcatggttttatttaccatcttgtattcaccatctctgcttccagaataattaattggcttattcctatgcatatataattataaatataattttttctctatctctgaaggctaggagagaactgaagaaatatgattagcactgttggcaggatgcaaaatgaaaaattcctaagcatcatccacatcattttaactaccctttgcaaaccttcagaggtgcagacccctgtgggtctcacccctttagtgaaggtgtccagtagcagtataagaaagcagttctcccacccccttccrtacagagtcttagcaatctcttaaaaggttggaaacttatgagtaaacaaggcataactccagtactggtgtcccatttggagtctcattgaagtggcagtaaattgaaactcatataaatgctccagtcctgttgggcacccctggaacaagtgagtcatgggcctgtttgaataaccaatcttgctgccactatctcaacactgaaaatcattcttataacttgctcta

SEQ ID NO: 540109 - DNA, 467 bp, Homo sapiens
gctgagtttgtacataaggctgaatacctggcccagtgccagggctacctcttggactaggtaaaaccctgggtctgagtttggaggccaagtggtgagtccctcttgtcctctcagcctttcataataacagtttcaggaggaacaaaaccktcctcccttaataaacctacctagtttccagaaatcagcttatcaaacttgaagcacactaaacttgcttttttgggcagatagctcattcatagaatgttccttttccttatccatatcttaaagacagtttctttctcttttttcttttttttgggacagattctcactctgttgcccaggctggagtgcagtggcacgatcttggctcactgcaacctccgtctcccaggttcaagctattcttctgcctcagcctcctgagtagctgggacgaggggtgtgtgctaccatgcccggctaagttttacgtt

SEQ ID NO: 540110 - DNA, 593 bp, Homo sapiens
ttttttttttaaaatacagccatgagttttgaaaataatcacatattgaaagcctcaaatcatttgggcctttgaaatcaggtcaccattatcaaaatatacacaccacagcactcgacacatgaatcccactttgctctgtttttttgagtcgttggaagccaggatcggggaggggtagataacagggggagaagctgtcaaggtcaaatgatttaggctgtggattgaggaatggaagggagactggatgtcaggtggtttgggggagattaaacgactagcccccagaattaggctccctaactatgtaattgctgtggaaaatggtaaaatttggtaaaaatttcatcctcagagctgctgctggtggggctggcctcttggggtttttaatcctgagtcaacttgtgttccctctcattcatgatagtgcccttgagggtatcattttatttgggaaggtctgaggaccgcggaggcaagcagctctcctgtttgtcttaccctccatgcaggtgagacttacagggaaggcaggtttgcattcagtacraataagaacattttaacaattagtgaagatcagtcag

SEQ ID NO: 540111 - DNA, 593 bp, Homo sapiens
gattgcttgagcccaggaatttaaggccaacctgggcaacttggcaagaccccatgtctaaaaataaagattcatgtccttgtggagcatatgttcaaatggggaaagatatcctgtaaaaatgtatatacatatatatatagacacatacataaaatcatagtatgtgacatggtttggctgtgtccccacccaaatctctcccataattcccacatgttgtgagagagacctggtgggaggtaactgaatcatggggacaggtctttcccatgctgttctcatgatagcgaataagtctcacgagatctgatggttttataaagggagtacccctacacaggcactctcttgcctgccgccatgcaagatgtgactttgctcctcctttgccttctaccgtgatggtgaggcatccccagccatgtggaactgtaagtccattaaacctcttttctttataaattacccagtctcaggtatgtctttattagcagcatgagaacagactratacagtatgtttaatgatgataaagtcaatgaaaaaagaaaaacagttcagagtacagaagattgataacataagaaggg

SEQ ID NO: 540112 - DNA, 369 bp, Homo sapiens
ctgttgagtatctctcctttatccataccacactagatgctttgggcttgaggtatgcaagagccacagaatgcatgattcttcctctcggtggacttgcaatttggttgagggttaaaacatacaaatttaaaaataatatggtatagaattgagaagaaatagtagagtaaaactctctccataatgagaaaascataatccagaaaattcactggcttaaaatctgatgttaataaaataactagagtgaggttgcccaactagccaaccatctgggagatgcaacggtctgtgccgtctacatccatcctggtcctggccacagtttggtgtcacctggtggcacttgtccattccagcttaaag

SEQ ID NO: 540113 - DNA, 603 bp, Homo sapiens
ctgatgcctgaggtttatgactgattacaaccactcatactcaccaggctttacaaaaggacgggtggattcaarctgccctctccaacttccctcctcctgtcagtggggacaccagattactcatctttttatccttaatgcctccatttcctttgctcccacatcctttattagacatttctttttaatcctggactgcctgtgtcatcttagagacctagggcaagaatataatagtggcatgtatactccatatctaaatatttgaaagttataaaaaaatcaagcttacaaaccattgactaaattacattcctttttcccttgaaaaataccttcatgataacatggtttggataaagctataatttacatatgcctgaaagttggccaaatgtcaaaggcaatagaatttaattgtaattatacatgtctgggactgttgatgggctggcactgtttagatgagtgataaaataaagatatacatatttcataagtcgttatgtgtgaatttaatacaatttatttttcttggcttcttttcagtcaaatcatcaattatgttgttatgatcaagattttcatgccacttgtatt

SEQ ID NO: 540114 - DNA, 603 bp, Homo sapiens
ctgatgcctgaggtttatgactgattacaaccactcatactcaccaggctttacaaaaggacgggtggattcaagctgccctctccaacttccctcctcctgtcagtggggacaccagattactcatctttttatccttaatgcctccatttcctttgctcccacatcctttattagacatttctttttaatcctggactgcctgtgtcatcttagagacctagggcaagaatataatagtggcatgtatactccatatctaaatatttgaaagttataaaaaaatcaagcttacaaaccattgactaaattacattcctttttcccttgaaaaataccttcatgataacatggtttggataaagctataatttacatatgcctgaaagttggccaaatgtcaaaggcaatagaatttaattgtaattatacatgtctgggwctgttgatgggctggcactgtttagatgagtgataaaataaagatatacatatttcataagtcgttatgtgtgaatttaatacaatttatttttcttggcttcttttcagtcaaatcatcaattatgttgttatgatcaagattttcatgccacttgtatt

SEQ ID NO: 540115 - DNA, 535 bp, Homo sapiens
tagtacacaaatatccaatatgttaaaagggcaaaagtggagctggagtgagggagggatggcatgtgtatgtgtgtgtgtgtgtatgtgtgtgtgtgcatgtttttttaaagggtgtggaggtcagcttacacccttgggttgacccttctccactgctcacttgtgactgtttccattaacagccagtgaaatcagatgagtattctcatgatatgagatccttacgctgaggctgcactgtaataatgagttagatccacctctctatcttgcacagatattaaaaaaaagagctgwgtggaaattcaggagacagaaatgtatcctgtgggatttcttttacagctatctggtcattatgaatcatgccaggattacaaagtttgggatttgaagacatttataatagaaaatataacagaatttgcaatgactgggttgagagacaggctcacagcaaaaaaaaaaaaaaaagcagctggctgttacagtagttaatttctgaacttctatgtgcaaagatgaagtgaaa

SEQ ID NO: 540116 - DNA, 627 bp, Homo sapiens
gtaggcatcagccagtgagaacgggagggatcaactgcaccatgtttaatgcgtgaaattgagaaatggaaaactgcacataaaacactcaccatggtgctcaatgaatgcctgctgcaaatatcaacctaattatcaggccagaggggcccttggacatggtggccacttgatttaatttttcctgtgctttaaactttataaactgttacatattgggaatcgaccttatggaaaacacaacacctagagttaagggattgaaaagaccataagcaaagaccaactgtggcagtcactggtagtcatctaccctaactacactttgccacctctttgcagacagattcaaattttgtttgagactgcaatgcacccgtctgagggcatgaatcttgcttggtaagaggccagttgggtcatttaattttgccttgccagaggcacactttcccagcctcctttgcagcatgtggccatgtgacacagccyggccaatggggtttctaggaaaacatttacttcccggccaagtaatagtggcataaatagagctccccaagaaactcaacgttccttctggttcccaagtattaatcaaccactgtgcagtttaaaaacaaatat

SEQ ID NO: 540117 - DNA, 541 bp, Homo sapiens
catgtaactctgtgcaagtccagagttgaggtcccttcccaactcccctgccaaagtgaacctggggaatatcttcaaggagaagggcacattgttttgttggtggtttaccctcaatcgttgtcatattcagtctctaggagtgaattgctgaagaagagtgaccaaacttaaggcagaaggaagataagcctgtgaccgttggtgggatctctggctttatcagcgtggctgacattctcagactctaatgggattcccggatattgtatggaatgccttaccttggatcatggttccaattcaccatcattccttcatttattcaaatttgattgagcacctgctatgcctcaacctctttttaggtattcagagtacattaatgaacacaatagataaaggtctctgccctagtgaactgagacataaaaarcagtaacagaacaaactggtgcattatatagcagagttcagacatgctaaagacaaacaaaaataggaaaaatagtgctgaccaagggagtgtatcgtgtatatg

SEQ ID NO: 540118 - DNA, 628 bp, Homo sapiens
gggacaaaggatccacgactttaggatttttattttcaactttacaatagtgtgaaagtgatactcattcagtaagaaccctacctagagcgcctatacaatcattctgctttttactttcagtacagtattcaataaattgcatgagctattcaacactgttttacaaaaataggccttgtgctagatgattttgcccaactgcaggctaagcgttctgatcatgtttaagttaggctaggctatgctatgatgtttagtacatttaggggtatgtctctrtaagttgaagatagagatgctgcacttcccatcaccaggatgtcctgagcacaccctgtatattgaatgataatcaaagctgtgagatgatatctggatcaaggccacacacccatgttttggtgcaagaggcgtgtcctgctcatgctgacccttcaggagccctaggagactccaccccagcagcagagtgagatgtctctgaaggaaagggtgggatgagaggagaaaagcagtaggaaagtatgaggagctgcaggagaaagtcctcactccaccaagggggtctagtgggaagaaatggggcaagtgactccactctgtggaacttggaagcccaagacaa

SEQ ID NO: 540119 - DNA, 457 bp, Homo sapiens
ctctgttgacctacatactcccatgcccatgctccttagcatagccaaagcataagactgacccacttacttcagaacagttttcattatctaatagtaggtctcaggactgtctcaagagctttatcacatactcctggcccctgtcccagagattgcaacataataggttaccctgataratatttaaggaatttccaatgtaacttaacacacatcttttcataaggaaggtgaaatgttatgcattatattaatctaagttgacacccataacctcatctgtgaggctgcggacaacttccagcaggcctcaccccagatctgggttcagccatcttctgtggcacatccacgtcagtgagcctggctccaaggcaccagcccatcggctctctacaccctgctactctctgcaacacttcctgcgctctctgcaacacatgcttctagaaag

SEQ ID NO: 540120 - DNA, 418 bp, Homo sapiens
agccaaagcataagactgacccacttacttcagaacagttttcattatctaatagtaggtctcaggactgtctcaagagctttatcacatactcctggcccctgtcccagagattgcaacataataggttaccctgataaatatttaaggaatttccaatgtaacttaacacacatcttttcataaggaaggtgaaatgttatgcattatattaatctaagttgacacccataacctcatctgtgaggctgcggacaacttccagcaggcctcaccccagatytgggttcagccatcttctgtggcacatccacgtcagtgagcctggctccaaggcaccagcccatcggctctctacaccctgctactctctgcaacacttcctgcgctctctgcaacacatgcttctagaaagaca

SEQ ID NO: 540121 - DNA, 460 bp, Homo sapiens
gggcagagatttgaacttgcaaagcccttaccccccaccacagcaccatgctgcctgagggtggccagagctcgccccccaccacggcaccacgctgcctgagaatggctggagctcgcttcccaccacagcaccacgctgcctgagaatggctggagctcrcttcccaccacagcaccatgctgcctgagaatggctggagctcgcttcccaccacagcaccatgctgcctgagagtggctggagctcacttcctttattggagtctcctggcatgggacagttgtcagggaatccctagggggtgcaaccctcctggccttagaatcagataaaggctcctgaggagcccatgtgcaggcaccaggctccagcaggagctgagggttggggagtgggtctggctggtgaaggggaggtcacatgggcaagagcctgacttcaggtctcctggaagtac

SEQ ID NO: 540122 - DNA, 460 bp, Homo sapiens
gggcagagatttgaacttgcaaagcccttaccccccaccacagcaccatgctgcctgagggtggccagagctcgccccccaccacggcaccacgctgcctgagaatggctggagctcgcttcccaccacagcaccacgctgcctgagaatggctggagctcgcttcccaccacagcaccatgctgcctgagaatggctggagctcgcttcccaccacagcaccatgctgcctgagagtggctggagctcacttcctttatyggagtctcctggcatgggacagttgtcagggaatccctagggggtgcaaccctcctggccttagaatcagataaaggctcctgaggagcccatgtgcaggcaccaggctccagcaggagctgagggttggggagtgggtctggctggtgaaggggaggtcacatgggcaagagcctgacttcaggtctcctggaagtac

SEQ ID NO: 540123 - DNA, 610 bp, Homo sapiens
atgtgttaaccataagtgttgctgaatttcaaactattacttcagaaccacaggctgtgcagatagatggagctaatttgtgatgatatggagacgccattttattttcattaaagtcctcatctggtgcctttgtagcttgcattaaatgtcatttttcatgctgtggtcgtagaagggcccctggaccctggtcccattaaacaggctctgtctcccacatgtccatttgatatcatgagaggcagttaaagctagatgggcccttcaaatttgctccacacctctagggaaactgaggctgagaaagcagatatgattcatggatggccacatggcctcattcttccctctgtagcacactgtcttcctgtctgttcttttgtttgtttctcctgtgcttaaagaaggaacaaaagggtcagaatttccataagaaaataacacaaaagmtaatcattgcttatttctatgtgagatgcaaggctagaaatcctccacacatggtctcatttttcctctcagcaactcagagacgtgggccatgttttgtccactgcacagatgaagaaagtgagacacagggtcggtgaagggtctatcaaggtca

SEQ ID NO: 540124 - DNA, 610 bp, Homo sapiens
atgtgttaaccataagtgttgctgaatttcaaactattacttcagaaccacaggctgtgcagatagatggagctaatttgtgatgatatggagacgccattttattttcattaaagtcctcatctggtgcctttgtagcttgcattaaatgtcatttttcatgctgtggtcgtagaagggcccctggaccctggtcccattaaacaggctctgtctcccacatgtccatttgatatcatgagaggcagttaaagctagatgggcccttcaaatttgctccacacctctagggaaactgaggctgagaaagcagatatgattcatggatggccacatggcctcattcttccctctgtagcacactgtcttcctgtctgttcttttgtttgtttctcctgtgcttaaagaaggaacaaaagggtcagaatttccataagaaaataacacaaaagctaatcattgcttatttctatgtgagatgcaaggctagaaatcctccacacatggtctcatttttcctctcagcaactcagagacgtggrccatgttttgtccactgcacagatgaagaaagtgagacacagggtcggtgaagggtctatcaaggtca

SEQ ID NO: 540125 - DNA, 504 bp, Homo sapiens
aggaacgtgcagatagagtgagagtgggtcactgtgtaggaccacaggaagagggagtggtcctggtccttcccagccctcctggagggaactcagagcactgtgcctcatccatccactgaaaatccaagcgaggctgaagatggcatcaggacaagaggggagtcttcaggaagactcaacttctgaatgagaagacagaggcatacagcattaacctcctgatgcacgagtgtcacccaagatcatgtgacacctccttcttcctcaagagacttggactggtcagcctttcatgtattgattgctttygttgattctcaccctctgatatccagaaggaatgaaaagggcacagacaaaaagaaaaaggggggaggaatatttcactttctgccacagtatattattggtgtctcccttttgtaataacaaaacaatgacaaaaatgctatcagcagtgtgggagcttccaaagagtgggtggaaaaatcccacaggagt

SEQ ID NO: 540126 - DNA, 653 bp, Homo sapiens
attggtctgctcaggtgaggggctttggttaatgaacctgcatgtgctgtgagctacagtctagtaagtgtctgctctatgctagacattaagctcagtgttatgcatgcattatttccaagccttctgatatccttcacagataaagtgctttcttctcattttatacacactcagagatgttgagggcctttaatcaaggccccagctctgaaagtatgtaaagacaagattggactttagttctgtctggtccccaaatcaaagtgtaaactatttctgctagcttatgtgaaaccttgtggccaagcactgcctgtgtgcacatcactttgcctacccatgaccctctgacccaacctatgaattaggtcagatggcctgargtctgcttgtgtctcaggaggctctcagggaagcctccttgagcctctccacacaccgatgatctctggcacccagtggttgatgaagcacatggtttctgagatgaccccagagtcatatcatggccaatatagtggtcaatactcctactcattctcctcatgatttatgtgttcatctcctttgagttcagttctataagagcatggataaggccaaccccatgtacacagtaagttcatgtaatgaactctgaccaaatgtct

SEQ ID NO: 540127 - DNA, 679 bp, Homo sapiens
agaaaaaggcacacacacacttgtccacacataggcacagacacacatacatatatagcttccctgcctagcatagtgcctagtccttagaactcaggaattactagttgaatgaaatggctgaagtttaattttgttaacattaacatcacaaggctttttggtcaatgaatatgccaatgtattgttacttataaagggattttgcatctactatggagtatttatttatagayataacattcacatgtacttgaggattgtataaatcaagacttattttatctacaggagtttcatatcactagaaaaaaagattttagaaacgttctaataattgtcatatgttcggcaagagaggctcttttaatcatacgaaaatgaagttagataattggatggttatgatagctacagaaggggtttataaaagtcacaattaagaggcacccactgtaagaaaaagcaaaacgtattttctttaggctcccataagctgcattttcaatgcacagatttaaggaaattccctttccaaatcctcttttgtcccacatgaaagcgatgatgactttctacacagcagacccaggacttaaaaaaaataaaataaaaagaatgtttactctaagtagaacatcatgggcttcgtcatagcagtttcatggcattccccctc

SEQ ID NO: 540128 - DNA, 679 bp, Homo sapiens
agaaaaaggcacacacacacttgtccacacataggcacagacacacatacatatatagcttccctgcctagcatagtgcctagtccttagaactcaggaattactagttgaatgaaatggctgaagtttaattttgttaacattaacatcacaaggctttttggtcaatgaatatgccaatgtattgttacttataaagggattttgcatctactatggagtatttatttatagacataacattcacatgtacttgaggattgtataaatcaagacttattttatctacaggagtttcatatcactagaaaaaaagattttagaaacgttctaataattgtcatatgttcggcaagagaggctcttttaatcatacgaaaatgaagttagataattggatggttatgatagctacagaaggggtttataaaagtcacaattaagaggcacccactgtaagaaaaagcaaaacgtattttctttaggctcccataagctgcattttcaatgcacagatttaaggaaattcccttkccaaatcctcttttgtcccacatgaaagcgatgatgactttctacacagcagacccaggacttaaaaaaaataaaataaaaagaatgtttactctaagtagaacatcatgggcttcgtcatagcagtttcatggcattccccctc

SEQ ID NO: 540129 - DNA, 611 bp, Homo sapiens
tttgcagtgaaggtcatctcttcccaagatcattgccatctkttttttctttttatttttacttaaattaatgaaatattttctcctaggaaggaaagtcccatctaaaactcattttaattacctcacacttatactcacaattccagcattggtgtgtatgacagacattaagggacaccaagaagtttggtggaagccagtatttgaggtctaaggaactgagtagtgttagagttggccaccagtagggaggtgcaatttagagttaacgtcccaccagattagaggaatttcataaaacatttgatttctcattgaaaacacagaaattctatgtcataagagcaagaactaagtgaaaaaccaaagtaaactggtcctagaaaggtataaatccaagctactacagggtcaggtgatctagtaatttcattgcctgtcagaaaaaaacaaacaaaaacctcaatattattttgaggatgataacaaaattcagagtatccatataaatccatggtatctagtatacaataaaaattctctaaacacaccaaaaagtagaaaaatgtggcttgtaatcaagagaaaatatagtcaaaagaagcaga

SEQ ID NO: 540130 - DNA, 600 bp, Homo sapiens
atctcttcccaagatcattgccatctgttttttctttttatttttacttaaattaatgaaatattttctcctaggaaggaaagtcccatctaaaactcattttaattacctcacacttatactcacaattccagcattggtgtgtatgacagacattaagggacaccaagaagtttggtggaagccagtatttgaggtctaaggaactgagtagtgttagagttggccaccagtagggaggtgcaatttagagttaacgtcccaccagattagaggaatttcataaaacatttgatttctcattgaaaacacagaaattctatgtcataagagcaagaactaagtgaaaaaccaaagtaaactggtcctagaaaggtataaatccaagctactacagggtcaggtgatctagtaatttcattgcctgtcagaaaaaaacaaacaaaaacctcaatattattttgaggatgataacaaaatycagagtatccatataaatccatggtatctagtatacaataaaaattctctaaacacaccaaaaagtagaaaaatgtggcttgtaatcaagagaaaatatagtcaaaagaagcagactgg

SEQ ID NO: 540131 - DNA, 590 bp, Homo sapiens
gtgatctcaaccttttaaacatagaaattaagacagatccaaggctgaatgtacctgtccttggagagtattcctaacactaagtgtaaccatgaatatctagtctggctcaacagatatttttctggataataaaatagcctggctaactgaggtctcatgtaaactaatcacaaaatactactgtgtgaggaaccaayacagagttttgttgataaagtaaagcaaagtccttgccttcaaggagctcacattcttatgagggaaagaagggagtaaataaatgaatttacagtatatataaaaaaacaaagtaaagcaagagagacaagagcattggggaggggctgctgtttggtatcctttagtggagggtggcctccccagttaagtggcatttgtgtgggcactctaaagaagaaaagaaaggaactcttggttattgaggtaagaacattccatacagggacaacaaaaaagccaaaaccctggggagaaacgtgcttgagtgtttgagaaacttcatggaagtcaatgtggttgaagcagaatgagaaagggagaaacacagtcagagaggaagaaacaag

SEQ ID NO: 540132 - DNA, 507 bp, Homo sapiens
gagcgtgacattaaaggcggagaaggagaaaaccctttactctgtctccaagcacaagggttttagctggagctcagattcaggtaaatatacagcgagctggcaagaagggctggccatgcatccctgtgctcccgactccagcaaacacaggcctggtcctcagagccttcatcttcataaattctttatagaaagaattccacaaaaccattcacctttctggctcctgctaaaatgaaagcttgctcactcacagaaagaaatggagagaaaaaaaatcattctcacatttggaatatctattcactcaacaaatagagactgagtcctaggcaytggaatcgcagggcctggcttccggtgacctgggtcaactcagtaaaccttatgggattcagttttcttaccaggaaaatgggcccgaggtttactcatgtttcatacacattgctggaaggattataaagattattgtaatgggtatggaaaagtttatgaactggc

SEQ ID NO: 540133 - DNA, 638 bp, Homo sapiens
tagcactttcttcctcccctgactcagagttattcactgacctgcttctggtacattctttcccccctcccttcagagcycctctcatgctgggtgccattagcagtttgtaaactgcctctcctgcctttccccatgtggcctgagcaactcaaagacaaggaattgtgtctttttcattttgacaaacattgccttggctaacatttgataagcaccaactatattctctgcagtttgctacatagagatgagagtgggtggttcggctcatgagaagcccatagtcaaaggaaaaaggatagaggggtgacatgcaaggacaaagtggggtgtgcaggtcacctgccaggtcagcacagaggaggggattcctctgaagaagctactttgtttagttctctcaagggccaggaaagaaaggagtgaggaaaagcaagaacgaaagaaggaagggttgatttatctatctagaattgaccctggcacccagcccagtactggaggagcagagcaggccattcatgcttacagacacaccctcctgcttctctctgtcccatttacagcaatagtccttgcacttgctgaccactgctgtcccctttgctgtcctctattctcttcttgacattcta

SEQ ID NO: 540134 - DNA, 350 bp, Homo sapiens
gggaatattaccaggagaggaaagacacattttcaaagcttattgtcgtgctaatgataatggctgcttatccattccccgtgtgctttcacatccaatagctcatctcatctcctcttcacaacagcccagagccaaggaaagggcttatcacatagtaggttcacaatgtgtatttgcaatgtaatggatagatgactccatggaaatcagtataatgtgttttataattctcattgtggaaaagtggaaatgacgtcwcagtggtttaatgatttgctgacagacatcgggtggctgacctggcagtagaagcaggtgtctgaatttgggcccagagcactttcctt

SEQ ID NO: 540135 - DNA, 622 bp, Homo sapiens
ctgctcagagtttccaatgatgataaagctcctatcccttgcctggcctctctcatcctaaccatgttctggtggccaagtaggggaagtgaattgaggcaacgggtgtgaaggatctcaccatgcagtcactacactttcaccaaatcttcttggtttcactgggctacctgggatctggagccttcctagttcagttcttctacagactaaactccatgtctcttgtctctggcagggtagggtggaaggagcagttcatgctgcggcagggtggaagtagcctcctggccagtcatcctgtattcagtctgaccttgaatctggccttcagaggcaagtggttgtcccatcctcagcctccccaggactccccagtgcacatctccctggcccttgatgcccctaccccaggcagacactttggtgttgttcttactgtcagccaagtgatttgctgcsttctcacctattctctaaggtcctagtacttgacaccctttgtctgttgttcctgcctctcagacttccttatctctgtggatttgtacattccctactttgcggtgctatgggaagaagatcagatgagggatgcccatcatgtgccttacacaatgtg

SEQ ID NO: 540136 - DNA, 556 bp, Homo sapiens
tacaaactgctctaacagcttccaagaatataagcagagaatggtgatatcgaatagcagcagagaattgctgctcagagataggaaacttgcaaatgctgggtgtgaggtggaaaatgcagaatgagtcacatagaagtaaatgctgaagaataaagacagaggttgggagaaacctatttcaccccagggatggaaaacaaatagaacaacctttggatctcactctrtgcataaatacaaaacacataggtatttttttggaaaaaaaatcccaccaatgaatcataattcaactataaatcatttctaaaacattaaatttacaagagtttctaattggcatgataaatcagtcacatatcaactacaactctggtatttcccatcttttcctttgtcatgtcattcaggcattgcattgtcatgattgacaacttcttaaaagaaatatatttttatcttctctagttcttctagaagacaggatacatgagcaaaaggtgctagaaaatggaaaagaatacaaaatcatttctattgaatttgctacacc

SEQ ID NO: 540137 - DNA, 472 bp, Homo sapiens
agttttgcctgaggtgatactgatgctgttcatctgtggacaacacattgcgtatgaaagtacctagcactgaagttcattagatcagtgaaaccatcacaaaccaatagcagagcctctggaaggcagttaccgcaatggaggagcccrttctctggagtatctctaaatctggttcacttgctgtccaaatgacttggttctcttcttgcagagcatataattcaaacggtgtgacaaagatggcccccaagttttcatgtgagggatctgcccaatttctgactttacagtctaggagaaattataccattttctgagccagtgctctctaaaattttaataattataatcctcagtagggctattttgaaaatcaaaattgaacaatataagaatatagtaagacaacaaatatcagtttttcttccttctttcctatactaaacaataagtataattaacattgata

SEQ ID NO: 540138 - DNA, 435 bp, Homo sapiens
gctgcacaggtgcgtatgagcattctgctcacctttatctatgtccatttcacaatggcccccactgtgctgccactgaaacaatacacaaaatgttgcctcgtttgtattccactaaattctcactgtatgtgttttactgaggaggaatagatgacatttcttcatgctccccctttatctttttatgttaacaacagcagtttataaaggaaatttacctgctttggtcattctctaaggtcactgctacggtacacggggcctcargcaaacattttttcagactcccaataggtccttgtgaagtataatttattttagaattataagcagagaagtagtgctctgtatgtgtttactgtccattcagggcacaaagagattcctcctagtgtctatgtaccacctctttctcttcaggtccggaaactg

SEQ ID NO: 540139 - DNA, 570 bp, Homo sapiens
aaatataacatatgttactgcaaacctaaattaaaagcttttcataaaactaaatttaagccattatttgttactccaaggcatacttttgcaatcagtttataagatatcctatagttctcaccatcattctaacagcaggaactgagacatgtttctgtggtttctcatttatttttgctcaagcaacagaaacttaagaaatttaaaactttttaatgatatcattacaatataaattaaaataatagctaacatttttagagcttactccatgccagagatcattctaagaacctccaatctttgagatacatgccattattattcccatttcccagaggaaaatctaagagmtaagtaacttgccgaagagcatacaattagtatgctgcaatctgcctcctgaaatagtgtcttatccactatgataaactcataagactactgtcttttttatactttactttgagtccaaacatcgaagtggctaaactcagcttccaaggggagtacccatccaagtttatggcctcctcaattccactggtcttcatctcaactatctaa

SEQ ID NO: 540140 - DNA, 570 bp, Homo sapiens
aaatataacatatgttactgcaaacctaaattaaaagcttttcataaaactaaatttaagccattatttgttactccaaggcatacttttgcaatcagtttataagatatcctatagttctcaccatcattctaacagcaggaactgagacatgtttctgtggtttctcatttatttttgctcaagcaacagaaacttaagaaatttaaaactttttaatgatatcattacaatataaattaaaataatagctaacatttttagagcttactccatgccagagatcattctaagaacctccaatctttgagatacatgccattattattcccatttcccagaggaaaatctaagagctaagtaacttgccgaagagcatacaattagtatgctgcaatctgcctcctgaaatagtgtcttatccactatgataaactcataagactactgtcttttttatactttactttgagtccaaacatcgaagtggctraactcagcttccaaggggagtacccatccaagtttatggcctcctcaattccactggtcttcatctcaactatctaa

SEQ ID NO: 540141 - DNA, 570 bp, Homo sapiens
aaatataacatatgttactgcaaacctaaattaaaagcttttcataaaactaaatttaagccattatttgttactccaaggcatacttttgcaatcagtttataagatatcctatagttctcaccatcattctaacagcaggaactgagacatgtttctgtggtttctcatttatttttgctcaagcaacagaaacttaagaaatttaaaactttttaatgatatcattacaatataaattaaaataatagctaacatttttagagcttactccatgccagagatcattctaagaacctccaatctttgagatacatgccattattattcccatttcccagaggaaaatctaagagctaagtaacttgccgaagagcatacaattagtatgctgcaatctgcctcctgaaatagtgtcttatccactatgataaactcataagactactgtcttttttatactttactttgagtccaaacatcgaagtggctaaactcagcttccaaggggartacccatccaagtttatggcctcctcaattccactggtcttcatctcaactatctaa

SEQ ID NO: 540142 - DNA, 324 bp, Homo sapiens
ctggcaccatccttactattgcttaacgagtccatggccatgtcrctgcagttatccttggtgaaagagtgtcagcatcttgtctaagagatatatcgataaaaccaaccaccatgagtcctaaagtcctaactaagatttttaagtgtttatataacatgcagaggtaccatgaatattgactcctcacactaagccaccgagaaatgtgatagttccatttatatatgtaagccctccaaaggctttctgtaatcctttttattatcagccacagaattttactatcaatccaactacttaatctcattattgacttgcctt

SEQ ID NO: 540143 - DNA, 324 bp, Homo sapiens
ctggcaccatccttactattgcttaacgagtccatggccatgtcactgcagttatccttggtgaaagagtgtcagcatcttgtctaagagatatatcgataaaaccaaccaccatgagtcctaaagtcctaactaagatttttaagtgtttatataacatgcagaggtaccatgaatattgactcctcacactaagccaccgagaaatgtgatagttccatttatatatgtaagccctccaaaggctttctgtaatcctttttattatcagccacagaaytttactatcaatccaactacttaatctcattattgacttgcctt

SEQ ID NO: 540144 - DNA, 613 bp, Homo sapiens
gcacattatagtgaagtttcgatggacagttgtagagctcttgtaaatttccagagatgaactgttaaagtattcccagataaagtttcctgtttgaaactcaaaagaaatacatagaaagttagttttgctgatattcatccagagagactaatttattacaatacagtcatacagacaaaggaaaggcatttaacttcttttggtcctttctttttaattaaaatatgactgtgttccttataaatatttataattctatgatttaaaattttatatcacaaaggatatataacaacattttcatgggaaagtgctcaaagatcagtctctttcatttcacctctgtttgaattcttcttctgtaaatgttaacatatgtaaactgttgtattgacctaagcttcatggaatagggattaggaaatgggagtgggaagggcaaacatttaaaatatttcagtagaactcatttgtaaaacacttttacttaycagatctatagaagaaccagggctttagattattcagtgttaagtaggcttctgacagagcatcgaaggcaatttaaaatataaataaatgacctagttgaatcattagttgtgtatca

SEQ ID NO: 540145 - DNA, 632 bp, Homo sapiens
atactttcctggattgtcggcatcttccatgctctgagtcagttagcatttacagtgaatctgcccttctgtggacccaatgaagtagacagtttcttttgtgacctccctttggtgattaaacttgcttgtgtygacacatatattctgggggtgttcatgatctcaaccagtggcatgattgcctggtgtgcttcatcctcttggtgatctcttacactatcatcctggtcaccgttcggcagcgttcctctggtggatcctccaaagccctctccacgtgcagtgcccactttactgttgtgacccttttctttggcccatgcactttcatttatgtgtggcctttcacaaatttcccaatagacaaagtactctcagtattttataccatatacactcccctcttgaatccagtgatctataccgttaggaataaagatgtcaagtattccatgaggaaactaagcagccatatctttaaatctaggaagactgatcatactccttaattttcctcataggaaaataaaatacctgttcagcatttatccccctcattcagttggtcaacatattgatgctattgcaagaactcaattagttcatggtagaactgtttctgtaatcag

SEQ ID NO: 540146 - DNA, 538 bp, Homo sapiens
agaagagaagtggcacaaacgaaaatcttggtgttgaaatagttcagctttctagattctcctctcttttctgcaactcataatctaaaaggaaattggaattatctagccaatcagaggcagccctttaaatgaaaggtttaaaatggaagcttctgagtatgtatcattccatattttaaagcattttagctatttgaaaaccgtatgggataggcataattgattttkgggggggggagtctcataacctaataatctccacttgaacttaagcagttatattaaattgtagtttggctattccctgaagttggcaaaattcagtttcagattcttaaatactattcatccacatagaagttttaggcatgttgttaagaaaactcttaaaacctgacaaatgtttgaatgtatgcccaccagagaattaggttctcattgatttttttcttgatatttacatttaccccgtaacaaaagcagtaaatgcatacatattatccatctagtgcccatattttatttctagaaccag

SEQ ID NO: 540147 - DNA, 483 bp, Homo sapiens
atatgttctatatttctcttattttttttatacyaacaactagaccttcacgtttttcttagggtggtgacagagtttcaagaaagcaagatcaatagtgaaggtgttgtaaagcctcttgccacttcctacctagtatattctactgacaaaagtaaaccacatgaccaatcccaaagatcaagggtagagaagtaccctctgctcacagaggtggggtcaaaatcgaaataaatatttctgaatagttatctaatctgaaaccagttagtactttattggtacttacactttttaataaaaattttacttatttctgtgtcttcagtaaatacacacacttagacacacacaaagctataactagctcatttacaaattttaaaaagtgttttttttcttgttggtgctatggtggatatttttctagtgcgcaaagcttggcaaataaagtgagtgaaaaattttaggatcttttaactt

SEQ ID NO: 540148 - DNA, 527 bp, Homo sapiens
aaatatttgctgctatgcatttaaaaagcattaacacatttcagccacattttctggaaaagcatgaaacatgacataaaacataaatcttcacctttcttttttttttttttttgagagatgggatctggcygtgttgccctgtctaggctcaaactcctggactcaagtgattcttctgcctcagcctcccacagtgctgggattagaggtgtgagccactgtacctggcaatacaaatattattttaacagtttgtatgaatgcactaaggtttgagaagcccaacttttctataaataattggctaaacatagaaacatgttgggattcgtggaaataaacacttgcctaaaatgagcagaaatttagtatctatgagggtaaatctaagataattgtattcattttacaatagattatattttaaatatactgactgagttgtaaacttactgtgtagaatgtaaactgtgttcttattatatcaaacaatagaattctatatgattaaatatttaagtggc

SEQ ID NO: 540149 - DNA, 527 bp, Homo sapiens
aaatatttgctgctatgcatttaaaaagcattaacacatttcagccacattttctggaaaagcatgaaacatgacataaaacataaatcttcacctttcttttttttttttttttgagagatgggatctggccgtgttgccctgtctaggctcaaactcctggactcaagtgattcttctgcctcagcctcccacagtgctgggattagaggtgtgagccactgtmcctggcaatacaaatattattttaacagtttgtatgaatgcactaaggtttgagaagcccaacttttctataaataattggctaaacatagaaacatgttgggattcgtggaaataaacacttgcctaaaatgagcagaaatttagtatctatgagggtaaatctaagataattgtattcattttacaatagattatattttaaatatactgactgagttgtaaacttactgtgtagaatgtaaactgtgttcttattatatcaaacaatagaattctatatgattaaatatttaagtggc

SEQ ID NO: 540150 - DNA, 626 bp, Homo sapiens
tctagtccaaaaaagaactcacaggaacctaaataaagtttggtcaagagaggggctttgtcagaaccatgaataatacagtgggtgctcttcccaaaaaatatttgctgctatgcatttaaaaagcattaacacatttcagccacattttctggaaaagcatgaaacatgacataaaacataaatcttcacctttcttttttttttttttttgagagatgggatctggccgtgttgccctgtctaggctcaaactcctggactcaagtgattcttctgcctcagcctcccacagtgctgggattagaggtgtgagccactgtacctggcaatacaaatattattttaacagtttgtrtgaatgcactaaggtttgagaagcccaacttttctataaataattggctaaacatagaaacatgttgggattcgtggaaataaacacttgcctaaaatgagcagaaatttagtatctatgagggtaaatctaagataattgtattcattttacaatagattatattttaaatatactgactgagttgtaaacttactgtgtagaatgtaaactgtgttcttattatatcaaacaatagaattctatatgattaaatatttaagtggca

SEQ ID NO: 540151 - DNA, 597 bp, Homo sapiens
gcacatcccagcactgcagacccttgaggggctcatggggtctgtggtctgcccagcttctggacactgccactccaagctgaggagcacaagctgaagctccacagcatcctctttgttcttcctataacactgcaccmtgcctcaaggatgggagttttatgagctcttggctcctctctcaatttcttccaaattgtattaaatctgtctgcaagatttagagtttgtagtgtgtggtaggaataattccttagtttcaatctagttggaagtactttctcaaagtgttgtgcttgttttattcatttccatggctttcagaaggggatgttgttgtaaattgtccttcagatggcattcttccccatggtggggggcagtatatctttcctgcaggcatttgatatggagaaaggataccgtccctgatattgttctcagtgcctttcccacccttctctggtctccacagtaacagagggacaaatatctggaagctacaatcctcaggattccattcagattccacaaatgagggcattctggcccaaggtggcaggccgaactcaatgagaaaccactatgctctggagg

SEQ ID NO: 540152 - DNA, 597 bp, Homo sapiens
gcacatcccagcactgcagacccttgaggggctcatggggtctgtggtctgcccagcttctggacactgccactccaagctgaggagcacaagctgaagctccacagcatcctctttgttcttcctataacactgcaccctgcctcaaggatgggagttttatgagctcttggctcctctctcaatttcttccaaattgtattaaatctgtctgcaagatttagagtttgtagtgtgtggtaggaataattccttagtttcaatctagttggaagtactttctcaaagtgttgtgcttgttttattcatttccatggctttcagaaggggatgttgttgtaaattgtccttcagatggcattcttccccatggtggggggcagtatatctttcctgcaggcatttgatatggagaaaggataccgtccctgatattgttctcagtgcctttcccacccttctctggtctccacagtaacagagggacaaatatctggaagctacaatcctcaggattccattcagattccacaaatgagggcattctggcccaaggtggcaggcygaactcaatgagaaaccactatgctctggagg

SEQ ID NO: 540153 - DNA, 609 bp, Homo sapiens
tgagaaatacttggatacacaacaaaataacttggtaaggcttggaggagtagctggggttctgccttattaggtaggatgagactaccaaaacaggatgagtgttagtagcatgatgctgtttgaaacaacaggccagggtaaagtgggttacaaagttgttgtctgatacagctatagcctggagtggtcaccagaggactgggtggcatggtaggccagatgttgtaggagactatagaaggaaccagaaagaccatagaagttccactttagacaaattataaatgaactttccaatgactgcccaaaggtgggctgaggaagggacactatgtgagtggtaataatgagctcataaatggcaaaatcaggattggaaactcaagcattctgatttctgacccgtgcttttacccagtatgccatactgcaccttggtaaaattttacacataagttcttcgtattattaattttragggagagacagaatgataggataaaagaatttggccaatggtatagtctagtagactctgaaatccttagaaacagatgagaccttcagccgagactactggaatagtattcattctgggtcaaatgg

SEQ ID NO: 540154 - DNA, 481 bp, Homo sapiens
gtcatcattttactttataaaataatcacttttatctttctactatatacatgttgtttaaaattctattttcatcagatattaagtttactagtttcttatagttcataattaactgatttttttaatctgatctattattttgaagttttctgcatcttttcaaggtatcttatgtagctgacatattattgtatcctgtaagcttatatagataaagagtgtcttcatattttaattggcaaatttaacatactttcatctattgtaactattattttgttaagatttattrctcccatattatttcatattttccattgcaatccttttttttttaagttttggattcgttttgaagagaatgagttttcttctgctggtttataaaagttaactatattactcattaaacattgttcttcagatgtatgctcgagttgaaatagctatcagaggagaaccagaaaagttattgcag

SEQ ID NO: 540155 - DNA, 529 bp, Homo sapiens
ctgctaggctagcttgccacatttttacatatttagccaggaaggagacaatgaatccaaatgttagacagtttgtcttaatcagtttgggctgccatgaaaaattactataggcttaaaaaatagaaatgtayttctcacagttccagaggctgagaaatccaagatcaaggcaccaggagatccactgtctgctgaggacccacctcctgacttgcaaatggccgtcttctccctgtatccccacatggcagagagcagaaaaagagagagaaagcaagctctctcttgttttataaggatgctaatcccattcatgagctctccattatcatggcctatttacctcccaaaagcctcacctcctaattctatcacaattgaggttgaggtttcaatatctgaattaggagagaacaaacattcagtccatagcacagtttatgcaaaactgttttgcataatagcaaaaacagtttttttgcaaatagcaaaaacaaaatcaacatgatgttacatccctgtttgc

SEQ ID NO: 540156 - DNA, 529 bp, Homo sapiens
ctgctaggctagcttgccacatttttacatatttagccaggaaggagacaatgaatccaaatgttagacagtttgtcttaatcagtttgggctgccatgaaaaattactataggcttaaaaaatagaaatgtacttctcacagttccagaggctgagaaatccaagatcaaggcaccaggagatccactgtctgctgaggacccacctcctgacttgcaaatggccrtcttctccctgtatccccacatggcagagagcagaaaaagagagagaaagcaagctctctcttgttttataaggatgctaatcccattcatgagctctccattatcatggcctatttacctcccaaaagcctcacctcctaattctatcacaattgaggttgaggtttcaatatctgaattaggagagaacaaacattcagtccatagcacagtttatgcaaaactgttttgcataatagcaaaaacagtttttttgcaaatagcaaaaacaaaatcaacatgatgttacatccctgtttgc

SEQ ID NO: 540157 - DNA, 687 bp, Homo sapiens
tatcaatgtcttagatattgctccaaggtaggactctgatctccactatcagtttcacattttctttaaaagatttagctttcagctttctgggatccccaaacttaggaaatgaataaaccataggggaagaaccacagatagacctgtggccgtttttttcaggtatgttgaggaaggggtattgatttgtcctcatccctctcattgaatatacatagygcaagtcctttttgatataattgtctaattataattatatataattgtgaaatataatggagttatagattcatacatggatcagggctgaaggatactgtcaaacatctctggatctagaccggaacattcctgtcacccacaggtattccagttttctcatgggagcatcaagaggattttcgagcatagcacctgtcattgtacccactgtcagcggatttcttcttagtcaggtacaatttttttgtcatgaaggactccaaagatgctctgctaaatccacttataaaggtgatagcatgtattcaaagactgaaaaataaagttaaattttgggtaatttgtcattaagatgaacctgctaaagaaaaatatagaatcatttctttggtgacctaaagcctggttcattctcaagcaaagaactaaatagtgattgctgtctttgaaactgaaaccaca

SEQ ID NO: 540158 - DNA, 687 bp, Homo sapiens
tatcaatgtcttagatattgctccaaggtaggactctgatctccactatcagtttcacattttctttaaaagatttagctttcagctttctgggatccccaaacttaggaaatgaataaaccataggggaagaaccacagatagacctgtggccgtttttttcaggtatgttgaggaaggggtattgatttgtcctcatccctctcattgaatatacatagcgcaagtcctttttgatataattgtctaattataattatatataattgtgaaatataatkgagttatagattcatacatggatcagggctgaaggatactgtcaaacatctctggatctagaccggaacattcctgtcacccacaggtattccagttttctcatgggagcatcaagaggattttcgagcatagcacctgtcattgtacccactgtcagcggatttcttcttagtcaggtacaatttttttgtcatgaaggactccaaagatgctctgctaaatccacttataaaggtgatagcatgtattcaaagactgaaaaataaagttaaattttgggtaatttgtcattaagatgaacctgctaaagaaaaatatagaatcatttctttggtgacctaaagcctggttcattctcaagcaaagaactaaatagtgattgctgtctttgaaactgaaaccaca

SEQ ID NO: 540159 - DNA, 549 bp, Homo sapiens
gcccaagcagggaacttgggagtcatctccagcagtttcctctctctcactgtccatacccaatcggtcactgctcccagccaattctttctctaaatccayttcttcccattcctattctaatcttctcatcccagagccctgcctaaaaagctctcccctaatgcttgttctgaccaactccacacattcttcaagtctctgagaaatgtttctgagggagccacctcccccattacctcccaggggaacaaaattccactacacacctacagaggaatgtctgctctccctatatttctgcatctcagacagataccaatcttctccttcttccagacttagggagagtgggagaaaagcattctgattgtgatttttcatgcccttttcctctcaggtttttgttcagtccgacatgggctggccctcatcttgcagctctgtaatttttcaatttacacccaacaaatgaacttgagcattgccatcccagctatggtgaacaacacagccccacctagccagcccaatgcttccacagaacgg

SEQ ID NO: 540160 - DNA, 687 bp, Homo sapiens
ccaagcagggaacttgggagtcatctccagcagtttcctctctctcactgtccatacccaatcggtcactgctcccagccaattctttctctaaatccacttcttcccattcctattctaatcttctcatcccagagccctgcctaaaaagctctcccctaatgcttgttctgaccarctccacacattcttcaagtctctgagaaatgtttctgagggagccacctcccccattacctcccaggggaacaaaattccactacacacctacagaggaatgtctgctctccctatatttctgcatctcagacagataccaatcttctccttcttccagacttagggagagtgggagaaaagcattctgattgtgatttttcatgcccttttcctctcaggtttttgttcagtccgacatgggctggccctcatcttgcagctctgtaatttttcaatttacacccaacaaatgaacttgagcattgccatcccagctatggtgaacaacacagccccacctagccagcccaatgcttccacagaacggccctccactgactcccagggctactggaatgaaactctaaaagaatttaaagcaatggtaagtttaatgagactctggactctttctttgactcaaataatttgacttaaagagttataaaagagtgagattcatttaac

SEQ ID NO: 540161 - DNA, 328 bp, Homo sapiens
ggaacttgggagtcatctccagcagtttcctctctctcactgtccatacccaatcggtcactgctcccagccaattctttctctaaatccacttcttcccattcctattctaatcttctcatcccagagccctgcctaaaaagctctcccctaatgcttgttctgaccaactccacacattcttcaagtctctgagaaatgyttctgagggagccacctcccccattacctcccaggggaacaaaattccactacacacctacagaggaatgtctgctctccctatatttctgcatctcagacagataccaatcttctccttcttcca

SEQ ID NO: 540162 - DNA, 687 bp, Homo sapiens
ccaagcagggaacttgggagtcatctccagcagtttcctctctctcactgtccatacccaatcggtcactgctcccagccaattctttctctaaatccacttcttcccattcctattctaatcttctcatcccagagccctgcctaaaaagctctcccctaatgcttgttctgaccaactccacacattcttcaagtctctgagaaatgtttctgagggagccacctcccccattacctcccaggggaacaaaattccactacacacctacagaggaatgtctgctctccctatatttctgcatctcagacagataccaatcttctccttcttccagacttagggagagtgggagaaaagcattctgattgtgatttttcatgcccttttcctctcaggtttttgttcagtccgacatgggctggccctcatcttgcagctctgtaatttttcaatttacacccaacaaatgaacttgagcattgccatcccagctatggtgaacaacacagccccacctagccagcccaatgcytccacagaacggccctccactgactcccagggctactggaatgaaactctaaaagaatttaaagcaatggtaagtttaatgagactctggactctttctttgactcaaataatttgacttaaagagttataaaagagtgagattcatttaac

SEQ ID NO: 540163 - DNA, 613 bp, Homo sapiens
accccaatgtgcaacattgctaattttcatatctatccctccgcacttgattatgttccttgatggcaaaattgtgtcttcgccattttatattctcaaaatttagcaaaaagcstggtgtatagtggctgctgtatgatgtttgtgaaggaatttgtaaatgacatgctagccaaacaaagagagctcataagatttcttaagattctaaaaagggaatttgaagatgggccatatttccactcaatactgataatgttaaattcccaactctgtaataatgtatatattagaaaaaatgtctttgctgaggattcatttcatttcatatctacaaattgggtaattaatttcacataatgtactgctgctcactcttatgtgctttgaggaagataagagatagatatggaaaggtttaatgatgaaaggaactctgcaaagcatgactagcaggagggatgctgactggtacgtgaatggtgagggcattttcaagcacgtggggcaaacacgctactaacttgtaagggtgctatagctttaataatagttcatttcaaaacctcccaaaactcaatggtttaaaacaataatcatttattcccatggt

SEQ ID NO: 540164 - DNA, 580 bp, Homo sapiens
cttgtaggaatgatctcactcacccctgaggaagagctttaatgtcactagggattcacccttatgacacaaacacctcctgcaagtggacccaacattgggatcaaatttcaatattagatttggagggaacagacatctaaaccatagcagaaggaaagaggcaagaaagtagctgcaaaagcatatgggctcgaagaaggagttgaaaacaaacatgtttaagattgtgagaaggtgctagctgacagagaaaagtcgcatatgcaaaaaacacaaagcactaatggaaagttcctgagaaggttgtgacaagggaggaattttgtgacttgaagcccagttaggagaatkatgagagatggtgtgaggacagctcctgccttttcacctgacagcccaagatggtgtcttcatctgctagtgcaagatctagggagggtcttatttttatatctttcttcctacttggaagggaggcagtaagtggagaaagaaaaaggtctgaagtgctcttgtcagaccagaggagagaggccctgcaggttgcctggcagggctatcgccacactgttcctca

SEQ ID NO: 540165 - DNA, 465 bp, Homo sapiens
ggctgctgagctctgattggttggttcaggtgaatgctggaagtcccaaatataaaaggatgcagattttcagggaactgagagtatgtgtgtgactcctacctggtcagaaaattgcttcttggctctattttaaacttaggcccagttagccacctgggatccatcttgaagaaytggcttgaaggattcacatttgttcactatgtaaatagatttaggtgaatgtgtttgggtctgtaaagagaaatggactctacagctctattccttgaaggcagagacagagaatgaagccacgtaagtagtaggaaatgttcccgccacctttgcacctgcaaatggactcggtcacttcacaggcctatttctccttcagacatcgtcacagccacatgggcaatgggcaggaaagaatttcaggactgtgatagtattttaacctcctgtaggcctttaaaattt

SEQ ID NO: 540166 - DNA, 529 bp, Homo sapiens
cacttcacaggcctatttctccttcagacatcgtcacagccacatgggcaatgggcaggaaagaatttcaggactgtgatagtattttaacctcctgtaggcctttaaaattttctgtgttaaccacttaaagcattcagcagctttggagtcatccagaaggtgtgagctcacgcagagccaaaaaggagagaaagaagagtgtttccttctagacaattcatagtcttttgttcatctgtagacgtttattgcatggcttaagtgaagatttgggttcattttcctagtgtttgaattttaccaccattgttttttaaaaaataattwgcgttttcctctctgacttaaaataccaacttttagtaaaaggaatctctgtatatttatgtctatttctgggcttaatatttagttttagtttaatatctattactagacctattttacaacatattcagtggtctaaattttaatatttgtaaatatcaggcaggtcaaaaaaaacatcattttcacttttgaaaat

SEQ ID NO: 540167 - DNA, 681 bp, Homo sapiens
gttactttgagcctaccaggcttcaatagaaaagccataacctttgcttcattatttttatgaatggttaccaccttgatttgatacttgcacaagaccaagctttaaaaggactttcttacttaaatcatttctcagttttatctttaactgttgggagttgagaaatagtatctttcaactcagtaagtctacagtttttagtttctctcaatttccttcattctgattttcaaaccagctaattactttttcagattatgtcttgttttattatactttgtgaaatatagtcaatagtaaatcacatgatttacattaactrtgccaagaacttcaccaaaaataataagctcaatagggaaattacctataaattcatttctaaagttttctaaatgtttcacctatgcaaattaagtactactgcccttctaaactctaataacagcttcttttctgctcctatcccatccctgaagccaatgccccaaaaaaggcggtgctttgttttattttgtttttaatctatggcaacaccctatgctacgccttgcactaatttctgtgttggttaggaaaggagaagttaggctgtggtaagagatgaagccttaattagtggcatacaatgtaattttatttcctgcttcaagatacatgtctagcacaggccagcag

SEQ ID NO: 540168 - DNA, 681 bp, Homo sapiens
gttactttgagcctaccaggcttcaatagaaaagccataacctttgcttcattatttttatgaatggttaccaccttgatttgatacttgcacaagaccaagctttaaaaggactttcttacttaaatcatttctcagttttatctttaactgttgggagttgagaaatagtatctttcaactcagtaagtctacagtttttagtttctctcaatttccttcattctgattttcaaaccagctaattactttttcagattatgtcttgttttattatactttgtgaaatatagtcaatagtaaatcacatgatttacattaactatgccaagaacttcaccaaaaataataagctcaatagggaaattacctataaattcatttctaaagttttctaaatgtttcacctatgcaaattaagtactactgcccttctaaactctaataacagcttcttttctgctcctatcccatccctgaagccaatgccccaaaaaaggyggtgctttgttttattttgtttttaatctatggcaacaccctatgctacgccttgcactaatttctgtgttggttaggaaaggagaagttaggctgtggtaagagatgaagccttaattagtggcatacaatgtaattttatttcctgcttcaagatacatgtctagcacaggccagcag

SEQ ID NO: 540169 - DNA, 610 bp, Homo sapiens
aaaagataaggattcagcaaaacgtattgacaaggaacaaccaatgagacacgaggaaaatcagatctgaatgaattaaatgaaacaaggcatcaagaaggaaygagtggtggaatctgtcaagcactgacagatggggcctgggatgtgaccactggatttgctggcagagaggctggtgatggctttgctaagggctgtcttgttgctgatggattcatgagaaaactagaggtggggaaccagaatgcaaatatgtatgagtcttctgaaatgttttgccataaaagggaggagaatcacagagttaattttcatggaaaactcaatggcctttgtgcaaaaaattacaatcagaaaaccataaaaatcactcaagtcgaccaaaatgtattaagtctctcctctttggaaagctcagttctattaaacagcaggatggtggaaaagggactcaaaaggggcaaaatataccccatctccatgaagattataataactctgagagaccccagaaggggatagtgctgtcagtgaaacatgtggggtgtcaggatccttataagaagggacattgattctgattaaggatgagggaagacataggtga

SEQ ID NO: 540170 - DNA, 593 bp, Homo sapiens
aatatctgttaagtctatttgttctagggtatagtttaagtccattgtttctttgctgactttctgtcttgatgacctgtctagtgctgtctgtggagtactgaagtcccccactattattatgttgctgtctatctcatttcttaggtctagtagtaattgttttataaacttaagagctccagtgttaggtgcatatatatttaggattgtgatattttcctgtagtccttttgttgctatataatgtctctcttyatctttttcaactgctgttgcttataagtttgttttgtctgatgtaagaatagctactcctcactccagcctgggcggcagagtgagactccgtctcaaaaaacaaaacaaaaacaaacaaaaaaagaatagctactcctgctcgcttttggtgtccatttgcatggaatatctagtcccacctctttaccttaagtttatgtgaatccttagatgttaggtgaatctcttgaagactatagatacttggttgtttacctgtcttttaaatctttatatgcttttatatatgtatccaattctttgatagctgtatagtatttcagaaaatatct

SEQ ID NO: 540171 - DNA, 503 bp, Homo sapiens
tggtgttttgggtgctccagacggcatctggctcctctcagtcttcccagtgggagtctgatcttccagcctgtgcctggagcgtggccatctccctgaaaggcgctgattgctctcctttagaggtgacttgaatccatacccagcaggcaggccgatgctaccttctcacagcagagcaggcatgcatggcccaggaaggtaggaatttagcaacagggcacctttgccttactctgtgcttggtggtatttagggcgttttagccttccttgtgtagaacaggctcccctcactgagctaggacaggtacacagacacagggctctgagtgtggggacgttggagtctatgtaccaagtgcttagggtcatagagccccactgcctgggtgcaaattgttccaacagtggggaccctgagcaagttccttaacccctctgagcctcaatatcttcatctgtaaattggggtgctrgccctatctagtaggggttttgtgg

SEQ ID NO: 540172 - DNA, 557 bp, Homo sapiens
aattggtgagctggcactatgctagtgtggggaggcataaaagaaggtagtatctttgaagacctactggtggtttaacttggctgaaactcaggaatgaaaagtggcaggacatgaggctgaacacggaggcattggctgagccataaatgggtcataagccagtaaaggaatttaggttttatcatataaactatacaaagatactgaaatgtctctgggaacaagtcaagtcaaatatcgtaattcttgtagcatagagtacaaattattctaaaggtattaagaaagcagagagatcatttaggaagatgtttcaaagagtctaatcaatacataaaatgagcttgaaccagtaagagtagagagagatagtcagtatgaaaactgttctctcgaatccatttgttgccatccttctgagacaaaagtaacagaatcatgctgaacaaaacttacctgtcgaggcaccaaatgtactgtgttattaacattcacattccaacccaktggccacagccatatgttgctatttcctactcgattttaattcctgg

SEQ ID NO: 540173 - DNA, 494 bp, Homo sapiens
gtttgtggcacacagtgccttacaagtggttgctacaggcagggaatagagaaaccaggattccaactrtctgcagcggacaaagctagtaagaacaaagatagctcctatcacaagccccaccacctttgaaggctggagtgtgatgtggagttgataacagaagaatgtcttggaaacctgtacaaggagcattcattaaccccaccacacctgccccagctccagcaatcaggcagtttctccttcccttgccagaagaatggaagctttccttcctaaggagcccaatgtagactactgctgaaagtaactattattgatagtaattgctcctgctccctggctatccattttctcttttcttgcgcaggtctctgagtagctagactttttctctatacattttcactttcttattttatgtggttctgttagtttttagtaagaaacttcctctgtgcttgtgaatctcaaatgaacttctgtgtgga

SEQ ID NO: 540174 - DNA, 494 bp, Homo sapiens
gtttgtggcacacagtgccttacaagtggttgctacaggcagggaatagagaaaccaggattccaactgtctgcagcggacaaagctagtaagaacaaagatagctcctatcacaagccccaccacctttgaaggctggagtgtgatgtggagttgataacagaagaatgtcttggaaacctgtacaaggagcattcattaaccccaccacacctgccccagctccagcaatcaggcagtttctccttcccttgccagaagaatggaagctttccttcctaaggagcccaatgtagactactgctgaaagtaactattattgatagtaattgctcctgctccctggctatccattttctcttttcttgcgcaggtctctgagtagctagactttttctctatacrttttcactttcttattttatgtggttctgttagtttttagtaagaaacttcctctgtgcttgtgaatctcaaatgaacttctgtgtgga

SEQ ID NO: 540175 - DNA, 535 bp, Homo sapiens
ctgataaaagcaattctcctccctctcttcctttctttcttcctaactgcttaccttcccataagaaaagaatcaagttcatcgatttgcaaccatgatcaatttgtaagtatttcttttggccaggctgcttaaaaaaaaaaaaaaaaaaagatgatctcagggattagtttatgaccatggttcctaaactttgccacacattggaatcacttggaaagctttttaaaatcctaatgccccagtcacaccccatagcaattagtcaaacatctgagggtgggaaccaggcaatagtattgctttacaatccccaagtgattctagtgtgcttcaaagtttgasagtcactggcaaatgtagggaaatgggcctgtggccagttaatttcatggactggagcctgatgcaaataaggctgaagtgttggattcttgtccagaacatgacagttctttacactttcacagacccataaagcttatcccttctccttcaaccctccatcagcaagctctttataaatgaaccctag

SEQ ID NO: 540176 - DNA, 655 bp, Homo sapiens
aagtaagtgtgggatctgggagtcaatcccagcagcatggcccagagctatgcctctcaccaccatacagcattgctgctattatttttaaaataataataattaatatgtgttatcaatacaacatattctcatgataatcttatgatgtacatgctgttaaaactcctcttttacagatgagggagttgaaacctgtagtgtatgagttgccacttctctagtttgggtctccattgcgtactgcctgggctaatgaaattaccctcccacgtcttctctgaacctttctctgcacacttttaaaaagttaaaatttttcaaattactttacactcagacttctgaataaccttccccaaagcatggtttttgtccttcatttattctttaacacatatttattaaaaactacattccaagcaatgkttttctaatccatcattcacaggtaaatctggtatgtccctagcctacaacaagctcttactctttgggagacactggcacataaacatcatttctacacattgtaaaatgtgtcctgtagaggtacacagaaaaaggcctctaaggtggcatgtaggggcgggtgggaagaatgggtcaaagaaggctaagcacaagctgagaggcttatacagtcagcgaggca

SEQ ID NO: 540177 - DNA, 484 bp, Homo sapiens
gttcctcctgggtctgggccacaagcctcccagtattgccggtctcagaagacatctgtgggcaggttctgtagagggaatctgaggctgtgtgggatgagctgcaggaccccatgtggggaaaggcaggaggcagcaccagctccttcaccaggacctgagggtactgtggctcatcaggggccatcgaggacatggagaccctgcacagtgtttgaggagtcctgctacatcagtttattctggtttaggtggttgaggggagactcagtgaagtcttgggggttcmgagctacactgccagcctctgggacagcagccccagtgtcccccgacccaggcctttctcctccctgctgatgaacgcccactctgctcccagatgcacacctgtcctgaagacacccggttctcatgctcttctctgcagcacctgaattgggcattcctgggtaaagctgtttaagttactttcacttttatc

SEQ ID NO: 540178 - DNA, 484 bp, Homo sapiens
gttcctcctgggtctgggccacaagcctcccagtattgccggtctcagaagacatctgtgggcaggttctgtagagggaatctgaggctgtgtgggatgagctgcaggaccccatgtggggaaaggcaggaggcagcaccagctccttcaccaggacctgagggtactgtggctcatcaggggccatcgaggacatggagaccctgcacagtgtttgaggagtcctgctacatcagtttattctggtttaggtggttgaggggagactcagtgaagtcttgggggttcagrgctacactgccagcctctgggacagcagccccagtgtcccccgacccaggcctttctcctccctgctgatgaacgcccactctgctcccagatgcacacctgtcctgaagacacccggttctcatgctcttctctgcagcacctgaattgggcattcctgggtaaagctgtttaagttactttcacttttatc

SEQ ID NO: 540179 - DNA, 484 bp, Homo sapiens
gttcctcctgggtctgggccacaagcctcccagtattgccggtctcagaagacatctgtgggcaggttctgtagagggaatctgaggctgtgtgggatgagctgcaggaccccatgtggggaaaggcaggaggcagcaccagctccttcaccaggacctgagggtactgtggctcatcaggggccatcgaggacatggagaccctgcacagtgtttgaggagtcctgctacatcagtttattctggtttaggtggttgaggggagactcagtgaagtcttgggggttcagagctacactgccagcctctgggacagcagccccagtgtcccccgacccaggccttkctcctccctgctgatgaacgcccactctgctcccagatgcacacctgtcctgaagacacccggttctcatgctcttctctgcagcacctgaattgggcattcctgggtaaagctgtttaagttactttcacttttatc

SEQ ID NO: 540180 - DNA, 601 bp, Homo sapiens
ctggctctctcctaggccctccacggcacttcatttaaaccaccacggcttaccaggccctgcatcccgcccacctgcacacaactccaccctcatcctgcaccagccacaccctcattccccacactgcaaaccctctggcttcctccagtgtcatgaacaggctcattccccacactgcaaaccctctggcttcctccactgtcatgaacatgccackctctccctggatgccatctctttatagggcaactccctctgcctggaacaatctttctctccctggcccccttcacctggctaactctcactcatccttcatgtctcagcttagacaccacttgctcagagaagtcttccctgacccaccccacacagactacgtgggcttttctatgagctccagaatggcctgtaattgtcccctcatgtacctcaacaggcctccgcctccctacagtggaagctcacggcaagctcaggtccacattggtcttgttcatcacctgtacagctcagcacctgctatgacatctgcacggaataagtgtccatgacgtatctatctgctcaatgggtgaacaaagcagaaaacgtatct

SEQ ID NO: 540181 - DNA, 601 bp, Homo sapiens
ctggctctctcctaggccctccacggcacttcatttaaaccaccacggcttaccaggccctgcatcccgcccacctgcacacaactccaccctcatcctgcaccagccacaccctcattccccacactgcaaaccctctggcttcctccagtgtcatgaacaggctcattccccacactgcaaaccctctggcttcctccactgtcatgaacatgccactctctccctggatgccatctctttatagggcaactccctctgcctggaacaatctttctctccctggcccccttcacctggctaactctcactcatccttcatgtctcagcttagacaccacttgctcagagaagtcttccctgacccaccccacacagactacgtgggcttttctatgagctccagaatggcctrtaattgtcccctcatgtacctcaacaggcctccgcctccctacagtggaagctcacggcaagctcaggtccacattggtcttgttcatcacctgtacagctcagcacctgctatgacatctgcacggaataagtgtccatgacgtatctatctgctcaatgggtgaacaaagcagaaaacgtatct

SEQ ID NO: 540182 - DNA, 621 bp, Homo sapiens
attgtcaggggtgtgtacctgtgagctcacttgtgctgagcaaggacagagcttgccgagctgggggctgggtctcgtgggcttgggctgagctgttgggatggctgaaggctgtatcttgggggaagtgygttcttgagagctgtgtaagttaatgtctatgagatgagcagatggttggtgtcatgagggtgtcctcttctagaagactagggccctacagcgatggttctctcagtggtgtctctggaccactggcatcagcatcacctgggagcttgttaaaaatgcaaacatggtcaggtgcagtggttcacacctgtaatctcagcactttgggggaggccaagatgggaggattactgagcccaagagtttgagaccagcctgggcaacatagtgggatcctatctctacaaataataataataataaaaaatagccaggtgtggtggctcgtgcctgtgatcccagctacttgggaggctaaagtgagaggattgcttgagcctgggaggttgaggctgcagtgaggtatgattgtgccactgcactccagcatgtatgacagagctagaccctgtctcaaacaaacacacaaacaaaacaaaaaaagcaaac

SEQ ID NO: 540183 - DNA, 549 bp, Homo sapiens
agctgatttggagagcctgacatgagaggacactgaggagtcgacaggttttggagaagattcccatctaatagttttaaaaaatattcttggtcgggcgcggtggctcctgcctgtaatcacagcacttcaagaggccaaggcaggtggatcacgaggtcaggagatcgagaccatcctgactaacatggtgaaatcctgtctctactaaaaatacaaaaaattagccgggcrtggtggcgggcgcctgtagtcccagctactcgggaggctgaggcaggagaatggcgtgaacccgggaggtggagcttgcagtgagccaagatcgcgccactgcactccagcctgggtgacagagcgagactccgtctcaaaaaaaaaaaaaaaaaaaaattatttaagtagaacaacattcagtatggacatcaaactgttgatatttaacctgtttcttatttgattgcaaggaagatgggactcagagaagacgctgttgatttccaagtaacatttcattcacaagtcttcaatttcttttgggtacatacc

SEQ ID NO: 540184 - DNA, 422 bp, Homo sapiens
cctgacatgagaggacactgaggagtcgacaggttttggagaagattcccatctaatagttttaaaaaatattcttggtcgggcgcggtggctcctgcctgtaatcacagcacttcaagaggccaaggcaggtggatcacgaggtcaggagatcgagaccatcctgactaacatggtgaaatcctgtctctactaaaaatacaaaaaattagccgggcgtggtggcgggcgcctgtagtcccagctactcgggaggctgaggcaggagaatggcktgaacccgggaggtggagcttgcagtgagccaagatcgcgccactgcactccagcctgggtgacagagcgagactccgtctcaaaaaaaaaaaaaaaaaaaaattatttaagtagaacaacattcagtatggacatcaaactgttga

SEQ ID NO: 540185 - DNA, 549 bp, Homo sapiens
agctgatttggagagcctgacatgagaggacactgaggagtcgacaggttttggagaagattcccatctaatagttttaaaaaatattcttggtcgggcgcggtggctcctgcctgtaatcacagcacttcaagaggccaaggcaggtggatcacgaggtcaggagatcgagaccatcctgactaacatggtgaaatcctgtctctactaaaaatacaaaaaattagccgggcgtggtggcgggcgcctgtagtcccagctactcgggaggctgaggcaggagaatggcgtgaacccgggaggtggagsttgcagtgagccaagatcgcgccactgcactccagcctgggtgacagagcgagactccgtctcaaaaaaaaaaaaaaaaaaaaattatttaagtagaacaacattcagtatggacatcaaactgttgatatttaacctgtttcttatttgattgcaaggaagatgggactcagagaagacgctgttgatttccaagtaacatttcattcacaagtcttcaatttcttttgggtacatacc

SEQ ID NO: 540186 - DNA, 422 bp, Homo sapiens
cctgacatgagaggacactgaggagtcgacaggttttggagaagattcccatctaatagttttaaaaaatattcttggtcgggcgcggtggctcctgcctgtaatcacagcacttcaagaggccaaggcaggtggatcacgaggtcaggagatcgagaccatcctgactaacatggtgaaatcctgtctctactaaaaatacaaaaaattagccgggcgtggtggcgggcgcctgtagtcccagctactcgggaggctgaggcaggagaatggcgtgaacccgggaggtggagcttgcagtgagccaagatcgcgccactgcactccagcctgggtgacagagygagactccgtctcaaaaaaaaaaaaaaaaaaaaattatttaagtagaacaacattcagtatggacatcaaactgttga

SEQ ID NO: 540187 - DNA, 549 bp, Homo sapiens
agctgatttggagagcctgacatgagaggacactgaggagtcgacaggttttggagaagattcccatctaatagttttaaaaaatattcttggtcgggcgcggtggctcctgcctgtaatcacagcacttcaagaggccaaggcaggtggatcacgaggtcaggagatcgagaccatcctgactaacatggtgaaatcctgtctctactaaaaatacaaaaaattagccgggcgtggtggcgggcgcctgtagtcccagctactcgggaggctgaggcaggagaatggcgtgaacccgggaggtggagcttgcagtgagccaagatcgcgccactgcactccagcctgggtgacagagcgagactccgtctcaaaaaaaaaaaaaaaaaaaaattatttaagtagaacaacattcagtatggacakcaaactgttgatatttaacctgtttcttatttgattgcaaggaagatgggactcagagaagacgctgttgatttccaagtaacatttcattcacaagtcttcaatttcttttgggtacatacc

SEQ ID NO: 540188 - DNA, 656 bp, Homo sapiens
tgttttccaaatttatacaatactaggcaaaacaaatggcagcagactgcagttctagtactgaaaacagactagctttctattactgcatcatcataagaaacatctttttatactttgtaaaagaaattaatcagtggaatgggctgttttcagattttgcctatagatttttctaaattgtgtaaatgtgaaaygttagcctagagcagagttagtataaaatggcaagatcatgcatattcatcatgagaatgtgtatattcatgaagtgatgcacttaggctgacacctaaacaaagatgacagaatcctaaatgaataatgcaaatatttggaaaattgaaaattaacacaaaatacacaaaattaagaaatgtgatgagcatttttatcatttattctagttatgactgagttgcactggcaaagtccacttgaaactgtgtctgagatgaagacacacatcatggtgtcctgctcagaaccacagacctgagctactttacttacccatgtcatcaggggaaaataaattgtaattttaacaatgatgctctgaacacacttcctctgtttcaccctaatcagaacaccaaggagctacttccaaaccaccatcacctgggttatgttaggttctcgagaggaaacag

SEQ ID NO: 540189 - DNA, 622 bp, Homo sapiens
cttcccccagcccactctgctccttcatcctgcagggtgggggccggagtggggagggtttcacccagcctggccgatctcacacttttcctcctgtacccttcctgggaaggtttcccagcccaccttcatggaggtgtcaaccactggggtggactcggaggagagtagaaccaacaaccggtaccagcatttactgaacctgaactttcagaaatattttgaacagtttagaagggaatatttggagcagcacccaccgccatcccacacctgccccaccaggctcccttgaccccctcagaagccagcacataaatcccactcaactcccaatatcaacaggccatttgtgaaacaaagtttgaggagatattattccttctcttttgagtaacataaaaaattataaaagaatcaaaacctcaatgaattccatgttcattaaaggaaaaaatttaaaaagcatttttactttaactttaagcccttacttgtgcttaagaataaacacgatggccggrcgtagtggctcatgcctataatcccagcactttgagaggtcgaagtgggaggtcactagagcccaggagttaatgatcagccctggcaacatagcgag

SEQ ID NO: 540190 - DNA, 622 bp, Homo sapiens
gcatacctgtattggacagagaaatcaatggagccagttatttcataaacggctccactagacacgaggaaattcatggcttagagagagccagtggttgggggaggaggggttgyggaggagggaagtgcatgctttcttgatggcagcttgttttcagaggtgcctggaatgctcacaaaccagtctatagctgagcagacccagctcagacctttagatggtgacattttaatttttgaatccctggcacctattatgatgtgtggcatagaccatcttacatataattatatacacattaaatgtatattgtgaatgtcatatatttataatgtacatttatgtagttatataaataatttatactatataataattattttttaatttttttccactgagctgaattgaactcaatgtgtaatttctaatgaacttgaatgaggcctgagtaactggtaattatagcctgaaagaaaagacttgtgtttgaaaaaaagaaagcatggaaatcaaatgatgactgacttaatctggtcaattaatggaaaacagagatggccagatttatatccccaactcattagctggtaattaacattctcctacctctactttt

SEQ ID NO: 540191 - DNA, 620 bp, Homo sapiens
tgcatagcaggaggggacctggaaagacaggtttgggaaggatggagaaggtccttgaatgctatccattgacatttggatgtgatcctaaaggaatggtgaactcttgaaggatgttaaggaagagacaatcaaattctcatttcagaaggacctctagctgctgtggggtagactaattgaaaggagacagtggctgggcatggtggctcatgcctgtaattccagcactttaggaggctgaggagggtgaatcacttgaagtcaggagtttgagaccagcctggccaacatggtgaaacccttattctactaaaaatmcaaaaaaaaaaaaaaaaaaaaaaaaaagctgggtgtggtggcggttgcctgtaatcccagctactagggaggctgaggcaacagaatctcttgaatccagggggcagagggtgcagtgagctgagatcatgccactgcactctagcctgggtgacagagtgaaactccatctcaaaaaaaaaaaaaaaaaaaagacagggccgggaacagggaaaccatcaagagactcaacagtctaggtgaaggatggtactggacctctctgaaggagaaatgcagtccattcctccccagctcag

SEQ ID NO: 540192 - DNA, 514 bp, Homo sapiens
ctggaggccatcatcctaagtgaattaacacaggaataaaaaatcaaatactacattttctcacttataagtgggagytaaacattgaacacacatggacgtaaagatgggaacaacagacactgaagactgctagagggaggaggaagggagtggagcaagggttgaaaaactaactattgggtcctatgctcagtacttgggtgaaaagatcaatcacaccccaaacctcagcatcacacaatacagccaggtaacaaacctgcaggtgtatcactgaatctaaaataaaaattgaaattattaaaaacaaaagcaaaaaccttctgttccgtttccctgtgggcaccaaaaagttttccctcccctgcatcatcttaatcagtctctagtctctagtcccagagacccttggatgggtctcacctcacccaaatatggagtgaatctcattaaagaaaaacgaactgcttcagttttcctcaaaccccacctcacttcagtctctgttaca

SEQ ID NO: 540193 - DNA, 514 bp, Homo sapiens
ctggaggccatcatcctaagtgaattaacacaggaataaaaaatcaaatactacattttctcacttataagtgggagttaaacattgaacacacatggacrtaaagatgggaacaacagacactgaagactgctagagggaggaggaagggagtggagcaagggttgaaaaactaactattgggtcctatgctcagtacttgggtgaaaagatcaatcacaccccaaacctcagcatcacacaatacagccaggtaacaaacctgcaggtgtatcactgaatctaaaataaaaattgaaattattaaaaacaaaagcaaaaaccttctgttccgtttccctgtgggcaccaaaaagttttccctcccctgcatcatcttaatcagtctctagtctctagtcccagagacccttggatgggtctcacctcacccaaatatggagtgaatctcattaaagaaaaacgaactgcttcagttttcctcaaaccccacctcacttcagtctctgttaca

SEQ ID NO: 540194 - DNA, 586 bp, Homo sapiens
ccccgaagtatgcttccaggaagtgcagaccctcatgtgcttcagacagcacagatctgaggacagaaagtggaaatccttatgaatcaaaaaccaygaattcccaaagctagcagcccacttgccacttcaaatttcctccttgcacttttaaaacagagctaaccaaggattcccagcagtcacctttcacctctttgatccactcataattattagactttaagaactgggtccttcagcaaaaaaaagttatgattttttgtgttgaaactccctgaattgtttttaatatgtcatgtttctcaaaatcataggttcattggactttaagaattagaagagactttgataatctattccccatttccatgtttcaaaaaatgtcagaaaaactaagagacttatgtgtatgagcttcaaacgttaagggcaaagtggggcttgaatttaggctctttctgataattgtccaagcagcccataaatacttcatgtagccatcaaaacagagtcttggatcttctctcctctttatacaaatattgcagtggcttcattgccacctgatgctgacatccatgtt

SEQ ID NO: 540195 - DNA, 586 bp, Homo sapiens
ccccgaagtatgcttccaggaagtgcagaccctcatgtgcttcagacagcacagatctgaggacagaaagtggaaatccttatgaatcaaaaaccatgaattcccaaagctagcagcccacttgccacttcaaatttcctccttgcacttttaaaacagagctaaccaaggattcccagcagtcacctttcacctctttgatccactcataattattagactttaagaactgggtccttcagcaaaaaaaagttatgattttttgtgttgaaactccctgaattgtttttaatatgtcatgtttctcaaaatcataggttcattggactttaagaattagaagagactttgataatctattccccatttccatgtttcaaaaaatgtcagaaaaactaagagacttatgtgtatgagcttcaaacgttaagggcaaagtggggcttgaatttaggctctttctgataattgtccaagcagcccataaatacttcatgtagccatcaaaacagagtcttggatcttctctcctctttayacaaatattgcagtggcttcattgccacctgatgctgacatccatgtt

SEQ ID NO: 540196 - DNA, 586 bp, Homo sapiens
ccccgaagtatgcttccaggaagtgcagaccctcatgtgcttcagacagcacagatctgaggacagaaagtggaaatccttatgaatcaaaaaccatgaattcccaaagctagcagcccacttgccacttcaaatttcctccttgcacttttaaaacagagctaaccaaggattcccagcagtcacctttcacctctttgatccactcataattattagactttaagaactgggtccttcagcaaaaaaaagttatgattttttgtgttgaaactccctgaattgtttttaatatgtcatgtttctcaaaatcataggttcattggactttaagaattagaagagactttgataatctattccccatttccatgtttcaaaaaatgtcagaaaaactaagagacttatgtgtatgagcttcaaacgttaagggcaaagtggggcttgaatttaggctctttctgataattgtccaagcagcccataaatacttcatgtagccatcaaaacagagtcttggatcttctctcctctttatacaaataytgcagtggcttcattgccacctgatgctgacatccatgtt

SEQ ID NO: 540197 - DNA, 593 bp, Homo sapiens
caggggttgaatttgctaactttttttctgtctcccttctcaaccatgagcatcataacagaaagaatggtgccatattgatctttcactccccagtggggaacatggtgctgcatgtttaaaaagaaggttttcagaggatatctagaaaatggaatctaccttaccgggttaatgtgtcaaccttctagaagtgcatatttttcaaaaagccctcaaaagtgatgtcttaaagagagtatttcagcagcgcacaaaaatgtattttggaggcagagtctcctcccagtgcctcataaattacatcacgtagaaaaatggtctgttttgctaagcttgagttgcagccatagctgacattcctggagccatacagggataggaacaaagagcrgaggcactggaagtggaggaggcaagttttcctaaagacatgaaacagcacacccacaaagacaaatggtcacccgctcaaccctactgccctttcatgtatcaaattcaagaagtttggtgaagacaacggatttcaaataatctttatattaaatatgatcgtcatgcaatgttaacttttatgcatttaaccttga

SEQ ID NO: 540198 - DNA, 669 bp, Homo sapiens
aataatagtaatagagattatttattaaacttcaaatattatgctcatggcacactacataaatctaattcctcccgttgaggaagcactgttagtctcactttacagatgaggaagctgaggctgaaagaggttaaatagcttgctcaagtcacagatgtccaagccatgctgtttctccctgcacccctcatagccaataaccttgaagatcacatttgtcttactcagacttctctcggtctcaacctgtcctygattttacccaaatccaataggctttctaaggaccattaatgagaaataagcatccttctatctctttaatgtgttgagtcatttatgttcaaatactgtcctgctcagcaaaagaaactgaaaaagaactgtgattgctgtttatgcttttgaggctacttttttactgttacttaagtctggaacgcttttaaatggtacttgcttctcaggacaagggaaaggacatgttagtaatttaagggttttgagcagttgtctgatcatgaggcagggctggggtgtggagtaaatcttgttttcaataacctgttgagtgacattttatattgccattggcccattctcctaagaaactcaagatattcacatgtgttatctcattaatcttcaacccattctttggtgggc

SEQ ID NO: 540199 - DNA, 601 bp, Homo sapiens
tcctcccgttgaggaagcactgttagtctcactttacagatgaggaagctgaggctgaaagaggttaaatagcttgctcaagtcacagatgtccaagccatgctgtttctccctgcacccctcatagccaataaccttgaagatcacatttgtcttactcagacttctctcggtctcaacctgtccttgattttacccaaatccaataggctttctaaggaccattaatgagaaataagcatccttctatctctttaatgtgttgagtcatttatgttcaaatactgtcctgctcagcaaaagaaactgaaaaagaactgtgattgctgtttatgcttttgaggctacttttttactgttacttaagtctggaacscttttaaatggtacttgcttctcaggacaagggaaaggacatgttagtaatttaagggttttgagcagttgtctgatcatgaggcagggctggggtgtggagtaaatcttgttttcaataacctgttgagtgacattttatattgccattggcccattctcctaagaaactcaagatattcacatgtgttatctcattaatcttcaacccattctttggtgggca

SEQ ID NO: 540200 - DNA, 137 bp, Homo sapiens
acaaatgggttactccttgctctcttataaataggcagatgggaagctggtgagtgtcttattatcttgccaatgcacatgcttgtaagttcgtccacatggatacaacacacacrcattctctctctttctctccc

SEQ ID NO: 540201 - DNA, 394 bp, Homo sapiens
gatggatgttcaggttgctcaggtgagctcacattagagtgaggtgcaaagctaggctgagaaggttgttgtcctgttacagctcaccttcacctggtgctttcccttgcccctgtcccctattatacagattgagagcgatatctattcatctgctttataggtggcatataagagttcaagtcatgctctggatttctctgagaggtgctgtttaaatcattcttaagaaccagcaacagcctggttcagagcccctgctytgtattacataaccactaaaatctacagtttcagatcaaaagctttgtggagcaaattggagtatttgcagacatcatctgatttcctgataacgagctatgtgacctacaacacttatgcacatctagta

SEQ ID NO: 540202 - DNA, 640 bp, Homo sapiens
gacactttcctgcttcattatcccaactacattattttacaaagcaagtacttcttggccactgtgctagccagtggagacacaaagaaaagtaagaaatgcatatsgaagggccatgtgttaatagaggccatccaaagagcccctggtcataagggccatggtggccactttgtttcctcctctgacttctgggccctttaggggtcactgtttgtcttttgtccatctctttaacatcttaggggcacgcaagcttccagattttgatctccatgccactctgaggaaactcagaggtcttctggtgcttctgttgcacaccacattttctcctttacttccagcatgccactaactcagagcacgttggcaatgctgctgcctcccaggtaccagagagaaagtgggctataagttctcactcccacctaggacttggcttgaggatgggcagtcagcaggagcctggctcccattttgacctgtttagtctgttggtgggtgtggaatgggagtggttggggaggcgaactctttctctatctctttgctccagaatcttgtgcttaggatataaatattgacttttgtacttaaaatgttcaggttcttaacatgtaaaataccttcctctcat

SEQ ID NO: 540203 - DNA, 640 bp, Homo sapiens
gacactttcctgcttcattatcccaactacattattttacaaagcaagtacttcttggccactgtgctagccagtggagacacaaagaaaagtaagaaatgcatatcgaagggccatgtgttaatagaggccatccaaagagcccctggtcataagggccatggtggccactttgtttcctcctctgacttctgggccctttaggggtcactgtttgtcttttgtccatctctttaacatcttaggggcacgcaagcttccagattttgatctccatgccactctgaggaaactcagaggtcttctggtgcttctgttgcacaccacattttctcctttacttccagcatgccactaactcagagcacgtyggcaatgctgctgcctcccaggtaccagagagaaagtgggctataagttctcactcccacctaggacttggcttgaggatgggcagtcagcaggagcctggctcccattttgacctgtttagtctgttggtgggtgtggaatgggagtggttggggaggcgaactctttctctatctctttgctccagaatcttgtgcttaggatataaatattgacttttgtacttaaaatgttcaggttcttaacatgtaaaataccttcctctcat

SEQ ID NO: 540204 - DNA, 639 bp, Homo sapiens
gctttttattacagctcccaaaactgttacttaaaaaaaaaaatttgtacctgcacctattaaattgagtgaggattaagaattgcccaaggtccagggaccaagtcaggagcatggggttctcgtcctagttttccaaataaatacattgctcagggacttaatttcttagtggaatagttaaattgtcttagtggggacatctatggggtcatccaaaaacccatcctcatgcagcaattgaatatttgagataaattaaatattaaaaataaattcctttgaattgcttgagagcaaaattcaatagatattcaaaatactttgccaaggcattcgaagggcaagccacaagtacaaggtcacatgctgtcaggttctcwtccgtctctcctaacaccggtagctcttctttaggtaactgaccagccctttcggggattactttgaaatctctcccctcattgtccctcttgtcttccaggcccaccctcctccccctctgcctttgcttcagtctccagcacccagaagcaagtccactgtcagtactggcgaacaagtcattcccatgcactcagcctgggggttgggggcttttctcttattcatttccccatgcctggctctgcctgtcgg

SEQ ID NO: 540205 - DNA, 639 bp, Homo sapiens
gctttttattacagctcccaaaactgttacttaaaaaaaaaaatttgtacctgcacctattaaattgagtgaggattaagaattgcccaaggtccagggaccaagtcaggagcatggggttctcgtcctagttttccaaataaatacattgctcagggacttaatttcttagtggaatagttaaattgtcttagtggggacatctatggggtcatccaaaaacccatcctcatgcagcaattgaatatttgagataaattaaatattaaaaataaattcctttgaattgcttgagagcaaaattcaatagatattcaaaatactttgccaaggcattcgaagggcaagccacaagtacaaggtcacatgctgtcaggttctcttccgtctctcctaacaccggtagctcttctttaggtaactgaccagccctttcsgggattactttgaaatctctcccctcattgtccctcttgtcttccaggcccaccctcctccccctctgcctttgcttcagtctccagcacccagaagcaagtccactgtcagtactggcgaacaagtcattcccatgcactcagcctgggggttgggggcttttctcttattcatttccccatgcctggctctgcctgtcgg

SEQ ID NO: 540206 - DNA, 484 bp, Homo sapiens
gcaaccctgcagtggaggagtccagaagtggacattccgagagcacagacttcatataggattgggctaaagcaggtcaaaggcaaaacagttgaaactatttgggaaacaggtggggacaatggaaaattcatttggctaaatgtgtgcttaaatcaacacaaaagttatctcagttgcttkgttttggaaagcagtgctgtagtgtttaaaagctccctcctttcctctctcccttttcttcctttctcccttcccttgtcctttctttcttcttcttttaagaatattaacatttaaagcttatttaagagaaactggaaaggtgatttaactctccttaggttatgaagaggtattaatgaaggttgattaccagtcgtgtgattgtttcccctgtatataagagaagaacgtgtgatttcaatgcaacaaagggattttagttcaatataagggaaactatgttgtatcagatccctgg

SEQ ID NO: 540207 - DNA, 589 bp, Homo sapiens
accaatagtccacagacacctcaaaatcaacagagacaaaactaagctcgctagctttactgacaaactggctcctcctactgctattttatctactggaatggcatcrtctactcatctgagcaagaaacctagctttctctccatccctcattcccctcctccaatcagtgaccaactcttcatcaatgtctcacatgtcctccccttccttgctaactccaagtttgctattacagttgcattatattatgacactaactggcctctctgccttgcttcttatatttaataattcggtatctctcaaacttgtaagggagtctagtcagagtaggtaattaatagcttctgcaacagacaaagttcaaataaacaaaggtttgtttcttgtgcatgttacaatccaacaggatcattagggagctttgctctacttggccactgagagacccaggctgacacagaggttctgacttctacaacaccatctagcactgcaatgtctaacacagtagccacgaggcatttgtaactattgagcgcttggaatgtggctagtcccagttgagttgtgttataagtgtaa

SEQ ID NO: 540208 - DNA, 589 bp, Homo sapiens
accaatagtccacagacacctcaaaatcaacagagacaaaactaagctcgctagctttactgacaaactggctcctcctactgctattttatctactggaatggcatcgtctactcatctgagcaagaaacctagctttctctccatccctcattcccctcctccartcagtgaccaactcttcatcaatgtctcacatgtcctccccttccttgctaactccaagtttgctattacagttgcattatattatgacactaactggcctctctgccttgcttcttatatttaataattcggtatctctcaaacttgtaagggagtctagtcagagtaggtaattaatagcttctgcaacagacaaagttcaaataaacaaaggtttgtttcttgtgcatgttacaatccaacaggatcattagggagctttgctctacttggccactgagagacccaggctgacacagaggttctgacttctacaacaccatctagcactgcaatgtctaacacagtagccacgaggcatttgtaactattgagcgcttggaatgtggctagtcccagttgagttgtgttataagtgtaa

SEQ ID NO: 540209 - DNA, 589 bp, Homo sapiens
accaatagtccacagacacctcaaaatcaacagagacaaaactaagctcgctagctttactgacaaactggctcctcctactgctattttatctactggaatggcatcgtctactcatctgagcaagaaacctagctttctctccatccctcattcccctcctccaatcagtgaccaactcttcatcaatgtctcacatgtcctccccttccttgctaactccaagtttgctattacagttgcattatattatgacactaactggcctctctgccttgcttcttatatttaataattcggtatctctcaaacttgtargggagtctagtcagagtaggtaattaatagcttctgcaacagacaaagttcaaataaacaaaggtttgtttcttgtgcatgttacaatccaacaggatcattagggagctttgctctacttggccactgagagacccaggctgacacagaggttctgacttctacaacaccatctagcactgcaatgtctaacacagtagccacgaggcatttgtaactattgagcgcttggaatgtggctagtcccagttgagttgtgttataagtgtaa

SEQ ID NO: 540210 - DNA, 562 bp, Homo sapiens
ctgactgcaagctctgcctcctgggttcacaccattctcctccctcagcctcctgagtagctgggactgcaggtgcccgccaccacgcctggctgatttttttgtatttttagtagaaacggggtttcaccatgttagccaggatggtctcgatctcctgacctcrtgatccgccctcctcggcctcccaaagtgctggtattacaggcgtgagccaccgcgcccggcgtgttttcatttttaaagatatgagtgacttgagcatggatgtaggtagggtgaccaaccattccagtttggttgagactgaggggattgctgggtgcagcactttcagttttaaaaccaggacagtcctgggaaaatcaggatgaggtagtcacctcaattgccagtaaggaatagataaagtagtagaagatgaagatgcagttgagaatagggaaaattaatagaaacagtcctcaagtaggtgggagagatgatctggaaccatgaggggctaatgagactagagaggtagtaaggtagagaagaggtggatataggcagattcagatgg

SEQ ID NO: 540211 - DNA, 562 bp, Homo sapiens
ctgactgcaagctctgcctcctgggttcacaccattctcctccctcagcctcctgagtagctgggactgcaggtgcccgccaccacgcctggctgatttttttgtatttttagtagaaacggggtttcaccatgttagccaggatggtctcgatctcctgacctcgtgatccgccctcctcggcctcccaaagtgctggkattacaggcgtgagccaccgcgcccggcgtgttttcatttttaaagatatgagtgacttgagcatggatgtaggtagggtgaccaaccattccagtttggttgagactgaggggattgctgggtgcagcactttcagttttaaaaccaggacagtcctgggaaaatcaggatgaggtagtcacctcaattgccagtaaggaatagataaagtagtagaagatgaagatgcagttgagaatagggaaaattaatagaaacagtcctcaagtaggtgggagagatgatctggaaccatgaggggctaatgagactagagaggtagtaaggtagagaagaggtggatataggcagattcagatgg

SEQ ID NO: 540212 - DNA, 540 bp, Homo sapiens
tgacttgagcatggatgtaggtagggtgaccaaccattccagtttggttgagactgaggggattgctgggtgcagcactttcagttttaaaaccaggacagtcctgggaaaatcaggatgaggtagtcacctcaattgccagtaaggaatagataaagtagtagaagatgaagatgcagttgagaatagggaaaattaatagaaacagtcctcaagtaggtgggagagatgatctggaaccatgaggggctaatgagactagagaggtagtaaggtagagaagaggtggatataggcagattcagatggtgaaaggcccagaaaccattttrtctttgaatttggcgtgtgtgtgtgtgtgtgtgtgtatcatattccagagaaagaaatccactttatattatgacattgtggctttacacacacttacaccccacatatttggcactgtgtgtgcaaggttgctaaggatcttctagggatgccttctgatatttctgttctatttcctcaaggaaaaagactgcaggctatagccag

SEQ ID NO: 540213 - DNA, 414 bp, Homo sapiens
atgactctaatgggacagatattagtgacagacagataggaaaacagtgcattagggcattggaataagagggaagatgggtagagagcggtcttgatgaatttgaaatagctgtggggaaaggaagagtttatcaaacatgcagaagagggctgttggctcacctgatagtccgctgacattagaggacatggatttacggtggtaccacttcacagtatccatggtagaatgatggtacttcaggagctttggtctctgtaagtcctaggaatgaagacaatgagtctggytttaaagatttttttaaagttattctcctgttattgcctgctctcatgctgagctccaagaaaaagaataatatgacacaggttggtgtagcttatcagtcctttccacaacattatatct

SEQ ID NO: 540214 - DNA, 522 bp, Homo sapiens
tattttgattttctttctctaatatctagcacaatgtcctgcactttgtatgctccaaacacataaagacttgtttaataaatagaaaaagaaatggataagtgttgccagccagactgtatgacaggtgcagaaattccccactttcaaaaactgttggtaaatatatttgagcaaacactcagactcttccctggcgatcctaawatactagactctacaatggtttttgccctaataagaaaagagttccttttcggaagacctttaaactgcatagattctcattttctcttctgaaagcatttcgttttgtctttgggactctcctgtagctaactggagagaacaacattattctctccatacccttaaatgatgtcagtgtttcatgaattttcttttctaaaaattatactacaatatgaacacattttagtagcattcacttataatccaagacattttgcaatccctcctccgtttttccatttttcattgtacatagagctatatgaggca

SEQ ID NO: 540215 - DNA, 682 bp, Homo sapiens
tggctcttctgtctttctctaacctcactgcccacctctcccagagtgactcctctcccaacaaactggttggtctgttgagtccccaaaacgccctgccctggaatgcttgtttccactcccttctttgcctatccatacccagcccatccttcaaagcctcataaaccctctagggcctctccatctccaatctcctttctctcctccaaagtcaattaaaaactgctggttttaatggtttcctctcatggccctcgggtgatttaggaccacttgtgttgctcttgctggtttgtccaggcacctgtggcagcacagaagggcgtagaggaggaaaggggaaaaccggtcctgaggaggaggagaagatgctgagataccagctccttaggctcagccccgcattctctgggcccttcccatacaggtctgcctcagtacacaggctaaatttcctcttccttccttgtctttccctgcctctctttctctctaaaaactgctagtttttaattgactttggaggagagaaaggagattggaggtggagaggctagaatcacacactgattctagcacacactacattgcagcattgagctgtcttttytatgtgactatttcctatctccccactgaattagaggctctttgaaggcaggaacaatatctcgtgctt

SEQ ID NO: 540216 - DNA, 311 bp, Homo sapiens
ccttttccatgacactatagaaaatcagcagagtcatcagtttgatggttcccacaaagactgcttggggttgacctctgcaaagctcccttgaatcttgcttccagtaacccaacctcttcagccctcgccagcccccaaccccctggcaacacaaaacacaactcgatttcctgaagctgaagctgcccctttattccttgttggtctctgaaagcaaaaaaaaaaaaaaaaaaaaaaggaaaaaaaaaaagaaactatcacttttgagctattgtcttaagagartaataagctttgtgttcctccag

SEQ ID NO: 540217 - DNA, 526 bp, Homo sapiens
gctgttttgcagtcttaaggttgagctcctgcagctcggggctttattgccaagcaggtgaaacacagagaactgtgttttatggatgggtgggatgggcgtaatgattcaagctcacagaatmcaggtgacctaaataggctatgcaaaattttcaagaggccaaggtgctggtgtttacagaggtcttatctttaggaaaatacagacccttttacaccattaagccttgcctgtctgtggattttgtacatggacctggatctctgagtcggaagggacttacaaagaccacctggtccactctcctgccttcgggtagggaccaatttgcataacaaagagtataggggctttggagagatccagtcctgactccatcctactagctgtgtgacctctgagctttaatttcctcaatgtaaaatgaggacagttctggtaccggcatcataagattacagtaaggattaaatgacataattcattattgaactgatatttattgaatatgtactgtgtgcca

SEQ ID NO: 540218 - DNA, 473 bp, Homo sapiens
gatcaggaaggtatcagatgccttcactagctgtcactaacacctgcctcctgaatcctgatcggggagatggtgtcatcgggccctccacataaaatatttagtggcacttgcttcccaaagaggcaagcgtggcctctccttggcatcaggaacgctccgagttacatgtgctgggagactctcttgttcaggcgagagtcctggagcagcatacctggtttgagacttggagtaggagagagggaaactggtagaacagagactaggcaagttttggctcttgagaatgcatgtgacaagtgacttcatgcactaaacagagagggatgtgacagaaagaagaaagcatcattattaagagaaaactcctgaggttgacactagcagaaaattggggataggaggaagtcacactgggtatgcaaagtcaaatgcatgttkgtttaccagtgtctaccaaactgaggatg

SEQ ID NO: 540219 - DNA, 650 bp, Homo sapiens
gctctcaggtctccctgggtttaatctagaaattaaaaaaatagtgatttcctgatattaccctttaaataagggaacaatttaaaaatataatattaaaaaacttagatttgggagctaagctacaaggatgccaaggcataagaattatacagtggacttcggggactcgaggaaaggatgggagggggatgagggataaaagactacacattgggtacagtgtacactgcttgggtggtgggtgcaccagaatctcagaaatcatcactaaataacttcttcatgtaaccaaacactacctgttccataaaatcctattgaaattaaaacaaacacctagagtaaggtcaataggaagagcatttcatcaggaattaataaatctaggtctaattctaccattgacaatctatgttgggcaatttatttccacctctcaaggcctctattgcaaawtgaaacattcaaattagattctctctaataccccttccagttctaaaattctatgatccagatatatacatcatataacataatgtatctttcatttccatttttctcctctaagaaaagactattaactgtttaacttaaggtctctgggatgttgaaaagccccagggcttaaggaacaattttcttca

SEQ ID NO: 540220 - DNA, 677 bp, Homo sapiens
actgaaatgcactgggaagggggacttagatactaacacaagttcaattcaagaagcatttattgaaccgtcctcatgagccaggtcagggtgttcagcactgagcgtgtcaagacgaagacacatagcctctaagtgtccaccatctacaatagctaatgtttaattgtccttaaaagttgaagaatgttgactggattgtctgcaaatcagtcatgtgagtagtgttaatctaatgaagaagaatcttaaaagacaaattctccaaatgctgctgctcctgcatcctgctgctctacctgctgtggggaggaggtgagtggatgatacccagcttcctttcgtggcaacaacacttaaaaagtaaggtgaractttgcttttctagagagtactgagatggtcaagatatgcactgttgatgggctaattttcagtgttcatagcacagcacataatgccaaagtggaacacagtgagaaagagattcatgccaatcccttttgggaacaaatgtctgaaaaatcacaagggtcactggctctggtctcgcttggttctgtcactgtggggaatgggggatggaggagtgaggaaatacgccaggattgataatggtcagtgaaatgccttgcccatctaaagcactgctcccctcccccttcttttccttctta

SEQ ID NO: 540221 - DNA, 697 bp, Homo sapiens
ggaagaaatgattcctctttaccctttctatacctttcagtaaggaaaccaaagcattgtggcatagtagaaagaacactaaactagaaatatttttttacattttggcctgactttacaagttacaggctgtgcaacaagccccttcacctgtttggggataattgtttttttatatgttgtgtggtagctgagttctgccacatacgctatctatagcttatgctgtctatagttctgtggtccctggatcccttgtctattctctgtggaagttctttgtgaaaatattcatctctagtagctgttctgcagtgaaaattattgaaaaaaaaatgattctactctttctcttagtgtgtaaacagatattggttttcatcctttgaactagggggtgcgaaattttaaaccctgtttccattagtttcaggagatagtttgtcctttattttaggaagcaacctcattacttcactgccagctgtggaggctttcttgttctccagccttacattttgtttgacatgtgtcagctaggatttctaagacacatgatagataataactgttccttcctttgcaattgaaatgcctccccagttattcatcagataatttacctagtttgtaatgggtctctaytgaggctagcaacaatgtcaattaattaaaatgaaacaatcagccaataaca

SEQ ID NO: 540222 - DNA, 539 bp, Homo sapiens
actcgctcttctgagttcacgtagcactactttcttaaacaccactttctatcttgtattataattgtttacgcaggactcatttcccttactagatcatatcctcactgaagatgagatctgtgtttgattctccactgtattctccaaagtgcctactacaatatcttgtacataatacagtttgagtatcccttatctgaaatttttaggaacagaagtgtttcaaatttctgattttttcagattttttcagaatatttgcataataccagttgatatctcaaatccaaaaatccaaaatatgaaawgttccaataagcatttcccttgaagatcttgtcagtgctcaaaaagtttccaattttggagcattttggacttggggatttgggatgctcaacctgtatgcagaaatatttgctgaatgaatgaatgagtgaataatacagactagctgggatctgaatcttaggacatgctgatgttcgtaaagtgcttgtgatacaagctgtgttcacaaggccttctatttctgc

SEQ ID NO: 540223 - DNA, 624 bp, Homo sapiens
actttttacatctcttccccctcaggccaggcagggtgctaagactggcaaagggcatggtggtggtgtctgaaatgccttcctttctttcccccctttcttacaggcaggctcctccatctctcactctccgtcaccttcaaggcctggactttctctgggcacatcagttactccatcttgaaagtagctcaggtatactgtccacaagtctagctcttccacagcacagtgtggaggccacacctctgatttaaggtaaggtttatcataactcttcacagtcttaaactcaggtaaaactgcacttagcacttggcaggagtggcccttgccctgggacctgccctttaaggggtggcaaggctggaggagggccagagcaatatctgttaaagtcaatgactcatggcagggtcaacgagtccaaaggatcaagaggttgcactagaccagagctgatacctctccccgmacttctagaccatgctttagttgcccaggactgaagaattccctgtccatactgcccctcgcctgcttttaggtacatcttcctgaaggtgaactgagacattgacaacgtgcaagatgtggccaagtggtggctgtttgtggggagtt

SEQ ID NO: 540224 - DNA, 463 bp, Homo sapiens
ctaagcccacccaggggtgggtgccggcccctcctcccgattccaggctggggaggagggcagggtgaggttctggccttcctttctgtaaatgctggacaggacaaaagattcaccaaggactccaggcaggtggcctggaaaagagggtggcgctggcatgggagggacgaaaaccctttggggactggctggggcaagtctggagccagggaagggacagatgcctgggcaggtgggggcgggggtcggggggcaggcgggagagtggggagaatccctgctagggtgcgtctgcatctggaaaagcagctctgccccagcaaggcctggggcagcgggatcctgggggcctggggcaggatgggtggggctggtgctgagggcatcttcctgtctcccagtacctggggccaggcaggagaagggagcatggctytttggggtggctgcagcagcctgg

SEQ ID NO: 540225 - DNA, 547 bp, Homo sapiens
cccttcatcttctgcagaagcctggattgtgcggaggagggagcattcccaaaggcgggtgggggcaggggcggtgcccgggtgacagcagcctccccagcttcctggaactcyctccacctgcctgcagacagaccggcagggcaggctggctccgggaagtgaggcacagggactcccacagcccaggcccagaccgtgggggcggggtggccgcagccaaaccaggctgctccccaccccatggggccccaggccaccaggatcagacaggggctgtgcctgcaggaggcagagggctcggggccagcacccactgtgatctggcctgacccgtccttgcctctgcctcttaccccgggcccttctccctggagagtggagggttccggctgttatatttgtgcttcctccggtgtctgcctcaagtccggcccgggccctgacactgcacctctggctgaccccatgctctctgggaccctctgtccacgtccctcctccggggtggagacagcggggggagggcaggacacaagaatgagtc

SEQ ID NO: 540226 - DNA, 576 bp, Homo sapiens
acgccacggactggatctgggccggcctcgacccggacacggactacgacgtggcgctagtgcctgagtccaacgtgcgcctcctgaggccccagatcctgcgggtgcgcacgcggcccggtgaggcagggccgggggcttcgggcccggagtcgggggctgggccggcccccacgcagctcgccgccctccccgccccagaggaggccgggccrgagcgcatcgtcatctcccacgcccggccgcgcagcctccgcgtgagttgggccccagcgctgggctcagccgcggcgctcggctaccacgtgcagttcgggccgctgcggggcggggaggcgcagcgggtggaggtgcccgcgggccgcaactgcaccacgctgcagggcctggcgccgggcaccgcctacctggtgaccgtgaccgccgccttccgctcgggccgcgagagcgcgctgtccgccaaggcctgcacgcccgacggcccgcgcccgcgcccacgccccgtgccccgcgccccgaccccggggaccgccagccgtgagccgtaagccggcgtccccgcccagccgagagggc

SEQ ID NO: 540227 - DNA, 422 bp, Homo sapiens
cacttgggagcctgggctctggggccagactgcctattggtgttaaattgtcactcatgggctctgtaacccaggaaaagttacttaacctctttttcagtgagcagtccatcyagagcttcctggggtcttgcagctaccacttctcttgttgccagagaagaaaaatatccctatctgtggggcctctaatcactgttttgccctattctggaagaagacacattgtgtgggactctggagtacctactcaattgaaatgaccatgaggagagcctacagtgaagagatgaatctgactgacattggggttatgtgctatgagcttatgagcttttggtgagaaatctgccttcaagattacctcacctagttagacctacagaggcatactctgcaagaatggggacgacctggagcat

SEQ ID NO: 540228 - DNA, 506 bp, Homo sapiens
tggcccttaatgctgcatccactaagcagtttcagatctcactctctctccttaagccttttactgtcaatcacaacagaagaccttacttccaacttaggaaagaagagccattctgaatttgctctggccaggtcttttaacacaattccatctttatagctcacaaagagtctttcctttttgtctcagaaaaagtgtaccttctcacagaaaataatttcttcatatgttcaatgaacsctgtcttttttcaacagcttcaatgtctcccctcattaggttcttcccttctttcttcaaatatgcctttcctatcttgaaaatacatcatcactttaaaaagttgagattagaaaacaggtagtcttctcccagagcccttgattgtatctgccattttacaaagctgtatgtgaaatctagatggagattctttcttctttcttccagctctttaatcataaagtatacttttatagaggcttaaaacacatgaaagcaaa

SEQ ID NO: 540229 - DNA, 504 bp, Homo sapiens
cttgttccagtaatcccacaagtcctgactcagtaaagtattttccagagcagataccttcttcatctggagataccacatcatctgagaccgcagattcttctaaaacattagatgaaatattctagggaaaaaatatattgaaaaggtttttgaaacagaattttctagcataaaaatgtataagaagaaataactgaagatgaactgtaactatcaggttaggttaaaaaaaggagagtgatataaaggtaaaagataaayctctaaaaactttctgtattttgaagatgataataaaatgaaaacaccattgctagataacttttctcttaataaaaagttgtatgaaagaaaattaagaaaaatcatgggctaaaggaaattgtaatataacataagacatctaaggagacatcaatagtctttcttatttatttaattgatcttttcaaaactctctgtaaaggaaaaagggtacaaaaatggtctcttgacttatct

SEQ ID NO: 540230 - DNA, 643 bp, Homo sapiens
ctggatcttccaggctgttctttgttagaagtgatttctttgaactgcrtgtggttagaaagacagtaatttctgagctgcttcttgttagaaggaaagttttgccagggtctctttcaccctaactatctgcctaaataatttctttctatctcctgtatcacttgtggaattaggaggcatcactgtcatggtatattgattttgtttaccagccaggaagtaccactgagcttccatatccagaatttttcatgggcttttgctatgtaggtatgtttgatttaatcattggctacaaggctgaattcagtgtcctacctctctactttccccggaggtggggctggctcaaagccctaactctgtaatcacagggttggtctttctgatgaccagcccccattatgaggtatctgtttagcatacactcaggtgtaagccaacagactaataaataacaattcataatttatgtaattaatcctctatcgatgaacatttcacttgcttctgattttctgctatgtattaacagtgccacagtaaacattcttctacattccaaaaaaaaaaaaataacaaagacagtcctattgtcagggtgtaggtacaagaatttacttttcctctcaggcatcag

SEQ ID NO: 540231 - DNA, 643 bp, Homo sapiens
ctggatcttccaggctgttctttgttagaagtgatttctttgaactgcgtgtrgttagaaagacagtaatttctgagctgcttcttgttagaaggaaagttttgccagggtctctttcaccctaactatctgcctaaataatttctttctatctcctgtatcacttgtggaattaggaggcatcactgtcatggtatattgattttgtttaccagccaggaagtaccactgagcttccatatccagaatttttcatgggcttttgctatgtaggtatgtttgatttaatcattggctacaaggctgaattcagtgtcctacctctctactttccccggaggtggggctggctcaaagccctaactctgtaatcacagggttggtctttctgatgaccagcccccattatgaggtatctgtttagcatacactcaggtgtaagccaacagactaataaataacaattcataatttatgtaattaatcctctatcgatgaacatttcacttgcttctgattttctgctatgtattaacagtgccacagtaaacattcttctacattccaaaaaaaaaaaaataacaaagacagtcctattgtcagggtgtaggtacaagaatttacttttcctctcaggcatcag

SEQ ID NO: 540232 - DNA, 664 bp, Homo sapiens
gtcattgaggaatcaactatagcagtggtccccaacctttctggcacaagggacttttttcagagggagtgggggcatgcttttwggatgaaactgttccacctcagattttctggcattagttacattcttatgaaaagaatttgtggctagttttaaaatactgtttttcactatactgaaagtatgaaatacttagggaaaaatatgaaaaaagatgtacaagatttgcataaactgtaaaacatggctgatacaagtttgaaagtacctaaataaatagggaggtatagattaggtgactaaatatttctgtcagtttttcaaaaatcattctataaacttatcatgattccaatcaacatataagcgtgcttctttatagaagttgacaagcttattttaaaatgtatatgaaaattgaaagaacttagaaaaaaaaatctttgaaaagaagaattacgttggaggacttatagtacatggtaaccaagacagtttggtattggtgtcaaagtatataaagaaatcaacagaagagaatagagacggtctaagttgatctccacatgtatgatcaatggattcttatcaatatcaggtggagtgatgttagcaagactggcagaataggagttgctcgtcacctcactgaagcataaat

SEQ ID NO: 540233 - DNA, 664 bp, Homo sapiens
gtcattgaggaatcaactatagcagtggtccccaacctttctggcacaagggacttttttcagagggagtgggggcatgctttttggatgaaactgttccacctcagattttctggcattagttacattcttatgaaaagaatttgtggctagttttaaaatactgtttttcactatactgaaagtatgaaatacttagggaaaaatatgaaaaaagatgtacaagatttgcataaactgtaaaacatggctgatacaagtttgaaagtacctaaataaatagggaggtatagattaggtgactaaatatttctgtcagtttttcaaaaatcattctataaacttatcatgattccaatcaacatataagcrtgcttctttatagaagttgacaagcttattttaaaatgtatatgaaaattgaaagaacttagaaaaaaaaatctttgaaaagaagaattacgttggaggacttatagtacatggtaaccaagacagtttggtattggtgtcaaagtatataaagaaatcaacagaagagaatagagacggtctaagttgatctccacatgtatgatcaatggattcttatcaatatcaggtggagtgatgttagcaagactggcagaataggagttgctcgtcacctcactgaagcataaat

SEQ ID NO: 540234 - DNA, 664 bp, Homo sapiens
gtcattgaggaatcaactatagcagtggtccccaacctttctggcacaagggacttttttcagagggagtgggggcatgctttttggatgaaactgttccacctcagattttctggcattagttacattcttatgaaaagaatttgtggctagttttaaaatactgtttttcactatactgaaagtatgaaatacttagggaaaaatatgaaaaaagatgtacaagatttgcataaactgtaaaacatggctgatacaagtttgaaagtacctaaataaatagggaggtatagattaggtgactaaatatttctgtcagtttttcaaaaatcattctataaacttatcatgattccaatcaacatataagcgtgcttctttatagaagttgacaagcttattttaaaatgtatatgaaaattgaaagaacytagaaaaaaaaatctttgaaaagaagaattacgttggaggacttatagtacatggtaaccaagacagtttggtattggtgtcaaagtatataaagaaatcaacagaagagaatagagacggtctaagttgatctccacatgtatgatcaatggattcttatcaatatcaggtggagtgatgttagcaagactggcagaataggagttgctcgtcacctcactgaagcataaat

SEQ ID NO: 540235 - DNA, 664 bp, Homo sapiens
gtcattgaggaatcaactatagcagtggtccccaacctttctggcacaagggacttttttcagagggagtgggggcatgctttttggatgaaactgttccacctcagattttctggcattagttacattcttatgaaaagaatttgtggctagttttaaaatactgtttttcactatactgaaagtatgaaatacttagggaaaaatatgaaaaaagatgtacaagatttgcataaactgtaaaacatggctgatacaagtttgaaagtacctaaataaatagggaggtatagattaggtgactaaatatttctgtcagtttttcaaaaatcattctataaacttatcatgattccaatcaacatataagcgtgcttctttatagaagttgacaagcttattttaaaatgtatatgaaaattgaaagaacttagaaaaaaaaatctttgaaaagaagaattacgttggaggacttatagtacatggtaaccaagacagtttggtattggtgtcaaagtatataaagaaatcaacagaagagaatagagayggtctaagttgatctccacatgtatgatcaatggattcttatcaatatcaggtggagtgatgttagcaagactggcagaataggagttgctcgtcacctcactgaagcataaat

SEQ ID NO: 540236 - DNA, 648 bp, Homo sapiens
tttgcaatataaatctagcctgaaggtccagctccccacatcagcctcgaggccttcacgtcaaattagaaagaacatttaaatcagaatatggctatgtgggaggatttagatttaatgatgattartaacaaatatgtaaggagttaacaaaatgtttctctaagtgtttatttttaacgaataaacagctttattgtttattgttctttcaagtcagcaatttttaaagtatgttgtgtaattaataattaattataaatttgttagcatggacttgggaaaataacaaaatgtgaatctcaggaaaaaatctttcctgatagaatgcccaacagggcacttactgccatttggtggcaatgcatactgattgcaggaaaagagcctacaggtttttttaatcctagttttgtatacagagattcatatttccacccactcttgtcctattttctaagacgatatggattttcaaaagctataaagatgaagactgcaatgttaactgattcaacaaatcattacagagcatctacttagtgtcaggcactattataggcactggggatacagagatggcctaaaaagttgatgaccatgctctcatagtatccaaattctggtaagaaaatgggcaatgaatga

SEQ ID NO: 540237 - DNA, 648 bp, Homo sapiens
tttgcaatataaatctagcctgaaggtccagctccccacatcagcctcgaggccttcacgtcaaattagaaagaacatttaaatcagaatatggctatgtgggaggatttagatttaatgatgattagtaacaaatatgtaaggagttaacaaaatgtttctctaagtgtttatttttaacgaataaacagctttattgtttattgttctttcaagtcagcaatttttaaagtatgttgtgtaattaataattaattataaatttgttagcatggacttgggaaaataacaaaatgtgaatctcaggaaaaaatctttcctgatagaatgcccaacagggcacttactgccatttggtggcaatgcatactgattgcaggaaaagagcctacaggtttttttaatcctagttttgtrtacagagattcatatttccacccactcttgtcctattttctaagacgatatggattttcaaaagctataaagatgaagactgcaatgttaactgattcaacaaatcattacagagcatctacttagtgtcaggcactattataggcactggggatacagagatggcctaaaaagttgatgaccatgctctcatagtatccaaattctggtaagaaaatgggcaatgaatga

SEQ ID NO: 540238 - DNA, 569 bp, Homo sapiens
tggtgtactcaacaatatatctagacgttcttcactgggagtcgccgaggtttcctgcttcaacagtgtttgcatgtaacacagtgctggtcctctatagtccacatcccatcccacccctgctgctcacagtcagccctcttcctcctcctcaccaatccctcatacatctccaattccccttcttctccakttccacacagccgctgccacctctccttagcctccatttttactacatccccctttcatgttatccaccactaccatactattggagggtcttgactgggagtcatccagattcttggcattttgaacaaagaattggacaaaatgcacaagcaaagcaactaaaggatgaagcaaggaaaggacagatttactgaaacaaaagtacactccacagagagcaggagcaggctgagcaagcagttcaagagcactggttacagaattttctggggtttaaatactctctagaggtttcccattggttacttggttacaccctttgtaaaagaagatttggcccacgaccagtctgattggttgtgggaggggaccag

SEQ ID NO: 540239 - DNA, 422 bp, Homo sapiens
cgctcccagccctgcttcccctcccagcygccagccaggcgctcacagtgacctgcccagtctgtcccaacactgcccgattcactctcacctctagcctgttgagcaggagtatggctttcactttaagaaaagccaattatgagaaatccaaacttaggaaaccataacgaggacaaagggattcacatgacatacaaatgggttctttgcaaaagacttctgatgatgcccatctgttgtgtaaaaagaggcacccttgggtgtagggatctagggtaaactctgagtgagtcctttaaaaagaaacgacttctcgtcagtagactcacagtgatgtgataacctgaaggtttgctggaatgattgattgtccccaaatataggaagtttccacaagaaagaaatgtttcaggctcttc

SEQ ID NO: 540240 - DNA, 705 bp, Homo sapiens
ctgtcaatcatttctcacctgctgtctctgtgggctggctacatttgcctgaatcaagcacgtcacacctttaagtaaccagagtcaatcagggtgtcctcatttgtcmgaggtctggatgtggttgagataaagcatactgatttgtggagtctctcatgatttctgaaaagtcaaaatcatacctgtctctccaatcccagcgtgggtgtcacctgttctgagaggttctccttggttcctttccctgtgcagatccctcacctcaccccaggctgaaaaggagctggggtagaaaggagctgtcctctccagtgtcctgtgatgctgtcccctctgctttgatctggcctgatgtaccaccattaattagataaaagcagctcctaacaggcccaaatcatggcctcttgaaaggccctctatctagtggcattattaataatcataaaaatgttttacattgacatctaggcttcacagcttttaaaactggaaaatggcatattctaggaggctggaaagcattacagttaggatgtggttctggaacccaaggattggagctggaaccccaattctaccacatgggaaaataccttgacctcatttacaaacatcatttaatatgtttgtgtaaacagttaatccctgcgcacatataaaatccaaaaggtacaaaaggatacacagtaaaaataatta

SEQ ID NO: 540241 - DNA, 476 bp, Homo sapiens
ctgagcatatagaaaataggtcagtgatgggacatgctcaggattataggccatggtgggagataagaagatctttgagacctgaacaacttcctccatgaggctgtcactcagggcagctcctgggtaagacctgggaaccatgctgttaagctgtgctgagatggagttagaggaaatgtggaggagggctttccagaaggcaggagsctggaagagggacttgagggtcttgaagaaaaggcatgtgggcaggagtgtcaggaggggcatgaggtaatgttcccagagtgctctgagccctctggttaaaggacatttaaccacagattattatactacctattatttgtgtctgtaataactgctatgacaatggatgctgcaaaggtcagccctggggcttctgttgtctgatgcacttagtaagggttgggggtggaaaagagttgatgaggcttgctattgatctaaac

SEQ ID NO: 540242 - DNA, 572 bp, Homo sapiens
accattccaacattttttgcctggctttcaacagtgggaacactaaagtgttctctggaggtaaaaagggagattctaccttgggaacgtcactgtggttgggattttagagaaaagagtgcgaaaataactccttatttttcttcctgtatttcattgagctgtggaattactggtttctcatagcttgtcttttctgcattacagcagtattatatattaggatagtgtgtgtcttttctctcttctcttttttttgcttttcttcacctgtctttttctttatttctctttggcagaaaacttttcacattgcagtctggtacacagaaacacacacagacacacacacatatttgaaacaatacttaaccttcctatttgtggcacactctgrtttttttttattctattcgatttcatttttaaagattatgctggccataacgcagatgaatgtcctgacccacagatggctcctgtttgaaaagtgttgtgttagggtacaattggaatggctggtgctcacaccaacctcttggtgatggcttccatcaaccatactccttctg

SEQ ID NO: 540243 - DNA, 590 bp, Homo sapiens
cctatttaggggaacaatattccattaaaattcacatttttggaatttgatttctttcttttaaaaatttatttattttttgcccttttccccaagttctgatggaatttggtttctgtttagtaatgtttgctagaatatgtacttttatatgaaacatttgcatatttgttattagtacgattaatcgtattgtcactgaacaaaaagtagaagtaaataattttgtttgacgggtaaacctcttccatgttcagccgatctttttttttaaaaaaaattattattattttccccagatcagagatgtacagcccatctttcaatgatgattctactcaactgctcctgtgccatctctggtccagaggatgtaattcctgctaacttgaaagggcaaaactgacaagtgcctatttcagtagcttattaccacttaatgacagaggatagcttccaggaaaagtactayaatacatcgaaaaggggacttttaactgtatctggtagaattccaaagcatttaacacccactagggtcaacgcggtgactcccatcctactgaagtgcagccacttctggcctggag

SEQ ID NO: 540244 - DNA, 651 bp, Homo sapiens
tctctctcccatccttcacattgttgggcgatataagattccaaacttttaaatttcagatcccattcactgcttggaatagtatccacatcgctttgagtactaattatctgtattcagctttcacctcttatccacatagagttaccagatcaaccagtttatgtacattatcagaaattcacaatacctgagaaagccagagtgtgtttcagcttatatcacatttctctggcaaactgttaacctccatgaaatatgtcttgtttgaagaaggtttttaaaagaaaaatttaaaagtttatttmctaacactgcatcattggcagctgttcaagaacacagttttgttgccctttttgttgtttgggttgcatacctgatacataaatactataataaaaaaattgtcattgctaaaataaaatgcaactgagaaagagctgagatgtgcttggattggaatatattgcacaaggatgctacttgatgcaattcttctgggtttgcatggagaatgctattttgacagagaaattaagtcatcatttactacacaatgatccgaagaaaaacgaacgttagatctctaaaatgcacgttgccgtaggaaatgttgatggaatcaatgaatcacctccctaacatgta

SEQ ID NO: 540245 - DNA, 643 bp, Homo sapiens
ttctatggaagaatgagtcaatgtttgtacaagtaaaactttagaaactgagggacagttatatatgaatttttggaaattgaaattctaggaaaaatcctcgtcttaaattatcctcattatttatagggtgctgcagttctcctgtggtgtgaaagcatatagatttttattagctctctaaactgagagtgagatgccatctgtacaggggcattgacagaatattattgattcygtctgtaataaagccaagtcagggcaactattgtgtgctgagccaccttgaacttccactgctgccaattgttttcctagagaattgggatataaagttgatccttattaagatttcaaattagcgtaggcttttttcttttcatttgttaaaataaactgcctctgtgtcttccacacttcttgacctgaccatcttttgcccttctttttctactaaacatatgaaatccttttaagaggaaccattttcacaattatgaaagagaacgaagtccctttacgttcataaaaacatatactattccttgggatagagtagtgaaactgaacccaggtcctgcgcaacccatgcctaccacaactgtgagatgttggtggaagctgtctgaatttttcctgagca

SEQ ID NO: 540246 - DNA, 523 bp, Homo sapiens
caaagcatgctagagaacagcgtcaggaagatggctttagtgaaataaagtatgctctgtaacaaattaaatgttaagatcagtttccaatcaattagtaagtacttatgaagggttaaccaactaactacatgtttcatttagtctaaatagaaaccgtaagatctgctttcaatgagctttcaacctagtttcagtatgacagtatagaatatagaatatagggtacaggatagtgcatatgtagccaccaggacttggaatccatgtataggaaccgttcacgaaaacaccacaaccactcctgcagtagtacatctgtgacttccatggtacaggcttggttttaaatctcactttaacacactctttcaatgatatttactgtgtgycctgctgtatgttagtttctgtggtgcacacaagtgatgcagcagtggaagtgaaatagatacaatccgtcccctcactgagctttacaggatagcacatgacacatatatgatcaatcacacaagtttac

SEQ ID NO: 540247 - DNA, 665 bp, Homo sapiens
tttcttttctcatggttaggagtagtcaatatagtaatttagaggatttttcagggctgatgrctgtccttagaagcttaggacccatccatgccctttgtgttttccctggtggcaaaatgcatacttttacctgtgaccaacaagggctgcctgttggaaaaaaggagtggtagaatggtgaagacgctggtaggagagggttatgtgtgggcagcatggccaacaattgtccatttctaaaatcagatgggcatggattcgcattccaactctgccacttacaagttgtgcaattttgaccaggcttaaaaaaatgctatctctattcctccaaactttagattttttagatagcagaagggagaattatttcttccccctgaatcactgaccaacaacactaacactgattcagaatgtagaatatactcggtgtttatctgctgcagaaaaactcccctggtatgctagctcctttactgaaactattcaggaaagtatcactaagcaaaggaagttaagaaatcattaccatactgtcatcatcaatgcattcaggatttgatctgcatttggtaaggcatctgtctttccagatttaacacaagccaccctagcagtggaaaaaaatagaaaacacctggataaccaaaaaggcctag

SEQ ID NO: 540248 - DNA, 665 bp, Homo sapiens
tttcttttctcatggttaggagtagtcaatatagtaatttagaggatttttcagggctgatgactgtccttagaagcttaggacccatccatgccctttgtgttttccctggtggcaaaatgcatacttttacytgtgaccaacaagggctgcctgttggaaaaaaggagtggtagaatggtgaagacgctggtaggagagggttatgtgtgggcagcatggccaacaattgtccatttctaaaatcagatgggcatggattcgcattccaactctgccacttacaagttgtgcaattttgaccaggcttaaaaaaatgctatctctattcctccaaactttagattttttagatagcagaagggagaattatttcttccccctgaatcactgaccaacaacactaacactgattcagaatgtagaatatactcggtgtttatctgctgcagaaaaactcccctggtatgctagctcctttactgaaactattcaggaaagtatcactaagcaaaggaagttaagaaatcattaccatactgtcatcatcaatgcattcaggatttgatctgcatttggtaaggcatctgtctttccagatttaacacaagccaccctagcagtggaaaaaaatagaaaacacctggataaccaaaaaggcctag

SEQ ID NO: 540249 - DNA, 663 bp, Homo sapiens
tgtttcacctggctgcatctagttagccatcttacccaaatcccaatacctttatttcaaagggaaacagttcagcagattcagggaaagagcactaggttgtaggtagcagcagcaagtgagtatctagcctcctgttttgtgctctgggtgaacatgaaggtaaacctactaaagaaaagctttcacaaacttgtgtttcttcctaagtaacaccttaattgcttgaaaatacaattttgtgccattcaaacattctctcatcctcaaaactcgaaagtatctttctcaggttcttaaaggaagaaaaaacaaattgagttaggaagtcttatagtagctagcttccaagatgaacaatgaattttactggttcaatgaatccagtgaatctcacttcttggtattcatacctttctttactcatttttcatattaagaagagctgacttgtataacaaataagatattgcagaaataaagatatatgatgtgtgacttccaagctaggttataaaagacatgtggcttccaccttactctgtcttataacacttgttctaagtgaagccagtcactgcatgatgakgctactcaagtagctgtatagggaagttcatgtagtaaggaactgaggcctcctgcccatagccagtattaacc

SEQ ID NO: 540250 - DNA, 572 bp, Homo sapiens
agaatgccctctattatggaggtttattgtttagagtagagatactatatgtaaaacctgtagcacagcacaagttatcaacaaatggaggttataaccaaaaatataaaatgtacatatataataaacataaatatatgcaactatatgtgcataatatataatgtagtatgtacttagaaaatacataatcatgtaatatgcccacaggtgctagcaaaggtcctgacatatagaacgtatttaataagtgtgtggtgaataagtttggcctactctctaggtctttccattttgtctttttgtcataagagaatgacaattcattgaaggcaaagactttaaatatattaatctttgtatttccttttttctaatgcctacataacacatcacaggcatttaataagtctttgttgagaaaataaaatcattaatcatctgaattctcatctacctacttgtcttagcatctagcccacctttcttcatttkgtttgtaatcatatcagtgagcaattcaaatacatgttccatagttggtctttttagttagagcacatatgtaaagc

SEQ ID NO: 540251 - DNA, 615 bp, Homo sapiens
aaagttaatgataaacgatgctcttaygattgtagaggggacggaagggaccatggcaacattccttagttaaatgacaccgatggaacctgcatgatatctgtagcatataattggaagaacaattgctattggttgtgcatccatagaggtattttgttttgcacttggatgaaaccactggtgtgcaaagtgtgaattaatatacctgtgagcatatatgagaggctaaggcttggtggatttttgttgttctgttcataattgaaaatccatacaaggagaagagaattttcattcggttagtgatcatgttgtgagccctgacgtcaaccagaaaaggtgattcaaaatcaatattgatggagcaccagtgaaatgtacaagcagaaagggcactgctatttgaataaaagcctttgctcctgaaggccaggcggcatgcagcctcacttacagagcacagttggaagtccccagtatgcctccaattgtaattcagcactaaggaaatagtggaaattattaattcagcaacattataacaataagtgtacttcttttcagaggatttttaagaagcaataagctgcaagtacaaaactgttcttccac

SEQ ID NO: 540252 - DNA, 610 bp, Homo sapiens
taatagagcagggaaccagttttgtttcattatcttactgcacagcctagaaagggacttgtgcagttaggaacctggcaaattcttctggtggatgatggtggcaagcactgaaacaattgcctaggacatgggcacagatttttctttcatgcagcttaatttatgacagcatttgagattggaggaaacgaattgctctcctcaggtgatttgcagtgttaaaggctacaggctgttttgaactcctcaaacagagatattcagtgcaactgctcagaacagttttctggttttgagaaaygttttctgtgacattcaaattttctccttgtcaatctgctatctaccatttccagtgcttgaccagatcaggatctatcaggaaactatttttatccttcttcaccatctacttgtaacaatgtactgttataaaaattcaggtctatcctcaaagttttattcaaaagggtcagaagaaaaatgtttcttagtgtatgtcaatttcgctaccttactttcttttcagaaattgagtcagctcatttttgatgaatgtatattaagatgtcctgttcttagccagcaatggtggtgcgcacgtgta

SEQ ID NO: 540253 - DNA, 557 bp, Homo sapiens
ggtaattttctgataaatgcacctgtatcatgcccccagtacatgagtcactgtaattttcctctcttctttattttcaaatggcttttctaccttagaggttctgaatcatcctctcacttgcaaatttgcaactcagtcaatatgcattaagatggaaattcattaatcatagaagcaataatctttagataaaaggcatttatttaacagaattttaaggggagaatyttaagcaggaaatgaaagaattttttattcttgattaaaagaataaaatagaaaagctgaaaatctttaaagtcttttaaaaagattttaaagacaaatttttattactcgttgattccttcaagcctggattggaaccacaagaggtcaaccacttcagtctcctgaaaaaacctaacctaaaccctagatgacattttgcagatctctgggaatgaaaatttaggttatcagaatgttctaaaactacccaggactaataataaggaagcaattattttttccttaattttaatctaaatcttacggtgaaaccattttcttga

SEQ ID NO: 540254 - DNA, 557 bp, Homo sapiens
ggtaattttctgataaatgcacctgtatcatgcccccagtacatgagtcactgtaattttcctctcttctttattttcaaatggcttttctaccttagaggttctgaatcatcctctcacttgcaaatttgcaactcagtcaatatgcattaagatggaaattcattaatcatagaagcaataatctttagataaaaggcatttatttaacagaattttaaggggagaatcttaagcaggaaatgaaagaattttttattyttgattaaaagaataaaatagaaaagctgaaaatctttaaagtcttttaaaaagattttaaagacaaatttttattactcgttgattccttcaagcctggattggaaccacaagaggtcaaccacttcagtctcctgaaaaaacctaacctaaaccctagatgacattttgcagatctctgggaatgaaaatttaggttatcagaatgttctaaaactacccaggactaataataaggaagcaattattttttccttaattttaatctaaatcttacggtgaaaccattttcttga

SEQ ID NO: 540255 - DNA, 557 bp, Homo sapiens
ggtaattttctgataaatgcacctgtatcatgcccccagtacatgagtcactgtaattttcctctcttctttattttcaaatggcttttctaccttagaggttctgaatcatcctctcacttgcaaatttgcaactcagtcaatatgcattaagatggaaattcattaatcatagaagcaataatctttagataaaaggcatttatttaacagaattttaaggggagaatcttaagcaggaaatgaaagaattttttattcttgattaaaagaataaaatagaaaagctgaaaatctttaaagtcttttaaaaagattttaaagacaaatttttattactcgttgattccttcaagcctggattggaaccacaagaggtcaaccactycagtctcctgaaaaaacctaacctaaaccctagatgacattttgcagatctctgggaatgaaaatttaggttatcagaatgttctaaaactacccaggactaataataaggaagcaattattttttccttaattttaatctaaatcttacggtgaaaccattttcttga

SEQ ID NO: 540256 - DNA, 532 bp, Homo sapiens
aggaactattagacactgcytaaaaaatggtggagggctgccatttacactaatcttttcttttccaaaaatcctctgcaaatccctgtctctcaacttgatgagcctccaatcttaagattgaaaatgacctcaagggtttatctcatttagcaacttgggacctttgaacattttcctaagccccctaatgtacaaactatcataatgccattgcttcaatatgcttcagggatacctcagtttggcccaatgatgctaatgctgtacccaaaggacagaaagaggagaggaaaattacttctgccattcattttcagcctcctgatgataaacttgaaaaaggtccagacaggatatctcctatcactgactggaaggaataatccgtgttcatcacaaatgtaggactgatggccatcaatgctgtcaaatggctacaatgaatgagctggccttaggcagaggtcaccctttttggtctctatctggtttcttcaggggtaaaatggaggaaacaagattaaatgat

SEQ ID NO: 540257 - DNA, 633 bp, Homo sapiens
gtagtcctttgcccatatataaaggggagatgaatgtttgggcaggaagagggacagaggggcaatgtggctgacttgtggtccaagatatactcttccactcttgggggactaagatcaacagagaaatatttctgtttagctggtttcatagtaagaaccacatatgatgagagactgtagttactatactttattatcatataatactcttatacacaaatatgagctgcatgccagaaagtctttgtattagtcaagattctccagagaaacagagacaataagattcttttccttaggatrtgtatgcatatagaaaaaattttttctatatgcatacacatcctattaggaaaagaattaactcacatgattatggaggatggcaagcctaaaatttagagtgtgggccagctggattgagacctaggagagctgatattccagttccagtaggaaggctggcagcctagagacccaggaaagctgatggtgcacataaaatctgaaagcagtgtgctggataattcattcttgtttgggcaggccagtctttttgttctattgcggccttcaacggattggaagaggcccacccacattacaaggatcagtctgctttatgcacag

SEQ ID NO: 540258 - DNA, 633 bp, Homo sapiens
gtagtcctttgcccatatataaaggggagatgaatgtttgggcaggaagagggacagaggggcaatgtggctgacttgtggtccaagatatactcttccactcttgggggactaagatcaacagagaaatatttctgtttagctggtttcatagtaagaaccacatatgatgagagactgtagttactatactttattatcatataatactcttatacacaaatatgagctgcatgccagaaagtctttgtattagtcaagattctccagagaaacagagacaataagattcttttccttaggatgtgtatgcatatagaaaaaattttttctatatgcatacacatcctattaggaaaagaattaactcacatgattatggaggatggcaagcctaaaatttagagtgtgggccagctggattgagacctaggagagctgatattccagttccagtaggaaggctggcagcctagagacccaggaaagctgatggtgcacataaaatctgaaagcagtgtgctggataattcattcttgtttgggcaggccagtctttttgttctattgmggccttcaacggattggaagaggcccacccacattacaaggatcagtctgctttatgcacag

SEQ ID NO: 540259 - DNA, 530 bp, Homo sapiens
tggctctgtaggtcatctaaaatgtctttgttggaaatattattttgggagtcttcaacataattgaagccaaaggtatgaataaggttgcctccagagaaaatacagaataaagagaagagggcctagaaatgatgtttaaggaatgccacactttattactgtgtgcactgctgtaaaattatctgtttttttaaaaacagcaatgctgtagaaagaggatcagggaagactttatgcagactgtgatcagacattggggctgagctttgaagtatgagtattatttccctagcttgtgaaggtaggacgagcaattcattcttgaggaaaaagtataagcaagggcagagaggcatmaaatgaaatggtatatttggaaaataagtaaatcttttactgcagccataaagactagtggaagaaaaggtcacaaagataaccagacaccaattatgggggactttaatctatacacaataagaatttgttgacatttttaagaaaagcaataggcagatttatatttt

SEQ ID NO: 540260 - DNA, 604 bp, Homo sapiens
ctgcaagaacagcaggtcaaagcaactagaggaaataagtcactccaagagataaaagaggtgaggagcaaggctgtgggctatctgtccaaaaccatgggcactaggtttttgtcatccctgaatatcttgccctactgagttctctagagaatatgagatgtgtgacttctggaaatgtgtcttactagggcacacaccatgctgacatattcatttcttcataactggaaaagtcaacgctctgacatggattttaatctgcagttctcaggagttttcccatagagattttgcaaatgatcaactttgattctcccaaacctgtgactctgccttcctaatagctagtactgaaagaaatgcacataagatcataagaattctgtgatttcattacttttaattatcagaacactaaaagtttgtcaaaggtatgttgattgtactggaaatttatataatattgaatgtgatatataggtaaatattatcttaaacacctaaatgtaggctttcaggaaagctcatatgttcacagaaayttcataaatgttaaagctgcctgtcatcttataaatgttttaaatgcagtcagagttcc

SEQ ID NO: 540261 - DNA, 349 bp, Homo sapiens
gtatgtggtcctccaatctattgtgatactttaaagaggggttggacaaggcatgggtggatgtatcatgactgtacttctgaaaatttattctaccttcctgcccctttttactgtctggtagcttctaatttctactggaaaggaggaggtaagkccttctgtgaagagtggggaacatatggtgacgttagagatttaagaatgcaggtttgaaatagctgctgtggagactgaaagaaaggcttatctaggggaaaaaaaaaagaaatattctcagacaacggtgagatgtcctttgaggttggagaccatgcatttaatttatagtgtcactgattttcataat

SEQ ID NO: 540262 - DNA, 583 bp, Homo sapiens
ctgcttttcccctgctcaccaattgaggtttctgtggaatttatgccgcagatggacataaacctttctgtggggtgcttggatgacaactgcactcggaatgagatgtaggtacccaacctaatgcaattgctggccttaaactgmcacatttaagaaagatgtttcaattaccagcctggacaaaagcctttctcctaattaaatttacacagtaactaagaaaagagaacagtgaggaggaacttagcccagggtgactctgtagcccctcagccttccccaaccattccccctaaagaggccccagcttccagatctcaagcatcccccagtcccctgaaggttaacgatgctgtttcctgctgaaccagccagaaacaactaacacgcaagtggatttatttttaccccaggctttgtcatctatcattactgaaaaactaagaggcagattttggctgaacagcctgcggaatattcaagatctccatgcagaatttggccctccgtctgccgcaattcatcttatttagagtggccttctcctccctgccaatgttcctcattagcaaggatatct

SEQ ID NO: 540263 - DNA, 583 bp, Homo sapiens
ctgcttttcccctgctcaccaattgaggtttctgtggaatttatgccgcagatggacataaacctttctgtggggtgcttggatgacaactgcactcggaatgagatgtaggtacccaacctaatgcaattgctggccttaaactgacacatttaagaaagatgtttcaattaccagcctggacaaaagcctttctcctaattaaatttacacagtaactaagaaargagaacagtgaggaggaacttagcccagggtgactctgtagcccctcagccttccccaaccattccccctaaagaggccccagcttccagatctcaagcatcccccagtcccctgaaggttaacgatgctgtttcctgctgaaccagccagaaacaactaacacgcaagtggatttatttttaccccaggctttgtcatctatcattactgaaaaactaagaggcagattttggctgaacagcctgcggaatattcaagatctccatgcagaatttggccctccgtctgccgcaattcatcttatttagagtggccttctcctccctgccaatgttcctcattagcaaggatatct

SEQ ID NO: 540264 - DNA, 572 bp, Homo sapiens
aaataggtacaccttaattagttgcaaagatttaaacaagtgtaggaaagctaggagagaaagctgtttgttactgttcattatgtattgtacagggygatgctgagattgagttattcttggtatgaataacttcctttgaaagttagaatgatagagttttagaacgtaagggaccttagattttaatccgtaatgaccaagaaaactgtgtttttaaaaattttttttttttttgagatggagtctcactctgtcacccagaccggagtgcagtggcatgatctcagctccctgcaacctctgcctcgtgggtgattctcgtgcctcagtctcacgagaagctgggactgcaagcatgcgccaccacacctggctaatttttgtatttttagtagaaatggggtttctccatgttggtcgggctggtcttgaactcctgacctccatccgcctgcctcagcctcccaaagtgctgggattatagacatgagccaccgcgcctggctggaaaactgtatttttgagcattaagtaatttcctttaaatttttgttgataaaggagagacc

SEQ ID NO: 540265 - DNA, 572 bp, Homo sapiens
aaataggtacaccttaattagttgcaaagatttaaacaagtgtaggaaagctaggagagaaagctgtttgttactgttcattatgtattgtacagggtgatgctgagattgagttattcttggtatgaataacttcctttgaaagttagaatgatagagttttagaacgtaagggaccttagattttaatccgtaatgaccaagaaaactgtgtttttaaaaattttttttttttttgagatggagtctcactctgtcacccagaccggagtgcagtggcatgatctcagctccctgcaacctctgcctcgygggtgattctcgtgcctcagtctcacgagaagctgggactgcaagcatgcgccaccacacctggctaatttttgtatttttagtagaaatggggtttctccatgttggtcgggctggtcttgaactcctgacctccatccgcctgcctcagcctcccaaagtgctgggattatagacatgagccaccgcgcctggctggaaaactgtatttttgagcattaagtaatttcctttaaatttttgttgataaaggagagacc

SEQ ID NO: 540266 - DNA, 572 bp, Homo sapiens
aaataggtacaccttaattagttgcaaagatttaaacaagtgtaggaaagctaggagagaaagctgtttgttactgttcattatgtattgtacagggtgatgctgagattgagttattcttggtatgaataacttcctttgaaagttagaatgatagagttttagaacgtaagggaccttagattttaatccgtaatgaccaagaaaactgtgtttttaaaaattttttttttttttgagatggagtctcactctgtcacccagaccggagtgcagtggcatgatctcagctccctgcaacctctgcctcgtgggtgattctcgtgcctcagtctcacgagaagctgggactgcaagcatgcgccaccacacctggctaatttttgtatttttagtagaaatggggtttctccatgttggtcrggctggtcttgaactcctgacctccatccgcctgcctcagcctcccaaagtgctgggattatagacatgagccaccgcgcctggctggaaaactgtatttttgagcattaagtaatttcctttaaatttttgttgataaaggagagacc

SEQ ID NO: 540267 - DNA, 439 bp, Homo sapiens
tgctttcaagaggttcatgctaaggagcgggccctggacttccaggctagctggaattctccttgggtgatgctcagttttcttatgacccaggttagaagattcctttagtctttacctcttccaaaagaaatctgaaactacagtgctgagttctttgtcttcctgttgcctcagtgacagactgctttttgcaaaggtggcagttttgtgtgaytcctcatttagttacgtgtttccttggtgtagattctagtgcacaccatcaacaacttatgttaaccagcagtgtataagaaatgagctccagtaactctctactatttctaggaactgaggacacaatttaaggtgctaacagtttttacagcatttgtgagaagagccccacccacccccaacttaagagtgttgtcaaacaatatatttaatggagagc

SEQ ID NO: 540268 - DNA, 489 bp, Homo sapiens
ctacaacttgtattgtaagggcaaccccatgcatgtgccctgtatacacgcctatgttcacatacacacacacacacayacggctcatactggaagagcactcccatgggcagacatcatatacagatacactcacatatgctcatacatgcacacaggtgtgcacacacatgggcaatactgggagggcaccttcacatatatttgccatgtaaacacacttgcacacctaaatacatgcacaagaatgcatgcacacacgagcacacatgtacatgtctgcacacatacatgtaaaacatgtgagcttactcagacacacaaacatgtgaactcacgcatacatgcacagatgcgaacatactctcacacgcatgtgcatacatgtgcacgtgtgaaaacatgttcacaccatgcacatatgcacatatatgttcatgcatgtacatgtacatgtgtgtacacacaggaacacccacacaacagatc

SEQ ID NO: 540269 - DNA, 489 bp, Homo sapiens
ctacaacttgtattgtaagggcaaccccatgcatgtgccctgtatacacgcctatgttcacatacacacacacacacacacggctcatactggaagagcactcccatgggcagacatcatatacagatacactcacatatgctcatacatgcacacaggtgtgcacacacatgggcaatactgggagggcaccttcacatatatttgccatgtaaacacacttgcacacctaaatacatgcacaagaatgcatgcacacacgagcacacatgtacatgtctgcacacatacatgtaaaacatgtgagcttactcagacacacaaacatgygaactcacgcatacatgcacagatgcgaacatactctcacacgcatgtgcatacatgtgcacgtgtgaaaacatgttcacaccatgcacatatgcacatatatgttcatgcatgtacatgtacatgtgtgtacacacaggaacacccacacaacagatc

SEQ ID NO: 540270 - DNA, 505 bp, Homo sapiens
tacctttaatgctgcaacatggctttacttctttttccttttttaaaaatcgagagcactgtgaaatataacacaaacccggtgtattctgaagttggtgagaaaattgcttctctagaactaaaagtagaatggccttggtccctttgcctcctgctgacctgttggaagaaggaaggaagaggaagggaggggagagggggaggaggggccggagggaagccaggggaggtttgaggggcatyggtcttgcccagctcttcgtcactcccacccttcctatcatctgcactcccatgccccgcctgcctcagagggccctcactgtggctggtcttggcatggggtgctatggccactcactttgaaggagagacctggggcaacaactcatgccttcggcttggccaagtggacctttccttcggagtcagactctgagcactgatgctgtcctgcctggggatggctggggccctgcctggctctccacaggcctcttggt

SEQ ID NO: 540271 - DNA, 505 bp, Homo sapiens
tacctttaatgctgcaacatggctttacttctttttccttttttaaaaatcgagagcactgtgaaatataacacaaacccggtgtattctgaagttggtgagaaaattgcttctctagaactaaaagtagaatggccttggtccctttgcctcctgctgacctgttggaagaaggaaggaagaggaagggaggggagagggggaggaggggccggagggaagccaggggaggtttgaggggcatcggtcttgcccagctcttcgtcactcccacccttcctatcatctgcactcccatgccccgcctgcctcagagggccctcactgtggctggtcttggcatggggtgctatggccactcactttgaaggagagacctggggcaacaactcatgccttcggcttggccaagtggacctttccttcggagtcagactctgagcactgatgctgtcctgcctggggatggcyggggccctgcctggctctccacaggcctcttggt

SEQ ID NO: 540272 - DNA, 614 bp, Homo sapiens
gtgtcttctactctcatgggctaactggatctctgcctcctcagtggttatctggttgaactccacctcctttctcaataattgtggctgcaattcctgcactttcttgatagcagtttcatcttcatgatgaagatagcgcaggcatcttcatgaaatcctgcatgtttgcatttcttgcactttcactttgcaaccaactccattgcactgaggctttatggataggacagttgcaatataaaacaatcagctaagatcaagccgtgatgacctgagtgtattaggcagagatggatctcagtgatgagcagtgaggcatgttagagtgggaattcaatttaggagtggtctgtacawgaatgccttttttccccaatatcaccatgtaactagggcgatacaaagagttaggatgtgggcagccctccccgctagtcccctctagtgctgagggtgatggtctccaaagaggcgcctcgaatcctacccctctgtatttgcatgctggactgcccatcagagggaggggcttatgcccggcccttgaacctggactggccagtgactgtctgactcatacagtcctgcagaagagatgttcccgccttcca

SEQ ID NO: 540273 - DNA, 613 bp, Homo sapiens
ctttgcatatcacacaagacagcaggtaataaggagggaagcaggactggcgactgatctgtcaccggcraggctgggattgtttccttcctttacctcctctaatcgcaccattgcagtgttgattcagaacacggcggcccatgaaaaatgtcaccgttctgtcgatggtgtggatctgctggcaattccagcaagcagtggctgcacataaagggtgataaggcactatatcctgccacgctcagcaggtttcccatttcctcctgcaattacacatcaaactgttttggcttcacaagcttctgcactataaatggcctggaggcagaaggccgcctggcacactgatgagccgggcgtcaaagctgagtgcagactcaggtgtgggggaggttgctgaaaaaacatatcgcccccttctctgcaagcacacacccactctgcagggccctgaaggcatgccctaaaaatcattctttcattatctctgcttagtccaattaacagagggttaagggaaacattactgactgttgttgcaagagagacggcaccaaaggcactggagagctttatgtctttgcctctctgttgtggtccacagataagt

SEQ ID NO: 540274 - DNA, 697 bp, Homo sapiens
cgttgaataaattttcgaagtttcaaatgtgtctgatctgtgagatggatataaaggtggtccctacctcaagggttggttataaagataaaatgacttaatttttactgagcacttagaacagtatctgagaaaagtgagcatttaaatataagctgtcattatayaagcttaccgtcataggtaagctatcgtaacttatgacggtaacataagttaccgtcatcttcgttaacatctttctatagtctagaaagtaggttctggactaatacaatatagttagataactaaggcaaactaatacaatacaattactaacctctatagaaggggcagagggagacatatgcactgtgaacatgggagaaatggctctcagtctgtgcacaattttccctggaacatagctggaaagctcgcctgctctcgctcactctctctcactatctctctctccccatcgacttagttaaaatctatattaaagtatacatatacatatgataaaatcatgatgcatggccagatggattttcaaagtgacaaacacaccatgttaccagcatccagatcgagaagagaacatcacatggaccacagaagtcctggacgcccatcccggcaccttccactctgcctcctatcatcagcacacctgtggtccgcgtggtaaagggcagtggtttgttcttat

SEQ ID NO: 540275 - DNA, 632 bp, Homo sapiens
gtgacaaacacaccatgttaccagcatccagatcgagaagagaacatcacatggaccacagaagtcctggacgcccatcccggcaccttccactctgcctcctatcatcagcacacctgtggtccgcgtggtaaagggcagtggtttgttcttattgaacactgcatagtattccatgctaggagtatgaattgcccacagtgtctttctcctattctactccttgtccaattgatgaatctaccacccattaagccagatgctttctggcttggggacataacaaatgatgttgccgtaaacattcttgtgtttgtcttctggtgcacacacatctgttagggagacatccacgagtagaatctctgtatcyctgttagggagacatccatgagtagaatttctggggcataggatacgcatatattcagctttagaagcaatgattctcccaaaagacagactagttcccacaccacctgctgtatgtcaggattccaggtgctgcatgtttctgtcgacacttggtagtgtctgatttttgcctttagataggctttgaatgaactcaccgtcccaagttaagaatcccagaagcagaaggaattcctacctggccccacttttcagca

SEQ ID NO: 540276 - DNA, 660 bp, Homo sapiens
atgatgcatggccagatggattttcaaagtgacaaacacaccatgttaccagcatccagatcgagaagagaacatcacatggaccacagaagtcctggacgcccatcccggcaccttccactctgcctcctatcatcagcacacctgtggtccgcgtggtaaagggcagtggtttgttcttattgaacactgcatagtattccatgctaggagtatgaattgcccacagtgtctttctcctattctactccttgtccaattgatgaatctaccacccattaagccagatgctttctggcttggggacataacaaatgatgttgccgtaaacattcttgtgtttgtcttctggtgcacacacatctgttagggagacatccacgagtagaatctctgtatctctgttagggagacatccatgagtagaatttctggggcataggataygcatatattcagctttagaagcaatgattctcccaaaagacagactagttcccacaccacctgctgtatgtcaggattccaggtgctgcatgtttctgtcgacacttggtagtgtctgatttttgcctttagataggctttgaatgaactcaccgtcccaagttaagaatcccagaagcagaaggaattcctacctggccccacttttcagca

SEQ ID NO: 540277 - DNA, 569 bp, Homo sapiens
cccctccctgtctttagctccatagaaatgagtaacatatggaagctgccactcatattccacagcacgtctgagacccatccacatggctggcaggccttgccgtcactgtcctatcatcccccatggaacatgccacactctgtttgccagtgcactgtgtgtggatacctgggtcacccctgtcctatcgtcccccgtgggacatgccacactccatttaccagtgcactgtgcrtggacacctgggccacccctgtcctatcatcccccgtgggacatgccacactctgttcaccagtgctctgtgcatgggcacctgggtcactcctgaccttattcccctgtgggacatgccacaccctattcactagtgcactgtgcatgggcacctggctcactcccaactttggactgttaggaggagtgctgctatgaaccttccagagcacggctttggctgcacctgggcatgcgtttctgttaggtcttgtgaggaagagagttgctggatccctggaaatacacacgctcagctttactggacactgccacatggtttcccagaa

SEQ ID NO: 540278 - DNA, 582 bp, Homo sapiens
atttcaaaccagcaattggaagaacccccgagatgtgcagcctctgtgtctgagcacagatatccacttctccccaaaggcagtgagtcaggacaaaactgtccgaagatttcaccccctcaaaaagatacccttcattaaaatgaatagagctgcaggccctaaaatcacacttggtaagctatgtcctctgtccctttctggagctgcggggagactcgcccagcgccatgctgtccacagggcgtcaaggggcgggcctgtgccaagtgccttcaatgggtctggtctgagcrgagctggggtgtgagtgtctaatgcacaccgatttcaaaagcttcctccaaaataaaaattttaaaaccatgtaaaatacctgattaatactctgagtatttttacacactgaaataatactgttccagcaatactaggttaaacaaactcgttcacgaaactgattgcataccacttcacacccattaggatggtcactatcaaaacacagaaaataacaaatattggtgaagatgcagagaaactggaaccttgggaactgctgtgggaatgtaaattgcgcag

SEQ ID NO: 540279 - DNA, 582 bp, Homo sapiens
atttcaaaccagcaattggaagaacccccgagatgtgcagcctctgtgtctgagcacagatatccacttctccccaaaggcagtgagtcaggacaaaactgtccgaagatttcaccccctcaaaaagatacccttcattaaaatgaatagagctgcaggccctaaaatcacacttggtaagctatgtcctctgtccctttctggagctgcggggagactcgcccagcgccatgctgtccacagggcgtcaaggggcgggcctgtgccaagtgccttcaatgggtctggtctgagcagagctggggtgtgagtgtctaatgcacaccgatttcaaaagcttcctccaaaataaaaattttaaaaccatgtaaaatacctgattaatactctgagtatttttacacactgaaataatactgttccagcaatactaggttaaacaaactcgttcamgaaactgattgcataccacttcacacccattaggatggtcactatcaaaacacagaaaataacaaatattggtgaagatgcagagaaactggaaccttgggaactgctgtgggaatgtaaattgcgcag

SEQ ID NO: 540280 - DNA, 539 bp, Homo sapiens
gaaagcacttccaggccagcggtgaaaggcaaggaggccacccaggcagggaaagggagcatgggccaggggtggggggcggggaagctctgcgaatggggaggggagcttccagatctgaggctgggatgggaaggggggccttgggtgccatgaaggatgatttaaaaccatgcaaagaccgggaagggtgtttgcagggaggtggccccccacaccaagagcctggaacatggaaaggaggagtggcttggggratggactatttcgcagaggcagaggacagaagcaaagcctaggcagggttctatcaacacagcctggctccttcctctggaaacagcccctcagggtctccctggagaaacactcttcccgttcccagggcttgaccctggggtttagtggggctgactctgcccctcctgcttaaagggcgatcatatgagccaggcctggccatctagaacattccatttcattggactggttcgaaggaaaaacaagatgtccatgaggccggagagatgcagtcccaa

SEQ ID NO: 540281 - DNA, 550 bp, Homo sapiens
gttccaagctaccaacatgcccttgctcaccatggtcagggagggactgcacagacggctctggggagtcaatgagagccagctccagccatcatgggctcatgctacggacccagagtttcttgctagagtgtttgctgaagttcactttggtctgttagcacagactagactgaagggcagaggccctgctctacccaccatgatctgggtaagaaccaggcaaggggcagccacagaacagaaactggctggtgcctgcagaggagggttggtcatatcagtgaccaagaggcctccttccttggctctgcccatccagagtcggccttgaycctggctcaagggcagggtgtccttctggatgaggcagcagctctgcatgaccagtgcccacagtcaccctgctgaaatcaggccttggtctctctggcctcacccagtcccctgttgggccatgctaaggagtggatacagggcagccccactgcctgtgggcactgatcggggcctggctggaggcttctgtgcactgtgcccatgccggcca

SEQ ID NO: 540282 - DNA, 584 bp, Homo sapiens
ccagctcagctgcacctgcccagtgtctccttgcccagtgcccagctcctgggagtccaagctgtactttctgatcaacggcatgtgaaaagacatggtcctttcattaggacttaactgaggttgtcagttacctaattacttcaataaaatataattaattaagaataacatgtggagatatttacatgagctggagatcacacactgcaatttgcagactttttcctgaaacacagcgtcctgccagacattttctccctgtatgtagacaaaggggacaagctattccatgttaaagatgttgatttcccctctcagtttgggttttgggataaagacaatttaagtctactatctgtgccaaaaaaaattgtcccgtgcgaaatcaggaatacacacggagttcctgaggggaagtacagacccargaacacaagaggtgagcacagccctgcatgagcacacggccttctggagaataatgccgcatgcctgaggtccaggcagaaacaaagtcagggaaaaagtcccgtcctagtctcttaatccagcctgcatgttttccacgatgatttgatttg

SEQ ID NO: 540283 - DNA, 215 bp, Homo sapiens
tgagagatggctgtatatgctttaagacagsggctctgtgcaaatatccattattataaaaatccattctgtgctgtgtagctaggtgactgggacaaatgttacccagggatgtttccagcctccacaaacaacatctgagcaaccactgctggcctccgtgatacacctgtgaacaagatggttatagaagtccatcattaaatgcatgtgca

SEQ ID NO: 540284 - DNA, 215 bp, Homo sapiens
tgagagatggctgtatatgctttaagacagcrgctctgtgcaaatatccattattataaaaatccattctgtgctgtgtagctaggtgactgggacaaatgttacccagggatgtttccagcctccacaaacaacatctgagcaaccactgctggcctccgtgatacacctgtgaacaagatggttatagaagtccatcattaaatgcatgtgca

SEQ ID NO: 540285 - DNA, 215 bp, Homo sapiens
tgagagatggctgtatatgctttaagacagcggctctgtgcaaatatccattattatamaaatccattctgtgctgtgtagctaggtgactgggacaaatgttacccagggatgtttccagcctccacaaacaacatctgagcaaccactgctggcctccgtgatacacctgtgaacaagatggttatagaagtccatcattaaatgcatgtgca

SEQ ID NO: 540286 - DNA, 215 bp, Homo sapiens
tgagagatggctgtatatgctttaagacagcggctctgtgcaaatatccattattataamaatccattctgtgctgtgtagctaggtgactgggacaaatgttacccagggatgtttccagcctccacaaacaacatctgagcaaccactgctggcctccgtgatacacctgtgaacaagatggttatagaagtccatcattaaatgcatgtgca

SEQ ID NO: 540287 - DNA, 553 bp, Homo sapiens
gaaactgttgtccaggtaccttaaataacttgcccgaggccacagggaaagtgagtggagcaccaggacccgagatcgggcagtctgcaagcagagttgcccctcccagaccctctcaggactcccaggtaactcccaggggatgccacgacatgtcacgctgccaagatggggtgccctagtcaccctcaaactgcacctttcctccagtcatcaccttctctgcgaagccttccctgagtcctgtgcatggggacggcccctggtccagcttcacgcatctcctccacgtcacgctgcacagaactcaacttttccacatgcttctcccctttcagacagcgagctcctcagggagctastgccaacctataggtgctactgccaacctacaagccccaagctcagtgccagctctgtgacagtgcttgatagatgtttaaaaacttggggtccatgctctgtcaccatcacgcaggagccccgcgggctctgtatcgctaaaccctccacacccgccgtgcgcactgccagccacaccccacctctagag

SEQ ID NO: 540288 - DNA, 553 bp, Homo sapiens
gaaactgttgtccaggtaccttaaataacttgcccgaggccacagggaaagtgagtggagcaccaggacccgagatcgggcagtctgcaagcagagttgcccctcccagaccctctcaggactcccaggtaactcccaggggatgccacgacatgtcacgctgccaagatggggtgccctagtcaccctcaaactgcacctttcctccagtcatcaccttctctgcgaagccttccctgagtcctgtgcatggggacggcccctggtccagcttcacgcatctcctccacgtcacgctgcacagaactcaacttttccacatgcttctcccctttcagacagcgagctcctcagggagctagtgccaacctataggtgctactgccaacctacaagccccaagctcagtgccagctytgtgacagtgcttgatagatgtttaaaaacttggggtccatgctctgtcaccatcacgcaggagccccgcgggctctgtatcgctaaaccctccacacccgccgtgcgcactgccagccacaccccacctctagag

SEQ ID NO: 540289 - DNA, 553 bp, Homo sapiens
gaaactgttgtccaggtaccttaaataacttgcccgaggccacagggaaagtgagtggagcaccaggacccgagatcgggcagtctgcaagcagagttgcccctcccagaccctctcaggactcccaggtaactcccaggggatgccacgacatgtcacgctgccaagatggggtgccctagtcaccctcaaactgcacctttcctccagtcatcaccttctctgcgaagccttccctgagtcctgtgcatggggacggcccctggtccagcttcacgcatctcctccacgtcacgctgcacagaactcaacttttccacatgcttctcccctttcagacagcgagctcctcagggagctagtgccaacctataggtgctactgccaacctacaagccccaagctcagtgccagctctgtgacagtgcttgatagatgtttaaaaacttggggtccatgctctgtcaccatcacgcaggagccccgcgggctctgtatcgctaaaccctccacrcccgccgtgcgcactgccagccacaccccacctctagag

SEQ ID NO: 540290 - DNA, 291 bp, Homo sapiens
ctccactggcctctgctgcttcctcctcayttttagaatacacctgccacctgccaggtgctcataaatattcatggagtgaatgaatgtctccctgcaaggctatgcattatttgaatttaggatatctgtctgatttgtttcatctttgtgtcatcctcaaggcccagaaaaatcgttacattcataaggccctcaataaatatcgattgcgtgcataaatgcagtgaattgatgggtttattcatgatgtatcagattcatagtagttgttcaatgtagaaaaagtag

SEQ ID NO: 540291 - DNA, 620 bp, Homo sapiens
gctgtggaatgccatagttctatggtgctccagtaasgggcagtaggcgtgaatttctagacatcttgtcgaatatgcgaggacaaagtgaatgcttgtgttcccctttggaaatgccagactccaggaaagtagtcagtgaaaatagatgcttggagtagttgtgtacaagaggaagtggtgcatatcaaagtgcccttttctctgttgcctgagggctgtttctctatgtatgaggaccatttatcttttatcttgcctccatgtacaggtagcaagatccacagaaaacatcatctgttggattaaaactcagaaggcatcaccacacaaaacaggggaatgggttcctgacacatttttactctctttatttgaaaacccaatttggcttgaaattgaaccagttttatattctgctatgaatatggaggcttcagattaaaagaagccaacaaattaataactcaaccattcttaggtgaggaaaattctctgaaaaaaaataagggagcaggttatgacatagtaggagctcaataaaagtttgatgaataaaagaacgaatgaatgaaccaatgcacaaaaaaagaatgattttccagttgttcaatcaaacg

SEQ ID NO: 540292 - DNA, 620 bp, Homo sapiens
gctgtggaatgccatagttctatggtgctccagtaacgggcagtaggcgtgaatttctagacatcttgtcgaatatgcraggacaaagtgaatgcttgtgttcccctttggaaatgccagactccaggaaagtagtcagtgaaaatagatgcttggagtagttgtgtacaagaggaagtggtgcatatcaaagtgcccttttctctgttgcctgagggctgtttctctatgtatgaggaccatttatcttttatcttgcctccatgtacaggtagcaagatccacagaaaacatcatctgttggattaaaactcagaaggcatcaccacacaaaacaggggaatgggttcctgacacatttttactctctttatttgaaaacccaatttggcttgaaattgaaccagttttatattctgctatgaatatggaggcttcagattaaaagaagccaacaaattaataactcaaccattcttaggtgaggaaaattctctgaaaaaaaataagggagcaggttatgacatagtaggagctcaataaaagtttgatgaataaaagaacgaatgaatgaaccaatgcacaaaaaaagaatgattttccagttgttcaatcaaacg

SEQ ID NO: 540293 - DNA, 620 bp, Homo sapiens
gctgtggaatgccatagttctatggtgctccagtaacgggcagtaggcgtgaatttctagacatcttgtcgaatatgcgaggacaaagtgaatgcttgtgttcccctttggaaatgccagactccaggaaagtagtcagtgaaaatagatgcttggagtagttgtgtacaagaggaagtggtgcatatcaaagtgcccttttctctgttgcctgagggctgtttctctatgtatgaggaccatttatcttttatcttgcctccatgtacaggtagcaagatccacagaaaacatcatctgttggattaaaactcagaaggcatcaccacacaaaacaggggaatgggttcctgacayatttttactctctttatttgaaaacccaatttggcttgaaattgaaccagttttatattctgctatgaatatggaggcttcagattaaaagaagccaacaaattaataactcaaccattcttaggtgaggaaaattctctgaaaaaaaataagggagcaggttatgacatagtaggagctcaataaaagtttgatgaataaaagaacgaatgaatgaaccaatgcacaaaaaaagaatgattttccagttgttcaatcaaacg

SEQ ID NO: 540294 - DNA, 586 bp, Homo sapiens
acaagccagagaaggccttccctgtacacagacgaggtgtgaaatatcaaatcaatcacacagagaaaggactgcgattacaagaagaaagttccagcctggtgtctgtgaggcttccattactttttagcacyggataattcttccttttaaccaggagcctaggggcttcaggctcagaggcttcttcaagtcacctcatggagctgggatttcatcgtatcaatagctcttgtccactgtatttagttttacatttactttctcctcatggcaaagggatactaactgctttgccacttaaggtaatggtatataatctctttttgacatcacttattttagaatatgaatgtgatttgcttaaagaaaacacaaattaagtaagtggctgaaatttggtgagttgtctttattttctttcttctttgttttaaaaaaatgtgaacagaaatgcaaaatgtgtggagaggtcctccctttttatcatggaaacaattcatttggaaattcagccacttcctctacctagagcctggagtgacaaagaagtcaacggggaaagattctgaatgcgggagaggag

SEQ ID NO: 540295 - DNA, 586 bp, Homo sapiens
cagagatgcatctgttctgaatgatagagaactgcaacgttgatgtcaaagtgtaaacgtccgcttcagttagactcagtagaaactcatttagcacgtgttgaggaaccagctcagtgccagccagtatttgtaaatgtaaagaaccaactgtgatctcacatgrtccactctctctgaacaccataactaaccacaagaacacactgatgttgggcgtggtggctcacgcctctaatcccagcactttgggaggccgaggcgggtggatcaccagaggtcgggagttcaagaccagcctgaccaacatggagaaaccccgtctctgctaaaaatacaaaattagctgggcgtggtggtgcatgcctgtaatcccagctactccagaggctgaggcaggagaattgcttgaacctgggaggtggaggttgcatcatgccattacactccaagctgggcaacaagagtgaaactccatcaaaaaataaaaataaaaaaaaaacacacagcaaaaaaagaacacactgagactttttttttttcactgccagatggaaatagtgatgcacacatcatgctgttggga

SEQ ID NO: 540296 - DNA, 580 bp, Homo sapiens
agcctgccccactgtagggctgctgggaaccagtcgagactactggatctgccactgaagttacaggtcatcaggtcgcacttctgagcctcagcttcctcgcctgtgaaataggaatcagtcatggcaatgcccagcccagtcacaggtttcagtagatcaactatggtgagggctcaaccagcgccacccatccatgccccttggagggaatggttggttttaaggacagaacctccacatgagtctgcaaaggtttgtattaaccaggaggagggaattcatctatttgattgtccctttaagtgagcagggctggcttctgaatggatccaggatgagcaggcatctctgccactgtcccaccagaggctgctccaaaggagcgtcccagcaagggaggccatcgggttgaggatgagcaggcatctctgccactgtcccaccagaggctgctccaaaggagcgtcccagcaagggaggccgtcgggttgaggatgaacaggcatctctgccactgtccyaccagaggctgctccaaaggagcgtcccagcaagggaggccgtcgggttgaccaca

SEQ ID NO: 540297 - DNA, 551 bp, Homo sapiens
tatatattacaaggcatgcattttataatggccgaatttatcactttctaaaattatcactatagggattatttaaaaataatttcttgccacggtattgcccattttaaataccgtttagctatggattaaatttataaacattttcaagtttttgrtgacatggccattgattagaaacaacatacaggtgtagcaagggtaagttgagtgtgaccagccacatgcaaacatcagagcttgaatgattagatgtaacgtgtgacaagaaagaagcttaagcccatgtattcgatgtacaagaaagaccagcctcatttttacagtttcagctaggattttaactaccttctgagccgtccccctccctccttgcagacaggacactcaattcagtcattatagaggctctctactgcccctacccaccagcaccaaagcatagaatggctcttccttattagtagagtccaccctggttggcacccaaatgtctattgtcccaggacacaaagtccttggacacagaatggcagagtgcttaaaacaca

SEQ ID NO: 540298 - DNA, 516 bp, Homo sapiens
tggtagctattctcccctccatttggagaaagagaatctgatgagaaagagtgaggccaaaggatgtggggaccaatgaaggggtgtgcatcctggcagcctccaaatcctcacgtccagttactcctgacatccaattacctcccatccttctcttgcacaatactccctggatgcactgtcaaccgatacaccctctttggttagctagatggagctgggctgctatcactcccagctaacaactcctaatgaacacagagcattttctgtagttagcaatctttaaaacagttagtccttgtccatggtatttattcatragtctaacttttataaacttcagagctgcaggtaggcacaattgcaagtcccccggatggactagaatgaagcaccagcctgctactcaaggactaggctagtggtaatgtgtactgctgtaatcacgagtcctggaaaccaaatcaattcattcacttattcattcacataaaaaaattgttttccactgta

SEQ ID NO: 540299 - DNA, 538 bp, Homo sapiens
ccttgcatggcacggcacctggaccttcccttcctctctcctgctgtgtgtccctggcttgctgcactagactcttttttttttttttttttttttgagatggagtctcactctgttgcccaggctggagtgcagtggcactatctcagctcaccacaacctccaccacctgagttcaaatgattctcctgtctcagcctcccgagtagctgggattacaagtgcttgcaaccatgcccagctaatttttatatttttagtagagatggggtttcaccatgttggccagggtggtcttgaactcctgaccttaggsgatccacctgcctcagcctcccaaagtgctgggattataggcatgagccacagtgcccggcctgcccaggactctcttaccttctttctttctttttctgagacaaggtcttgctctgtcgcccaggctgcagtctcagtttcttaagtggccattcccacctcagagcctcatctgtttcctgcctcctcccctgctgggcaatcctgggctgccctgcag

SEQ ID NO: 540300 - DNA, 635 bp, Homo sapiens
ccttctcactgtgtcctcacatagcctctttgtgcacacatggagagagagatggagacaaagagaaagggagatctggtrtctcttcttcttataaggacaccaagcctatcagattaggtatcaatccttaagacaatttaaccttaattacctctctgagggcttcagcatatgaattttgggcagtgcaattcagtctataacactgtcctaaaataacctcttcatcttacatctcatcactgtccctcaaacttgcccttcctcctcttctctcttttcaataagtcacatcatccagtggctcaagccagaaacttgagagtcatccttgacttactctttttcctcaccttctacatccaagctgtactacttatctattgctgtgtatatctcaaaatatagcatctgaaaacaataagcatttattatctcactcagtttctgtgcgtgaggaatttaagaacagattagctaggtggttctgacttagaatgtttcatgaggtggccatcaaaatgtcagctaaggattcagtcatctgaaggcttgattggacctgcaggatcatcattcaaaattgcccacttagccattagcagggcctttagttcctcatcagctatagg

SEQ ID NO: 540301 - DNA, 642 bp, Homo sapiens
tatgccagaaggagtttgtcccagggtaccttgcaatagatgcaaataggaagaaactcaccatggcaaactgaagaaaagggaggcatgctgtgtgaccttagaaaagtctctctccctcttggggcctccatttctcagttttatagtgtgtaagtggagtttcatttcaaygatctccaagtttccctccagcccaaaccatctatggttctttcagattttaagcaggataccagtttccactggacagagtctcagatagctaccccccttaagaagatgacatttggtcccaatctttattgaggacccatttgtagtaatgctgctaggtctgagggacatagctagttttgaacctgtcccttgccaatgacccactaaatatatttccacagcaggatacattccttactagagatctgtctacaaaagaagagccatgttcacaagccattctactggataagtcacaccacttgcccccaaatatccaagtgattaaaagatgtgggaccactagccacagccggtacctgttgccacactcaatcattgggttgtctcaaccacatactgcagaagcaagagaccttgctacattccatgatccgtggacaccattatctcctggagcct

SEQ ID NO: 540302 - DNA, 622 bp, Homo sapiens
ctggcaccctgctggtaggcagggtagagtcctctgttgtgtatataagatggtggaggaattactgaagcaacttcctcacttcaagtttccttgattttcatgattacaatggcctttactttcattctctctattttttctatggtcacacttgttctttacatcaactggagatgttctgcagcagaaactagtatgctgttttctgatcatagcctcttctccctttaactctgttattcgtaagatgtcactttaagcaaatgaagtttactagtccctctgcaactgccttttttgcccaaatgccaccccctcctactttacttctttatgtgtgcaagctttatccatgaggtattgtttaatccacttcatcctcctgccagaatctccaacatcccagctctcttttctgccctaaatatccaacctgtaagtactaaacctgggtgccatccaccatccaactgtctgccttctacaaccacttattgaaacacacacacacacacacacacacacacacacgcacacagagttatgggcattgrtattagtataattgcttgtatccaacttgagtggatattcaccaccactccccaatttttttgtg

SEQ ID NO: 540303 - DNA, 630 bp, Homo sapiens
tctcttacaagtactgccacagcttgtcacgccaaagcatttcatggtcatcttttttgaggagcaaaatagtttcctacacatgtacgacctgctagaagaggctagtcctttcctataaccaaaacaattgggtgtttttactcatagaatgcttttttcacttgtccttttaaaaacaaacaaacaaacaaacaaagaacttgctcctgtgtccacaccaaacatacttgacatactaggctatactatatgttagagagtgtgctggtgttttttgtctctatgaaataaactatttatgcccatatatatatattgttgttgttgtttttgttttttcaacttccattttactatcagggtgtacatgtgcaggtctgttacaaagctatagtgcatgatgctgackctgaggtttggggtatgactaaacctgtcatacgagtagtgagcatagtacccagtaagcagtgtttcagcccttgctcccttccctcacttccctgccctggtagtccacagtgtctattgatcccatctttctggccatgtgtatccaatggttacacccacatctttatctctgggtttgctctgcctaatcatctggctctgccaagtcctcct

SEQ ID NO: 540304 - DNA, 333 bp, Homo sapiens
gctgggaaactggaggcacagagatgagttagggagaaattataatgactcatgtgagagatgtagacatctgaacaggcagtgccatcagggatggagaggacaaaatggatatgaaatgccttaggaaagtaaaaaaaaaatgcaattagatrtacatttttctgtttgagtgacggctgggcttgtttgggtgatgttatttttccaaggttgggagagtccattacaggcaaattgtgtccgggaaaggggttacttgggcctgagggatgatggaggtgctgctctggtggaaataatggactctttggagttaggcctgagtttgaa

SEQ ID NO: 540305 - DNA, 662 bp, Homo sapiens
cagtcttataacttaagggggcctgttgatcttaaaacttgacctaatatgtagcatgtgatgaagttatttaaagaaacgtaaaacactaaaattgattaatgtttcctggctctctcagtaatgttccaaatgatctcttacatgtttctattgtggcacatgacactttgtcttctagctattatttacacatgtggcaggaagctactccaaatgactaatagatgtgctccttttccccctgcttcctctccttccaaatcctgaggttatcccagtcctgttcttgcctaggacatcatgtgtcacctattgccttaggtagggtaaagtctcagagaaaaaccacagaagcagcatctctggcctgtgaatttaaaaactgaggggaagctgtaaactgaaagatttggaagaatagaggaactgtttcctccttctcctaacatctactagaccgagaatggggaatggggagagaagagagattccaagaaaggggaaagcataaatcgaggagtgaagtcaacatgaagaagcaatctacrttcatgcattcatgcaactaaacatcactaattgccaacaccaggaaattttgtgggggttgaatttgaaaccatcaaccttaggatctccatttgaggacgttgcatgta

SEQ ID NO: 540306 - DNA, 656 bp, Homo sapiens
gtttcgttgagcaatatggattargttactagttctcaaaagatctaacattcattctgctcttactctatgtgatcagtttcatcttggatttttatatggaagaaattgtcagggagtctttacctttggttacatagtatgagaatttcacatatttattttattagatgcctatcttgcaaaaaatattttaaatcatatttctaaaatgtgcattaattcaactagtactgccttcaagtggctgtaatactttttcttcttatgttgtggaatatcttgaagtaggaattgtgattcactttaataaaaaatgcattaaactatttggtgaccctttaacatatgcaaagtacacctaaactttaaatttcgtttatcttctatattcgaccaattctaaacgttatttgtttggaaaatgaagtgctaaacagtagtttgattttaaaaggaaaaaatatttgaaattcctttacacttgtgttgacagaaaagagtcaaactctgtaaaatatttgaagagatttattctgagccaaatataagtgaccatggcccatgacacagcccttaggaggtcctgagaacatgtgtctaaggtggtcggggttcaggttggttttatacatttttagggaggcatgagacat

SEQ ID NO: 540307 - DNA, 656 bp, Homo sapiens
gtttcgttgagcaatatggattaagttactagttctcaaaagatctaacattcattctgctcttactctatgtgatcagtttcatcttggatttttatatggaagaaattgtcaggkagtctttacctttggttacatagtatgagaatttcacatatttattttattagatgcctatcttgcaaaaaatattttaaatcatatttctaaaatgtgcattaattcaactagtactgccttcaagtggctgtaatactttttcttcttatgttgtggaatatcttgaagtaggaattgtgattcactttaataaaaaatgcattaaactatttggtgaccctttaacatatgcaaagtacacctaaactttaaatttcgtttatcttctatattcgaccaattctaaacgttatttgtttggaaaatgaagtgctaaacagtagtttgattttaaaaggaaaaaatatttgaaattcctttacacttgtgttgacagaaaagagtcaaactctgtaaaatatttgaagagatttattctgagccaaatataagtgaccatggcccatgacacagcccttaggaggtcctgagaacatgtgtctaaggtggtcggggttcaggttggttttatacatttttagggaggcatgagacat

SEQ ID NO: 540308 - DNA, 656 bp, Homo sapiens
gtttcgttgagcaatatggattaagttactagttctcaaaagatctaacattcattctgctcttactctatgtgatcagtttcatcttggatttttatatggaagaaattgtcagggagtctttacctttggttacatagtatgagaatttcacatatttattttattagatgcctatcttgcaaaaaatattttaaatcatatttctaaaatgtgcattaattcaactagtactgccttcaagtggctgtaatactttttcttcttatgttgtggaatatcttgaagtaggaattgtgattmactttaataaaaaatgcattaaactatttggtgaccctttaacatatgcaaagtacacctaaactttaaatttcgtttatcttctatattcgaccaattctaaacgttatttgtttggaaaatgaagtgctaaacagtagtttgattttaaaaggaaaaaatatttgaaattcctttacacttgtgttgacagaaaagagtcaaactctgtaaaatatttgaagagatttattctgagccaaatataagtgaccatggcccatgacacagcccttaggaggtcctgagaacatgtgtctaaggtggtcggggttcaggttggttttatacatttttagggaggcatgagacat

SEQ ID NO: 540309 - DNA, 515 bp, Homo sapiens
tctcctttagaacggaatcaatcgtgcaaatttggttctaggctgacagttgaaagtcaagactttgtaagtaaaatccttctgttctgtaggtatattattgtaaataagaacttcattcttaaagaacaatttcataccttacaaaattgattatgaaaataaaacaaaacakacgcatatgcgattttgaatattaattatgtaagactaaaaacagtataaaaagtagtattttaaacgctcctttggggaatattttctacattggcacagatatagtccagggaattttagaatgaaaataacttttttccctttgtaaatatgtaaatttcattttgtaaatatgtatatgcatatagagtaagcatatgcatttttcattgtgctaaatgttgaattgccttcaaagctggagtcatctattctgaaaaatctttgaacggtaaatgatgggaaggaatagattcctttgtgaggtcttcagtttcaaagatccttacaatgtatca

SEQ ID NO: 540310 - DNA, 486 bp, Homo sapiens
ttggccccaatagagagaggccttaagctagctaatgggagtggcttcaaataagacttctattcaaccaaagttggccagctagggaaactgcaaagctaacataaacatttccaaaagcaggagaaaaagctctagtcaggatttgtatacyacttgtgaaggaagctatatacaatgaaaactaggtataaatggaaatatgacaaacccaatcactatatataccacagcaaaaagccattctacatagtaagcaaaatactattttgaccctctgtgacatgcacgaaagtaataaaaaagtaattagtctctcagaggcagcccattaaaaatggataataaattcctataactgcaagtgctaagacatacatttcaattttgtagatggctatatgcctacacaatggctacatgtctataagaatggctaaaatagagtggcaataccaagttttgccaaagatgtggaacaagtgc

SEQ ID NO: 540311 - DNA, 548 bp, Homo sapiens
tagaaagattgatgcttcagaacatagacagaaggaccaattaggaaattgctatgattactcagttaataagtgtaggcagtgataattgaaaagagggaaatgatatgagaaagtttgtggaagtgaaatcttaaatgatttaataccattgagtttatgcgaaagtactaaaaactcttgaggttttctgtctatgtgactagaaaatagaaatatatgagtcaggactttatgggagaaagttttagcattggccctatgatgatgtagatayggatgggaagtccagtatagatgtccaacagtcatttcttatttactaagcaatgtctaatatttggggcactgtttagggtgatcaggatacagtgctggacaaagcagactgggtagtaaatgttggtgaattaacttttaaaagatgactcttggcttcttgggagaacaaattgtaggagagcaggaaaagaaacatggagacagatgagagcaatgtgacgtggacagtgttgatggctgtggagatgcagagacatgagtaagta

SEQ ID NO: 540312 - DNA, 548 bp, Homo sapiens
tagaaagattgatgcttcagaacatagacagaaggaccaattaggaaattgctatgattactcagttaataagtgtaggcagtgataattgaaaagagggaaatgatatgagaaagtttgtggaagtgaaatcttaaatgatttaataccattgagtttatgcgaaagtactaaaaactcttgaggttttctgtctatgtgactagaaaatagaaatatatgagtcaggactttatgggagaaagttttagcattggccctatgatgatgtagatacggatgggaagtccagtatagatgtccaacagtcatttcttatttactaagcaatgtctaatatttggggcactgtttagggtgaycaggatacagtgctggacaaagcagactgggtagtaaatgttggtgaattaacttttaaaagatgactcttggcttcttgggagaacaaattgtaggagagcaggaaaagaaacatggagacagatgagagcaatgtgacgtggacagtgttgatggctgtggagatgcagagacatgagtaagta

SEQ ID NO: 540313 - DNA, 648 bp, Homo sapiens
tgtcttttactgcttctgagcatgactacatcatttttaacataaaatctaattaatcacaycacagagagtgtactaaacactttgtaatgtggaaacaattacacgtgattaatggatgaagtaaatttcaactagaaagagggttgcactgcttgtaaaaacatgcaggtaagaggaagttctgcaggttttcttgtagctagacattagaaaagtttttgaaaatggtatatccttcttctgataagctttgtaaaagagctgtggagtttccaggtcattcactaagatataaatcaaatgcaataattctgagaacaatttttttaagctagagatagggtaaggtttaaagttataattagtggattccattgtcagatttctccatgacatcgtagccatggttacaactgaccatggtttcacaccacataaatcaggacattgcctgctttcacagagaattttgaatatcacctaacaataaagaaaactgtatataatatggcaccagtaactaaatacggcatcctttctacacaatctttttaagattcacatagttccaatttagctgttggcaaaatttctcatcattcttgtgatggagcagcttcagtcttatgctgattacttagccat

SEQ ID NO: 540314 - DNA, 648 bp, Homo sapiens
tgtcttttactgcttctgagcatgactacatcatttttaacataaaatctaattaatcacaccacagagagtgtactaaacactttgtaatgtggaaacaattacacgtgattaatggatgaagtaaatttcaactagaaagagggttgcactgcttgtaaaaacatgcaggtaagaggaagttctgcaggttttcttgtagctagacattagaaaagtttttgaaaatggtatatccttcttctgataagctttgtaaaagagctgtggagtttccaggtcattcactaagatataaatcaaatgcaataattctgagaacaatttttttaagctagagatagggtaaggtttaaagttataattagtggattccattgtcagatttctccatgacatcgtagccatggttacaactgaccatggtttcacaccacataaatcaggacattgcctgctttcacagagaattttgaatatcacctaacaataaagaaaactgtatataatatggcaccagtaactaaatacggcatcctttctacacaatctttttaagattcacatagttccaatttagctgtyggcaaaatttctcatcattcttgtgatggagcagcttcagtcttatgctgattacttagccat

SEQ ID NO: 540315 - DNA, 613 bp, Homo sapiens
ctgtggagatttctggctaatgaagcaacaccaaaaaaatcctatgtcattagcattacatagactcattattttattaaaatttataggaataatatttttattattcgttcaattaaactttcatgtcctacaatacattacaattctggggaaatttctattaacttgccttatatttctatgtgaagaggttttggtagaattaagtctcttgcttaatatctcacattataaattcatttgtcctcactctgtgacccaattggtgtgcagcatgcattcttccacatttctctagatggaatgcactaatctgttaaacagccacaacaggtggagatactttttctcttcttttttttctaccacaataatgtaagaaaacaaacctgaatcaatataccatgttttctatgaaaatattttctaggaaaggttgtttcaagcttgaggatgagagtagatattcaawatctcaaatctagacccattttctctaattagcctatcaatacaaagtggacatatacatgtctatttactagacccactctctgtctactgtgtctgggactagggcaaggaagaaagagtcattagtagttgaact

SEQ ID NO: 540316 - DNA, 533 bp, Homo sapiens
ccactaaacatcagcaagacatgctttcggggctctcgaaacactgttgagggaagagtgttgggaaaacactctgctctgaagttcctggggctatctgggagctacaagcttctgtagcttgaagtgtaaccatatgtgagcagtgacactttaattgttgctttgcttttctgggtagagatcagaagtctttcagcacagagcttattcacccttgggaaaaacctaccctctagatatcagaaaggaagaatctgaccaaattctagttgttgctgacagttcagccacatagatttggtcactgtacttttctcattgagcaaacaaatgctgcttgagaatttgaggctatttaggatgatggctgtagttgaaatggttagaaatgaccaaaagactacgtattctctaaaagttcccttatgattgtggtaattaatgtaataaatagctattgccttkctaaaggatgattatatacagagttagtgagggggtagtacaccatggcatgatgcaacatataa

SEQ ID NO: 540317 - DNA, 517 bp, Homo sapiens
aaaacagtaagcttccaagatcaacaaagttcccagtgctagtacaacatttttgacagtacaatggctattcattcagtgtgcatttctgagcagatgactaaaacagcataaattatcactgtcctattttgcatttctagccatttggattcttcaaatgtcaataccactcttaagaatactcaaaagaaacaatgtcacgacctatatcaaacccaaacagatccaatactggttttggaaatgttttaaagttcaaaaatgtaaaataagaaaataaaaataaaccatcagagacttttttcaaaatctgaaacwtttttacccaaagcaaatagacatttttgaacaagatttgctcttcttaaaaataagtgcccaagattacttaaactttgaaaaataatatcttatgtaaaagcacctttatttttcaaaatttaactttacagagatgaatgaattcggtataatttgaatctagctggaaaaatgtggtaatttatcctactat

SEQ ID NO: 540318 - DNA, 418 bp, Homo sapiens
caaaacataattttcttgtatgcattatgttcaagtatatgcatgaacataatgcatacaagataatgatgtgtttacaaaaaggtaaacttaattaaaatcttctgagttcaaatgtaaaaagcccaggtagttaytccattttactgtagcaatttaaattgttatattcccccttttattaatatctcatcttcatgaatctgacctttgaaaaaaagtatacaaaagtggatttcttgttattgggtgggaactgaataaaatgtgaattagttatgctaataattttacaagtattctctttattttggtcttcttttttactaatgtaccagagaccatttctactgaaggttatgttgccagttttatattatgtactttgtgctgtgcaaaagtagactctggagagcat

SEQ ID NO: 540319 - DNA, 418 bp, Homo sapiens
caaaacataattttcttgtatgcattatgttcaagtatatgcatgaacataatgcatacaagataatgatgtgtttacaaaaaggtaaacttaattaaaatcttctgagttcaaatgtaaaaagcccaggtagttattccattttactgtagcaatttaaattgttatattcccccttttattaatatctcatcttcatgaatctgacctttgaaaaaaagtatacmaaagtggatttcttgttattgggtgggaactgaataaaatgtgaattagttatgctaataattttacaagtattctctttattttggtcttcttttttactaatgtaccagagaccatttctactgaaggttatgttgccagttttatattatgtactttgtgctgtgcaaaagtagactctggagagcat

SEQ ID NO: 540320 - DNA, 418 bp, Homo sapiens
caaaacataattttcttgtatgcattatgttcaagtatatgcatgaacataatgcatacaagataatgatgtgtttacaaaaaggtaaacttaattaaaatcttctgagttcaaatgtaaaaagcccaggtagttattccattttactgtagcaatttaaattgttatattcccccttttattaatatctcatcttcatgaatctgacctttgaaaaaaagtatacaaargtggatttcttgttattgggtgggaactgaataaaatgtgaattagttatgctaataattttacaagtattctctttattttggtcttcttttttactaatgtaccagagaccatttctactgaaggttatgttgccagttttatattatgtactttgtgctgtgcaaaagtagactctggagagcat

SEQ ID NO: 540321 - DNA, 594 bp, Homo sapiens
tgcatctgagcactctgcattgctcagtgactaaggcaactgaattagggcagggacacctggaatagctcagtcctccacagcaggtggggtctgataaaagccatatgcctaagaccctgcagtatcaaagaactaagactcgcaggcattcctaactggaatctatctctatttcagtgttatgggctagattgtgttccccaaaattcatatattcaacctctatcccctagtaactcagaatgtaactatatttggatatagggcttttgaagagataattaagttaaaatgaggctcttaaggtgaaacctgtaagaagatactaggacacaaggagagacatcacrggtgtgcctgtacagaagggcaacaatgtgaagaggcagcaagagggtagatatctgaaagccaaggagagaggactgaggcaaccagctcaactagtaccttgatcttggataattccagtctccagaagtgcttaaatttctgttgtttaagccacctagtctgtggtatttaattacggcattcctagtaaaaggacaacttttatctctgtttccaataaacatttcaatcccatgg

SEQ ID NO: 540322 - DNA, 309 bp, Homo sapiens
tttgggaaataacagagaacaagacagacacaaattctattactttctcaaacttttggaattcatttgaaaatatacccatgtttttaatatcaccatttttttccactagctagcagccattctcaactcttttacaaattatggcacatcagtccaggtgtggtggcttatgcctataataccagcacttaagaaggatgaggtgggagaatcgcttgagcccaagagttcaagactagccccggccrcatagtcagaccgtgtctttacaaaaaatagaaattagctgggtgtggtcacatgcaa

SEQ ID NO: 540323 - DNA, 498 bp, Homo sapiens
atttgctgtttcactggtttcaaacaaaaatgtgttgcttttttttttttttttgtgcttttatcatcttagaaggagaacttaatacatctctaaggagtcaagctgccaggggaaacatccttgcagacatctactggccactgacagcataccttgctccctgggccacacctaaccccatggttgtcatcccccatgtatgcttccccaaggagatcaggagacatcccagggcccagccagccatctgggcctgcgtgtatcagtggaattttggcagaaggttgatgtaatgcaagctctctaggtcttctatcctttgaggattgagagaagtagaggaatgggagtgagcagracccagtctgattttacaaggatgtccccctcccctctctgcatccccacccccatctcaaaggctgcagaatgatcacattctgtattcctgtgggatatgagatcacaggcatgattatggcatgagatgctcca

SEQ ID NO: 540324 - DNA, 426 bp, Homo sapiens
tttttagaagtctggttgctatggtaacaaaataccattttccagactaaagatacatctctggttcaaatctgagggcgatgacgctctttctagacatctcctagagtggcagggtggraccaagcctgtcgcctcagggctcagtaaacacggaggaattcaatggaattgcactgaagcagcctatgaaaaatgtctgatggaagaggagtgcagctcccatttcagcctgcccaggttgagcggctgcccagcatcctcctccaaaccaccccaggcattgttgacactgcccatcacatagggaccaagtgctttcaaagaccagcagtgttgctggttggcacatataccaagggcaggcagacacagccacagccaaaaagccagatgttcattcaaaaatagatatttattgagcac

SEQ ID NO: 540325 - DNA, 573 bp, Homo sapiens
tgctggggcaggagtggggaggtgggagctggaaatggggtgaccggcatgctgctcagagaagctggcatttgggcccagacatgaagggagtgatgagggagccctctgagtgcctgaagaatatccctggccaagggaacagcccatatgaagacgcccaggtgggaktacctggcctgttggggttaacatcaaggaagccaaagtggggcaactctctgaggggtggactagaggatgaggtcagagaggccacaggggtggctgagacaaggcctagttggccatggggagccatgaaggatttagggtaggggagggacatgatgagactcactttctaaggatctaggttaaagcgttcgattagcactcatttgatacaagatagggtcttgcaatcctaaaagggcccctcggctgagaacagaatgtgcaggctcctgggaagagacatggagggcagtgtgggggatcagtcagagtggtgggaaaaactacagggaaaggacgcaaacctgaaagatcagaaggttctgcagagccccggggaagaatagctgaaggcag

SEQ ID NO: 540326 - DNA, 530 bp, Homo sapiens
tacgtatcgcaggtccagtgagttcatttgcagctcaggggaacaaatgcaaaggcttaagacaaacgtactctttaactcaagacaaccaatacaatgtcttataagctgtgtggtcatcataagcctcatactaaaaggttatgttcctgggagattaaagaaaatctttgtagttgaaacattaaatatctcagagaacctctttttccttctctataaacattaaagagaggagctataatggtaatgttgaccaaaaaaaaaaaaagccaaattctgtaaawtatttaaagaggtttattctgagccagtatgagtgatcatggctcagagtacagtctcaggaggtcctgagaaaggatgcccaaggtggctgggttacagcttggttttatacattttagggagacagaagtgacaggcaaaaatataaatcaatacatggaaggcatatacattggttcagcctggaaaggtggaacatcttgaagcagtggatgctcataggttctacgtggagtcaaaga

SEQ ID NO: 540327 - DNA, 594 bp, Homo sapiens
cctcatcatgccacctaagttcaaccccaatgagatctaagtcatatacatgaggtgcactagtaatgaagtcggtgacacatctgccctggctcccaagatcagcaccctggatctgtctccagaaaaaggctggatatgacatcaccaagggaactggtgaccggaagggtctgaggattacagtgaaactgaccatcagaagagacaggcccagactgaggcagtaccttctgtctctgccctggtcatcgaagccctcaagggaccagcaaaagacagaaagaaacaaaaagcattagacacaatggaaatatcacttttgatgagattatcaacttgctggacaggtgtggcactgatctttagccagagaactctctggtaccattaaagagatcctggggacttcccaatctgtgggctgcaatgttgatggccgccaccactgtcatgacatcatagaggacatcaacagtggtacagtggaatgcccagctagttaagaagtacraaggaaaatatttcaataaagaatcatttgacaaccaaaaaaaaggaggggggagggcagatagtactcttgctcagacc

SEQ ID NO: 540328 - DNA, 592 bp, Homo sapiens
cgtgactcctaaaccataacttgtaattctgtggctaatttgttagtcctacaaagacagtctagtccacaggcaaggaggtttgttttgggaaagggctattatcatctttgttttaaactatatactgtaaactaagttcctcccaaagttatttcagcctacacccaggaatgaacaaggacagcttggaggccagaagcaagatggagttggttaggtcagatctctttcactgtctcagccacaaacctgcaatggcagtttcaataagatatcacttttttgtgttttatacaccggagttctgtgacaggtttttgtctaagatagcattcatttgattttgaaaaataaaaatgtctgaaaaccaatattctataggaattgggggcctctgaaagttttggggttggggaatataaatcttatatctgtgcrtctggaaagtttatttggcagcaatgtgagagatggattgatggggagaaattggagactagaattagggagaatagtgcctaactagaggatagggcagtggatacggggagaagatggatgacagagatgctgaggggcagattgacat

SEQ ID NO: 540329 - DNA, 532 bp, Homo sapiens
gatgtgctgggcaggagggcatggaagctccatgtaggccccaccccaggccctcatgtcatttctttcatttggctgttcccaagttgcataataaaccagtaatcataagtaaaatgttttcctgagttatttgagtttttgtttgtttggttggttggttggttttttgtttttgtttttgtttttttgagacggagtctcactctgttgcccagagtgyggggacactacatcagctcactgcaacctccatctcccgggttcaagcgattcttgtgtctcggcctcccgagtagctgggattataggtacccgccaccacacctggctaatttttgtatttttagtagagacagggttttgccatgttggccaggctggtctcaaacttatgacctcaagtgatctgcctgccttggcctcccaaagtgctgggattacaggaatgagccaccgcgcctggcctgagttctgtgaattatggaattattgaacctgggaggggttgtgggaatccctgaattggtag

SEQ ID NO: 540330 - DNA, 656 bp, Homo sapiens
cgcactgggagcatagggtggcgcctcgggaagttctcaccccttgcaggtgggaggagcctggcctttcctgttcctgtgtagtgacctgggattcaatctgtgaggcaggaaacctgctagcaggactctctctcgcttcgctaagagctattttttatttttctttttgcctaataaattccattttcctcacccttctatgtgtcggtgagcctaatctttcttggtcatgtgacaagagcccagttttagctgaactaaggagaaagtactgcaacaattctttataataggatgtggccaggaatcttctggaaccctgatattttatatcaaattttacattgctcctactctatactgtgatttatcctgaaaaagtaaagcttgtaacatttataccctatgcagtggagacataatagagaattaaatatttcagtgttgggataaggactgctaaaaacagagaaaagaaaaaaagaaatatttggtgaatgaatgaatgaatgagttctatttatcatcagtagttttccatttttaaattctgctgccctgtaagctccatctctatgatgagttgaatccttttayatgagttttgaatgcaccaaagttttgaataatgaaaggtaatgaataagggaaag

SEQ ID NO: 540331 - DNA, 482 bp, Homo sapiens
tgcccagttttttgcttgaaacccagggccctggtggtgtaggcacatgaggtaatctcctgatctgcagattgcaaaaactatgggaaaagcgtgctaggtgggcccaatagcacagtccctcacggcttcctttggctgaggtagggaggtccctggctgtttgcatttcccaggtgaggcatgccccactctgcttctgctcttcctccgtgggctgcacccattgcctaaacagtcccaatgagatgaactgggtacctcagttggaaatgcagaaatcacgcaacttctttgttggtctcccwgggagctcagactggagccgtttttattcggccatcttgccagatcctcctgaattcagtccctctctgatacagtctttctctctgtctccctctctccctccatcccaactccaccacccccactccttgaaactagtacaaagctctgatcctgtgtgaattgtagctgct

SEQ ID NO: 540332 - DNA, 594 bp, Homo sapiens
agttgctcactaaccatctcttcttaattttcccacaagaatgacaagctgcaaatttaaagctgaactcacgtaatccattagattgggaatgcagaggcagagggtaacagcagttttccagcataggctagagtacctggagcaaggggagttgccaacagaagtcctagaatggaccagagttgtagagcagccatggctgagtgcaggggttaggccaatgtatttgagcttgcctcatatacttaactgaaatcactcaagttcccaggatcccaatggcccagcgacaggagatcatggcaggactacaaccatcagcartagagagcaaaacacaatgaaatcagcaaaagcatatgaggtacatctcagaggaagccagagtagactactgattattgtggacaagatgcttgaatcctgattttaaaaacataaacatctccatcttcttaggaataatgacacaagaagagggaggggaaaactaccaaattgactatgcaaaagaaactgagttgtgaactggaagtgacttagtttatcttgagtcagcttggataatttgatcactaatgagtgccaata

SEQ ID NO: 540333 - DNA, 594 bp, Homo sapiens
agttgctcactaaccatctcttcttaattttcccacaagaatgacaagctgcaaatttaaagctgaactcacgtaatccattagattgggaatgcagaggcagagggtaacagcagttttccagcataggctagagtacctggagcaaggggagttgccaacagaagtcctagaatggaccagagttgtagagcagccatggctgagtgcaggggttaggccaatgtatttgagcttgcctcatatacttaactgaaatcactcaagttcccaggatcccaatggcccagcgacaggagatcatggcaggactacaaccatcagcagtagagagcaaaacacaatgaaatcagcaaaagcatatgaggtacatctcagaggaagccagagtagactactgattattgtggacaagatgcttgaatcctgattttaaaaacataaacatctccatcttcttaggaataatgacacaagaagagggaggggaaaactaccaaaytgactatgcaaaagaaactgagttgtgaactggaagtgacttagtttatcttgagtcagcttggataatttgatcactaatgagtgccaata

SEQ ID NO: 540334 - DNA, 659 bp, Homo sapiens
agctgtcacacagatttttagcactgcatttatcatgggtttaagatgcaagtatttctgcttagcattttaaataggtttggaacatacataaggcacagataattgggtaatacagaagccaactttatgctgccctgtaaacactctcaaatgtcaccagggcaaattttcctggcagaaacatctgcgaaaaagtctggcccttacagactcctctggccccaccgtcaccatctgcctctgtaggaacaatgaagctccctgctggggagggtggcaaagaaggaaggctttttgttcaaggaatacaagactgatcaaggcaaattttcctatctmaaaatagtacaaggagttggagaagaggtcttaaaatgtcccttcttcttcctcattctaaatcagcagagacttcaagattttcacaatcacagtcagtttggcgacattgtttttctaggttgtctactttttcacactccagtgattcaccaatacccaatgggaaaacatgtagcagcagtgagcactgagaagttgaagcacagaaatggtgtgtaatggtatgacttgagcagattataacagaaagcagttagaatagctgaatgaattgctttttggtaatggctctaggatacgggttctcgtgtcgg

SEQ ID NO: 540335 - DNA, 592 bp, Homo sapiens
tccccagccaggtggggccagggaccctccaacatccccaagctggagatgcttccggcaggatgatgagccaggaggccaagtaactggccggccccggggacaargtgcccacgacgaatgacgacacgagtaaaccaggccactgctgatcctcctgaggctgcaggggccctgtgtccccacccgttccctttatgcgtctccttatcgggtgcaaaacctcaactccctccggtctcctgccccatcccgcacccttcatgctgtgaagatggaggcgccttgtacttccgggaggcaaaagagccctgagggaacctccttccgtttcttgctgtgaggacagcggactccctgtcgccgcccaactcctttctcctttccccgcaggactacctttcctcgagtgacagccctgctctcctcaggaactcacccctggtaaccccttctctgtcctcgccatctacggacgctctcctgtgagcactgaaatgccgtctgcactcccggggcctccagctccttctcttttgacttcatcgcagacacatttcttcagagttatcctaatgtactgtttccattt

SEQ ID NO: 540336 - DNA, 647 bp, Homo sapiens
ctgtctttttaatctggttcctggacatggcgccctcatgtttgtggaataaatgaatgaaccaacataccaaagtgcagcrggggaggggcccaggggtctagatcttttcctttacattaatggagtaaaatattttgtatgttttctttttgtgtgtgtgatggattttccatcttgtcccccaggctggagtgcaaaggtgcacttggctcactgcaacctccccctccctagttcaagcaattcttctgcctcagcctcccaagcagcttggattacagatgcacatcacatggctaattattattattattattattctatttttagtagagatggggtttcaccatgtcagtcaggctggtgtcaaactcctgacctcaggtgatccacctgtttcggcctcccaaagtgctaggattacaggcgttatccaccttgccaagccagtacattattttcatttcaaccattgaaaaaccatactgagtacaagaaatatagaaacacgattcccattccattgctcatttctgcctaaaattcttactccatttttataacatctgttatctaggttagaagccaggagatttacggctaacttaaccctcttggccctgaacccaaaattcaatggaata

SEQ ID NO: 540337 - DNA, 647 bp, Homo sapiens
ctgtctttttaatctggttcctggacatggcgccctcatgtttgtggaataaatgaatgaaccaacataccaaagtgcagcaggggaggggcccaggggtctagatcttttccwttacattaatggagtaaaatattttgtatgttttctttttgtgtgtgtgatggattttccatcttgtcccccaggctggagtgcaaaggtgcacttggctcactgcaacctccccctccctagttcaagcaattcttctgcctcagcctcccaagcagcttggattacagatgcacatcacatggctaattattattattattattattctatttttagtagagatggggtttcaccatgtcagtcaggctggtgtcaaactcctgacctcaggtgatccacctgtttcggcctcccaaagtgctaggattacaggcgttatccaccttgccaagccagtacattattttcatttcaaccattgaaaaaccatactgagtacaagaaatatagaaacacgattcccattccattgctcatttctgcctaaaattcttactccatttttataacatctgttatctaggttagaagccaggagatttacggctaacttaaccctcttggccctgaacccaaaattcaatggaata

SEQ ID NO: 540338 - DNA, 515 bp, Homo sapiens
aattataagataggatgatataagttacttaaatactactaaggaggaacacagacataaaatattattttactatattatccagatttagcaagtaatttcaggaagtgtatctaagttaattgtattaaactctcctgtactggtcacatactgtccaaaaacattccttatatatattttttttatgaggactgtagcgaatcacgaaaagagcagagtgcttttttgataaagaactttatgttttttctcctactctcagctacaaaatggtggtttaattaagaggcaggctggagggattgctgtgtagagagaggaaagcagagagcttccagagaataaaaatcgtttgtgtcctaaacacattttgtcctagagcaaaattatatctttacttgtttttggcagataatcaaccttattccctaacttttgttgctataagtgcagcagrtgtacagatggatacctgggatgatttgatagactcagagtttaggaagaacagg

SEQ ID NO: 540339 - DNA, 644 bp, Homo sapiens
gcatttaaaaggatgattctcagtttcttctgtagcactggactttctcaattgtaaaagcattccagcatcatttagtggcttataaaatcacaatgtcaagaactagtggaaggaagtactgctttcttgagttcataatctgcagtataaacatttcatttttatgtagtgaagattttaaagcaataatttaacttaccaattgttaaatcatcatcaattaaaggactatttaacatattaaaaagcatttttcttagtaagttaataatgatccaattaaaatacaatttctcttcatttctgtagatagaatattctgaaaaatattcatgtcagatctttgacctgagactgaaggacaaatacttcttacaaggaacttaggatggcttaaaaatatatcttctagtaattaagaacttctaagaagaagatcttcacttgttattttttctttttcttactggcccctggaacctgaargtataccctttagctgtcacccaacctgttgtcaccaagcttcccagaaaggcagtagagggcactaagagaatgtgacagtacagcatagatactgattgcttcaagcacgatgctatgcaattcggagacaaagaaggggagtccatttttca

SEQ ID NO: 540340 - DNA, 644 bp, Homo sapiens
gcatttaaaaggatgattctcagtttcttctgtagcactggactttctcaattgtaaaagcattccagcatcatttagtggcttataaaatcacaatgtcaagaactagtggaaggaagtactgctttcttgagttcataatctgcagtataaacatttcatttttatgtagtgaagattttaaagcaataatttaacttaccaattgttaaatcatcatcaattaaaggactatttaacatattaaaaagcatttttcttagtaagttaataatgatccaattaaaatacaatttctcttcatttctgtagatagaatattctgaaaaatattcatgtcagatctttgacctgagactgaaggacaaatacttcttacaaggaacttaggatggcttaaaaatatatcttctagtaattaagaacttctaagaagaagatcttcacttgttattttttctttttcttactggcccctggaacctgaaggtataccctttagctgtcacccaacctgttgtcaccaagcytcccagaaaggcagtagagggcactaagagaatgtgacagtacagcatagatactgattgcttcaagcacgatgctatgcaattcggagacaaagaaggggagtccatttttca

SEQ ID NO: 540341 - DNA, 604 bp, Homo sapiens
ccatttaccactgtagttttmctttctgatatttgggccattgttgtaactcattaacagataggcttggaagagattatttcattaaaaattgctagttacattcttcagcacagtatggaaaaagctgtttggaataataattctgttcatacttttaaatgacctttcctcaatattggattatttgcttgaacttgtaataggctaaggtgcatgcttacacagagcctggacttgatgctgcattaagagtcagccagcatttggcatagcaggtgtaacaagccaaaaatttattctcaaaaagaattggcctcaacctgggcatagcacctcagaataagtactaaagagttgtggtgggttttttcttttaatatgtaaaatttacagtggggtatttcatttgaatatacatctcattgaatatctgtataggaattgttttatttcaactgagaaacagtttaacttgtttgaatttttttaactgaaattatatttcctttcttttattagtatagaaatttgataagcaaattgtgtgctcctatagttaatacacaaactattatagtttacagtttaatggatttacctc

SEQ ID NO: 540342 - DNA, 604 bp, Homo sapiens
ccatttaccactgtagttttactttctgatatttgggccattgttgtamctcattaacagataggcttggaagagattatttcattaaaaattgctagttacattcttcagcacagtatggaaaaagctgtttggaataataattctgttcatacttttaaatgacctttcctcaatattggattatttgcttgaacttgtaataggctaaggtgcatgcttacacagagcctggacttgatgctgcattaagagtcagccagcatttggcatagcaggtgtaacaagccaaaaatttattctcaaaaagaattggcctcaacctgggcatagcacctcagaataagtactaaagagttgtggtgggttttttcttttaatatgtaaaatttacagtggggtatttcatttgaatatacatctcattgaatatctgtataggaattgttttatttcaactgagaaacagtttaacttgtttgaatttttttaactgaaattatatttcctttcttttattagtatagaaatttgataagcaaattgtgtgctcctatagttaatacacaaactattatagtttacagtttaatggatttacctc

SEQ ID NO: 540343 - DNA, 604 bp, Homo sapiens
ccatttaccactgtagttttactttctgatatttgggccattgttgtaactcattaacagataggcttggaagagattatttcattaaaaattrctagttacattcttcagcacagtatggaaaaagctgtttggaataataattctgttcatacttttaaatgacctttcctcaatattggattatttgcttgaacttgtaataggctaaggtgcatgcttacacagagcctggacttgatgctgcattaagagtcagccagcatttggcatagcaggtgtaacaagccaaaaatttattctcaaaaagaattggcctcaacctgggcatagcacctcagaataagtactaaagagttgtggtgggttttttcttttaatatgtaaaatttacagtggggtatttcatttgaatatacatctcattgaatatctgtataggaattgttttatttcaactgagaaacagtttaacttgtttgaatttttttaactgaaattatatttcctttcttttattagtatagaaatttgataagcaaattgtgtgctcctatagttaatacacaaactattatagtttacagtttaatggatttacctc

SEQ ID NO: 540344 - DNA, 553 bp, Homo sapiens
tccagctgtgtttcacgacattcacagccctcttcgcattaattttaatttgttattttgatcaataatactgaaatcacagaaataaaagcagccagcttagtaataatgactgtggactcttgatttgagctaattgtgccaatttcacacatatacaaataaccaggttaaaaggaagtttgatcctttgccttatacacaataagtatttagacagtgacatctcatggtagaaattcctttttgtaactaactgatttttgtaagtatttgctcttctccacgtcaggcctatttttttttttttaattttttgcttgattcctgtaactttaggaacaaaacttggttatgttcccagaccacaragatgcttctctacttttatgccttttcttagaccgtttctctgcctgtttcaaggagtggtcaaatgctaaaggtagttctaaggagaagaaagattgaaagaacatctagttctcttgggtgaacagataactggtaatttttgaaagggaagtgtccttcaaagccaaaacatttcaaa

SEQ ID NO: 540345 - DNA, 542 bp, Homo sapiens
ctgtccaggtcatccaacagagccctttcaccccctatttgtgtctccagccttcagaatagagtatgtccagaacaacttaatcaagtttaagcacagaaaaatgtggacttaatttggcatctttgtgcatataaacaagtaggttcttttaatctactgttccttcttctgacayagaaactttgataaatgaagcagtaatttttggagattatgacattcattatcttttttgcttatcttcagcagcagacctttttccttttccaagagaaattttctttgtggcaaggctgtttacttctcacagagttattttaaagcaaatgtcatgtggggatatcaccaggtaaccttaaagcaaggctttttcactacaactctattttatgaagtggttcttttcatggcaaagccatctcaaaacactgtcaaaattggaaacaaaacaaaagtcacacagtcagaaaaatcaatgatctttcaaataatccaagattaaatcaaatcaaactaactctaatcttaaactctaaagc

SEQ ID NO: 540346 - DNA, 542 bp, Homo sapiens
ctgtccaggtcatccaacagagccctttcaccccctatttgtgtctccagccttcagaatagagtatgtccagaacaacttaatcaagtttaagcacagaaaaatgtggacttaatttggcatctttgtgcatataaacaagtaggttcttttaatctactgttccttcttctgacatagaaactttgataaatgaagcagtaatttttggagattatgacattcattatcttttttgcttatcttcagyagcagacctttttccttttccaagagaaattttctttgtggcaaggctgtttacttctcacagagttattttaaagcaaatgtcatgtggggatatcaccaggtaaccttaaagcaaggctttttcactacaactctattttatgaagtggttcttttcatggcaaagccatctcaaaacactgtcaaaattggaaacaaaacaaaagtcacacagtcagaaaaatcaatgatctttcaaataatccaagattaaatcaaatcaaactaactctaatcttaaactctaaagc

SEQ ID NO: 540347 - DNA, 341 bp, Homo sapiens
ttggatttcaacctggtgataccctgagtaaagaaactaggtacactgtgtcaggacctatgactcatatgaacttactcatagaaactgtcagataataaataggaatcgtttaagttgccaagaatttttgttatgcagcaatagaaaactaatatataagccagttagatccttgtgttacttgttttgcatagcctagcctaygctgactgatgtagcatcctaagcacatacttttatgagccatctcataagaagggaataaaaaaagaccctttcttaatggctagccctacatttgtaaatgaaggtacactgctgaattataaagactatgt

SEQ ID NO: 540348 - DNA, 640 bp, Homo sapiens
atgccattcacattgggtgagggtgaatcttccccactcagcccactgactcacatgccaatytcctacagaaacactctcacagacacacccagaaataatgctttaccaactctctaggtattcttcaatccagtcagtttaaaccctaaaattaacagccacagtcctctacttttaagaattttatgtcagtgtttggaatctcaatttcttagtaaaaacactattagaaattagagacagatagtgaaatattttttagtgactctaaaaatgagctggcatcacaacaaaaagaaacgcctaaattcaaatttaaaaatcagactgtcttttcccatacttctttgaggacagagaatgatttattcataaagatagctaaagcaaatttcaaagttcctggcctataataactgacccccttcatgtgtatttctgcatcttcatctgtctctatctctctgtacatatggaattagatacattgatatgatttggatgtttatcccctccaaatctcatgtcaaaatgtgtttctcaatattgaaggtgggtctggtaacaggtgactggattatgagggtggattcctcataaatggcttagaaccatccctttggtgataagtgagttc

SEQ ID NO: 540349 - DNA, 615 bp, Homo sapiens
acaacatgacagaaaaacacgtgtgccagtaataggtggtagactgtggatgatagtgttgggatttaattgaaatgatacttcctcaaaaaacttacaaaagaaaaccactcaaactaattagactatatacatgaattacttgcgctcttcctggatacgacaggtacttatcttttatatagcaggcaagcaaaatacaatccagttaatcatttaagtgaaataacacatcagttttttattagcatcaaatctgaacttttccactggttgctsgttgaaaagaaattacataatttttactttaaaaaaatatttccatgtctttccttttcaaatcattcatttttacatggcatagagataacagacttactaaaagtaatctaaggaaaataaggggaagctcaaggagaacaaaggtaaattcttttgctaattatacataaatatacattgaatatgtgtagtgtttctattgagttgtttttcacatgggcttcaaaagtcagccaatatttaaaacctgccagagctaatagcacatttgattgtccatcattccatctctgttcccatctgtctgtgaagtctaatgattgttgtgaatga

SEQ ID NO: 540350 - DNA, 548 bp, Homo sapiens
ttccacatgacaggaagcagcagtggggccaggccagtccaggagctgggggatggagcaggatggcaggattgaaagagctgtaacatgaattggctgaagcatgccagcaccctcgaccccaacaacttcccacttgccacactgtgggcaataagaaggagagaaccacagttctrtaacacaatggatttcataagaaggaagagtaattaatgaccttcatgatttattttaattaaaatattgtcatattaaaaaatgttattctctgaacatcctaccatgtatatatcacactattgaaatctatttaaaatttttctaaccaataatttaattcagtttgtaacaactaatttatccagtgactattatatccaggttgtgatgcatacttcaggactcatgaacattaaggttctaacacccagtgttttgtgagagtagtaacacttctttgccattgctttggtcaaatggcagaaatcaaactctagtggaatgagtaaggttttcgaagatacttgaacagaaatgagtccatc

SEQ ID NO: 540351 - DNA, 580 bp, Homo sapiens
tatatgattacttgtatttttaaaaactcagaacaattgacaaattgttggaattaacaaaagctcatgaagtttgctatatattttgcctgtataagcctaaatcaatcatattgtgcatactaacaactgacaaataaaaatataataaatatatgtcatttccagtagtaatagcaactttaaaatacataagaataaacttcacaacagatctattgagttgtttgagttccttatatatgttggatattaaccctttatcagatatggtttgaaagcactttatcccattccrtgggttctcttaagtctgttgtttcatttgctttgtagaaggtttttggtctgatgccaatcagatttgtctgtgtttacttttgttgcctgtgctttcaggttcatattaaaaaactctttgctaaaacaagtgataagaggcatttaccctctgttttcttataatggttttacagtttaaagtcttaagtctttaacctattttgagttgatttttatatatgttctgagataaaggtcgaatttctttcttctgcatgtgtatatccaactcatgcat

SEQ ID NO: 540352 - DNA, 651 bp, Homo sapiens
tggaatagatatttcctctttgctcctttcttcactatctttctttctaaaaactcactgcttggaagttcattccagtagtatatgcctcagttttcaaagactgctctccattcatgagttagtcaagctaagagcrtacccttggtccccctcattgtgtgaagattttagcttttaaatccaaccctacccaacattacctcatacttttttggtgacctcaatatccatttagataatacattcaatacccaacgctcttcattctttgacagtttttactctaataatcttgacttccattccatattagcttcttactgccaagttcatactgaatgctatgttacaaccaataattgcactccatctataaaatattaaacacctcaatactttctgttctagtttactgcctccaggaccctgactttcataatattttaacttgattttgatctatacttaattggtcatcattccattgcatgtactttcaaatcttttgtcctgcctttcttggttggacatacctagtatattactatattaacatccctggttgaattacaacttgcttcctattgcaggggggaacatagtttaaaaatcacaactgtgatgattggtttcactttaaatttatga

SEQ ID NO: 540353 - DNA, 482 bp, Homo sapiens
ttctattaaaaatggttggaataaatacatataatggctttgccagtgtaaagtcaaggtgtttagggatttggggtatctgtaacaccactattgaaggtgtggtggacattcaattactttgtacaaagcaatgaggggccacaatgccaaattgtactttctcttgcaaactaaaattagaggtagcttttcttctttcartgaaactaaagactgtatcatttgtgattcaggctagcagtattattcccagccaagtcttattgactttcctttccagtgacattattttaattaatcactaggacaaagcatgttaaatgcagactagaagagtggtttcatgaagtcaaggtcatttccaaaacacattgtttgttctcaatgtagattatcattgtcatttcccgaccagtcagtaagtatctaattttggtcagatcagttcaaacttacaagacgatatcccaaagtagaaa

SEQ ID NO: 540354 - DNA, 615 bp, Homo sapiens
atttcttactgtcacattttccaagataatatttgataacactgaacaaggggttgaaaatctgagctgtttcatatactagttgtgtgactttggataaatcaataaatatttctgaacatctatttctctttcatttttaagggatacaatgatttttacccactacaactgtggtaaaagagtaaatgaaatcttacttgtgaaaaccttagagaactaaataatactaattaaaggtragatacaaatatgtgacttatttgagactcttctcaatcaagaactaatcgctcatgtgtttttggtttcagaactttcttaccataactagatatttctcattttcgtattggtgttaattttgtgtattttcctaagtatttaaatttcatcaagttgcttgagggcagagtcattgtcttatttattttgatctttaaaaattaattctcttagtagacacttgtgatggttaatgttgtgtcaacttgattggattgaaggatgcaaagtattattcctgggtgtgtctgtgagggtgttgtcaaaggagattaacatttgagtcagtggactgggagaggcagacccaccctcaatctgagtgggcac

SEQ ID NO: 540355 - DNA, 527 bp, Homo sapiens
ctttcagataatcagcaagagtatcttggaacaattggcaattgcatggaaattcatgttttgaaaagtgagtaattatatgcacaggtatctaacaatatgtgtactgaagtactcatttgaagcgattatgaataactgccccaaattgccctgagygtttctctcctgaatgctccacaagttgagtttgaagtgcaacgcaagcttagcttcaaggcctccttttgtttactgaagcctgctgaaaatggttcctctgcgctgtcacagtgcacatactcctgccttctcttcctgcacattgaagcttgtttattcttcacagcacacttcagtgtctcaccttgtctcctcctgaaacatttctgtctttgtgaaatctcatttgagtatttcttagtatgacatgctgtcttgctgcacatccgtattttggcacagtttgtcattctaaaataggctattcttaatttagctttagcttttcttcagtgttttcatttaatttcctatcaattgtatta

SEQ ID NO: 540356 - DNA, 461 bp, Homo sapiens
gttgaagggctgaaaagaacaagactggcctccctcaaacaaaagggaattctgccagcagatggcagactttagacttgaactgctacatcaactcttacatgggtctccagcctgccagcccaccctgcagattttgaacctgacagtctccataattacataaaccagttccttgtaataaatctttctctacacaacmcatgtcctatgaattctgtttctttgaagaaccctgactcatacaatcactaatggagggaacacgtctcatgattgagtgccttgtccagaaacttcttggacacaccccaaaagctctctttttggctgcctgttctatttgtttgatagctctgctgctggatcttggggaggaggacagtggagagacaaatgaaaaaataaacttttgctccttggtaattgaatcatgggggtgggtctttctcatgctgttc

SEQ ID NO: 540357 - DNA, 461 bp, Homo sapiens
gttgaagggctgaaaagaacaagactggcctccctcaaacaaaagggaattctgccagcagatggcagactttagacttgaactgctacatcaactcttacatgggtctccagcctgccagcccaccctgcagattttgaacctgacagtctccataattacataaaccagttccttgtaataaatctttctctacacaacacatgtcctatgaattctgtttctttgaagaaccctgactcatacaatcactaatggagggaacacgtctcatgattgagtgccttgtccagaaacttcttggacacaccccaaaagctctctttttggctgcctgttctatttgtttgatagctstgctgctggatcttggggaggaggacagtggagagacaaatgaaaaaataaacttttgctccttggtaattgaatcatgggggtgggtctttctcatgctgttc

SEQ ID NO: 540358 - DNA, 461 bp, Homo sapiens
gttgaagggctgaaaagaacaagactggcctccctcaaacaaaagggaattctgccagcagatggcagactttagacttgaactgctacatcaactcttacatgggtctccagcctgccagcccaccctgcagattttgaacctgacagtctccataattacataaaccagttccttgtaataaatctttctctacacaacacatgtcctatgaattctgtttctttgaagaaccctgactcatacaatcactaatggagggaacacgtctcatgattgagtgccttgtccagaaacttcttggacacaccccaaaagctctctttttggctgcctgttctatttgtttgatagctctgctgctgratcttggggaggaggacagtggagagacaaatgaaaaaataaacttttgctccttggtaattgaatcatgggggtgggtctttctcatgctgttc

SEQ ID NO: 540359 - DNA, 461 bp, Homo sapiens
gttgaagggctgaaaagaacaagactggcctccctcaaacaaaagggaattctgccagcagatggcagactttagacttgaactgctacatcaactcttacatgggtctccagcctgccagcccaccctgcagattttgaacctgacagtctccataattacataaaccagttccttgtaataaatctttctctacacaacacatgtcctatgaattctgtttctttgaagaaccctgactcatacaatcactaatggagggaacacgtctcatgattgagtgccttgtccagaaacttcttggacacaccccaaaagctctctttttggctgcctgttctatttgtttgatagctctgctgctggatcttggggaggaggacagtggagagacaaatgaaaaaataaacttttgctccttgrtaattgaatcatgggggtgggtctttctcatgctgttc

SEQ ID NO: 540360 - DNA, 403 bp, Homo sapiens
cctccccagccatgtggaactgtgaatccattaaacctctttttctgtataaattacccagtctcaggtatgtctttatcagcagcatgaaaacggactaatacgttcctttagtggcgtgtatatgaggcatctggagaccgctctgtcactttccttctgaatgaggaaatttcartgggtactgcattgagtagacctccagaggagaaaatttttctcttattcttctgcctcctcaactttaactgaacctccaatttattctagaaaaattgctgatcaaattcgtccaattcgagtacattgaatagaatatattttccagaagactaatgttgtgtgtgaaagggtcaggagaatgtgactcatcctctctgtcttctctcttttgtgtatgcag

SEQ ID NO: 540361 - DNA, 520 bp, Homo sapiens
ctgccacctgaaagatacacaaattctgacatctactacatgtcaactttgtgattcaaaatcggattttaccattgttattaccaaaaacagacttggccataaaaagagtgtctgaacagractgaagagcttcctcaccatgtatgagatttgccagatgagtcaagtgaaattgaactgagcactccgcctgtccaagtccagacaaggtatgccactggactacatgtttctgctggctttgatgacagaatacaaaatgaattataacttaatggaacctttaatgatgactttcaaagaagactgtgagacaaattcattcagaaaaaaagcacaatacttgcaaaaaaagcaagggagtcacattccagaaggaaagagttgtcaaatataaaacacagcaaaggaaaaatgtaaaatttgcattttttgagaggatcttactctgttgctcaggctgaagtcaagtggcatgatcttggctcactgaagccttaaactgctggcctcaagc

SEQ ID NO: 540362 - DNA, 520 bp, Homo sapiens
ctgccacctgaaagatacacaaattctgacatctactacatgtcaactttgtgattcaaaatcggattttaccattgttattaccaaaaacagacttggccataaaaagagtgtctgaacagaactgaagagcttcctcaccatgtrtgagatttgccagatgagtcaagtgaaattgaactgagcactccgcctgtccaagtccagacaaggtatgccactggactacatgtttctgctggctttgatgacagaatacaaaatgaattataacttaatggaacctttaatgatgactttcaaagaagactgtgagacaaattcattcagaaaaaaagcacaatacttgcaaaaaaagcaagggagtcacattccagaaggaaagagttgtcaaatataaaacacagcaaaggaaaaatgtaaaatttgcattttttgagaggatcttactctgttgctcaggctgaagtcaagtggcatgatcttggctcactgaagccttaaactgctggcctcaagc

SEQ ID NO: 540363 - DNA, 520 bp, Homo sapiens
ctgccacctgaaagatacacaaattctgacatctactacatgtcaactttgtgattcaaaatcggattttaccattgttattaccaaaaacagacttggccataaaaagagtgtctgaacagaactgaagagcttcctcaccatgtatgagatttgccagatgagtcaagtgaaaytgaactgagcactccgcctgtccaagtccagacaaggtatgccactggactacatgtttctgctggctttgatgacagaatacaaaatgaattataacttaatggaacctttaatgatgactttcaaagaagactgtgagacaaattcattcagaaaaaaagcacaatacttgcaaaaaaagcaagggagtcacattccagaaggaaagagttgtcaaatataaaacacagcaaaggaaaaatgtaaaatttgcattttttgagaggatcttactctgttgctcaggctgaagtcaagtggcatgatcttggctcactgaagccttaaactgctggcctcaagc

SEQ ID NO: 540364 - DNA, 655 bp, Homo sapiens
gtagataactaattttctagtttacagattaaaagacgtgtaaaacatttctaaaaatgactgataamagtaatattgtagacagttaaaagaaaaacagtttgaacaaggtcatttagtggtatttctgttacagcaacaggaaagaagcttctactcttgtgagattctatagtttcatattcaagagcccaattttgaagggaaatcaggaatatcaagcactactgccaaccaacagcattattggcatagttggacattatgttttcacaacagattaggttcatgcccagtttccacttggtgctggaaataaatcctgccaactgctttgaagatgtgactatggtgactttttattctttattttcctgtccatatttacttacaaacaaaacagttatctactggggtatgtttatccagaaatattcttgctgcaaatttaaactctaaaagtaatcctttctgacaataaacacaatacataccatatgcacctgcttaatttatatgcaatgctaaactaaaaagtaaaataagtgttagttggtgtaactatgggagtgcacttaggtctgtgtgaacagtgacagttcagttgaagattatagcttctttatgaataaacctataataaaatttaaaattt

SEQ ID NO: 540365 - DNA, 655 bp, Homo sapiens
gtagataactaattttctagtttacagattaaaagacgtgtaaaacatttctaaaaatgactgataacagtaatattgtagacagttaaaagaaaaacagtttgaacaaggtcatttagtggtatttctgttacagcaacaggaragaagcttctactcttgtgagattctatagtttcatattcaagagcccaattttgaagggaaatcaggaatatcaagcactactgccaaccaacagcattattggcatagttggacattatgttttcacaacagattaggttcatgcccagtttccacttggtgctggaaataaatcctgccaactgctttgaagatgtgactatggtgactttttattctttattttcctgtccatatttacttacaaacaaaacagttatctactggggtatgtttatccagaaatattcttgctgcaaatttaaactctaaaagtaatcctttctgacaataaacacaatacataccatatgcacctgcttaatttatatgcaatgctaaactaaaaagtaaaataagtgttagttggtgtaactatgggagtgcacttaggtctgtgtgaacagtgacagttcagttgaagattatagcttctttatgaataaacctataataaaatttaaaattt

SEQ ID NO: 540366 - DNA, 655 bp, Homo sapiens
gtagataactaattttctagtttacagattaaaagacgtgtaaaacatttctaaaaatgactgataacagtaatattgtagacagttaaaagaaaaacagtttgaacaaggtcatttagtggtatttctgttacagcaacaggaaagaagcttctactcttgtgagattctatagtttcatattcaagagcccaattttgaagggaaatcaggaatatcaagcactactgccaaccaacagcattattggcatagttggacattatgttttcacaacagattaggttcatgcccagtttccacttggtgctggaaataaatcctgccaactgctttgaagatgtgactatggtgactttttattctttattttcctgtccatatttacttacaaacaaaacagttatctactggggtatgtttatccagaaatattmttgctgcaaatttaaactctaaaagtaatcctttctgacaataaacacaatacataccatatgcacctgcttaatttatatgcaatgctaaactaaaaagtaaaataagtgttagttggtgtaactatgggagtgcacttaggtctgtgtgaacagtgacagttcagttgaagattatagcttctttatgaataaacctataataaaatttaaaattt

SEQ ID NO: 540367 - DNA, 640 bp, Homo sapiens
atgttttcctatttaaagttttaccatgttaagtgagatagctttctcagcayaagggtgacgcagacaagcagaaaatggctgcctgctagtgccggcttctttagtttggctgttgaaatcatcatagaagctatcaagggctgggggcactcctttgctacacacatcatctttccagtaacatctgctcactgggccaaggatcaattatctctatagaggagatattgctgccagtcctcaaggcaaaaccctgcatgtgaggccagtcttggacaacatcccagaagcttgattttaccctctggacatcatttaatctcagtcaaagggttttgctctttgtccccaggtatatgcagaatgcacacctcagaggaagtgacagaacagattgtggcttttaaaagagtttgggtactgccatgaatggcaaggttctcttgactactatgtagctgtcatcagggtaggtatagcagtccagtctctcctctattgaggactgtattttgttgccaactagtagctcccactttatcttctattctttcattcaacaaacatttattgagcacctactgtgtgcaaggtgttactgagagaaaggaggctacagggaggaattatatgtaaa

SEQ ID NO: 540368 - DNA, 640 bp, Homo sapiens
atgttttcctatttaaagttttaccatgttaagtgagatagctttctcagcataagggtgacgcagacaagcagaaaatggctgcctgctagtgccggcttctttagtttggctgttgaaatcatcayagaagctatcaagggctgggggcactcctttgctacacacatcatctttccagtaacatctgctcactgggccaaggatcaattatctctatagaggagatattgctgccagtcctcaaggcaaaaccctgcatgtgaggccagtcttggacaacatcccagaagcttgattttaccctctggacatcatttaatctcagtcaaagggttttgctctttgtccccaggtatatgcagaatgcacacctcagaggaagtgacagaacagattgtggcttttaaaagagtttgggtactgccatgaatggcaaggttctcttgactactatgtagctgtcatcagggtaggtatagcagtccagtctctcctctattgaggactgtattttgttgccaactagtagctcccactttatcttctattctttcattcaacaaacatttattgagcacctactgtgtgcaaggtgttactgagagaaaggaggctacagggaggaattatatgtaaa

SEQ ID NO: 540369 - DNA, 640 bp, Homo sapiens
atgttttcctatttaaagttttaccatgttaagtgagatagctttctcagcataagggtgacgcagacaagcagaaaatggctgcctgctagtgccggcttctttagtttggctgttgaaatcatcatagaagctatcaagggctgggggcactcctttgctacacacatcatctttccagtaacatctgctcactgggccaaggatcaattatctctatagaggagatattgctgccagtcctcaaggcaaaaccctgcatgtgaggccagtcttggacaacatcccagaagcttgattttaccctctggacatcatttaatctcagtcaaagggttttgctctttgtccccaggtatatgcagaatgcacacctcagaggaagtgacagaacagattgtggcttttaaaagagtttgggtactgccatgaatggcaaggttctcttgactactatgtagctgtcatcagggtaggtatagcagtccagtctctcctctattgaggactgtattttgttgccaactagtagctcccactttatcttctattctttcattcaacwaacatttattgagcacctactgtgtgcaaggtgttactgagagaaaggaggctacagggaggaattatatgtaaa

SEQ ID NO: 540370 - DNA, 640 bp, Homo sapiens
atgttttcctatttaaagttttaccatgttaagtgagatagctttctcagcataagggtgacgcagacaagcagaaaatggctgcctgctagtgccggcttctttagtttggctgttgaaatcatcatagaagctatcaagggctgggggcactcctttgctacacacatcatctttccagtaacatctgctcactgggccaaggatcaattatctctatagaggagatattgctgccagtcctcaaggcaaaaccctgcatgtgaggccagtcttggacaacatcccagaagcttgattttaccctctggacatcatttaatctcagtcaaagggttttgctctttgtccccaggtatatgcagaatgcacacctcagaggaagtgacagaacagattgtggcttttaaaagagtttgggtactgccatgaatggcaaggttctcttgactactatgtagctgtcatcagggtaggtatagcagtccagtctctcctctattgaggactgtattttgttgccaactagtagctcccactttatcttctattctttcattcaacaaacatttattgagcacstactgtgtgcaaggtgttactgagagaaaggaggctacagggaggaattatatgtaaa

SEQ ID NO: 540371 - DNA, 551 bp, Homo sapiens
cctgatttttaggtagaaaacaaagcatatcagaaccacttctttgcttgtattaaagtcaatttcatgtccaattttccctttaaaacatttgattagattttcttggaataaaagacttctgtctcactaactttttaagaactctctacctttgatttgcaattttgcatgattggatcttggaaacatttcatcctaacttatgagttgttctgatttgtgtccctggatggtgcacttatgtacgttattatccactggatatttrtacttctatggcaccgataaggtcttgggcaaataacatttcttacttactaaattattaattggaacattataagaaagttttttaaaaaagacaaaaaaataggcaaagagagaaaacatatttcaactcacccttgcttaatgatatagtaggaagtacatatcagattatacattccagggaccctcttgggaaaaggaggttaatgtagccaacttactcttacttgctgccaggtccagcaggctgattaaataatttagttgttttggctgtg

SEQ ID NO: 540372 - DNA, 551 bp, Homo sapiens
cctgatttttaggtagaaaacaaagcatatcagaaccacttctttgcttgtattaaagtcaatttcatgtccaattttccctttaaaacatttgattagattttcttggaataaaagacttctgtctcactaactttttaagaactctctacctttgatttgcaattttgcatgattggatcttggaaacatttcatcctaacttatgagttgttctgatttgtgtccctggatggtgcacttatgtacgttattatccactggatatttatacttctatggcaccgataaggtcttgggcaaataacatttcttacttactaaattattaattggaacattataagaaagttttttaaaaaagacaaaaaaataggcaaagagagaaaacatatttcaactcacccttgcttaatgatatagtaggaagtacatatcagattatacattccagggaccctcttgggaaaaggaggttaatgtarccaacttactcttacttgctgccaggtccagcaggctgattaaataatttagttgttttggctgtg

SEQ ID NO: 540373 - DNA, 342 bp, Homo sapiens
ctcactgtcatttaatggcatcwcattccttggcctccctgaatctcaggttttaatatttaaaatgaaggcaggtgctgatgatctatgatgctactcctaactctaacattttgtgtttctaatttccaaaagaatttagtcaatatagaaatactttgttacaatttacctgccattatgaactaaacaatgctacttgtcactcaaaaccacaaatgcaaaacgagtgatgattgaaactgaaagcaaatatgcgtataatctctcaaaaaataataagttttcttgttacagaataagggagtgattggcagggaagctgattattataagcctatt

SEQ ID NO: 540374 - DNA, 588 bp, Homo sapiens
taatagataatcaggaaaaggtagcaaaaggtaatatgctaccttttgaataagaggagaaattaacagcatgtattcatccytatttgcttaaatttgcataaaaaaggactggaaagataaatagtaaaaatagttacctttatttaggtcagagattctcaactgggagacatttagcaatgtcttgagatatttttcgttattacaagtggagtttgtgggtggggttgttgctactggcttctagtggatatagactcattgtgctagtaagcatccttaaatgcacaggacaacctcacacaccccacaaaaaagaatcatccagccaaaaccatcaacagtgttgagactgacaaacgcttccctatggggaagtagggcaataaggcctatggaggtgatgggccagggtcaagacttctctgtgtatatactttttacattatttctttgattcatttaaatgtattacctattccaaaattaattttaaagaactattaaaatgtcaagatttagaacagcagtttttcttcattctcgctataaattttagtaagaatgaatagcaggtatgcttaa

SEQ ID NO: 540375 - DNA, 615 bp, Homo sapiens
cacagccaatgcacaattatttaatatataatcatgagaaataacaaattgttgttttaacagtctaaggtttgggttagcttgttatacctcagtagataagtgaaacactatttgaggccatgtatgatcttcccgtygatgtctctaatcttaactttcagccctctccccttcatgcgcactactctagtcactctgatcttttcaattctcaaatataacctggggcacaggatcttcacatatgctgccctctttacctgaactatgcttccagaggcccctcccccacccatcccacatactatctgccccccttttctctaagtaactcctacttgtcatttactcttatacaagccttttattttttctttagagcactttctataattataattacttgggtagttatttgtttaatgtctgccttccttctaacctaaaaatttactgaaggcacccagcacaatttctggcatctaaagatactcaatacttaattcttgaattgatgaaccgataggttgattgcaatagagccaaaagcaaaactgtgtctcttgcctcatacattagtgttcttgtccttggaatttaccatcctcctct

SEQ ID NO: 540376 - DNA, 542 bp, Homo sapiens
ggcctgaagtttttgttgttgttgttgtgtctttgccaggttttgatattcaggatgacgctggcctcatagaatgagttcaggaggagtctctcctcctcaatttttggaagcgtttcagtagaaatggtaccagcttttctttckgcatctgatagaatttggctgtgaatctatcatgtcctgggctttatttgttggtagtctatttattactgattcaatttcagagctcattatttgtctgttcagggaatccatttctttcttgttcagtcttgaaaggaatttatctatctcttctaggttttctagtttgtatgcacagtggtgtttgtagtagtttctgatggctattttaatttctgtggggtcagtagtaatattcccttcatcatttctgattgtgtttattttattcttctctgttttcttctttattggtcttcaaggactttttattatgtttcccctgcctgtagtgctctttgcccatgataatctagatatcttctcattgcctctagtaatctggctctcag

SEQ ID NO: 540377 - DNA, 637 bp, Homo sapiens
aatctgagttttggttaattgttttgtgatcctcccagaacacaagaagatcagaggctgtaaggagctgctataaggccttctcccagtcacttccctctctctcctgagaggctgtcttgaatgaatttctcatcacttaccagattctgatgaggtatggagctttctttcctgtgccttttagaatagagctgyggaatatatagccactcagccgcagtatagatttggctcctcagccagggagtatccctcaacttgcattatagtcatctagccccttttgtttctttgttgtcttttagggtatatgagacaaggacctggggagttggcctctttggttcattctttgtactgtttatgtaagtactaaactgtctcaatctaaaagtggttccttgtatttttaccagtcaaatcagtcaggctttagccttgtatatatgagcttgttaccatataatcctaataatcctaattgctgtctatgttttttacctgtaaattaaaataattaggatacttgtgttcattcaaaggttcttacattaaataaatactgaaggattaccatgttcttaaatcatttgtatttgggaagctttaagccttcagtgaattatcaaatgca

SEQ ID NO: 540378 - DNA, 637 bp, Homo sapiens
aatctgagttttggttaattgttttgtgatcctcccagaacacaagaagatcagaggctgtaaggagctgctataaggccttctcccagtcacttccctctctctcctgagaggctgtcttgaatgaatttctcatcacttaccagattctgatgaggtatggagctttctttcctgtgccttttagaatagagctgtggaatatatagccactcagccgcagtatagatttggctcctcagccagggagtatccctcaacttgcattatagtcatctagccccttttgtttctttgttgtcttttagggtatatgagacaaggacctggggagttggcctctttggttcattctttgtactgtttatgtaagtactaaactgtctcaatctaaaagtggttccttgtatttttaccagtcaaatcagtcaggctttagccttgtmtatatgagcttgttaccatataatcctaataatcctaattgctgtctatgttttttacctgtaaattaaaataattaggatacttgtgttcattcaaaggttcttacattaaataaatactgaaggattaccatgttcttaaatcatttgtatttgggaagctttaagccttcagtgaattatcaaatgca

SEQ ID NO: 540379 - DNA, 473 bp, Homo sapiens
aagctggtattccagccatgagtaccaatgatctgtgtatgttaacttataagttggattgtcctcattggtttccatatgcgtgcatggtgtcatgaaggggagaaggtggttttgttgtattatctattgtgacctcaatttaagggatttcatatcaccacctggcatgtcctcctgctttgtgcaataatttcctagcaagtgagcatcacaggaatataccctgaggggttgacataatgcgctttcttcacagctcaacctcttcatttggtttccagatgctaccatcactcacgatgtcagtgaaaagaagataaaaaacagccaaccagcaactgataacttcctgtgcactgttacaccagggcttattaatttggcagaagctgstattctggccacgagtacgagggatctgtgtatgtctgtttactggttgtactgtcctacttgttttccatatgaat

SEQ ID NO: 540380 - DNA, 502 bp, Homo sapiens
atcatcttgctgccctttacatttctcatttgatattatttttatagttcacctataaatgccgtgctgtacacagcaggaagcgagactaattgagccctccttaacctgcctcctttctacctcaaatattctgaaaaaatggaggtggctattggagttgaacactcttatctccactccatcatcacacatctgtgttttttatgattctacagatccttcccctttgtctagaaaaagtggctttcttttcactccaggtctgacacctctttcatttattcatcatctgtggcaggcagcatgccaggagctgggaatcagcagtaaacagcccagagagcaacgttccctgcccttgtggagctcacatcctcatggggcagtcagacaaaacatgtacaatgagcaaatgaaacaaacagcgctgagctggtgttggggaagcagtccacgggcctgtgggagrcagcagcagagggagccccaggggctgcag

SEQ ID NO: 540381 - DNA, 512 bp, Homo sapiens
tggttgctacaacttagaggatatttcacctaatggacagtatctttaattgaaaagtgaaggatgaaagtagagtatttttggagagagggaggtcagaaatttgaacacgtagagccagttgaattttacatgcctattagacacccagtagagataccgcgcgtgtagttgtatttgagtctggatttcaggagcaagttgtagtgctgaagtataatggtgagaattcttatagtgtgaatcatttaaaattctaagacagcatggcatcgcctaaatagatagtatactgaagagaagagagtctaggattaagctttggggttccgaaatatttagaggtgggaagggagaggaraaaaacaaaaaagagaaggaaaatgagtctctagtaacagggtaagaaatccaggtgtctggggacccaagaagctttccgtgcaggagggagtaaacaactgtgtcgcatgctgctgagacattaatgccaaagtgtagcaaacactggt

SEQ ID NO: 540382 - DNA, 512 bp, Homo sapiens
tggttgctacaacttagaggatatttcacctaatggacagtatctttaattgaaaagtgaaggatgaaagtagagtatttttggagagagggaggtcagaaatttgaacacgtagagccagttgaattttacatgcctattagacacccagtagagataccgcgcgtgtagttgtatttgagtctggatttcaggagcaagttgtagtgctgaagtataatggtgagaattcttatagtgtgaatcatttaaaattctaagacagcatggcatcgcctaaatagatagtatactgaagagaagagagtctaggattaagctttggggttccgaaatatttagaggtgggaagggagaggagaaaaacaaaaaagagaaggaaaatgagtctcyagtaacagggtaagaaatccaggtgtctggggacccaagaagctttccgtgcaggagggagtaaacaactgtgtcgcatgctgctgagacattaatgccaaagtgtagcaaacactggt

SEQ ID NO: 540383 - DNA, 512 bp, Homo sapiens
tggttgctacaacttagaggatatttcacctaatggacagtatctttaattgaaaagtgaaggatgaaagtagagtatttttggagagagggaggtcagaaatttgaacacgtagagccagttgaattttacatgcctattagacacccagtagagataccgcgcgtgtagttgtatttgagtctggatttcaggagcaagttgtagtgctgaagtataatggtgagaattcttatagtgtgaatcatttaaaattctaagacagcatggcatcgcctaaatagatagtatactgaagagaagagagtctaggattaagctttggggttccgaaatatttagaggtgggaagggagaggagaaaaacaaaaaagagaaggaaaatgagtctctagtaacagggtaagaaatccaggtgtctggggacccaagaagctttccgtgcaggagggagtaaacaactgtgtcgcatgctgctgagacattaaygccaaagtgtagcaaacactggt

SEQ ID NO: 540384 - DNA, 633 bp, Homo sapiens
tatgatcctcttgagagtacatgatcacagactgtcttagtaatgtgtgccttggcaccaaacacagtttagaatctcatatctagaatctatatcatgttccgtgatctagaatcatctccctttacctaagtcatgactcagtccaccctcactacttcctataggttcacaccactaggttaaacaattcccttatgcctccagctcagtttgagaatgggctgacctcccttacaccaccatcccaactaaaaatctaattctaaatattaatactttaatatttagaatgccaattttcactgaattattcaagctcattttttaaagctcaaaggagaagtatgtattaatgagcacatacactgtcctacttaacttacctgcccattatttataaacacacagccaaaagtataaacttcttcaggtggagttggctgactcgtttgaagtgtccratttgaagtgactgactcctttgaaccagcatctgcagatattcctcatagctaactatgtgtgtgtgactagaacactctgattaaaaactagaacataaatggcaaagaaatcgacactattctccccattgaaagggtgtaggctccgtggcattctcttatcatc

SEQ ID NO: 540385 - DNA, 555 bp, Homo sapiens
acagagtcctgctttgtccctcaggctgacgtgcagtggcagcgaacagggctcactgcagcctcgacctcctgggctcaagcaatcctcccacctsagcctctcgagtagctgggactacaggcatgcaccaccatacctattttttgtagagatggggtctcactatgttgcccaggctggtctcaaactcgggctcaagcaatccacccgccacggccttccaaagtgctggcattataggcgtgagcaaccacgcccagcaaggtcagaatatcaacattggtgataagatgaataggatagaatttcaacattggggggttgggggaggttatttgagtattccatttaagatctgtagtggggagctctttccaaggcactgtatctcaacagtgtttcaggataaactttttggaaggtaatctgtcttagctctgggttaaagggattcttccctgtatactccacctcaaattcccaaaggtagatctccaatgagttctgccaatgtggcaccccaacaagttctctggcatacattgagtaaca

SEQ ID NO: 540386 - DNA, 595 bp, Homo sapiens
ctggtgagctggtgacagagttgatgttgcattcatctgcttaaggactaatttgctcattcctgtggcagaaataaagtgggttctttttcttgtgtctaatgggagtttacaaaaagagccagactcacagtgcaggcaaaaaaccaattaagctttcattctacttcctattctccccagacccagtggagaggaaaaggaagtgtccccagatgaagttaggagttcagggttataatttcttaccacctaggcagttatgctcacattgatggcagaaagggacaggtgatgccatcttawcatttcatggagtcccagcaggtgaaacagcagtggccaggacccaacacagatcctgttggcttaagctgaccccaagagatggacattgggcttctcctcaaatgagaccacctgagtatggtcctgactgttgctgagtgacactttcaaatacaggcttacaaaatatacacacacagctaggagacgatcatgcagtaatatgcttatcatggcattggcacaaaatcaaacttcagtattccaatagtgcattagccaggctcatatctaaggctacgtactt

SEQ ID NO: 540387 - DNA, 407 bp, Homo sapiens
gttaattaccctgcggattgcccagggtggccagcctctccccaatcacatggactagtattgaaagagtggtcctcacatgaaaaaaaaatggaagaatagtggcagagaaatacgggagggagggcctcatctctatataaaaagtatgagcatatttgtgttcttttgtacactcattgatrtagtcactgggaaaataattgagaaaaacccacacacgactttctacatgcctctgtgctctgtattcaacactgagctgtgagaactgtaattattaaaacaaaactttgaagagaagtaacaatttgggacaatggggacccttagctgacatgacaccagtgagcagttcttcttttgtgtgcatgaagatgcaattcccaggagcccacctggggtct

SEQ ID NO: 540388 - DNA, 440 bp, Homo sapiens
aactgagttcaagttcaggctctgtgactcactgggtaagtctcttgctctccttgagtcccatatcctcattggtaaaatggagaggtagagttattgttaggtttggaaggcaaggcgagggttaaagaaagacagaaagagatagttggtggcttctaacagcaacatctttattgacagcaaaaccctggggaggaggaaaccagcttagtgccagcaccaattgccrctcacaggctggggtaatcatgggactgggagggagggatctgggtggtagagcttgctgcccagcaggatatggctaggatgtccctgcagtcaggctgttgggcctttgcccaggaagatgcgataaggatgtttctgcagtcacgtggttaggaaggatgtttctcatggcccaagttcccatggaacgtttcactgtgatcaga

SEQ ID NO: 540389 - DNA, 298 bp, Homo sapiens
ctgggattacaggcatgcaccatcacgcctggttaatttttgtgctttttttttttttttttttaaagacagggtttcaccatgttggccaggctgatcttgaactcctgacctcaggtgatctacccacctcrgcctccaaaagtgctgggattacaggtgtgagccaccacgtctggccaactaaatattttaaataaactacaatgacaaaattatgatgataaagtcttaccatattggtattaagagtctctgcttctagaactggttatttgcagcaaaatacatgttattc

SEQ ID NO: 540390 - DNA, 322 bp, Homo sapiens
aattgttcagtggggggtcggstgagcagcaacctggtaaatagtggtcttgtcagtgggaacctggtcttgtcactggggaccaggtcagtggaaaattggtcagtggagtctggcccatgaggcctattaagtgcgggcctggttaggaagacatggtcagtggggacttgatcagtgggacctggtcaatggaggagtggtcattaggggccccatcactgggaacctggtcagcggcggttggtcagtacctggcccgctggccactgtgtgacctcagggggtttgtctgtggaacctcacctccatctgcagggaa

SEQ ID NO: 540391 - DNA, 532 bp, Homo sapiens
aactgggagcagtccatattttcagtaatggctgcatagtgttttaaggccaatttagattctttttcwtagagagaaaaacataaacatgtgattgaacgagtctcctctattagactaattggtttagatttgatatttaattgctaaaaatacatttagaatataaatcttactgtgtcaaggtctcaaagaacaaataattggtatggtataaagtatttaattgtatgctaaaaatttctaagctaaaatattttcaatttatgcaaggataggtgccatacatattatatattattcccccattaagcaaatttatactgagacaaaattatcttccataaaaaagaaaaagccacataaaattaaggactaagtttttctgcacagactggacaacaattcctaacacataaggtcaatgagaatcagaacagtcagagaaagcttcataaaaacaaaaaaattgtctgccaggtctgaatgaatgaggctagatgaacagaaactgagaaggcagaaaggatag

SEQ ID NO: 540392 - DNA, 532 bp, Homo sapiens
aactgggagcagtccatattttcagtaatggctgcatagtgttttaaggccaatttagattctttttcttagagagaaaaacataaacatgtgattgaacgagtctcctctattagactaattggtttagatttgatatttaattgctaaaaatacatttagaatataaatcttactgtgtcaaggwctcaaagaacaaataattggtatggtataaagtatttaattgtatgctaaaaatttctaagctaaaatattttcaatttatgcaaggataggtgccatacatattatatattattcccccattaagcaaatttatactgagacaaaattatcttccataaaaaagaaaaagccacataaaattaaggactaagtttttctgcacagactggacaacaattcctaacacataaggtcaatgagaatcagaacagtcagagaaagcttcataaaaacaaaaaaattgtctgccaggtctgaatgaatgaggctagatgaacagaaactgagaaggcagaaaggatag

SEQ ID NO: 540393 - DNA, 387 bp, Homo sapiens
gctgaggtgggaggattacctgagctcaagaggtcgaggcagcagtgaaccgtgattgtccacttackcttcagcctgggtgacagagtaagactctgtctccaaaaaaagaaaaacagaaaagaaagaattctgctgttagaactttgcttttcttagccccaaatgctgagttcttcagaatcacaaacaattattgctgttgcacattactatttttttaagaatttttaaaaatagaggttggtttttaatatttaaagtgaggatttaaggaaccacaactgattcatactcgaaataatgttaactgtccaaatattctaaagattctatcactgagctatctatgtgccttgaacatgtgcctaatgggcatgctattaa

SEQ ID NO: 540394 - DNA, 581 bp, Homo sapiens
gccccaaggatcctgtgacagcaccaccatgcaaaagactagattgagtactggtacagcaaatatgactactaagcatttctatccaatattcaatagataggtttattcaaactttatggctttcatgactccctactcatattctgtatgaataataaaaaataataatttccarcccagtttttcatgagagatagtgtggcatgatgtaaaaagccctggctttggagtaagaaataactggattcaacttatggtcctcttaggctgtgtgacttgaggctaggtatatgagctctctaaacttcagtttactcagctaaaaagtaggttataacataaagggctttgtagggattaagtgagcaaaatcatttatattacattctttttatttatgttgtaactgctagagaaggagatttaaaaaaaaaaataggtgactatctgaaagaaacttactgttggtattttttttttattcaaagtttcatcttgattaaaaggcaaaagttttgatctttggaagctcatggctagttgtgtaatctcccagttagtcattgttgttatcttcc

SEQ ID NO: 540395 - DNA, 379 bp, Homo sapiens
tgtcattcaaaatttgactttcatatttcctaatctccttttttccagcatcctttccaagaaccactgtaagtaaaacagtgcactagacccctttaaatttgaagaaattcaaatagtcacccaytccatgactgtaaacaattgactctcatctcaggcatcaaattcatctattacagtagaggtttaagtactaacccactcaaaagaatctttcagatttagtaactcagaggagttacaataactcagtgggagaactggttgaggtctttgttctagttctgatgaactagtggcacttcctggctcaggtcatcatggagccaaactctttcccttccagttccagcgcaagtctcacctactggcacct

SEQ ID NO: 540396 - DNA, 616 bp, Homo sapiens
tttttgggttattatctcagtgtctcatcttagccacaggccattgcactggggtcatagcctccagagaataaagccaaaaatattcttttaagcgtaacctgtttatctatttcaggtaagggatttttttcaagttaccaaaaatagtatttcatgctttgtacttatttttaaaagggactttcacatctaattctcctttgatcctcctgacagtcctacacagcaggcgggctagatgtcattatgaccatttgtcatatagtgaaattgggcatggaggggtaaggagatgtcatgtgctcaagggaccttctgatgagtggtgcaggcaggccaggatgcgggcctcagggccccagttcatcttccccmctctgtgctctctcctctagccaggctaactgttcttagcttaaggggaatgacagaaatttgaaaatcattgatggaaatgcctgggaagagctgggcgtgcggatcaatagtattaagagttgttctgctcagtttgcagagagaaaagggcatagtactgaggaataaaagcaaaactgctgttcagccctcccagcagcccctcttctgtggcaggaatgccttcccatacgcc

SEQ ID NO: 540397 - DNA, 616 bp, Homo sapiens
tttttgggttattatctcagtgtctcatcttagccacaggccattgcactggggtcatagcctccagagaataaagccaaaaatattcttttaagcgtaacctgtttatctatttcaggtaagggatttttttcaagttaccaaaaatagtatttcatgctttgtacttatttttaaaagggactttcacatctaattctcctttgatcctcctgacagtcctacacagcaggcgggctagatgtcattatgaccatttgtcatatagtgaaattgggcatggaggggtaaggagatgtcatgtgctcaagggaccttctgatgagtggtgcaggcaggccaggatgcgggcctcagggccccagttcatcttcccccctctgtgctctctcctctagccaggctaactgttcttrgcttaaggggaatgacagaaatttgaaaatcattgatggaaatgcctgggaagagctgggcgtgcggatcaatagtattaagagttgttctgctcagtttgcagagagaaaagggcatagtactgaggaataaaagcaaaactgctgttcagccctcccagcagcccctcttctgtggcaggaatgccttcccatacgcc

SEQ ID NO: 540398 - DNA, 616 bp, Homo sapiens
tttttgggttattatctcagtgtctcatcttagccacaggccattgcactggggtcatagcctccagagaataaagccaaaaatattcttttaagcgtaacctgtttatctatttcaggtaagggatttttttcaagttaccaaaaatagtatttcatgctttgtacttatttttaaaagggactttcacatctaattctcctttgatcctcctgacagtcctacacagcaggcgggctagatgtcattatgaccatttgtcatatagtgaaattgggcatggaggggtaaggagatgtcatgtgctcaagggaccttctgatgagtggtgcaggcaggccaggatgcgggcctcagggccccagttcatcttcccccctctgtgctctctcctctagccaggctaactgttcttagcttaaggggaatgacagaaatttgaaaatcattgatggaaatgcctgggaagagctgggcgtgcggatcaatagtattaagagttgttctrctcagtttgcagagagaaaagggcatagtactgaggaataaaagcaaaactgctgttcagccctcccagcagcccctcttctgtggcaggaatgccttcccatacgcc

SEQ ID NO: 540399 - DNA, 300 bp, Homo sapiens
aggtccggaggtgatactgtctaaaggtaggggtggcttccatggcacrgcccctccactgccttcttctcttaggctccaagctggaacagccaaatggagaaggaaccattcagttacccagtgcacctccaccatggccccaccatgcacctaggtcaagtgcttgggaaggtggcagcggggctggaggaaggaagaggtaacagtgggtgtgctggggggcaaatcaagtagaaacaacccaggagtgaggaaatgaggggctgcccaagaggcaggcctgtggctcaaaggagg

SEQ ID NO: 540400 - DNA, 401 bp, Homo sapiens
cagcagaaagttttagaggtgagtaattttacagaagtaaggattctgaatttggaaaataggattgactatccttgaagaccatgtttaaagtgacaagtcagaagcaactgagagaagatagctttgcaaggaccaggctgcatattcttgggagtgcaccgaggaaaatttatgttacaacttacagaytccattttctatctctctgcaccaacctgcacagggaacttcaaatcaaattcgaacagaataaatatcagttgtcttttctgagaattatgagaaataattccgtctccatttattggtcccttattatgggaacgtggtaaaacatgacttgataaaactaagatctgaaaaataaactatgttaagccccacgtacaaccttcact

SEQ ID NO: 540401 - DNA, 401 bp, Homo sapiens
cagcagaaagttttagaggtgagtaattttacagaagtaaggattctgaatttggaaaataggattgactatccttgaagaccatgtttaaagtgacaagtcagaagcaactgagagaagatagctttgcaaggaccaggctgcatattcttgggagtgcaccgaggaaaatttatgttacaacttacagattccattttctatctctctgcaccaacctgcacagggaacttcaaatcaaattcgaacagaataaatatcagttgtcttttctgagaatkatgagaaataattccgtctccatttattggtcccttattatgggaacgtggtaaaacatgacttgataaaactaagatctgaaaaataaactatgttaagccccacgtacaaccttcact

SEQ ID NO: 540402 - DNA, 415 bp, Homo sapiens
gttttatttttaatttcaaaatagagacttagccacaaatttctttataattaatgaagaacagtagctttgctgaaattatttatatcttcctctgttgtgtgtgatgaaagtctttaattatgtgagccaatcaaagtttctagttaatgaggaaacctgcttagcttagcttggtatgtaacttgacttgacctctgtctttgaagcttcactggggcttgaaacaatgctgttctttcaagttcagttcctcaaatgaaagttttttgggaatacaaaggtacaatatgagttctgtaagccttccagttcaagcagattccaatagacagaaaatataaatayaacggaaaaaacaatttgtgaataaatagagcaggtgttggcaaactttttgtgaagaggaccaaac

SEQ ID NO: 540403 - DNA, 524 bp, Homo sapiens
ctgccttaaccgtggcttatcactctgaccagccacggctctgcatttctctggagaagagtttccaagaaacaaccaagaggccctctgtcattgccactaggaaggggcaaagaaccagactgctttgctcatacctccagcacacttcagccaccttgaccagatagattcaaagttgaattctaccagaatctaatctaatagcacatcaaaaagcttatccaacaccatcaagcaggctttatttctggaatgagaggctagttcgacatgcgcacaccaacaaatgtgactcaccatataaacagaatcaaaaccaaaaactgtatgatcatctaaatagacatagaaaaagtcttctataaaatccaatataccttcatggtttttttttwaaacaaacaaacaaaaaaacaacaaaaacaaaaacaaaaaacacaaagaaccccaacaaccctcaataggcactgagggaaaatacttgaaaataataagaacaatcttagacaaaccaatagcta

SEQ ID NO: 540404 - DNA, 627 bp, Homo sapiens
tctattgttatgtagccaattttactatatgcctcccatcattttagcagaccttttctgcttttctrttaggagccatattaaacggcaaaaaaaaaggcagaaagcgaaatgaattacctcttgataataagtctgacaaatttggcaggaaaaaatattctaacagataaacaaagttgtagaactatctatatacataaatagcacatgaatatataaaatagatttattttcccttaactaaaataaaaaccatggacttttgtaaagtatcagtttatcaggaatttgccaataggagacacttttcttcatggatcagtcatatttagaagaaaatctatgtccccttccttggaattgcactgctctccttgttgctctggcaccccctggtggactgaaatcacacagattagggagaatggaggagtaacccaccaggaatctgttgtctggaagataaatgtgttgcatttttcaagtaacttctctgatttgagcactttgagatgaaagtacattttggttacattgatttagtactatggccttctgataaaggcactgttgggccctctgtggtgcaagcttctctgtgcttcctctgggtttttaatattt

SEQ ID NO: 540405 - DNA, 635 bp, Homo sapiens
ctattgttatgtagccaattttactatatgcctcccatcattttagcagaccttttctgcttttctgttaggagccatattaaacggcaaaaaaaaaggcagaaagcgaaatgaattacctcttgataataagtctgacaaatttggcaggaaaaaatattctaacagataaacaaagttgtagaactatctatatacataaatagcacatgaatatataaaatagatttattttcccttaactaaaataaaaaccatggacttttgtaaagtatcagtttatcaggaatttgccaataggagacacttttcttcatggatcagtcatatttagaagaaaatctatgtccccttccwtggaattgcactgctctccttgttgctctggcaccccctggtggactgaaatcacacagattagggagaatggaggagtaacccaccaggaatctgttgtctggaagataaatgtgttgcatttttcaagtaacttctctgatttgagcactttgagatgaaagtacattttggttacattgatttagtactatggccttctgataaaggcactgttgggccctctgtggtgcaagcttctctgtgcttcctctgggtttttaatatttagtaaagca

SEQ ID NO: 540406 - DNA, 620 bp, Homo sapiens
tcacttggaatagctggttttccctactgtgcatattatgcctgaactaattaacatgctaccagcttgttaaaactttgttttaataactagatatgtgggtttcccttttggtctgagactactcatcatcagagtcctgtggatttaccttcaacacatccctcccgttgcttctttctcacttggttcctctgctgccttaggctaggccttccctggtgttccagattgaaaaccagtatctctgtaatcagattctccctctgaaattcgtactgtgtattcctgccaagtatatcttttattgttctgctgtttattggattgggtccacatctcatttattcaaggcctgctgtcatctggacacgcagtacttgtctagtctgatctcctactcttccagatgtgaatttgctgctccytttaagcccctcttcattgttttctgcatactagagttatttcttttccctttctctcctcacctggctttttcagattgcctttcttctctccactcagcatcccctacccggctccttcagaacacctccagcagagcccttcccagggtgttccaacccatagccatcactgttctccagatccctatc

SEQ ID NO: 540407 - DNA, 500 bp, Homo sapiens
ttgcactcttgatctcccaggctcaagtgattctcctgcctcaacctcctgagtagttaggactacaggcacatgccaccacatctggctaatttttaaaaattattttgtattgacaaggtcttactgtgttgcccaggttggtctcaaacttctgggttcaagcaatcctcctgccttagcctcccaaagtgctgggactataggtgtgagatgctgcacctggccaattttctatttcttttattacattttaaattggctattgctgcaaagaatttttaatgcacagtcatgattttggcccatgatctaacataattctcatatttttaatagtttttctaattaaaaaagattgataattaaatgtttaattttcatggaaattagttcaaggagggatttaatagaaggtggatacaatgagtgtatttggtacaggaactggaccttcttgggggagtcaktgaaggcttcctgagatggtggcatttcag

SEQ ID NO: 540408 - DNA, 622 bp, Homo sapiens
tacagaaccttatagctgattgctatcattagaagcatttttattttgtgttcctgtgatggtcatccaagaaaagtggatctgaaagtgtgcctccctccgtcccagcatcatatggcactcactgttctattgagtagatctgggagaggccaagttggacatcaactttggtagcccaaagaggagagtgcacagctcaagatacaactgcctgtgcaggggaagccaggtaggggttctttcctattggagctgcaagcaggataaaattctgtcttcraatatattagtgtttatttcttatggcacaatgtttagaaataaagaaatatataaaatttgtgctgactacaattttagtagtgttctttctagctatagtatgactatcctaataatgtgtttgttcatcaagagaaaatttgattgtattcaaaatcatcatctttgcaagaaatttactattacatttgtcactgaaaaaaagggatgatagattctttagatataattccaactgtcataaattgttaagtagttataaaaaatattctcactttttaaactacctactcatatgaacatttcccaccaatggtaatgatcacatataattaga

SEQ ID NO: 540409 - DNA, 545 bp, Homo sapiens
tatctatgcatctattccaatttgctttttgtcttcattggtactaaaatcagtggtctgctaaatctacttattattgtacagattcccatgaacctacatttaaaaaattcatattttatatgtcatttctaatgttttagagtataaataatcaggcatttgaaataatctcttaattttcatgttctttacattgataargataaataatatgtagtattttgaaggaataataatgtagcaaatgaccatgacagttgaatattattcattccaatttgttttattccaataatccttttagacctggatgttatggactgaattgtgtcccttctcatatccatatattgaatccccaacccccaatgtgactatatttggagacaggatcattaggaggtgattaagatcataaggatggggtcctaatctgataggacagctctccctttaggaagaggaagagacaccgaatctctgtctctctctctctcttcctgtacacacagaagaaaggccatgtagcaaaaaggtagcca

SEQ ID NO: 540410 - DNA, 601 bp, Homo sapiens
tctcgctctgtcacccaggctggggtgcagtggcatgatttcggctcaccgcaacctccgcctcccaggttcaagcaattctcctctctcagcctcccgagtagctgggactataggatcacaccacgatgcccagttttttgtttttgtttttgtttttctttgtatttttagtagaggcggggtttcaccatatttttcaggctggtctcgaactcctgacctcaggtgatctgcctgccttggcctcgcaaagtgctgggattacaggcctgagccactgtgcccggccaaagttcagacttttcacaaaagactttcatagtcaggsacagagaaggaggaagaaaggaaggaggaatgaagtgatttttagtgaaagctaaaagtgaataatggtttttcaattattcctaccttttcaacttctccttgtatcactatccccttcactcattttattccagatacattgttccttttgtagcattggatattctgcattcctttaaacatcaagtactttgtacttgttactctctttggtatgctcagcgaaaaaagacaattagatacctgaaaataaagcttcgcttagtta

SEQ ID NO: 540411 - DNA, 639 bp, Homo sapiens
cggcagcagcagcttgctcctgtctcacctaaatcatctccaccctcaccaaagccctgggtgaatattattagcccctcttctacagatggggaagagaaagcaggcccaggaggttaagcgacttgaagtcacacagcttaggagtaaagagcyaagatttaagccccagtctgtgggggtccccaagagtggactcatgacattcagatgtctccagtcccgcagccttgctccctggctccaaacccaccaagaatgccccctgggtcattcatccatgtccttctcctcccaggagtaacataacactctgaaagcagagaccaccttccccacctcctagcccagaacctcccaggggctcagcaaagagttgcccaaaacttaaccagtcccagacctgcagccgccaaaccaccaggatggctctccacaaatctttccaaggctctcccagaaaccccaactgtggcccaaagcccagttctcttcactcatttctagtctctagagcaattcaaagaataatgatcacaaaaccaggcttcattcttggcgaactccataggggaaacaggaccagagaagacacacatctataaaataatgactactagccccagaatcacatgtgac

SEQ ID NO: 540412 - DNA, 402 bp, Homo sapiens
caactgccaggaaggaaaatgactgctcatagaatccaattttggtcatttgtggggtaggtgggaacaaggtggggatatgcaaaaataacctttaaactgagacctaaagaacagaaagatgagagctccccttggcacactttcccttgccttggttttttcaattctcaggtatttctgaagcatctactccaggccttcctctgtcataggcactgtgagggatatgagaaaaataacagcacagggtccctgtccctagcatgtctgggaggcaaagacatcccaggccaaacttacaaatgatgcaaggcaatagataatggcaaaagaggaagaggcaattcaaagcatagcacatcaggacttcygggagggaaaggcaaggtcagtaggagt

SEQ ID NO: 540413 - DNA, 402 bp, Homo sapiens
ttaggaccaattggaggaagccagatgtgctcccctaaccagtcacataggatgtcccgcttctaataggcccacctacagcttcctgatgtcaacagcctccaatcagggcacacccaaagcctccccttttcccaccacaaagcttctccacttccctgcccacctttgagkcctctgacaaaggcaagtgatggtagctgactcccttgctatagcaagctctgaatcaataggctttgctcattttcatgtgggcttcgtttatttctatacctcctagttgcttaattgttttatgacttgattttcttatctgtgaaatgggaccataattttggacacaaatcttttgggaggaaaatgccttgaattgcaggggagtccccgatacatccccac

SEQ ID NO: 540414 - DNA, 597 bp, Homo sapiens
ttcccactccccacacctcctgtgcctcctctttactttcctagtgaactggctggcttgcttcatcaaacttaagagaatggagccagcagcgtccgctggagaagccgaggagagcttcrcgaatgtgctgggacttggtgttgaagtgaagctctgaatgcatggagccatggagggaggacgtgtgggctgcgtaggctggaccgcacaggctgagccatagagaggagccatgtgtttacccagcctgagcagagcaggggtttggccttggctctgggtggaagggaattggggatgcagaggtaatctggaggaccttaatggctaggctgagtgggaggtttgaatttaggcattgtacactgtcagaaattagagctggaagtttgttttttttccccaagggaataaccctgccaggcttttctagtgggactaatgcagatgggtgctgattgtcaggtgtgggttatttattattcagcagaggttgcctggccttttgttctctctccacttccttcgggtaccagccaccttttcttcatcccctctgccctggagggtcagcagggcaagggacataagtaa

SEQ ID NO: 540415 - DNA, 514 bp, Homo sapiens
agccagcagcgtccgctggagaagccgaggagagcttcacgaatgtgctgggacttggtgttgaagtgaagctctgaatgcatggagccatggagggaggacgtgtgggctgcgtaggctggaccgcacaggctgagccatagagaggagccatgtgtttacccagcctgagcagagcaggggtttggccttggctctgggtggaagggaattggggatgcagaggtaatctggaggaccttaatggctaggctgagtgggaggtttgaatttaggcattgtacactgtcagaarttagagctggaagtttgttttttttccccaagggaataaccctgccaggcttttctagtgggactaatgcagatgggtgctgattgtcaggtgtgggttatttattattcagcagaggttgcctggccttttgttctctctccacttccttcgggtaccagccaccttttcttcatcccctctgccctggagggtcagcagggcaagggacataagtaa

SEQ ID NO: 540416 - DNA, 508 bp, Homo sapiens
ttttctcagccctttacaaatgccaggagttgaactgaggacttcatgccctccactccactagaaacaacagcatatttctcccacagtcaagccacattaattttttaaaataataaaaacaaaacaatgccaggataacagcataaagaggccttaacgatcatttagtcaaaccgcctcatttcacagatacgaacagtacagccctgtgacaaggtcatcaagttcgctcgaagagcacagctctgtccttccaggccgggggrcatcttccacacaggcagcctgcaaatcagagcccatggctccagaccagcaattctcagtgtgctccatagacaccggttctgcatggagctccattacccccaaaaaagtatattatctgatgacttatgtttgggaaactctgcatcttggccccctcttggagagtctgtctactgcacaacaccacgctgaaggctctgagaagtcctgcagcagagacatctgtctgggttca

SEQ ID NO: 540417 - DNA, 659 bp, Homo sapiens
caccccctgaaatgcacgacagtcatgtgccacataacaacgtttcagtcaatgatggtggaccacatgtaggatgtggtcccataagattataatagagttagaaacaaaagaaatatgtattwaaaaaaaaagattaaatcacatctctacaaaaaatacaaaaattagccaagagtggtggctcatgcctgtaatccaagcactctgggaggccaaggcagacggatcccttgagctcaggagtttgagaccagcctgggcaacatggcgaaaccccgtctctagcaaaaaataccaaaaaattagctgggtgtggtggcacgtgcctagagtcacagctacttgggaggctgaggtgggaggatcgcctgagcccaggacgtcaaggctgcagtgagccgagatcacaccactgtattccagcctgggtgacaaagcaagaacttctctctaaaaaaaataaattaaaagattaccatggagatgaaaaattcctgtcacctaatgacgtcttgttgatcctgaccctctgtagccctaggctaatatatgaatatatttgtgtcttagtttttaacaaaaaaagtacaaaaaaattaaacatttttaaaatagaaaaagcctatagaataaggatataaagaaagaaaatattc

SEQ ID NO: 540418 - DNA, 659 bp, Homo sapiens
caccccctgaaatgcacgacagtcatgtgccacataacaacgtttcagtcaatgatggtggaccacatgtaggatgtggtcccataagattataatagagttagaaacaaaagaaatatgtattaaaaaaaaaagattaaatcacatctctacaaaaaatacaaaaattagccaagagtggtggctcatgcctgtaatccaagcactctgggaggccaaggcagacggatcccttgagctcaggagtttgagaccagcctgggcaacatggcgaaaccccrtctctagcaaaaaataccaaaaaattagctgggtgtggtggcacgtgcctagagtcacagctacttgggaggctgaggtgggaggatcgcctgagcccaggacgtcaaggctgcagtgagccgagatcacaccactgtattccagcctgggtgacaaagcaagaacttctctctaaaaaaaataaattaaaagattaccatggagatgaaaaattcctgtcacctaatgacgtcttgttgatcctgaccctctgtagccctaggctaatatatgaatatatttgtgtcttagtttttaacaaaaaaagtacaaaaaaattaaacatttttaaaatagaaaaagcctatagaataaggatataaagaaagaaaatattc

SEQ ID NO: 540419 - DNA, 640 bp, Homo sapiens
tattgtcagcaaagaataaagctttttttttttttttttttttgatggggtaggaagaacagctcagaatcccaagtaaccctttcttttaaacacagaggatggaagcagccctctctctgctggtctattttaggatcttctggatgggcaaggagttctactgcccaaagcagcccaaccttttctgctccctgattcccagcgtaccccttccccacctctgcccatccagaaaaactcaaatctcacctcctccaagaagccctcgctgctagctcagcacctctcttcctcctggggaacaaggcctttcctcactctgccctcccctagctggcactatccactccagaggtcttgtaccggtctctgttccaggggcaaggggtttgccaagaccccagcacagcggtcttgaggggcagrgccaccttccttcctatgtcctttcaaagcactcgctctgcttttcttcttggaacttcgatacaaccttatgagaggtggacatgggttcagggaagaaaagtgatgagcaggtcacactgctggacttaaccccagtctgaccaagtccatcagggctcactctgcagccccaggctgcttcccatgggaggctcacagcaggcactca

SEQ ID NO: 540420 - DNA, 476 bp, Homo sapiens
gaaataaccactccctctcctgggctttcttggccacattcttattcatcaggatttttctgcaagggccagaaacttcaaactaatttatgcaaatatgggcaatttatgggtctcaaaaccaaactctaggaagggcagtgatgccaagaggcagggatcaaacttcattcaccaaggagcccaggggcaggaaggaggcgtcagagttgggccrgggcggggaagtgttctgtgttcagcagcagcttccattcaaatcatttagtgggtgcagggccagggaggccagaggaggctgttggcgctattggcaggagaattgggaagacgtgatgggaagatagagcactagctgtcaggatggttccacctctgctaaaaagggattacatttgacttcttgggacacctgtggaagctccgtcctctcatgctggtttgtgagctccttaaagggcagtgccctggtcttg

SEQ ID NO: 540421 - DNA, 320 bp, Homo sapiens
ttgctctattgggcagcaggaaatgctgggcgtgctgtgtactcagggctcacggggtgggaaggaagtggcctggaagcagagggctctccctccaggccccattgacaacttgggtattatccttggtcctacactctgctccccacccgacagattctaccttctaaagttcatcccactccgtctcctcatctttgctccccrtagcaccatagtctgggcctacattctctctcctaagaccagaggctggaaaactctttctctcaagggccagtgagtgttttaggctccatggacaagcggtctctgtccca

SEQ ID NO: 540422 - DNA, 505 bp, Homo sapiens
ggtttagatgaggcatgcaggcagggttcccatgatgggatttagtgctcttataasaatggatactggagagtttgctcgctctctccctgcttcccagtccgccaatatgtgggggcacagcaaggatatggccacttacaagccacagagagggccctcgccagaacccaatgctggcagccctgatctcagatttccgaccaccagaaccctgagaatctgctagcaccttgaccttgggcttcccagcctccagcacagtgagaaatcactttttgttgtttataagccacccagtccatggtaatttgttatagcagcccaatgcgctaaaacactggctgactgcccacagttgcagtaagtagggtgaggcagcatggtggggtagaagggagggccagagtggagcaccccaccaagcgtcctgcagctcctgcatcatatgcaggatgtgctgaagttcctgcctgacccatggaggaacccagaaagtagccag

SEQ ID NO: 540423 - DNA, 505 bp, Homo sapiens
ggtttagatgaggcatgcaggcagggttcccatgatgggatttagtgctcttataacaatggatactggagagtttgctcgctctctccctgcttcccagtccgccaatatgtgggggcacagcaaggatatggccacttacaagccacagagagggccctcgccagaacccaatgctggcagccctgatctcagatttccgaccaccagaaccctgagaatctgctagcaccttgaccttgggcttcccagcctccagcacagtgagaaatcactttttgttrtttataagccacccagtccatggtaatttgttatagcagcccaatgcgctaaaacactggctgactgcccacagttgcagtaagtagggtgaggcagcatggtggggtagaagggagggccagagtggagcaccccaccaagcgtcctgcagctcctgcatcatatgcaggatgtgctgaagttcctgcctgacccatggaggaacccagaaagtagccag

SEQ ID NO: 540424 - DNA, 511 bp, Homo sapiens
gctgagtgcaactgggctgtgtgctgtccctgacctgaggccctgggcatatggtccgcactcagcaccagccctgccatgtcagggagggaaggcatgggtatccctccaccctacttgtgtacataggtaagagcatgctcaatttactttacatcttctctttgtcaagctcctggatcattccagttgctcagcaaacctcttttttcagccctggtaagagtcagggctgaaatttcccatgtcccacccagtaaggccatggagacagtgaaaacattggggtgcgttcacgcgggttggtactgtaccctggccacccggcctctccccagccccctagatctctccatgagcccacatttaaagggtgaccttgtcacagcagagagcttgggtacctgccccagcatctcagcaaatggccagtccagtccttctgtgcaygtgcctggcatgttgttaaatattttgtggcataagttctatttgtgttgatagtttcagg

SEQ ID NO: 540425 - DNA, 579 bp, Homo sapiens
tgcaaatattaaaataaatatatttttagtaacatcaaccaaaaaagaaaccctcaaaaaaaaaaaaccctcagagttgggttggattttatttaccataatattgggtttttaaagttaaaaccctaatgttttagagacagggtctcactctgttgcccaacctggagagcagtggcgccatcacagcttactgcagtgttgaactcctgggctcaagcgatcctcccacctcaggctcccaggcaggtgggattacaggcacacatcaccacggctggttaatttttaaaatactttgtagagacagggtcttgctacgttgcccaggctggtttgaactgctggcctcaagcaatccccccastttagcttcccaaagtgttgggattacaggcatgagccactgtgcctggcctattcatcataatattgttagaaatgcattcagtaagaaaaaaataatagtacacaattttataaaaacaataacttagatttaatatttatttatgtagttataataatgtaaattttatttggtttaaacaataaagagctctgttgaaaaatcattga

SEQ ID NO: 540426 - DNA, 600 bp, Homo sapiens
cttggcctacaaatgatgcatgagttacctacaggtcacatggaccccactgaaagtaggttgggctggagccaccctgcagataatccagcctacagcactacaggaggttttgggttacacaagccatgcactgtaagagaaatgcaacatttgagcacttccacaaagagtaagaatgctggtcagtgctggcctgagaagaggcaataatgtggccaacttctgtctccctgycccaacacaacagaagaactggatctcctttcaaaagcaaaccgatccatcttgcaaagggtattgggggagtaggggtaaaaggagaacacactatcccccatccccaagccaactcccctacccctggctgacactagggacaggaggaggtgagactcagatcagagatgaccacaaaggaatactaaattgagcttttaataattgaaaatgtcctggaagctacagactgccagaaattttgttaaaagagatagaaaagttagctttgatgtaacatattttgatgcagtgattggagaaaattaaaactccctctttgagcactgtttgatttgttgtctagaacagtatagccca

SEQ ID NO: 540427 - DNA, 640 bp, Homo sapiens
gctcagggcagctgcccttgctcactagaagctgggagccctcttcttcttccccagaccctttccttaaagcatattgctttttccttggttttcatttcttcattcatcctccttcgttcagtcctgcagtaaccgtggcaaaccgtggcaagtggtgcccaacgtgggacttgatgaagggaactgcagggtcatacagggacttgcagggaactgaaggaacttacaggacctatagggacccatagggacagtcgagggacagataggaaaagataaagactagcagagacttgctgggacagaayagggacagagacagatagggtcctataggagcttgaacaaggaaggtctgcaggagcagaaaaagaagaaaaaaaagaaaagaaaaaaaattaaaaatgaaactgaccaggtgaaggagaaaccccttacgagtatgccggcagcgatataccctaaagaggtattggtcagtgccctaaaaggtacatagaatggaaagtttttgaatcagggtaacatgggggaagaatttggctatttcttttctcttttctgtttggagtttggtttgtactgttcttttgtcattgttccaaaatttaaaagaattttttgccctacccacagc

SEQ ID NO: 540428 - DNA, 357 bp, Homo sapiens
cccaaacgccctgggtcccctatcggaaatagattccctcacaccaagccgatgcctgggctgcccacacactgcyatgcagagtaacagggtgacaggccgtagcattcatggctgccactgtataaatattcctagcatggaaaagcagtcttagactcatggtggctttttaggattatatttacatcaaacgcagccactaacttcgggaacatcttgacaacccacctctctccttcctctctggggtagctcttgtaaccctcccctttgctctctctgtgccagccccattggcctctttgtgtcccacaaatgcactgagcatacttgagcctagggctttgcagtgac

SEQ ID NO: 540429 - DNA, 529 bp, Homo sapiens
tggttgaatgtgcagagaagaattttccatcgtaaagaggaggataagataaagcttctggtggacatttccaaatttctcaacaaaggcgacagttttgttgagacaatagcaggaagggggtggttagaagacagggaaaagagcccaggattgccattgtgaaatacacattaagacttcacagaggtgaacatggagattatagagtagccacaagagcccatttgaaataaaaagagaagtccagggccaggcacccaggggcagaacagcaggttaggacagagcagaaactcaagggaaagaagacaactgagaagaggtgagggcaggctgtcttccttttgtgtgtttttccttccctttctttccttctctctgatttcctttccttttctccttctctcttttcctttctratttcttctttaagaagtaataaatagtagaaagagtggttaatcattcgttcttcagtgttttccaccttctcatgagactcaaagaattgatgtctgttctgtag

SEQ ID NO: 540430 - DNA, 596 bp, Homo sapiens
tctacctgcctctgcctcccaaagtgctgggattacaggcgtgagccaccgcgccaggccaggttaaccttttaagtatcacagcttctgattgtgatggaaatctctgaaaagtttgcattgtcttactgtttcaagtgcattgttgtgtggtgcagcccaggtgactgtttattgccaccttacgctgttcctatacagcatctccccagatacatttacgtggaataataatgtctttaaaagctttgggcttttgaggtgcagtgacacaggtatctgtttggactctttcaggctgttattcatctcttctcttctgttgcagtgtctgtagcttgccattctggcacttctagtagtctctgcttacactgctgaatcttctctctctctctttcccatctmctcttctctcgacatttcctttcaccctgccttgtgtgtctggtgtttccttttatggtcagcactaaccaatcgaaactctccatttaatcactacttattctagggattatgttaactattaatacttcacacgtatcatttcattgaatccccactacaatcgtatggggcaggtattgtatttc

SEQ ID NO: 540431 - DNA, 413 bp, Homo sapiens
ttcgaaattccatgaatttggatggttgaggggatattattcaatccaccataccaattaactccaaggtgaaaggaattgatccaaactacattacactccaggggtctcaaatttgaaggtgcatgtgatcatctggggattcagcagctctgggaggtagctgacaatctgcacttctacaggttctcaggatgccagtgcttctggtctggaccataccgagtagcaaagatttagttgtctatgtggaaaggtatacaattagttggctttgcttaacataactcccagtagagctggtatggccacagrgtgtttggaaaacaatttaaaatgcttatgggtgaaaagtaagaaataaagataaatctgagtgtgagccaaactgttttccctgggtgagaaacagc

SEQ ID NO: 540432 - DNA, 450 bp, Homo sapiens
tgcctctccttgtaccaagggtgttagaagagcatatccccaacacagcctgctcaggataaatgcattttatcatgactgctcttctcagaaacatgctacagtctaawaaaccttaatcaccatgtcataaagtgcagtgactaatccattgtactgtgattatcacccataatatgtagagacataaaaagagattaataatgaaggtagtcaaataatacataggactgatgattatccacaacaaagtaaggagtgagtggaacgtgtttaaggagaaaagtcgatgccggatctgagctgtcagtttagtgctctccctactcagccagtcacccactctgctggtgactttgtcttccatgttactgggtgatgtttctttaaaatgtcttgctgtgcaaagtatgcactcctggtccctattcaacccccatgagaacgtca

SEQ ID NO: 540433 - DNA, 385 bp, Homo sapiens
aaaacaacaacaacaacaaaaaaaaacaaagtctgccctaaaacagccttgagtgtggaccgactgaattgagaggcctgggtaccagcaacagccaaagcaggggttcatagagccctcacctatcctgaaagtgcctcaggacaatctcatcctactctytggaaacataaagaataatacagcaactttttttaaaaagagaaaactggctgcagttgtggtgtcctggtgactcatgcagcaaattcaactccatctttacccaaatccttattatttcttctcctgcaagccactccttaaagagaaaatataaatatcgctcttcagattcaagatggtatagcttagatgggttagtgttgttattgaaaataggagg

SEQ ID NO: 540434 - DNA, 650 bp, Homo sapiens
ctgtgaaggacactgagcattaaataatgcagggactcccatccttcacatamaaagatgaaaagaagtatcaaggaagaagagaaggaatagattctggagctaatgcaggagatcaaattcaaatgagagtttacgattcagtgcatagattctggattgaagaacccaggctcctgctaaagctgtaattcctcctcgaacttccagagagccagtctctgggagccaatgccagacacagaaagcatcatgcagtgagggaacgcagggcttctgtgtattgcacaggttttgcactcttaggtggatggttcatttgcacataggtgcattcagctccaaactctctgggatgactgaaagagctagctgatgtgctgctggattcggtttgccagtattttattgaggatttttcgcattgatggtcatcagggatattggtctaaaattctttttgttgtgtgtctgccaggctttggtatcaggatgatgctggcctcataaaatgagttagggaggattccctctttttctattgattggaatagtttcagaagaaatggtaccagctcatctttgtacctctgatagaattcacctgtgaatatgtaaatgacgagttaatgggtgcagcaaaccaacac

SEQ ID NO: 540435 - DNA, 509 bp, Homo sapiens
tgtctattaccagctgaattagccaggctttggccttggctttgttttgtctcatgtgcatgcacttggcaacaactaaacgtgaaattgtagaggtggaatattagggtgagaacgtatttgtgaggtttttgagctatatcatccttttggatttctgaccttttgccttctattttcacagctaaccctaggatgactggcctctgacacttgagccatcccatcatctgtcatgggttgacccatccatcccctcaatgagcctgaccttcaggaccactgacagaggagcagtcwatagaaattaattgttaaatacccagaaaatctgaaatggtatttaatatgcagttcatcaagagcaaaagttccttaaatcttcatctagaaaagttatttataagggatgaatatgttgtatgaatatgttgtatgcaaatattatattcaagggcaagaccatgaaaacagtttaagaatccgacagggaattagataaagacatc

SEQ ID NO: 540436 - DNA, 513 bp, Homo sapiens
cagctgaattagccaggctttggccttggctttgttttgtctcatgtgcatgcacttggcaacaactaaacgtgaaattgtagaggtggaatattagggtgagaacgtatttgtgaggtttttgagctatatcatccttttggatttctgaccttttgccttctattttcacagctaaccctaggatgactggcctctgacacttgagccatcccatcatctgtcatgggttgacccatccatcccctcaatgagcctgaccttcaggaccactgacagaggagcagtcaatagaaattaattgttaaatacccagaaaatctgaaatggtatttaatatgcagttcatcaagagcaaaagttccttaaatcttcatctagaaaagttatttataagggatgaatatgttgtatgaatatgttgtatgcaaatattatattcaagggcaagaccatgaaaacagtttaagaatccgacagggaattrgataaagacatcggagtgcacttgtc

SEQ ID NO: 540437 - DNA, 583 bp, Homo sapiens
gttgatagtcaaatctatatccttacccatctttttgtcccatttttctgtcagttattgaacaagaggtgttaaaatctccaattacttctatttctctaacactgccatttttttctttgtggattttgaatttctctatatattttgtatattttgaaggtcacatacatcttttgtcgtcatgtattctgatgaattgacccttttgtcattattaaatgtgctttatctctattcatagtccttgccttgaaatttattttgactggtattaatatagccacaccacatcgtgtttattaagctcacattttgcatggtatatgtttttctatmcttttcctttcagtctatatctttatatttaaagtgcatttgtcttagacatccttttttttggccacaggataagaagaaaaccataaaaattactagatgccctatgatgaaagaaaaggtttctaaatggcgttatatctggataactataaaccacattccatgactttaggcaagtgattgattaaaaatataattttcctgtaatttgtcagttgcttagctcacacagatccttttg

SEQ ID NO: 540438 - DNA, 333 bp, Homo sapiens
gaagctactgacttcatcacctacgtgaacttggaaagtttacttatgaagtaagtcatttattctgttacatattatttctgtcttcttccatttcttgtgtttccaccaccaaatcaaaataggaatcagaagttygcatgcatttatctctactgacttcaaaagaagagggtaaaaaagttgtcctagtttagggatgcaaatgatttagcagtggcaggatgccctgagtgcgcattaccaggctttggagtttatgtcatcaggcatggggcgaaatggtagcttttgaggcataaaagaggagcataagttctgtcctattaaaga

SEQ ID NO: 540439 - DNA, 333 bp, Homo sapiens
gaagctactgacttcatcacctacgtgaacttggaaagtttacttatgaagtaagtcatttattctgttacatattatttctgtcttcttccatttcttgtgtttccaccaccaaatcaaaataggaatcagaagttcgcatgcattyatctctactgacttcaaaagaagagggtaaaaaagttgtcctagtttagggatgcaaatgatttagcagtggcaggatgccctgagtgcgcattaccaggctttggagtttatgtcatcaggcatggggcgaaatggtagcttttgaggcataaaagaggagcataagttctgtcctattaaaga

SEQ ID NO: 540440 - DNA, 658 bp, Homo sapiens
agctgtgtttgctcttccttataaaaaatgcttactaattgatctttgagacacttagatcttatgttcaaagagttctgcatttttaataaatctctcttacttaagtcaagagtagttttcatttgtcaacacatagtccctgatgaggagcccattaatagtaaaacagatattttttggttaaaaaaaaatgctactttcattatgtgatccaggacacaatttcatgaaagactcagatctatctatctatctatctatctatctatctatctatctaatgtatttatctctttctctatatgtatccgtccatcttctttctatctaccaacacatttatccaccactctttttaaaaatgtacttcagaagttatatggttgtcatgagagcaggtattaacattttgaattggatcaaaaartaaaatgggcattttttgtttaagttgtcacaatgagatttagatttacctatttaattttcccacaagttaatatacttaatctagaactacaatattttgaaataaatacattatatatgactcaaatgtcatctcttgtaaatattaaactcataataaaatttgtagctgtcattttaaaatgagaaacagcttacatattttttcaaaattcttgtgggattc

SEQ ID NO: 540441 - DNA, 658 bp, Homo sapiens
agctgtgtttgctcttccttataaaaaatgcttactaattgatctttgagacacttagatcttatgttcaaagagttctgcatttttaataaatctctcttacttaagtcaagagtagttttcatttgtcaacacatagtccctgatgaggagcccattaatagtaaaacagatattttttggttaaaaaaaaatgctactttcattatgtgatccaggacacaatttcatgaaagactcagatctatctatctatctatctatctatctatctatctatctaatgtatttatctctttctctatatgtatccgtccatcttctttctatctaccaacacatttatccaccactctttttaaaaatgtacttcagaagttatatggttgtcatgagagcaggtattaacattttgaattggatcaaaaagtaaaatgggcattttttgtttaagttgtcacaatgagatttagatttacctatttaattttyccacaagttaatatacttaatctagaactacaatattttgaaataaatacattatatatgactcaaatgtcatctcttgtaaatattaaactcataataaaatttgtagctgtcattttaaaatgagaaacagcttacatattttttcaaaattcttgtgggattc

SEQ ID NO: 540442 - DNA, 677 bp, Homo sapiens
tgttcttgtatttcctgcccttctgaatagccatcttgaaatttgtcaaaatactttcttttagagtatggacccccaaaatctgagagaggtctcagttaatatagagagtttattttgccaatattgaggacaaatgaccatgacacaccctcaggaggtcctgaggatatgtgtccaacgtggtcggggcacagcttggtatcatacattttagggagacatgagacatcaatcaacacatgtatgatgaacattggttcagtccggaaaggtgsgacaacttgaagtggggagggggcttccaggtcatagatagataagagacaaatggttacattcttttgagtttctggttagcctctgcaaaggaggcaatcaaatatgtaattatctcggtgagcagacgggtgactttgaatagaatggggggcaagtttgtgctgagcagttcccagcttgacttttttctttagcttagtgattttggggccctaagatttatcttcctttcccaagagtgaaatattttggtttccttcaagctcaactctgccttcaaccaagacaagtggggatttacaaccacagaacagggtgaggtcaaggaggaagaattactaacaagaagcacccaaggtgagggtgatgttcttgatagcagcaaggcagaaact

SEQ ID NO: 540443 - DNA, 508 bp, Homo sapiens
tctgagggcagctcaagtccgctacctcattgtttgctcctgaatcctcattttggctcaggaaactaacatttaaaagtggttaagcggtgaattaaatgtggctattttgtagactcatgtttaggaagcaccttttaacccttttcctgtttaaaaaaaaaaaaaagctcactgccagtgctcatttaattttacataaacacactttttgaggctgaagaaaatctgacttattttcaatgtaaaaatgtaaaaactgttcttagagttatttctaaagagaactaacatcagaattctacgaatcatcacaatcatctattttggagagattggattcatcaaatgaatcttcggccaacaagtgtgggaaaatgatgttaacatcacacatacgaatgctacgctttccaggatttaacatttccagtgatcaagaattactrtattttgtaagtcattcacagatggttctgcatgatacgcaggggccacccaaaagcag

SEQ ID NO: 540444 - DNA, 508 bp, Homo sapiens
tctgagggcagctcaagtccgctacctcattgtttgctcctgaatcctcattttggctcaggaaactaacatttaaaagtggttaagcggtgaattaaatgtggctattttgtagactcatgtttaggaagcaccttttaacccttttcctgtttaaaaaaaaaaaaaagctcactgccagtgctcatttaattttacataaacacactttttgaggctgaagaaaatctgacttattttcaatgtaaaaatgtaaaaactgttcttagagttatttctaaagagaactaacatcagaattctacgaatcatcacaatcatctattttggagagattggattcatcaaatgaatcttcggccaacaagtgtgggaaaatgatgttaacatcacacatacgaatgctacgctttccaggatttaacatttccagtgatcaagaattactgtawtttgtaagtcattcacagatggttctgcatgatacgcaggggccacccaaaagcag

SEQ ID NO: 540445 - DNA, 671 bp, Homo sapiens
aaagtaaccggaggcctaatactggctcagctccagcaataaatccatcattacaccatggaactggcacactccccgtgtatatctcaaggaccccaccctctggccggcaggatcatatctagggatctcaattagagatctcgtagtgaataagggcgagttattctcgtaacgccagaggtggtggacctgccgacgccctagggtgggacattccgggcttggatagtaagacatcgtaaatatacgccaaaatgtccacaccaacgtttcccgagagtatttctttacaagtaaaagaccgactcaaaatcacccctctcaaaacgcgtctctttggaactgcagagttagggagtaagactttctgcctgaccccacctacgtcggscgcgcgctctcagagccagggcaccacgctgctcctgcgcaggtcctagactcctcccttcgggaggctcaccccctcccttctcggctacttccggccctcaccgaacgccctcaacgcgcttgcgccgttttgataggcttctcgggccgaagtaatcggagcgctgcctctctggaaccgcccccgccacctcttcgccccgcccacgtattaccgcccctccgaaatctcgcgagggtaggtgcgcgtcggtattttgcgggcaactagctct

SEQ ID NO: 540446 - DNA, 671 bp, Homo sapiens
aaagtaaccggaggcctaatactggctcagctccagcaataaatccatcattacaccatggaactggcacactccccgtgtatatctcaaggaccccaccctctggccggcaggatcatatctagggatctcaattagagatctcgtagtgaataagggcgagttattctcgtaacgccagaggtggtggacctgccgacgccctagggtgggacattccgggcttggatagtaagacatcgtaaatatacgccaaaatgtccacaccaacgtttcccgagagtatttctttacaagtaaaagaccgactcaaaatcacccctctcaaaacgcgtctctttggaactgcagagttagggagtaagactttctgcctgaccccacctacgtcggccgcgcgctctcagagccagggcaccacgctgctcctgcgcaggtcctagactcctcccttcgggaggctcaccccctcccttctcggctacttccggccctcaccgaacgccctcaacgcgcttgcgccgttttgataggcttctcgggccgaagtaatcggagcgctgcctctctggaaccgcccccgccacctcttcgccccgcccrcgtattaccgcccctccgaaatctcgcgagggtaggtgcgcgtcggtattttgcgggcaactagctct

SEQ ID NO: 540447 - DNA, 545 bp, Homo sapiens
tattatatacccagaatacacagaatgacttctgttttcctgactgaaaactggactgattcagtgagaaaataaaaatctcctcctcccaattaagaataaaatgcttattcttcatcaactttcctccagtcttaactcyggaggcattttagtttgtgatgctggaaagcagggtcgtttcacggtggatgataaaaatagctctaaacaattactttgcccttaagcagctttgaaaacagaacatacaccttaagagaaaataaaaatataaagtaccatgacctaaaagtcaaatgaaggtatgaaggaactctgtccaaaatttcagagacatagcacagatctgtctcttgctacaggattcttgcatgcaccttctccactgcctggaaatgtctccatgtggccagttcttttgtacacttcaggtctcagcttaaatgttaattctttatagattgagcatccaatctaaattttaagtttcgattttttaattctttttcagagaacccaatttctttgtcttcactgcatta

SEQ ID NO: 540448 - DNA, 594 bp, Homo sapiens
acaaatatatctgaatgatagcatcaacaaaatcagaatgagtttttccaggaaacagtgaccttgtgacataaaagccrcgctactgagaggtgaagccggttgggcttctgggttgggtggggacttggagaacttttctgtctagctaaaggattgtaaatgcaccaatcaatgctctgtgtctagctaaaggtttgtaaatgcaccaatcagcactctgtgtctagctaatcgggtaggggacttggagaacttttgtgtatagctaaaggattgtaaatgcatcaatcagtgctctgtgtctagctaaaggtttgtaaacgcaccaatcagcactctgtaaaaacggaccaatcagccctctgtaaaacggaccaatcagtactctgtaaaatggaccaatcagcaggatgcgtgtggggccaaataagggaataaaaacaggccacggagccagcaggggcaacttgctggggtccccttccacgatgtggaagctttgttcttttgctcttcacaataaatcttgctgcccactcttcaggtcaacactacctttatgagctgcaacactcaccatgaaggtctgca

SEQ ID NO: 540449 - DNA, 544 bp, Homo sapiens
ctgacttggaacctgctgggacttaactgacataggtaagtggataaagagagaatgttaatattctctcattaacattaggcaaaactagggagagaacaggttgactaccaaggtgaggttatcagtggtatcatgtcttcctgaggaacatcataagcacaartttgaaatggactgatgtttctgttgtattgacttcaagtattggttgaaaataagaaataatttccagcctttttgagggtaagacattactaagagcatcagctaatcacattggagttgagagcacagccccagtgggtgataagaagctgaagctgaaactcacagtgaaggttgggaatgtacaggcaagcactgtggcttcagcatactctgagttctcatcatctcacccatgctctaggtatattgcaacaaaacaagttgtcaactgcattactgtggggttaaaactttctactttgatctgcattcactgaagaacttaggcggagcctggctctgtgaataaagtcgtcattacaagaaatgtaat

SEQ ID NO: 540450 - DNA, 184 bp, Homo sapiens
tttaaggggcactaatttttcgaaaccctaggcaacacgatcacaagcagtaaacaaagtttgtatcaagaaaataatggtatttcaatgttagggaaaaacaatgtcatarccaggagggaagcaagcaatcagaacttaaactgctgcaatctggaagcttctctgcaggacctgtttacag

SEQ ID NO: 540451 - DNA, 584 bp, Homo sapiens
gtcttccaattttaaaggggtttaatgaaatcttagaggtaaatgaaatgcttaaaatctgtgcccatttaatagaattctctatcaataggtacctgcctctagcccatctccatggggtccttttgtcctttgactcaacaagtcacacaagaatctctggtggagtgagtctctgtctccaaaaaataaaaaaaaaagaatctctggtggtcagtaggcctggagagtcataggaggccagayggcataatcctccttgagcctatgtttgtttgcaagtctgaatagtttcttttcttgtgagaagtaatatttacatgtggttgcttgcaaattaaattttgtcacttttaacaatcatttattcacttaacaaacaagtattttattgactgctttctgggtgcaaagcaatggctaggtccctgtggtttttttaagttctcactggctcttatttctcttctttatttgacattggggtggaggggatttaatcaacattacactcattccatctgccacatcattaatgcaaccttaaatgactagaacctgcagcaggtccctagggcattcca

SEQ ID NO: 540452 - DNA, 592 bp, Homo sapiens
ggcacttctgcctctcagcccttacctgatgctaaaataatgtgcctcggccacaaaaaagcatgcaaagtcattgttacaacaggtgagattaatcacaaatagtgtgggatattggttctgtgggtgcttgtgctcctaatgagagtcggatagccttcagcatcagccacagaaagaaacatttaatgacaccagggctgtgacattatttccactagtactgggaaaggtaatcatttgttaggtcagcaaacagcatagacttcattgacagacccataggaaaaataacatacaattcaagtatttatgtaaattcaaataccttttaagttactcagtcatcaatgaaggcaaaataacttattgaagagaaagagatatttagccctgastaattaccctggattccactgttatttataaagcatatcatcattcacataaaacccctccctgcccttccagccggcccctgtggacagttggcagatgactcaccaactagccctcctgctgagatttccttctcacttcagtcctctggctccaattattgttaggatatttccttttgaatattcttctg

SEQ ID NO: 540453 - DNA, 453 bp, Homo sapiens
cccttcaccagtcccatgtccaaaaaaaatgaggtcatgctgacaatcaaagggttgggcctgaacaaggcctgggcaggggcattgctggcaggagctctccaactggcagagtgatcaagaaaaatcctgtgtcattgtgacttctggagtaatggctggcaattgtttatgtctacaccttagcagaattcaggctcccctatcctcctagcctggtggtctctcattagctttacaaaggcagttaagtttggcggaagggctattctcacttaaactataaactaaatgtctcccaaaattagcttggcccaagcccagtaataattaagtatagcttgaaggctaaaggccagaaatgagttggctagatcagatctccccaactgccataattttctcactgttataatttctgcaaaggtagtytcaattctgataaacaccttg

SEQ ID NO: 540454 - DNA, 570 bp, Homo sapiens
tgtcaccctgtgaaatgggaaggaggcagaacacctttttattggcagtagyagagttttaaatttttgatggtacattactggattgagcagactgttacttccatctattcacacctccatgcatccatccaactgtccattcaaaaagcacttacggagcaccctgtgcattcaaggagctgagtacagttcttgaggtggctgtcgctatgcaacaggaaaagatataagtagcaaacctcctgactaacacagggaagttatgatattgtgaaaattcttgctaggagagtcaacaccactaacaaccaaaagataaacaactctcttaagagttctgatgcaaagccagtgagccttaggtccaagaaagtttagtcatcaagatttagagtgacaaataaatactagggttttagttgaaggtgatgtataagatcaggaatagggtaaattataattaacagttaagccttagtggcctggcgcggtggctcacacctgtaatcccagcactttggaaggccgaggcgggtggatcacaaggtcaggagatctagaccatcc

SEQ ID NO: 540455 - DNA, 455 bp, Homo sapiens
gtcaccctgtgaaatgggaaggaggcagaacacctttttattggcagtagtagagttttaaatttttgatggtacattactggattgagcagactgttacttccatctatwcacacctccatgcatccatccaactgtccattcaaaaagcacttacggagcaccctgtgcattcaaggagctgagtacagttcttgaggtggctgtcgctatgcaacaggaaaagatataagtagcaaacctcctgactaacacagggaagttatgatattgtgaaaattcttgctaggagagtcaacaccactaacaaccaaaagataaacaactctcttaagagttctgatgcaaagccagtgagccttaggtccaagaaagtttagtcatcaagatttagagtgacaaataaatactagggttttagttgaaggtgatgtataagatcaggaatagggtaa

SEQ ID NO: 540456 - DNA, 551 bp, Homo sapiens
gttctgccatctgatagaaacaaaacatgatctgtgtgtttctcagccattattacttctctgaactggaaaagggtcaagcctcactcctgtattaactgtaccctagccagaacaaaccagaaagggcaaaggtgggggtcactgtctttcagatcagtttatctccccacctttggtaacctggtcagtagggcatgcttcctagcagaacaagccaccaatcttcacacaccayctccctgtccactgccctctcaatgtcaatgggaaatgccttcctaccttctccttgtaggacacatttggctggatcaacctctttggtattaatcgtaccataaatttcatagccacggcactggcctgctttctcctgaggacagaagcgtatcttatcatttactccaggacgggtgctatattgaactttgttcagcttcctgagccgttctaccaccaccctcttggtgatgaggatctccaagtctgagccgctggtcagcaagtgctcggtgaactccactccagtccgcatgtctgccagtaac

SEQ ID NO: 540457 - DNA, 619 bp, Homo sapiens
tatttaaggttctaaaaggaataagatgggtccatagttttcacactgcttaggccgctggaaagggacagacaaactgagaatcctacatagaagcacagggctcataggagctgtaccaaaactaacagaactgagagcttttaagtctgctatttcaattcagaacaaggaagctttaagtgacacttttagaacagtggtgtctctacaatcacagactgtgcttcctagaaacagagcctaagtccaaatgtctagtggctgtgtggtagggaagggcccgtcgcttgattcccactgctggcagaaaggcccagagggtagtgctttctccttacctggcatggtgcctccacaggcgcagcgagcggttttctggcccccgctggagcagaaggtgcagcagtgaaacacgcctgagtgtgggcggtgctttctcctcaccrtcacagtgaatggcgagccctgcagtgttcagaccaaaagcaatgaacagcatcttacgagttaacaggatgtgctgcgcatcactatgtgctaaacagagtctgaggcacagggcctgtccttggatggacaaggacaacaggaaagaaacagattagaggacaagaac

SEQ ID NO: 540458 - DNA, 454 bp, Homo sapiens
tagatgacttggtcctttaattttagaggttttctttcttagctttcatagtgccgacctgtgggcaagaggcagtgaaaattcactgtgacaattgttatatattttacatatgtatcattttatatatatatgttatatatatctgatatgatagtaaaagttctcatatcttacactttgcactttcagttttgtagtaatggagattaggcggaaatttttatttttaatttcaagtsccagcttcaccaacctctgaaaaagatacacaaagaacctttcttatgagccactagcactgagtttatgcttcattttctgaagcagattgtcttccataattgcatgctttgaacattttaacatagaaaagtctttaattcaaatatctgaaataagttctccaatgatctataaactagtatccactagattgcacacctactgatta

SEQ ID NO: 540459 - DNA, 513 bp, Homo sapiens
gggatgatgataactgtccttcctggcagtcattggaccataatatatgtgaatgtcaattggaagttgtaaaatgccatataaatgcaagatattgtagctatgcaaaacctaaaattacctaattgattttggtctgtcccttaacccttataatgagagtgctagcaactaaaacaccttgaaaattactggagtgtttttatagccaatagactccagaatttatatagcacttagaactttatcaaactttctttgtactagtctgattatttaaagaagatctcactatataatgatgtctttaaaatatttaattttaaaaagataaaawtctttttaaaagataaatattttttaaagataaataagaatatttttatttccttgcagactctttaaaaagtgttgtctttttgtcttctgtttttcctaataattcttatttggtctggctggttggattcaatgctccactgctactagcagacaaattatacatattcttga

SEQ ID NO: 540460 - DNA, 513 bp, Homo sapiens
gggatgatgataactgtccttcctggcagtcattggaccataatatatgtgaatgtcaattggaagttgtaaaatgccatataaatgcaagatattgtagctatgcaaaacctaaaattacctaattgattttggtctgtcccttaacccttataatgagagtgctagcaactaaaacaccttgaaaattactggagtgtttttatagccaatagactccagaatttatatagcacttagaactttatcaaactttctttgtactagtctgattatttaaagaagatctcactatataatgatgtctttaaaatatttaattttaaaaagataaaaatctttttaaaagataaatattttttaaagataaataagaatatttttatttccttgcagactctttaaaaagtgttgtctttttgtcttckgtttttcctaataattcttatttggtctggctggttggattcaatgctccactgctactagcagacaaattatacatattcttga

SEQ ID NO: 540461 - DNA, 557 bp, Homo sapiens
atttttagtaaagacagggtttcgccatgttggccaggctggtctcaaactccaggcctcaagggatccactcaccttggcctccctaagtgctgggattacgggcatgcgccaccacacctggcctgtattagcattttagatgtaggaaatgatttttcagttctaaaattttcctaaagaattaaacatatccacttaaggatgcgttgaccactgatcattgttgaataatgaaactttagggatacttactggcacattcaagtgaaaatgttctacaattccctaggtagtrtttcttttctctaactgagctgctgcgaggctcgcatagggtgaaagtaaggtaactgtaaaggatgtaccttgttatgggtcaggcagcaggttaccatattggcacatatagcaacacatgcatacagcagagatcagagaaagaaagtttgtaagaattcctaaaacaggatagctttctagtttctcaaatactgctttctgatttaaacaaatccaaaatacagttatagctaacgtcagagaaaggagttatt

SEQ ID NO: 540462 - DNA, 631 bp, Homo sapiens
ttcttcactgttacactttatccaaatataatttgataatttaaaaatttttaaaaacatattttcctgttttataattgttttatttgtattacctttatagaaatacaattttattatgtttatagagtgcacatggaaaagaaaaatttgcagcccatgggatcattactattaattgctttgccttccagtcttggccagaaatattcatctttataatatttcattttatccttctcatatgtagtatttctgtgcatttattcaaatgtttttataatacttcctttagtagcttataggtttttatggactcattcaaatcccttaataattattttatcaggaatcttctcattgcttaactagtatgtgataactagttaagcacaaatttgtgttttataatgataaaggaaaggcacaaatttttgtatttttatttatatctagttaccttatgtactaaacatttytgttaggtagattttgaattgtctgccttttgcaggcctgtaatcctgcaatataaaaatagtgcatctttgtttcatagacttttgttaattttttaaaaatccagttctcacatactattttattgatccagcagtcgaaaccgatatta

SEQ ID NO: 540463 - DNA, 603 bp, Homo sapiens
ttcctgccataactacattgagtatatgcattatataaatgatatatgagtttttagtaatttgaagagaaatgtaatacctaaatacattttcctttctgttacttaccccatatagttttgcaacatttagtgccaagctaaggtgacttttgattattgaattaacttcttaattccaaagagtttgtgcacatcaatagaattttgttcaaataaawtagactatagactaaaaacaatttctagaaaaacatgttggcttgccacttaagattatttctctgatgtctaaaacaaattgaaacttagtttcaatgtagcattgtatttaatataatcataatttcaactgttttaggaaaatattttattaataaaccaccatagtccatcaaacagataatctgtattatactagcatgttagcttaaaatgattttgtatatattatcgttataattatatatatctaatgattgaagaaagagaactgatccactacattgttgttgaaagtgaatttagaatgagttatatgttaatgcaatcttgctatctttggctgattctggaaggagttgaaaccttaattgatcaatc

SEQ ID NO: 540464 - DNA, 565 bp, Homo sapiens
ctgccctcagtgtgctggttrtaagtttccaagtgatgaataaaagatttcctaaggcatcagtttccgtgatggtgtgttcttttttttctcttgggcacaagggaatgagcagagcaggtacacctctgggtttgttttgtttgtttttagcttatgtacaaaatcaagctctgtttttcattgaaatatctttttttcttgtatcagagaagagttgtaaaagactcattgtgggttcagggaagaatgttttaacatgcaaggaaatgttgcaaaattggaaagaggacataattccacaaaactaaatacaactgggggaatttttaggatactctgagttaatcttattatttgcatcctgctaaccccaatcaaataataatttagaattgtttaatttactaaactgcacattcaattgactaaactgtagaggatgagcaagtgtcaacaataattaccctccttatgggctaacacaacaggctccagtgagtcataatacacacattcagaggtggtccaatgcagtcccaccatagaaatccttcccatgctt

SEQ ID NO: 540465 - DNA, 610 bp, Homo sapiens
attgttaaaaatttcccacacaaattttaaagtataaaatgcctggcaagaaaatgtttaaagggaaatgacacttgtggaattcaaatcactctcggagcacttacagcctctcttagtcggtacggtgagctagataccctaacaaacaatttgtttccttcctaaatttcaaatgatattagtgactgattttattataatagtcacaggcagtgtgagccagaattatttccataccttctgttaaaatttgtggcattccgatccttttttcccctggatctgcttttattgttrttctttttgttttggaaatggggagtgtgtgaaagtcaataaagctgttgaatttgtctcctgtacgtttagcatccaagccgctcaaaactgccccaggtgtgaaggagtgagaagggatttgcatttctgcctttctttttaactttccatgtatctgctgtcaaatcttcatatgctatttcccacacctcccatttggaaaattcctgtataaatccatcattttactaaatgcattgttttagaactgaactgacccagcactacatatgttgtagaatctggacaacttccagccaccttctta

SEQ ID NO: 540466 - DNA, 505 bp, Homo sapiens
gactaatgtccaaagaagtacgcattgatttaggcctgcaatgcactgaaaaactaatatttcacaaaaatcattcaataaagggaacctatccttctcattgagttcagcattgtcttaaggcataaaggcatcaaacaaatagctgcactttttctgggattgcttatttgctgatttttccttccaccatgatgtctaagattaaaagagaaactgatacttaatatttaaaatctggatatcaatatatagttgackccaatttcttaaaatgattgctgaagaggacaaccaaatggctgaaataatttttgaatgaagccttggcattatagttgtactcacgattttagtgtcattgtaagatgaggctggctggctatgctgtcatcaaggaatattgtcgaacatgaactgtattgttgagtaaaatgctcagtagatacctgaaggggaagggaagtataagataaacttatcaaagtatactttttcattggtt

SEQ ID NO: 540467 - DNA, 649 bp, Homo sapiens
  misc_feature (1)...(649): n = A,T,C or G
nnnnnnnnnnnnnnnnnnnnnnnnnnnnnnnncagtaaaatgtaatgtattgaataatattggtataagaccattttactgcaatgaatacaagactaagactaacacatttactaagttactaatcctaaatgtattatttcaggcgatattgtgacaaaacaagtgtttcagattcagaggctcgtgtaccagggctgctaggccaccaacaagtgaggaagacataggtttctctagtcctgttttcttatgtggaggataaaaagagtatcacctaagtattctctcacaccctgaaaacagatgacaacttaaaaaatttaactttcacttcatgtttaaataagactgccatgacatgactcaaatgagaccctcagagaatactttccgttcatttcaaaatttgattaattttattctatacatcatttgacctgcacctaggcattttcctgctctacccctgttctctgtctggaataatgcttttctccttccttgtttcaacaagcttgactccatctaccctcttggatctctttgccagtagcctcagcctcacatgttttgtttttttgtacacyaaccgattacaagatactaattctagcagagtattcccctcatgagaaagtacgcctct

SEQ ID NO: 540468 - DNA, 658 bp, Homo sapiens
ggctgctcccaccagggggctgtggggttaagtgggagctaagaggattagagggtccttgtgagtggtgcagcgtgatcatctcccactcacccttgcctccagcctgggctgtctacatatctggctgcggggccaaggaagagggatggagggaggaggagggaaggaatcaaagggaagagggattcagaggagccagggagatctgctgcacccccacgttcatgcacatgcacaaaaagtacacgcacaaaaaatacacacacaactacacacaagagcacataaacacacacgtatgcagtgtgcatataggtgtactcgcaaggatacacgcatgcatacatattgcacacacatgcacatgagtgtgtatgcaagtacatatgcatgtgacaagcatacagcatacatgtgcacagacacatgtgagcacacatgcacatgccccgcacacctgtgcatactcacatgcatgtgtgggtgtgcacaaacacacgtacacactggccgggtcatgccctcccccgctaccccagtctctcacrcagtttgagacccaaggcctcacatgtccccaggtcataactgcacttcggatgctccttcagtgttacatcaatgacacacatagcctgtgacttgcacaatgtct

SEQ ID NO: 540469 - DNA, 678 bp, Homo sapiens
ctcacgcagtttgagacccaaggcctcacatgtccccaggtcataactgcacttcggatgctccttcagtgttacatcaatgacacacatagcctgtgacttgcacaatgtctcacaatgctagaaagggcctgagccaggatctaaactcattttggagggtggcgggtgtgcctgtatggagggatggaaggtgaatccaggagaccccaaagggctgcagccccaggagcaggagggggctgatgctggtagaaagagatattacacacctggcatggaactgctcggacatatggttaccagtgcccaccccccaggctggcacatcacctgccctctgcttctctctccttttagctccctggacccagtcagagagcttctagccaagggcctggtgtctcatgaagcgaacggagatcaggctggctgggtgcctggtgcccctgaaggaaggaggaagggagctggcatctgtggaggaccacttctgaccaagactgcctagtgaatgctggccactttcatcttgttaaatttttaagtgaaaggtcaagggacttgcagggttyatggggctggagcaggacaaggtgggccttgacctcaggcatccatctccatatagccatgggcatggctggacagacatacaggttggagtggcctgggcac

SEQ ID NO: 540470 - DNA, 649 bp, Homo sapiens
gccaacagcagcccccccacccagccccgactgccacactgcatgtgctgtccctgctgaggctggggggaatgagaaagtggagtgaaggcatggagagggcctgggtaaggggctcggggctggacaccctaggcatagccacaggtccttgagctccagagtatcctggtgatgcctggggcagttcttgggtctcccccaagagactgctctggggcagggtgagcgaagtctcccccmctggatggcatgctctgaggcttcctggagttgtcccctgtggcctgccaggggcctggccggtgctgcagcctgagatttacaagccagcctgaaggcgcaaacaataaatcaagcttgagtctggccgtggacttgtcctcccactgccttccaggcctctcacctgccatgtccaagccaggcactagagctgggatgggagcatcggggaggagccctggcccagcctccaccttcctgcttctccctgtgagaccctctctctgggttttccaggtactgaggcctggaggttaagggctggggctcttgaagctgtcagcctgggtccaagcaccagagcccctctattcctggttggggagcttgtgcagaggcatagctctgagcatccatttatggg

SEQ ID NO: 540471 - DNA, 468 bp, Homo sapiens
tggcggctggattgtgtggaaaggcccaaggcttcacacacgtgtttggggccttggtgctggccgtctgctgaagaacctagtttctccactaggtggcctctttttccacatggctttttagcctccaggaggctagggtgggcttccttacagacgatggccaggtcccaagaggacaagccccagtgtgcacgtgcttatccagcctctgcttgcattatgcttgctaagggcccgttgaccaaagcaagtgaaattgcccattacaaggtcaaygtgtaggggactccacaaggctgtgaatactaagagatttggttcattgccaccagtgtaaccatttactacacttcctaaggtgatcttccattttgctcagaacgcagttcaccaggcttcaagatcagagacaaaagccacagccaggcattgcatgtatgttgggagaggaagaggctagctggc

SEQ ID NO: 540472 - DNA, 513 bp, Homo sapiens
agctggcggctggattgtgtggaaaggcccaaggcttcacacacgtgtttggggccttggtgctggccgtctgctgaagaacctagtttctccactaggtggcctctttttccacatggctttttagcctccaggaggctagggtgggcttccttacagacgatggccaggtcccaagaggacaagccccagtgtgcacgtgcttatccagcctctgcttgcattatgcttgctaagggcccgttgaccaaagcaagtgaaattgcccattacaaggtcaatgtgtaggggactccacaaggctgtgaatactaagagatttggttcattgccaccagygtaaccatttactacacttcctaaggtgatcttccattttgctcagaacgcagttcaccaggcttcaagatcagagacaaaagccacagccaggcattgcatgtatgttgggagaggaagaggctagctggcccattggcttattcaatagtccttacctgatggtcgtgctgt

SEQ ID NO: 540473 - DNA, 214 bp, Homo sapiens
gtgtggagtgagccttgtcattgggcacacttggttcccatgtggctccctggctctggaaaccactggagcttctgggtgcagctcagtatgtggtcctccctctgacctgtctgtctcatccctttcttcaccttctttcagsctttggagtcttttatccagtctagagtgcagggatgtggaatctgtgggtagcactctcaatgcaagc

SEQ ID NO: 540474 - DNA, 441 bp, Homo sapiens
gtcttcatctcagccaaactcgctgatgcctataaaattgggttgttttggattgtgacagacgagagcctgccagcttcccctaagagaatgaagtctgaatgtcaccatgtagtcaagcctgagaccctggggttcacatgtctgccaygctctacctgcataacttggtcaggccatttttacctccgtgaggcttgatttttctcacagggaaaatggcagtgatattagtacctatcagtggtagattgcaaaagtcgccacaattccccatccctccctgagtgcgcctcatggcagtaaaatttggcaacttctctcattgccttgaatctaggatgatcttggacttactttggccaacagaatgtggtggaagtgacagagccagttctgagcccaagcctaaagaggccttgtatgctttcctccattctg

SEQ ID NO: 540475 - DNA, 543 bp, Homo sapiens
tgctctgtttctgattaaaatggggttggggagaccttttcgagcgagtcccctttttatcctgcacygtcctcacccttcccacctccacctccaagcacaggcacctttatttgcacttaactactgccattcataaacacacacacacacacacacacacacacactggagtctcaatcatgcattgcatcatcacacacacggagcctcagaagcacacacagccattagccgacacacagctacaccgatatatccaagcacgtacacacagtcacatcctcacacaccggtgcacagtcacgcatgcaaccagtctctcacacactcatggcctcagccagtctcacacgcgcattaaattacaatctgtcacaaacacagtctcacatatgcattaaattgcaatctgtcacacatatactcttcacacacagtcacaaccagacactcagagacaatctaatcagtgtcaaaaacgcacacatacctggctggtcatatccacgtatggcaagtccttcatgtgcaaaatcacac

SEQ ID NO: 540476 - DNA, 543 bp, Homo sapiens
tgctctgtttctgattaaaatggggttggggagaccttttcgagcgagtcccctttttatcctgcactgtcctcacccttcccacctccacctccaagcacaggcacctttatttgcacttaactactgccattcataaacacacacacacacacacacacacacacactggagtctcaatcatgcattgcatcatcacacacacggagcctcagaagcacacacagccattagccgacacacagctacaccgatatatccaagcacgtacacacagtcacatcctcacacaccggtgcacagtcacgcatgcaaccagtctctcayacactcatggcctcagccagtctcacacgcgcattaaattacaatctgtcacaaacacagtctcacatatgcattaaattgcaatctgtcacacatatactcttcacacacagtcacaaccagacactcagagacaatctaatcagtgtcaaaaacgcacacatacctggctggtcatatccacgtatggcaagtccttcatgtgcaaaatcacac

SEQ ID NO: 540477 - DNA, 563 bp, Homo sapiens
tggagctttggaggaaaggagttgctgctgcggactgaattgtgcccctgctgcccccacattcatatatggaagctctaaccctctatgtgactatatgtgggacgcggtctttaggaggtaatgaaggtaaaatgaggtcataatcccacaggaccgcggccttataacaagaggaagagggaccggaacgctctctccatgtgagtgtacagggcaggccaggaggagggcccgctccagaaatggccccgcgccaggctgcccagccgccaccgctgggagaaatgagtttctgttgcgagctgccaagtctgcagtactgtgttatggccggggctgaccgtcactcrcccaaggtcacacagagaggagcaaccaggattcaagctcagtctgttcttgagaactcaggcctgttcatgaccccacagtgggtctcctgtgctagggctgtgcctcagtagccgggtctgtggagtgggtggcttttttctgccctgctccagggtcatgaagcctgagtaacctctgactcacctcaggctcggcaggctccctgc

SEQ ID NO: 540478 - DNA, 606 bp, Homo sapiens
atttctgctgctgcagcgccccctgctggcccagaccacgtctgccttgtgcctgtcccctggagttcgttcccctccctccagatctggctctccaagccctgccccttccgtgccatccctcaggttctgcagggcactggccacttctgcacagccaggccttcccaccctacccccgagattcacacagcagggtccactccctcccaggcttggcttccccaggctgagggctgggcattggcacccttccacagaccacatgagtcagctccctccccacccaacaaggccagtgctggctctgtctgaggtccctttgttcaggtctcttctgaagaaaggcaccagaggctccagctctggccataatgccccagatgaagcttgacaggagaactggacacaacaggccaggtrgggatgggacgcctggatactgccttgggcctgagtgggcagggaagaggcaaagatatgctatcgtggatcctaggctggctacaaggctctcagatgccaacccacctccctcctgtccttttacactccctgggccccctgccccctgcagcccagggcccctcactgcctcctccacca

SEQ ID NO: 540479 - DNA, 563 bp, Homo sapiens
aaatggattccaacagcagtctgtgcacctcaaagggatctcttttcaccatctctaccctccttcccaagtcattttctctctctgaccttgttttctcatctgtacaatgggaacaaaaatcgtgcccaacacagagcctggcactaaaggttctcagtaaatatttgtgcatcctctcccaatctctgaggcttatttaggacgcattttcctgggccaaaacttcgtgcatgcacatgttcacagaaacaggtgcagagctcgacgaagcacatcttcagcacgggggactcagtaggcgcttaaccaatatgtgccgggcagaggagcattagtttagcaaaggctgacgagtacccagacaaaaagccacaatagtgactcaggcacakgaaccctccccctgccccaagttccctgtcaattatcctccgccaccactccccttcctctagcccaaggcgcgggaaatatttaaaacaattttattcatgaaaatatgctgtacaatgcactctacacagcctcgacacggcacacacgcacacgcacactctgac

SEQ ID NO: 540480 - DNA, 600 bp, Homo sapiens
tcttgtctgggtcactgctgtggccccactcttgtctccctgcttctgcctttgtcttcatctcccctcaacagcctcagattggaggctctgccacttgccctgttctcacctgccgtgccagccacagactgacggtcttggcccagtgcttttccctttctcctgggtcagccctgacctctcattcccataggcctggctcctgttcctacracactagacctcctgatggtgacatcagctcagaagtgacacagacaactcttctgttcctacccatgctatctcttctatctgtcctctgtcactgcagatccagtatttttgtgtccacacttagtagtcctgaggaaaaaaaaaaaaaaaaaaaaaaaacagccaggcctaaatctctaggcccttggccaatatctggggctcaagagcctgccaggagctgaaggtcatggggctggggatgccaagagggtggggtatttcttttctgttaggctttcacattccctgtctcctttaatttcccccagatccctgtgaggcaggaataatttcccctcctgtgggtgaggggaaggagaaaagagaactcacttgacc

SEQ ID NO: 540481 - DNA, 594 bp, Homo sapiens
gaaggaatgtgtatggccaacaagatggagacaggtattcccrggtaaagagagtagtgtgtagacacagaggtgcgaggtgccagaaaattctaggaacagcaaattgtcctggtgaggggacagtaggtatttgaagagactggcaggagatggaataggaatatcggatggagacacatgactttgaatgccctgcttggcacatcctttcactaagggtttttgcctctatcagggcctctggaacagggttcaaaggttgttggtgagaggggcagactcctggacctcaactccagaagctctgccaggaatgtggtaggtgtcccaactctagggactcctcacactggctaggacatggttgggggtgaggggtgtaagtgagaatcctggctggctccctttgtctctccacggtgcaacatggggttcctttggggttcctttggggagacatcttctggattgcctcattggggctggtctcttgctgattgtgggtgtggatgtgggggttcctgctcctgggacatctcagttggccgtagcttgactgatgccatggtaagcagagattctccaggaagt

SEQ ID NO: 540482 - DNA, 595 bp, Homo sapiens
aaagcccagcatcaccactgagaacaggtgtgagtgggggcagagctgggggctgtgaacctaagggagatgtggcgccacagggaacccccttctcctgcagatgcccctgacctccagccccagggccatcagccctgccaatgaggagtgtgaggcctgcagggtagagtcagagggtttaaatcatagactcctagagtcaggacagaccaagaggtcttctgacctggcctgtgtccatcagcaaactcttacaggtgtctttacaggcgccacattgggccctgggtgtgtagaaaaggctctgacacttctcacccctccagggactcatggtccagagcatggyttctctgcttagtactgttgacactttggctgcataattcctgggggcactgtgcattgtaggatgtgtagccgcatctctggcctctacccactagatgccagtaacatccccatagttgtgacaaccaaagatgtctgcagacattgccaaatagtccctgtcagattcctcttagtcgagaagcactggcttagggagaggggcaagccaacatatccacacagagctgagcatcctgca

SEQ ID NO: 540483 - DNA, 583 bp, Homo sapiens
gtaggcatggagccagtgatgcccctggttctgtctgccacagagctttggagaaagcaccagaaacaacctgtggcgttaccagcacccaagtgctcagagcagggacaaaaccctggtcctgggcccctccagggaccccctctgccacagagaccaggcctctctctggtcagcactgagtaatagtaatcactaacaagaaggaacccactgccacacactttacgctctcatgaagcatcactgtgccctgggttacagagaaggaagaaaagaacttgccagaggccacacagcttctggttggaacactttggccctgggaacccacamtcccctcaccatgctacatctcctggagactgttttccaggaaggagctcctagccacgtctctccaactgttcatccgatgcggttttctcgcctgctcggtggcggcagaggtaaatgacaacatagcccagccccgtagacttcacccagaggagaagtcagacaagacagcaggggactcattcagggcaacgtgggccattaagggccctgtgaatacagaatcctgatccatgacacaatt

SEQ ID NO: 540484 - DNA, 589 bp, Homo sapiens
tttgaaaacctctggtctatacggagtgtatatgacaatttatatacatgtgtggccgtgcagatatgcttattctcacctattgcaaatagaacacagctctccatggtcaggtgcttccatccctaatggcttcccaccagtgagaaagacattaagagtcagaatatttttgctgtaattctctggtaaattttgattctagaaggtcacattatattcttcccaaatttctaaccatacccgatcttttcctaaacaatcatttcattttatcatcctccattacataaacctgtttcttgttccttcatgtactctctgtacgctctgtctttctcagtcttcatttactctattactactttcttctttcttattttctcattttcctcacgtcttggaatatcttgaatttaaactartaattcagctcctcttcagcactcacaatatagtctgttgccaatgcctgatgagacacatagcttatgaccattgcacttctctttttttccatggtttgcatttaggaggtaattttcttcagctactagaggatatccttcctcatcaatttagagaaata

SEQ ID NO: 540485 - DNA, 462 bp, Homo sapiens
tatagtgtaaaaactaaggcttagaattcactagaaattcacatgggatctggagtacgtttgtctaaaagsaaaagaattacactgagtcgggctatgggcaaatatatgattctgtcttatatctagaggtagaaaagttctaattgtattcatagagagacactttaaactgcaatattgtaaaagttgggacctgaaaatttaatgcctgggacttgaacgtattgacatatctttattgttcagtatagatctgaaggaacatttcagcagaaagaaaagcatgaggaataggaaaccttgtgggagtataataacaagagtattggttgagtagtcttttgaaaaatataaattatattttcacaaatagaactccttgagtccccttatggcagtcaagctacagcagcatgagcgtcaaatcatagtgatgtattttaaggtcacaacggcgga

SEQ ID NO: 540486 - DNA, 462 bp, Homo sapiens
tatagtgtaaaaactaaggcttagaattcactagaaattcacatgggatctggagtacgtttgtctaaaagcaaaagaattacactgagtcsggctatgggcaaatatatgattctgtcttatatctagaggtagaaaagttctaattgtattcatagagagacactttaaactgcaatattgtaaaagttgggacctgaaaatttaatgcctgggacttgaacgtattgacatatctttattgttcagtatagatctgaaggaacatttcagcagaaagaaaagcatgaggaataggaaaccttgtgggagtataataacaagagtattggttgagtagtcttttgaaaaatataaattatattttcacaaatagaactccttgagtccccttatggcagtcaagctacagcagcatgagcgtcaaatcatagtgatgtattttaaggtcacaacggcgga

SEQ ID NO: 540487 - DNA, 462 bp, Homo sapiens
tatagtgtaaaaactaaggcttagaattcactagaaattcacatgggatctggagtacgtttgtctaaaagcaaaagaattacactgagtcgrgctatgggcaaatatatgattctgtcttatatctagaggtagaaaagttctaattgtattcatagagagacactttaaactgcaatattgtaaaagttgggacctgaaaatttaatgcctgggacttgaacgtattgacatatctttattgttcagtatagatctgaaggaacatttcagcagaaagaaaagcatgaggaataggaaaccttgtgggagtataataacaagagtattggttgagtagtcttttgaaaaatataaattatattttcacaaatagaactccttgagtccccttatggcagtcaagctacagcagcatgagcgtcaaatcatagtgatgtattttaaggtcacaacggcgga

SEQ ID NO: 540488 - DNA, 462 bp, Homo sapiens
tatagtgtaaaaactaaggcttagaattcactagaaattcacatgggatctggagtacgtttgtctaaaagcaaaagaattacactgagtcgggctatgggcaaatatatgattctgtcttatatctagaggtagaaaagttctaattgtattcatagagagacactttaaactgcaatattgtaaaagttgggacctgaaaatttaatgcctgggacttgaacgtattgacatatctttattgttcagtatagatctgaaggaacatttcagcagaaagraaagcatgaggaataggaaaccttgtgggagtataataacaagagtattggttgagtagtcttttgaaaaatataaattatattttcacaaatagaactccttgagtccccttatggcagtcaagctacagcagcatgagcgtcaaatcatagtgatgtattttaaggtcacaacggcgga

SEQ ID NO: 540489 - DNA, 456 bp, Homo sapiens
gctgctgcctggtggtaacagcaaagggtagaagtcaataggtagattttatctgatattttattagacagaaagactttaacacttgtttgctttcatttagatgtgacataatttttttcttactgcatttacattctattcaaacactttttctrtcaccaaaaattttgtcaaaaacatgttgcttattttaagcccctgtttaccgaaagaaagcagctttttcaaattctgtacatacattctatgacagactctaaaagttctcttcgtgacatgcatgatttttaacagtaaacagttctatgatcgtgaatattttaaatgtttactgctgtatgtgtcccggcaagtagcaaatgtgttgtattttgtttgaaatgtcttatttatttttgatgaggactagaacataagttagatatttttaagagagatactttttgaaatatg

SEQ ID NO: 540490 - DNA, 605 bp, Homo sapiens
ctgaactctcatcataaccatgtacctttccgaagataggctatgttaaagaacaggatgaatggaataatataagtgattctwatgtgtttcattaagtacgtggcgtagcattccatgttcagctttgacatttattttctcatatcaaccctgtttacacgtgaaacacaatctcactcttgaagtcttaactgcatgatctgtgaaacctgtatttatattttcttcagtgtattcttgtcgtgtgtgtgtcctaaacaaaccaaaagaaaactttccaaatctaaagtattcattctccaattggagcaagaggagtcagttagatactatcacggcattcatttgtggctggcttgtcatatttacttatgattgatgataaatctcttttgctttttagagcctcccgagaagccatctgccttcgaggtatttagtttcatgatttcattttgaatgacttattaactatgtattttgtgaagtatacattctttattaatcattttgcttccaaccccatttagcctgccattgaaatgcaaaagtctgttccaaataaagccttggaattgaagaatgaacaaacattgagagca

SEQ ID NO: 540491 - DNA, 605 bp, Homo sapiens
ctgaactctcatcataaccatgtacctttccgaagataggctatgttaaagaacaggatgaatggaataatataagtgattcttatgtgtttcattaagtacgtggcgtagcattccatgttcagctttgacatttattttctcatatcaaccctgtttacacgtgaaacacaatctcrctcttgaagtcttaactgcatgatctgtgaaacctgtatttatattttcttcagtgtattcttgtcgtgtgtgtgtcctaaacaaaccaaaagaaaactttccaaatctaaagtattcattctccaattggagcaagaggagtcagttagatactatcacggcattcatttgtggctggcttgtcatatttacttatgattgatgataaatctcttttgctttttagagcctcccgagaagccatctgccttcgaggtatttagtttcatgatttcattttgaatgacttattaactatgtattttgtgaagtatacattctttattaatcattttgcttccaaccccatttagcctgccattgaaatgcaaaagtctgttccaaataaagccttggaattgaagaatgaacaaacattgagagca

SEQ ID NO: 540492 - DNA, 605 bp, Homo sapiens
ctgaactctcatcataaccatgtacctttccgaagataggctatgttaaagaacaggatgaatggaataatataagtgattcttatgtgtttcattaagtacgtggcgtagcattccatgttcagctttgacatttattttctcatatcaaccctgtttacacgtgaaacacaatctcactcttgaagtcttaactgcatgatctgtgaaacctgtatttatattttcttcagtgtattcttgtcgtgtgtgtgtcctaaacaaaccaaaagaaaactttccaaatctaaagtattcattctccaattggagcaagaggagtcagttagatactatcacggcattcatttgtggctggcttgtcatatttacttatgattgatgataaatctcttttgctttttagagcctcccgagaagccatctgccttcgaggtatttagtttyatgatttcattttgaatgacttattaactatgtattttgtgaagtatacattctttattaatcattttgcttccaaccccatttagcctgccattgaaatgcaaaagtctgttccaaataaagccttggaattgaagaatgaacaaacattgagagca

SEQ ID NO: 540493 - DNA, 608 bp, Homo sapiens
tttgatatttttcagaatatgcttaatagagaatctatgtgctaagtagattactgcttcacagtgatattgtgtgaatttgtaggattaatttaagaagccagtgtggtacagtggaaataataagagttagaattcactagaaattcacatgggatctgaagtacgtttgtctaaaagcaaaagaattacactgagtccagctctgggcaaatatatgattctgtcttatatctagatgtacaaaagttctaattggattcatagagagacagtttaagctgcagtattgtaaaagttgggacctgaaaagttaatgcctgggacttgaacgtattgacatatctttattgttcagtatagatctgaaggaacatttcagcagaaagaaaagcatgaggaataggaaaccttktgggagtataataacaagagtattggttgagtagtcttttgaaaaatataaattatattttcacaaatggaactccttgagtccctttatgacagtcaagctgcagcagcatgagcgtcaaataatagtgatgtattttaaggtcacaacggcggaaagacatagaaagtatctgacctcttagaaacaagca

SEQ ID NO: 540494 - DNA, 606 bp, Homo sapiens
cttaagagcagatacatgtagaaaacaaacacattttgatagaaaacctcacataaccctctctacatcaagctcatctttacgttcacgtggccattaactcggtgactgagcaggaaaaacaaatcaccttcacaaaaaattcactcgtgcatatttcaaaaagtatctctcttaaaaatatctaacttaygttctagtcctcatcaaaaataaataagacatttcaaacaaaatacaacacatttgctacttgccgggacacatacagcagtaaacatttaaaatattcacgatcatagaactgtttactgttaaaaatcatgcatgtcacgaagagaacttttagagtctgtcatagaatgtatgtacagaatttgaaaaagctgctttctttcggtaaacaggggcttaaaataagcaacatgtttttgacaaaatttttggtgatagaaaaagtgtttgaatagaatgtaaatgcagtaagaaaaaaattatgtcacatctaaatgaaagcaaacaagtgttaaagtctttctgtctaataaaatatcagataaaatctacctattgacttccaccctttgctgttaccaccaggcagca

SEQ ID NO: 540495 - DNA, 605 bp, Homo sapiens
ttagttccctttatctctctcccctacctgccaattctagtcatgtgtacttttactttttacattgccaagagtggtaatgtttatgttttgctctacatttataattaactatctctataattaaatatcctgtgcttttatatattggttatttccagaagttgaaaatcaatatacagtgtttgtactattgttaattatttaaaatttttctctcttctgtcaagtgttgatagtattacatttcttaatttgtaaaacttgtttttttctggattttctaattacctttattttttcttgcatcgtctgctacattcataagtttctctaatttcttaaagatggataggcctggcgtggtggctcacgcctataatcccagcactttgggaggccgaggcgggcagatcatgaggtcaggagttcgagaccagcctggccaacatggtgaaacaccgtctctactaaaaatacaaaaaattagctgggtatggtggtgcctgtaatcccagatactcaggaggctgaggcaggagaatcgcttgaacccgggaggcagaggttkcagtgagctgaaatcgtaccactgcactccagcc

SEQ ID NO: 540496 - DNA, 621 bp, Homo sapiens
tgactcctttatctttctaactggtgtggaaagaggggttattcacttggctccctcaaacttcaatagtgggtagttttccttgctttgtatagctcacagctttcagtgaatatttattaaagatatatgtgcaaaaatgtggtgagagggaaacaaatctgtttggttttatttgttcatgaatgagtatttgaccatattccatcccataaaagtcttgggaggcagtccaaaatatgatatccaatttctgtgtgaattcttagagggaaacaattaacatatattcaaaagagaaacagccctattaaaaatatyattgatgtcttagcacatggaaataggtttttgacccttgtagagcattagccccttgaaaagtttcttcaaactattttctaagccaaatgacacaggtgaaaacttaactcttaagaggcttcttttatgtgtgctgaaataaatctgaagggcagcatgacatttctttccaagttccttttcatttttacaaccaactattttaaactatcaatcctttataaaagggttatttaaaacctccaaaatcaagtacttccatgtaaaaattcgtttgcctgcaactaaaaaatcagc

SEQ ID NO: 540497 - DNA, 644 bp, Homo sapiens
gttgaataacatgtcttctgactccttacccagtgcttttcttatttgctatttcatcttgagaaacagacatgggtattctgaaagacagttaattaattgaccaaaattgtggagaagaaaacaaaaaagaccgaaataatagacactgactatgtaattatctggaggaaagagtattggtagtttttaaatctaataaacatacaaatgtccaagaaaaagaaaaaaataataaatatttagttaacatatttcaagttcttttggccaaattataagaagacagcctttaaaaaacagctttccatattcttgaatttattttatagcaaaaatgtgatgtctttgaataaatgacttggcatacamaactcacagaataaagaattttaaatatattattgtatagtaataatatgctcttttgataaatggtatggctgcaatcattgtatcagcattttttacatagatctagtgtaaaaagtcaggagtcacatttattgaggtctataatatactctctctgaacctgagaaaaaatggagtctttcatattcacctgtcttcatctttagaccatgttagcccaaacattgtctggagtaaatatttactagtggatactaattgtccaattt

SEQ ID NO: 540498 - DNA, 644 bp, Homo sapiens
gttgaataacatgtcttctgactccttacccagtgcttttcttatttgctatttcatcttgagaaacagacatgggtattctgaaagacagttaattaattgaccaaaattgtggagaagaaaacaaaaaagaccgaaataatagacactgactatgtaattatctggaggaaagagtattggtagtttttaaatctaataaacatacaaatgtccaagaaaaagaaaaaaataataaatatttagttaacatatttcaagttcttttggccaaattataagaagacagcctttaaaaaacagctttccatattcttgaatttattttatagcaaaaatgtgatgtctttgaataaatgacttggcatacacaactcacagaataaagaattttaaatatattattgtatagtaataatatgctcttttgataaatggtatggctgcaatcattgtatcagcattttttacatagatctagtgtaaaaagtcaggagtcacatttattgaggkctataatatactctctctgaacctgagaaaaaatggagtctttcatattcacctgtcttcatctttagaccatgttagcccaaacattgtctggagtaaatatttactagtggatactaattgtccaattt

SEQ ID NO: 540499 - DNA, 640 bp, Homo sapiens
attttttttactggtccaagttcaaataaaatttacataaaaatattttctttataaaatgactatacagataatgaaccaagaatattatatagtgaatattttcatggtaaatttaaaaagcatatgtatcttccaaaaataatgtttttttaaataacaagaaaaattaatttagtacaaccattctttcatcttaattcaaccaatattttattttttaaccaataaagtgcttactagacagttgaaactgtgtaagcgaataataacttaaaaaaattacttgtgataaaatgatagaaaaagccaactcaaataattttcattgaagacaaatcttgcagctatattaatattaataaaaattaaatgcttttgattagtctagattggyttgtaatggtaaaacacaaagacaaaactgaggcagtgagcctcacaatgcctctactgatttctctactggcccttcctctgcacatggtcaattagaattgaaaatcctgtgctgatttcattcgctggaatttttaagcaggtcaggaagaaagatgttattgaaaggaaaagtctcatctaaataagaaaggagcacgtggccatctggtcttagctatacatataaaaagttatttca

SEQ ID NO: 540500 - DNA, 640 bp, Homo sapiens
ctatacatatgtcaaagtcaacactttagaagtggctaataaagaaccatattgataccgaaaagtcattagggacaatcagctgtgttaatgggaaagaatgacatactctggggggagcaccatggcagttgttatcatagctgctgggaatcctacgggagtgccatttccacaaaaataagaagagagcatagactgtcaggggctgcctttcatggcacttgaaatctctttggagctggcattgcacacctgagtctctatgacccatataaaaatgtggctattgcttctgaatgcctccccagcttcatccagattcctagrtcagagaaccccatgcatggcttctgtttagtcgtcacaatgtgttcctttgctatctccttgcaatttcatttgctttctaaatcaattccagctgttattttaaaaaccatcttagcttaaaatctttttagcagtttcatttgttacatcttccaggttcaccccatagaaagaataaaacccctgacgtttatgtggccagtttctaggaagtataattctgtcatctggccaaaatacagacataccatattttattacacttcactttattgcactttgcagaaattgtgctttttgcaaataa

SEQ ID NO: 540501 - DNA, 478 bp, Homo sapiens
agctgcagatacataggaggagtcaatccttgagtaaccttctctagataggaagtaagctagtattgctctccctactgacatcacactagcatgttaaattctacatttgcctcattgaatatcacatccctgtctactctattgtctcctctttcttcattaaggataggcttcttgttccagtctaccaatcgtccaaattaataacttaaatgtaaatcagttcatatcattctttttataaaacccttccaagggcttccatctgcacttaaaataaaatctatggcttcaagggctcttaatgttcaggcctttgaccccattttcctgctcataccactctctcttattactytctggccaactagactttcatattcttagaggcaataaaatctcaccttcgtaattttacttacttcttgcacagaaggctatttatttatttatttattttgagacagagtcatgc

SEQ ID NO: 540502 - DNA, 587 bp, Homo sapiens
tcctggggaatgaagggcatatgcctcttgtgtaaatccccaattcttcttcacccattgttttaagtggagatttctggcaatcacttcaagctttggtaactctttcctgtggagaattatctacttattaccatatatgtgtaggtttttgtgagctatctttatgaatattaatttaaataaagaaatamagctaggatttttttaactttactatatttttgtactttatattcgattgccttttatttcttttatgcatatatttatggggaaaagtttctttccctactcttgtcttttcatatgtaatgagttccattaatgtaacactttaagctctcctttttattctactccagacatgcatttaaatgggaagttgggaaggaaaaactggacacgtgagcctgcatatctccatatcttctttttctctctttctccctcatcctctcactgtctaactctcatgttcccttcctctctttgtattgcctatagaatgtaaatcctcccagatgacctctctatgctataaattttcagcccacatacttgaaggtgtgagtcacattcttcaa

SEQ ID NO: 540503 - DNA, 469 bp, Homo sapiens
acagggggttataagcaagaacatgctgaatgaatcttcagtgaaatggcccatacattgtatcactttgattatcagataagacctaacaccataggaaaaatgacttatctcttgacttcagggaaatacaataggatattaattaatatactagttttttttgttaaaagtcttagatttattcattattttaaaactaggtacctcttcttgttcttttattgagacagcaaaggaagatctgcctggctcaggtatacaacgtgagtagccaargaatgaagatgcataggatgacatcagagaacagggcgtggttttgcttttaatattttgcagtccccttccagttgcctttctacttatattcaagtagaagaattggtaaaacgagagagagagagagagagtatttttttcctcttaggactaaattatagaaacaccataagcattttaaatcaaa

SEQ ID NO: 540504 - DNA, 623 bp, Homo sapiens
tttcagcatacattttggtgttcatagatgttttcattgctcttagatgaatacttttggctcatagcgtgtataactttaccaaaaaattgccaaattgttttctaacgtgatgggaccattttacgctcctacctgaaatgtatgagagtttcagtagctcttcatccgtggttgggattgtcatttatttttgttatgggcattttaatgcatattggcacctcattgtggttttaacttggayttcctgatcagtcatgatgctgagcacctttgataggctattatccatttacataacttcttgtgtctaatatccgttctcatcttttccccatttatcagattgtctttatattacagatttgtaagagttctttaaccattctagatgtgagctctttgtcagttatttgttttgcaaatatcttatccctgcttgcttagagaaatatttgtatccttaaatgattcaattcagaaaagactaatggtttgcattgtattttcccaaagtagtatttgaagagcaagaaaatgcttttaagtttattgagttttcttttatggctagtgttttcattttgtattgttttttctcctaggaatcaatgacctac

SEQ ID NO: 540505 - DNA, 535 bp, Homo sapiens
gaagctcaaagtccattgtttctctgataccagtgaacaccaacaaagccagagaatagttcagaccaaagccaagagcagagagacagggcaaaggacatgcaaagggaaaagtcaaaccaagaggtggcattgagacaattccaatgatgccagacaacttgggttgctgcggcagatgaagctacaaatagattttattttkatatataaataaaatgagaatgaaggaagttgatgaggaccccaagatcacatgcccaacttggtgagctgacaagggcatttccaatctgtggaatctgtgaatagacagcagtattgcttacatcagaattttacttctaccaatgaagtgcttaaaatatatcttgataaacaagtttaactatatgaacgcttgcagagcttcatatatttgccttccaaaaatttatcacttgcttccaaaaagtgttattaacaaaatgtaggaatgtctctttatagtattggatttaccacaagtgttttcattaaagtagagaagccagcc

SEQ ID NO: 540506 - DNA, 634 bp, Homo sapiens
ttattcactttatgacattatcgattacrataattggagcaagtgctacatgggattgttgaaaggggattcttgatgagatatacaactctcagtgctaggcgttgttgttaaggctgcagaaatgagttcaatacatcatcccatggcagaaacactcattcagtaatattttcaggctgaaaaatattctgtatgacaatactctaaagattataaaaacagggtagagtcatgaatttaaacattttcattgctagaattaattgctattgtactatgttgaggcctttactttcttcttaatgaaagaaaatggtaattaatatatgttttatataaagagttgagtaagaacttttgcaaattgtatccattttcagggaaagagatttaatttttattgtattacccgtggcctggtgaagttgtagcagtaacactgtatcccaccctgggttagctgccctggtgttttctaaagataactagaatttttgtacctttgaaaactggttcctggtcaaatatctttgaaaagtatacccagtaaactttctagatactatcatcagctaattgaatttaaatggctattctcttattcccttaacaagctttcccagtatatttc

SEQ ID NO: 540507 - DNA, 660 bp, Homo sapiens
atggtcaatatgaccaggttctcttataatctgtcacaagtgatctacaatacattattgtmatttgaatcgttttttatgtcagttttttcttctattaaatatgaaaaatagaaaagtaattatttaacacttagtagaaacaccacaaagaaatgcaacaggaactacatgtaaactaaagattgtttaaagccttttacaaaaattcagagaataaaatgagtgatacatttaagtgttttaatctcacctgagagctcactctaattcacctttaaataagtctttgagcattaatatattttaagttttatttatcactttatttatataatcaaaccaaagaaaataaatcaaaataaatcctgctgattctgaaatttttagatttctttccaaaaatcagataagtttaagttttatgtttggattatcttgctagcaccataataaatatgtttaaacaatgtttataggatatattttaatctcaacttatcaattataacacagtgataaataaccatctgataaaatagatcatttgaaagctttgtaatagttaaacatatttgactctatttagactcaagattggcaaacataaatgaagagcagagaaatgagaacaagaaaaggctacttattcagagcttg

SEQ ID NO: 540508 - DNA, 660 bp, Homo sapiens
atggtcaatatgaccaggttctcttataatctgtcacaagtgatctacaatacattattgtcatttgaatcrttttttatgtcagttttttcttctattaaatatgaaaaatagaaaagtaattatttaacacttagtagaaacaccacaaagaaatgcaacaggaactacatgtaaactaaagattgtttaaagccttttacaaaaattcagagaataaaatgagtgatacatttaagtgttttaatctcacctgagagctcactctaattcacctttaaataagtctttgagcattaatatattttaagttttatttatcactttatttatataatcaaaccaaagaaaataaatcaaaataaatcctgctgattctgaaatttttagatttctttccaaaaatcagataagtttaagttttatgtttggattatcttgctagcaccataataaatatgtttaaacaatgtttataggatatattttaatctcaacttatcaattataacacagtgataaataaccatctgataaaatagatcatttgaaagctttgtaatagttaaacatatttgactctatttagactcaagattggcaaacataaatgaagagcagagaaatgagaacaagaaaaggctacttattcagagcttg

SEQ ID NO: 540509 - DNA, 660 bp, Homo sapiens
atggtcaatatgaccaggttctcttataatctgtcacaagtgatctacaatacattattgtcatttgaatcgttttttatgtcagttttttcttctattaaatatgaaaaatagaaaagtaattatttaacacttagtagaaacaccacaaagaaatgcaacaggaactacatgtaaactaaagattgtttaaagccttttacaaaaattcagagaataaaatgagtgatacatttaagtgttttaatctcacctgagagctcactctaattcacctttaaataagtctttgagcattaatatattttaagttttatttatcactttatttatataatcaaaccaaagaaaataaatcaaaataaatcctgctgattctgaaatttttagatttctttccaaaaatcagataagtttaagttttatgtttggattatcttgctagcaccataataaatatgtttaaacaatgtttataggatatattttaatctcaacttatcaattataacacagtgrtaaataaccatctgataaaatagatcatttgaaagctttgtaatagttaaacatatttgactctatttagactcaagattggcaaacataaatgaagagcagagaaatgagaacaagaaaaggctacttattcagagcttg

SEQ ID NO: 540510 - DNA, 660 bp, Homo sapiens
atggtcaatatgaccaggttctcttataatctgtcacaagtgatctacaatacattattgtcatttgaatcgttttttatgtcagttttttcttctattaaatatgaaaaatagaaaagtaattatttaacacttagtagaaacaccacaaagaaatgcaacaggaactacatgtaaactaaagattgtttaaagccttttacaaaaattcagagaataaaatgagtgatacatttaagtgttttaatctcacctgagagctcactctaattcacctttaaataagtctttgagcattaatatattttaagttttatttatcactttatttatataatcaaaccaaagaaaataaatcaaaataaatcctgctgattctgaaatttttagatttctttccaaaaatcagataagtttaagttttatgtttggattatcttgctagcaccataataaatatgtttaaacaatgtttataggatatattttaatctcaacttatcaattataacacagtgataaataaccatctgataaaatagatcatttgaaagctttgtaatagttaaacatatttgastctatttagactcaagattggcaaacataaatgaagagcagagaaatgagaacaagaaaaggctacttattcagagcttg

SEQ ID NO: 540511 - DNA, 519 bp, Homo sapiens
gatgatggaatttagaagacatgaaactatcttttcttctcaaataagatatttgracaaaacattaacccattctatcctttgatatcctttcaatgcaagtttagcttacacattattctggatatgtcaacactggatgcagagattcgagttaaactagactgaggaaaacgggctctttcaatatacatctaccaagctctagcataattctatggagagttatattttcctttagacctcatttttaaacattgtaatattattttattaatttttaagccaatggggtctcattctgttgcccaggctggagtgtaagggagtgatcatagaccactaccgccttaaactcttgtactcaagtgatcctctcacctcagcctccctagtagctagaactataggcaggtgccaccgtgcctagctaattattttttgttgttgttgtagaaatgggatctcactctgtcgtccaggctagcctcaaattcctggctttaagccacccttcag

SEQ ID NO: 540512 - DNA, 646 bp, Homo sapiens
ataattctatggagagttatattttcctttagacctcatttttaaacattgtaatattattttattaatttttaagccaatggggtctcattctgttgcccaggctggagtgtaagggagtgatcatagaccactaccgccttaaactcttgtactcaagtgatcctctcacctcagcctccctagtagctagaactataggcaggtgccaccgtgcctagctaattattttttgttgttgttgtagaaatgggatctcactctgtcrtccaggctagcctcaaattcctggctttaagccacccttcaggcttaaaggcctagtccttatttttttaatgctgtacaaaaaaaaatgctatcttgttattttatacattaaaattaccactatgagctctttgtaagaaataatatatgacaatacattatgtattatatgtgaagtagacagtacattatatgtaaaatatgtattagataagtattactgtattaatatgtaatatcagattatattattacataatatatattataacatatattgctctgtccttcagtagtcgttttatttgtaaactcttttcacatatacattttctttgctattcacaacttcattagtaccaccaaagggcaatca

SEQ ID NO: 540513 - DNA, 508 bp, Homo sapiens
ttaaactcttgtactcaagtgatcctctcacctcagcctccctagtagctagaactataggcaggtgccaccgtgcctagctaattattttttgttgttgttgtagaaatgggatctcactctgtcgtccaggctagcctcaaattcctggctttaagccacccttcaggcttaaaggcctagtccttatttttttaatgctgtacaaaaaaaaatgctatyttgttattttatacattaaaattaccactatgagctctttgtaagaaataatatatgacaatacattatgtattatatgtgaagtagacagtacattatatgtaaaatatgtattagataagtattactgtattaatatgtaatatcagattatattattacataatatatattataacatatattgctctgtccttcagtagtcgttttatttgtaaactcttttcacatatacattttctttgctattcacaacttcattagtaccaccaaagggcaatcacag

SEQ ID NO: 540514 - DNA, 605 bp, Homo sapiens
aaacattgtaatattattttattaatttttaagccaatggggtctcattctgttgcccaggctggagtgtaagggagtgatcatagaccactaccgccttaaactcttgtactcaagtgatcctctcacctcagcctccctagtagctagaactataggcaggtgccaccgtgcctagctaattattttttgttgttgttgtagaaatgggatctcactctgtcgtccaggctagcctcaaattcctggctttaagccacccttcaggcttaaaggcctagtccttatttttttaatgctgtacaaaaaaaaatgctatcttgttattttatacattaaaattaccactatgagctctttgtaagaaataatatatgacaatacattatgtattatatgtgaagtagacagtacattatatgtaaaatatgtattagataagtattactgtattaatatgtaatatcagattatattattacataatatatattataacatatattgctctgtccttcagtagtcrttttatttgtaaactcttttcacatatacattttctttgctattcacaacttcattagtaccaccaaagggcaatcaca

SEQ ID NO: 540515 - DNA, 416 bp, Homo sapiens
atccagagctgttttccttccaaactattatcaaacataccttctaatttaacatgtcttcagagcctgcaactgttagwgtacaacataaacagggtgaaaaggatactgttgggtaaatattgcactctaagatgtaaaattgcataaactcaggcaaagaaaaaaagactactaagaaaagtttgtgttgagtatggacttgtaggagagtgccatcctttacatattgctcttggactagaataagggtagacagtagtattatattttccagtgaccacaaaaaactgggcagttctaactgaagaccctactttagttagtggtgccacacaagaggactgtgatgctggtctttggataaaagctcttgtttgtgaccactaatttgttgtctagctttatatcctagg

SEQ ID NO: 540516 - DNA, 416 bp, Homo sapiens
atccagagctgttttccttccaaactattatcaaacataccttctaatttaacatgtcttcagagcctgcaactgttagtgtacaacataaacagggtgaaaaggatactgttgggtaaatattgcactctaagatgtaaaattgcataaactcaggcaaagaaaaaaagactactaagaaaagtttgtgttgagtatggacttgtaggagagtgccatcctttacatattgctcttggactagaataagggtagacagtagtattatattttccagtgaccacaaaaaactgggcagttctaactgaagaccctactttagttagtggtgccacacaagaggactgtgatgcwggtctttggataaaagctcttgtttgtgaccactaatttgttgtctagctttatatcctagg

SEQ ID NO: 540517 - DNA, 628 bp, Homo sapiens
atttttaagactgagatgctaatgtgaaataaatttcttatatgaaagggtatgatttttagcttatcatttatgctgatatacaatagagaactaaagacactaatttttcaaaataaaaaattggcctagtgaggaggaaagacagaattttgtaatacacatagtctgtattgaatgcaattctaaatttattttactatgtaaatgtatttacttttattaaaatgaaatataaaacaatctattagcttgctttggcttccgcaacaaagtatcacagattggatggcttaacaacaaaaatttattttctcatcgtctagagccttgaagtctgagaccaagttgtccacatagttgatttcattctgaggcctctgcctttagcttatagatgccttctccttttgtcttcacatgggttttcctctgtatttgtttgtgtactgatctgttcttatgaagacatcagccacattgaattacggccttctcatatgacttcattttaccgtaatcacctctttaatatgttatctccaaatacaggtayattctgaggtactgggagaaggggtggttagaatttagatatataaatttgagagagacaaagttgaaccca

SEQ ID NO: 540518 - DNA, 536 bp, Homo sapiens
ctgctgttcactgttgcaagaagaattttatcagagctgtttactgttagagcaccttgcattgggactcttattttttatagagagcaggaaacactgtagagcattcgtaggttatattaaacttaggctaatggtttttaaggctaaatgttaacaattcctcacatctgtgcaagagcatatgttcaaagtctctttcacctacttcagaagcatatgaatgtgtacccacactgtcataaatatcgtgacagaagagatcaactcctatacacttggtgtattagtctgcttttacgctgctgataaagacatatcggagactgggaagaaaagtcggtttaatttgacttacatttccccatggctggggaggtctcataatcatgatggagggcaaaaggcactttatttatttatttatttatttatttatttatttatttattcatttatttatttattttgagacagtctctcactgtcrcctgggctggagtgcaatggggctatcttggctcactgcaacctcc

SEQ ID NO: 540519 - DNA, 607 bp, Homo sapiens
acaagtatgagagctgcaaatgaacttggcctgtgttaatggatgaggaagctcgattctgattcccagctctgcagtcaatgatatctgcgatgtgatttttgaactgttgaggtgctaaggtgtttatgccatcagaataatgtaaaagaatgtcagaagaactcccctcagccttatcatgcctgctttttattgtctggctttgcacacaagataattagtttgatagcacaattatgtatttacttcttagtaaatcagccccataagacagtaagtcatacggaggccaaaccctacctatttagctcattattgtattctaatttgttaattcagtccctggcacaagacaactagaaaggaatagatggaargagggaggaaggaatgggagagagttttgtgaagttttttattagtctttaaggagacacaattctcattggtatgaaacagttggacttggtttaaactttggatagttttgaatactttctctttttggtataatacatgtgctttgatgcatatgaaaacatattgtacaagattaacaatatcatggtttcagataccctttatagactaattataacacagc

SEQ ID NO: 540520 - DNA, 490 bp, Homo sapiens
gagggtgaaatcagtgcttgctgtttgattctgagaagtctgattccctgagcacatgactggctcacagtttccccctgaggaaaaaaaagtcattaattttaaatctttcctatgtacatggctttcctaacctttttctggtaagacatgtgctttgaattatttttctaaatattgakttaaactgacataaaatcataagttcaaatcttaggtcaagtcgcatgttggccacaagctaaagtgaactacgaaacagatctggggaggtgactattcctgagctaagtcaagagtgaagacaggtacactctatgtcttatttccccccagaattaagaacacaagtatactggccttgtgggatggttagagactgaagtagggaatgcacgttaggtctgtaacacagtgttagtgttgggttgagattttcactactttttggatacagtagctcatccaggactcagtgatggaaatcatg

SEQ ID NO: 540521 - DNA, 490 bp, Homo sapiens
gagggtgaaatcagtgcttgctgtttgattctgagaagtctgattccctgagcacatgactggctcacagtttccccctgaggaaaaaaaagtcattaattttaaatctttcctatgtacatggctttcctaacctttttctggtaagacatgtgctttgaattatttttctaaatattgagttaaactgacataaaatcataagttcaaatcttaggtcaagtcgcatgttggccacaagctaaagtgaactacgaaacagatctggggaggtgactattcctgagctaagtcaagagtgaagacaggtacactctatgtcttatttccccccagaattaagaacacaagtatactggccttgtgggatggttagagactgaagtagggaatgcacgttaggtctgtaacacagtgttagtgttgggttgarattttcactactttttggatacagtagctcatccaggactcagtgatggaaatcatg

SEQ ID NO: 540522 - DNA, 611 bp, Homo sapiens
atattaataccaatttattgtgaacatttcaataagtaaagttgaaggaaaatatatgtggcagaatgatcagtgtgttaccatttaacaaatacatcctgctaaaatattacatttggacacatatctgcaataaaaacattaaaaattgatagggaagatacacacctactgtttaaaaaaattggtctgaggacactaagagagggaattcaggagagcacagataagactttgatgtacctgtaaaatatatacccccatttttgagtcagggtcttgctctgtcacccaggctggagtgcagtgtcacagttgtggctcactgcagcttcaatctcccaggctcaagtgatcctctcacctcagcctcctgagtagctaggactatagacacgtgccactatgcctccctaatytttttaaatttaatttttggagagatgaggtctcactatgttacccaggctggtctcaaatacttaggctcaagcaatcttcccacctcagccttccaaagtgttgggattatagggcataagccactgcccctggatgatgtacctatgatatatatatatttttttatttcaataggtttttggggaaca

SEQ ID NO: 540523 - DNA, 515 bp, Homo sapiens
tggctaagctgcttttcctacgcagccgtccacactggcaacatgtttcgggagcacgtttgcagatccartgtgatccaccagttcttccgtgacatccctcatgtgttggccctggtttcctgtgaggttttctttgtagagtttttgaccctggccctgagctcatgcttggttctgggatgctttattctcatgatgatctcctatttccaaatcttctcaacggtgctcagaatcccttcaggacagagtcgagcaaaagccttctccacctgctccccccagctcattgtcatcatgctctttcttaccacagggctctttgctgccttaggaccaattgcaaaagctctgtccattcaggatttagtgattgctctgacatacacagttttgcctcccttcctcaatcccatcatatatagtcttaggaataaggagattaaaacagccatgtggagactctttgtgaagatatattttctgcaaaagtagaacatcctggtctttac

SEQ ID NO: 540524 - DNA, 678 bp, Homo sapiens
tattatacatcaggttttctctatcactgagtttgcatgttaaattgggtcacttcttctggtgagacacagaggaaaacttcagaactgtttctttatcatcattggtccagacagtgaatacatattgagaagctacatgttatttaatcaaggtattgctggtcttgtatttctcagatatttacccaataaggaaattgaatttgtctacatgagatttatgtaagcaatcatttcaaattttttatgagaaaaaaatcaagacatgtttgcttaaagtgatttaattgttctcttagtaattatgtttcatatttttttccaatgaaacaagcaaacaaaatagtgcattcagtttgcttgaatttttatcattttaatcagttttggagagatctatttttagyttgagactagagtggaagcagctcatggtgcagtgtgtattggttttgttccaacagtgaagctcttttgcttgatataagtgggataaagggcagctcttcagcatcaggccactcagagaaaactacactgaagtaaaaaggcttcatatagattagatacaaatgctctcagaggtggggcagcagaggccatcttgttgagtgtagttttacatttcagtaaattgaaattaaaatgtatttgtaggttccccaacttaaaaca

SEQ ID NO: 540525 - DNA, 680 bp, Homo sapiens
cactatcttctcttttatataattattccataaactggtgacgatttatggcactgacgcatatgaactcaatgatttaaaaaaactctatccatgacacttttcatagagtgtttgagaaaactgagaataaaaattttcaggagaacaaagctataaataaatgcatttgcctcttgtttaaaaattccaataaaacctgatagttgacttaatacatctggagtacaagttgtcatgacagaaacaaatataatcacatttagttggaatttttttctttgagagacataaaggattaaaatgtatttatgccatgagtttgattttcggggtcatgaatgacatttctccataaattaggwagtcctttgagaagaaagccattaatttggttagtgttcttgtattgcacaactaatctaaagctaaagaagagtacttgcaatttttcaaactttatatcaattgacatttgatatcatgtaaacaatcttctgttttacacgctatagttggttggctttaattggaggtctttcactttgggtaaaataaattatgatcttttacttatacttcagttattttaaaaaatagtagctgaaaattaaagtcaccctggttggggagcatttaaaacaacacaaaggacaaaaatgcgggagcaaggccaggct

SEQ ID NO: 540526 - DNA, 508 bp, Homo sapiens
tgtgaaggagatctagttcagagtgaaaggttgctgtgaactctaatatttggggtttttcttccctaaataaaaagactagataaattatttaacttcataataaaccatttttgatacttcactgaaagatctctgcataacagtaaaacatctttcccttgctcccgaggagcaagaatccagacagggtgaatcatcttaactgccagtagtaagtgtaggttgatagctgagcagatcatctccagggaaacagggcaaatggaggaagtccttaggaasccttatcctctgggcagtgactctctaagcatcacttgttgctactttctgagcagatgagcaacatgcaaatacctttttaaatgcccctatgacgtccttgtttctgaggctgtagatgagaggattaagcatgggcgtgacaatggtatagaaggctgacactactttgtcctgctcgggggtgtggaaggactggggcagcacgtatgtgtagaaggca

SEQ ID NO: 540527 - DNA, 508 bp, Homo sapiens
tgtgaaggagatctagttcagagtgaaaggttgctgtgaactctaatatttggggtttttcttccctaaataaaaagactagataaattatttaacttcataataaaccatttttgatacttcactgaaagatctctgcataacagtaaaacatctttcccttgctcccgaggagcaagaatccagacagggtgaatcatcttaactgccagtagtaagtgtaggttgatagctgagcagatcatctccagggaaacagggcaaatggaggaagtccttaggaagccttatcctctgggcagtgactctctaagcatcacttgttgctactttcygagcagatgagcaacatgcaaatacctttttaaatgcccctatgacgtccttgtttctgaggctgtagatgagaggattaagcatgggcgtgacaatggtatagaaggctgacactactttgtcctgctcgggggtgtggaaggactggggcagcacgtatgtgtagaaggca

SEQ ID NO: 540528 - DNA, 488 bp, Homo sapiens
gtggatggttaacaagatgagggagtaggaagtggagatgatagagatggggatgagcaacatgaggacacagcagatgtacatcagagtttcatacaaggacgtgtctgcacaggccagtttcagaactgctgggatctcacagaaaaaatggttgatacttcgggagccacagtaagggacattcatggtgatgggagtgagcagaaagccatcgagggagcccccaaaccaggcaccagcagccagcaaaagacacttcttgcggttcatcaggactgggtatctcagagggttacagacagccacgtagcrgtcataggccatgaggcccaggaggaagaactcagaaccaatcatggtcaggtagaggaagatctggatgccacaggccacaaaggaaatgatcttctctttagaaaccatgtctgccaggagttttgggacagtggtacagatgaaaagggtgtccatgatggacagctgac

SEQ ID NO: 540529 - DNA, 590 bp, Homo sapiens
atgggggtgtggaggcgagagtccacctgaatcaagaatatcatgaccaaatttgcagtcacggcccccaagaaaacagcaaggatcactgtaaatacaatcccggcagcctcactgttcaccagaagccccaggagggtgaagtcagaggatgatgtgttcgtcattgatatggcccacgagcgtcccagggcaacgggaagacacaaggaccaggaaggaggcaagagaacacggtcaagatgggaaaggtctgcagtagaggtgacacttctgagggtaccgtcaggatgaagcttccaggctagaggctagagaagaacaggcagaccaacatgcacatcatgaagcaaaaaccatggctgcatttccctgtcagagaacagctccttctatattgcgtctatggttcatcatgctgctggaggttatggtaactgcgtgatacaattgctgtatgytacaccaagaatggggttttaaccatatctgttctgtccatgctgcatttcttgtatccagaaagttatccagcccatagtagggttaagtaaatactagttggaaaaaagggtgattcattgaccaaa

SEQ ID NO: 540530 - DNA, 630 bp, Homo sapiens
atcttccacctccagcaaaggtcctcatgtgctaatgtctggaaccgatgaatatgctctcttaagtggcaaaaaagactttgtgggtatgattaagaactctgagatgaggagattcttctgaattatgctgttggactcaattgcaaatgccaaggccttacatgggagagaggaggaaggagagtcagagacgtgatatgaaaacaggtcggagggactcagtcggtctccgggtttgacgatagaggggaccccaagccaaggaatgtagatggtctctagaaactggagagggctaagaaatagattmtctcctaaaacctcatagaaaagtaggtagccttcccaacatcgtgatttcagtccagtgagaccggtttccaacttctgacctccaggctgtgatattatgaactttgtggtcatttggtaccacagccatagggagcttctatgctgataaatgattttcttacttagcttttaaacaaaactgagacatgttgcaataatgaattggccagcacttgtgtagtgcttcttgctgggtctcaggcaccgtggacgtgtgccaacgtttccacgtgctcttcacagcacctcgacgggtcgatcactaattatcac

SEQ ID NO: 540531 - DNA, 534 bp, Homo sapiens
gtaaaactgaggctcagagtcaggtgggaggagctggatccaggctcaaggactcaacttttgtttttcatgctctctgccactacccttaacttctccccaaagayaatatccctttgagcatcacttccgtttacaaccagccaaagagaagttaaatgaatgcagggtaaaaggccataaacacacccaaggaaaagttgaatttctgatcacaagttgtcaacaaagcaataaagtgacaacatgaagttaataattttccagaaacacaaaattctccctaactcttgggcaattctcagtcattacacacctgcctgcaggtgtctggctttatactgaggtacataaaaaaaatctcatcaaatgtaccccaagaaaggtcttacaaatgccactcacacacgtcactgttgtgcaattgcagagggcaatgactcatctcccagcagacatcataaagccccattcaataggcatgtttcctgcacagcatcaccgctgtcaacatgaagccctgtacgtactatt

SEQ ID NO: 540532 - DNA, 534 bp, Homo sapiens
gtaaaactgaggctcagagtcaggtgggaggagctggatccaggctcaaggactcaacttttgtttttcatgctctctgccactacccttaacttctccccaaagataatatccctttgagcatcacttccgtttacaaccagccaaagagaagttaaatgaatgcagggtaaaaggccataaacacacccaaggaaaagttgaatttctgatcacaagttgtcaacaaagcaataaagtgacaacatgaagttaataattttccagaaacacaaaattctccctaactcytgggcaattctcagtcattacacacctgcctgcaggtgtctggctttatactgaggtacataaaaaaaatctcatcaaatgtaccccaagaaaggtcttacaaatgccactcacacacgtcactgttgtgcaattgcagagggcaatgactcatctcccagcagacatcataaagccccattcaataggcatgtttcctgcacagcatcaccgctgtcaacatgaagccctgtacgtactatt

SEQ ID NO: 540533 - DNA, 534 bp, Homo sapiens
gtaaaactgaggctcagagtcaggtgggaggagctggatccaggctcaaggactcaacttttgtttttcatgctctctgccactacccttaacttctccccaaagataatatccctttgagcatcacttccgtttacaaccagccaaagagaagttaaatgaatgcagggtaaaaggccataaacacacccaaggaaaagttgaatttctgatcacaagttgtcaacaaagcaataaagtgacaacatgaagttaataattttccagaaacacaaaattctccctaactcttgggcaattctcagtcattacacacctgcctgcaggtgtctggctttatactgaggtacataaaaaaaatctcatcaaatgtaccccaagaaaggtcttacaaatgccactcacacaygtcactgttgtgcaattgcagagggcaatgactcatctcccagcagacatcataaagccccattcaataggcatgtttcctgcacagcatcaccgctgtcaacatgaagccctgtacgtactatt

SEQ ID NO: 540534 - DNA, 526 bp, Homo sapiens
ataacctagacagctactgaatgactcggggtagcatagacagtgtgaatcaactacacagagggatgatatttccaccacactactcaaaatggtgggcaatttaaaatttgagatttttcatttaatattttytacacatggtagatagcaacctggcggattgcaggttaactaaaactatggaaatgaaagtgttaaagagaggaataccatgtcagaattctttacctcaaaggttcaaccctagggctagagactgaaaggatcttaaagcatgaaacttttgaagagcatctaagtgatcactgctttgaaaatagtggatcacaagaaccaggagaagacaggagtcagttcagttaaacagtgcaatagtagagagggaaaccggtctgattccgaaactcgagactgaaggagagaggacatgatcagagacaatgtaaataatgtcaaaaggctcgaaaatgggaattagcaggcactaggggtggaagagagaggggagagtccagtctaacta

SEQ ID NO: 540535 - DNA, 526 bp, Homo sapiens
ataacctagacagctactgaatgactcggggtagcatagacagtgtgaatcaactacacagagggatgatatttccaccacactactcaaaatggtgggcaatttaaaatttgagatttttcatttaatattttttacacatggtagatagcaacctggcggattgcaggttaactaaaactatggaaatgaaagtgttaaagagaggaataccatgtcagaattctttacctcaaaggttcaaccctagggctagagactgaaaggatcttaaagcatgaaacttttraagagcatctaagtgatcactgctttgaaaatagtggatcacaagaaccaggagaagacaggagtcagttcagttaaacagtgcaatagtagagagggaaaccggtctgattccgaaactcgagactgaaggagagaggacatgatcagagacaatgtaaataatgtcaaaaggctcgaaaatgggaattagcaggcactaggggtggaagagagaggggagagtccagtctaacta

SEQ ID NO: 540536 - DNA, 595 bp, Homo sapiens
atctctttggggccattaagaaaaactgagttacttgaacacaagcactgagtccgccacagtcgatttgataacctagacagctactgaatgactcggggtagcatagacagtgtgaatcaactacacagagggatgatatttccaccacactactcaaaatggtgggcaatttaaaatttgagatttttcatttaatattttttacacatggtagatagcaacctggcggattgcaggttaactaaaactatggaaatgaaagtgttaaagagaggaataccatgtcagaattctttacctcaaaggttcaaccctagggctagagactgaaaggatcttaaagcatgaaacttttgaagagcatctaagtgatcactgctttgaaaatagtggatcacaagaaccaggagaagacaggagtcagttcagttaaacagtgcaatagtagagagggaaaccggtctgattccgaaactcgagactgaaggagagaggacatgatcagagacaatgtraataatgtcaaaaggctcgaaaatgggaattagcaggcactaggggtggaagagagaggggagagtccagtctaact

SEQ ID NO: 540537 - DNA, 526 bp, Homo sapiens
ataacctagacagctactgaatgactcggggtagcatagacagtgtgaatcaactacacagagggatgatatttccaccacactactcaaaatggtgggcaatttaaaatttgagatttttcatttaatattttttacacatggtagatagcaacctggcggattgcaggttaactaaaactatggaaatgaaagtgttaaagagaggaataccatgtcagaattctttacctcaaaggttcaaccctagggctagagactgaaaggatcttaaagcatgaaacttttgaagagcatctaagtgatcactgctttgaaaatagtggatcacaagaaccaggagaagacaggagtcagttcagttaaacagtgcaatagtagagagggaaaccggtctgattccgaaactcgagactgaaggagagaggacatgatcagagacaatgtaaataatgtcaaaaggctcgmaaatgggaattagcaggcactaggggtggaagagagaggggagagtccagtctaacta

SEQ ID NO: 540538 - DNA, 595 bp, Homo sapiens
atctctttggggccattaagaaaaactgagttacttgaacacaagcactgagtccgccacagtcgatttgataacctagacagctactgaatgactcggggtagcatagacagtgtgaatcaactacacagagggatgatatttccaccacactactcaaaatggtgggcaatttaaaatttgagatttttcatttaatattttttacacatggtagatagcaacctggcggattgcaggttaactaaaactatggaaatgaaagtgttaaagagaggaataccatgtcagaattctttacctcaaaggttcaaccctagggctagagactgaaaggatcttaaagcatgaaacttttgaagagcatctaagtgatcactgctttgaaaatagtggatcacaagaaccaggagaagacaggagtcagttcagttaaacagtgcaatagtagagagggaaaccggtctgattccgaaactcgagactgaaggagagaggacatgatcagagacaatgtaaataatgtcaaaaggctcgaaaatgggaattagcaggcactaggggtggaagaragaggggagagtccagtctaact

SEQ ID NO: 540539 - DNA, 641 bp, Homo sapiens
ggtccaggagcatcttgggcacagtgacagaaatgtacgccatgtccatgagagacaattgactgatgaaaaagtacatggggctgtggaggtgggcgtcacagtgtatcagaaggatcaggacagcatttccagacaacgccttcaggaaaaccacaaagatgaccacactaagtagagctggatgtttggatygtctgaagagtcccatgaggatgaaatccaaccttccagtgtggttggccatcctggtgatgttggccatgaggtttcacctaggccaccaaggagagttttggagtcagtgtaacgcgtccctttgtaatgagtgtttagtgagtactcacatttgtgtatgctcattgtgctaacctgagtcccgtgggtctggggatttgagtatataaatgacatataacaaattcacaaaacaaactaagaattcacaactataggccagaagaattggtaactgatagtaaggttgtcacggttcaaattcataaactttcctgatgataatgccatttatcaacaagtactgaaaatttgcagaacctccctcctctgctaacacaaacagtgacttcattgaaagaaagataaagcaaactccttattgtagagtttttgtcatagac

SEQ ID NO: 540540 - DNA, 641 bp, Homo sapiens
ggtccaggagcatcttgggcacagtgacagaaatgtacgccatgtccatgagagacaattgactgatgaaaaagtacatggggctgtggaggtgggcgtcacagtgtatcagaaggatcaggacagcatttccagacaacgccttcaggaaaaccacaaagatgaccacactaagtagagctggatgtttggattgtctgaagagtcccatgaggatgaaatccaaccttccagtgtggttggccatcctggtgatgttggccatgaggtttcacctaggccaccaaggagagttttggagtcagtgtaacgcgtccctttgtaatgagtgtttmgtgagtactcacatttgtgtatgctcattgtgctaacctgagtcccgtgggtctggggatttgagtatataaatgacatataacaaattcacaaaacaaactaagaattcacaactataggccagaagaattggtaactgatagtaaggttgtcacggttcaaattcataaactttcctgatgataatgccatttatcaacaagtactgaaaatttgcagaacctccctcctctgctaacacaaacagtgacttcattgaaagaaagataaagcaaactccttattgtagagtttttgtcatagac

SEQ ID NO: 540541 - DNA, 515 bp, Homo sapiens
agggtggaaatgtgggaatgcaggctggaagagtggagagtacaggaatgcaggarggaattcacgaatgcagcaggaacctgggaatgcgggaatgcagagagcgacgctgcgggaaatgcgggaggaccccaagccatccgctcacctgtgaagaagggcatgaaagtaaggctgcaggccaagaggagcctgcccgccaccgagggacgcgtggctgaggctgcggccggccccgtcgctccgtctggaagagaggagccagtgagctcagttccgcgaaagggacacgcccaggcggccgggcccgcgctcccgcgccacgcgaatggcctttccgctgctgggcgagcgcccctcacagcgcccccggatgctgggtgggccgcgctgtgagctcggcctctggaggcacctgggactcggaaacactgcctagcctagagacttgtaggcccgagagagcctctggcctgtccgctcctttccacagcgcgctgtgggcccgcgggagc

SEQ ID NO: 540542 - DNA, 583 bp, Homo sapiens
gttagtgggaacgtgtatcgggtcgtctcgcgctttgtggragttttgttgttttgctatgtgggactatattgcctttgtgagctatgacactccctgcgaaggtttgtagctttactttcgaagctaatataagctgttgagccttggtgggaggaaaaagctccaaacgcaccactttaagagctgtaatagttaccgcgaaggtccgtaacttcattgctgaggtatcaagaccactaaacccacctagaagaaaaactcggaacacacccaaacgtaataatgaaacaaaactccggatacgccacttttaagaactgttactaccgcgagggtctgaggcttcctttttgaagtcagactaagaacccaccaattccagacagttttatgtttaactcaatatggttgtttttttcgtgtttaactgtatacacaaatgttttaattgcatgatacgtgctctggtttcctttggtttacttccctgtgatctgtcacttaggtaattactaatttttcacagttgtgggcgacatgctgatttttgtgcaagggtgcgtgtgttctgtctgtacta

SEQ ID NO: 540543 - DNA, 583 bp, Homo sapiens
gttagtgggaacgtgtatcgggtcgtctcgcgctttgtgggagttttgttgttttgctatgtgggactatattgcctttgtgagctatgacactccctgcgaaggtttgtagctttactttcgaagctaatataagctgttgagccttggtgggaggaaaaagctccaaacgcaccactttaagagctgtaatagttaccgcgaaggtccgtaacttcattgctgaggtatcaagaccactaaacccacctagaagaaaaactcggaacacacccaaacgtaataatgaaacaaaactccsgatacgccacttttaagaactgttactaccgcgagggtctgaggcttcctttttgaagtcagactaagaacccaccaattccagacagttttatgtttaactcaatatggttgtttttttcgtgtttaactgtatacacaaatgttttaattgcatgatacgtgctctggtttcctttggtttacttccctgtgatctgtcacttaggtaattactaatttttcacagttgtgggcgacatgctgatttttgtgcaagggtgcgtgtgttctgtctgtacta

SEQ ID NO: 540544 - DNA, 583 bp, Homo sapiens
gttagtgggaacgtgtatcgggtcgtctcgcgctttgtgggagttttgttgttttgctatgtgggactatattgcctttgtgagctatgacactccctgcgaaggtttgtagctttactttcgaagctaatataagctgttgagccttggtgggaggaaaaagctccaaacgcaccactttaagagctgtaatagttaccgcgaaggtccgtaacttcattgctgaggtatcaagaccactaaacccacctagaagaaaaactcggaacacacccaaacgtaataatgaaacaaaactccggatacgccacttttaagaactgttactaccgcgagggtctgaggcttcctttttgaagtcagacyaagaacccaccaattccagacagttttatgtttaactcaatatggttgtttttttcgtgtttaactgtatacacaaatgttttaattgcatgatacgtgctctggtttcctttggtttacttccctgtgatctgtcacttaggtaattactaatttttcacagttgtgggcgacatgctgatttttgtgcaagggtgcgtgtgttctgtctgtacta

SEQ ID NO: 540545 - DNA, 651 bp, Homo sapiens
tctagagtgcaattagcgtttgaattagtgacatgaggataaacaggtgattatcccatctaatagctgttgaatggtgttagagatactrtcagaccgcttgagcttcaaacgtaggggtttattgacgattaagaaaggactatgggactattggtttaaataaatgaaaatagggtttccaaaatgaagttatttctaagtgctttaaaccaactgattccaacttctaaagttgcttaaaaggtgaagagcagaaatcacatttgtacttccttttgtctgaagcgctcacagtgttaagtatagacattcttacacactttcggttaggtgaagaacacataaaattcagtaactgcattttgcccacggggagaccaagtcagaactctctacagacttccacagaggtcacaatcagacactgaagagacaaaattagaactcagtgttctgggctttagaaggatcagcttctaaaaccaacactttttctctctgaaatctatattgagatttttagagttagcaacaggtgagaacatttttattgatgtttggcttcacagttttaattacctgttttggattagagcttgtgggagtctgcagtctgagttggtggggacctgatggaatatattacag

SEQ ID NO: 540546 - DNA, 651 bp, Homo sapiens
tctagagtgcaattagcgtttgaattagtgacatgaggataaacaggtgattatcccatctaatagctgttgaatggtgttagagatactatcagaccgcttgagcttcaaacgtaggggtttattgacgattaagaaaggactatgggactattggtttaaataaatgaaaatagggtttccaaaatgaagttatttctaagtgctttaaaccaactgattccaacttctaaagttgcttaaaaggtgaagagcagaaatcacatttgtacttccttttgtctgaagcgctcacagtgttaagtatagacattcttacacactttcggttaggtgaagaacacataaaattcagtaactgcattttgcccacggggagaccaagtcagaactctctacagacttccacrgaggtcacaatcagacactgaagagacaaaattagaactcagtgttctgggctttagaaggatcagcttctaaaaccaacactttttctctctgaaatctatattgagatttttagagttagcaacaggtgagaacatttttattgatgtttggcttcacagttttaattacctgttttggattagagcttgtgggagtctgcagtctgagttggtggggacctgatggaatatattacag

SEQ ID NO: 540547 - DNA, 517 bp, Homo sapiens
acccatatagaagggtgtgaaggttacataccaaaaccattaccattgtcacctcaggaggatggaattatagtgggggagcctggcctggtctcagcattgtgaggcaggtggcgcgcccaaggcaagaaatcaaatggaaactcggaccttgtctcccctgctttttactctagtcccttgtgcacctgaggagaccttgtgcacacaattgttggcaccccacgctgcttaccccagttcattcactccatacaaatgctccttgggtctaggggtgtgctcatcctgggccagtctgccattgggaggacaggcccaggaggaggcccactttggtcttggaagagggctggaggccaggcggacagggacttctagcatcctggtyacctggaatgtggtctagcaggagagtcactgactgcagatgggcatatcttcttggccctgaagactcctgttccataggtaaggcttggccttctaatgcagagggctcagggcaggggcccca

SEQ ID NO: 540548 - DNA, 504 bp, Homo sapiens
ctgttcctaagccaggggcgctccttgagttacaaaaccgagaggacatggaaattgaaataggagaagcagccagtgggggccaaagggcccctgggcagctatggaaagacaaccctgccagagtgagcacattatttatcrgctctcttggggagacatatatggttataaacagaacctcttcctatcacaagacatgcctgccagccttttcatggatcaccaaagcacccccgagcttcgcgcttagggtgattgccaggcatgggaaacacctaacagttgcatgtcagcaccgaaggaagtgggattcagacaaaaggtgttccatttcacagcagggaggagggaacgccttggaagaaaaaagtctttcttggggctacccagcaagcccagccagagcttctcagcaatcaggtgtgcatttctggagcccaaaccactcattctcaacccaggaacaggattaggggactagggatattttgagacccaaag

SEQ ID NO: 540549 - DNA, 504 bp, Homo sapiens
ctgttcctaagccaggggcgctccttgagttacaaaaccgagaggacatggaaattgaaataggagaagcagccagtgggggccaaagggcccctgggcagctatggaaagacaaccctgccagagtgagcacattatttatcggctctcttggggagacatatatggttataaacagaacctcttcctatcacaagacatgcctgccagccttttcatggatcaccaaagcacccccragcttcgcgcttagggtgattgccaggcatgggaaacacctaacagttgcatgtcagcaccgaaggaagtgggattcagacaaaaggtgttccatttcacagcagggaggagggaacgccttggaagaaaaaagtctttcttggggctacccagcaagcccagccagagcttctcagcaatcaggtgtgcatttctggagcccaaaccactcattctcaacccaggaacaggattaggggactagggatattttgagacccaaag

SEQ ID NO: 540550 - DNA, 504 bp, Homo sapiens
ctgttcctaagccaggggcgctccttgagttacaaaaccgagaggacatggaaattgaaataggagaagcagccagtgggggccaaagggcccctgggcagctatggaaagacaaccctgccagagtgagcacattatttatcggctctcttggggagacatatatggttataaacagaacctcttcctatcacaagacatgcctgccagccttttcatggatcaccaaagcacccccgagcttcgcgcttagggtgattgccaggcatgggaaacacctaacagttgcatgtcagcaccgaaggaagtgggattcagacaaaaggtgttccatttcacagcagggaggagggaacgccttggaagaaaaaagtctttcttggggctacccagcaagcccagccagagcttctcagcaatcaggtgtgcatttctggagcccaaaccactcattctcaacccaggaacrggattaggggactagggatattttgagacccaaag

SEQ ID NO: 540551 - DNA, 415 bp, Homo sapiens
ccagctggcatctcctagctgggaaaagcagctcctgaaacagcagcaggagcatctgcattgtgaacacaggacctggggccagtaagtgagcgggtgtgagkcagggggactctccacctgcccatctcagcccaacagaccttgtctggaaaggccgtgtgtctacctgaatgagtagatccccgggtttcttgctcttcacagtaacagggaagccctgaggcaggtggtgggaggcatgtgacgcgaggcatgaagcaatgtgctgttgggttgtgcctacaagcaacatgggaagtcaggaacatccaccaccatgggcccagcctggccaggcaggtgaaatgtcatggcacagtaatctctgccaccagatggcatgaaactcaatgaacctcatttaaaaaaataa

SEQ ID NO: 540552 - DNA, 613 bp, Homo sapiens
ctgccagggttgggagcgcctgagggggcactgcagagtgtgcccartgtgtgctcccatttcaaatgggcatgagcaggatgggagggggaggaaggagagtggagataagggaatggcggtgtggaagaggttcaggggaagacagagatgcaaaagaagaagggagagggaggagacaggcagtgagaaacgagggtgaggcagaaagagggacaagaggattgccccacctgcagatgggactcgttttgtttctgtggaaaccatggagtttttagtgggcaacagatgaggatgaggatgagggtgggttcttgccggcagcagcacctctgtccagccagggctgatgtcgtgctagccttggcctgtaccctaccctcctcctgccccttgccctaaaacccagccaggcagacactgcctcccccttttctacctcctgcctccttcccctcccatagtcttggagcaggaagtcagacatattccttctagggtcatgtggactagattcaccccatcagcttggcatcagcctcaggctcttctgtggccctcttgcacctgtactctgaaatggcctttcttgtttccaaaaagcttctgg

SEQ ID NO: 540553 - DNA, 613 bp, Homo sapiens
ctgccagggttgggagcgcctgagggggcactgcagagtgtgcccagtgtgtgctcccatttcaaatgggcatgagcaggatgggagggggaggaaggagagtggagataagggaatggcggtgtggaagaggttcaggggaagacagagakgcaaaagaagaagggagagggaggagacaggcagtgagaaacgagggtgaggcagaaagagggacaagaggattgccccacctgcagatgggactcgttttgtttctgtggaaaccatggagtttttagtgggcaacagatgaggatgaggatgagggtgggttcttgccggcagcagcacctctgtccagccagggctgatgtcgtgctagccttggcctgtaccctaccctcctcctgccccttgccctaaaacccagccaggcagacactgcctcccccttttctacctcctgcctccttcccctcccatagtcttggagcaggaagtcagacatattccttctagggtcatgtggactagattcaccccatcagcttggcatcagcctcaggctcttctgtggccctcttgcacctgtactctgaaatggcctttcttgtttccaaaaagcttctgg

SEQ ID NO: 540554 - DNA, 613 bp, Homo sapiens
ctgccagggttgggagcgcctgagggggcactgcagagtgtgcccagtgtgtgctcccatttcaaatgggcatgagcaggatgggagggggaggaaggagagtggagataagggaatggcggtgtggaagaggttcaggggaagacagagatgcaaaagaagaagggagagggagragacaggcagtgagaaacgagggtgaggcagaaagagggacaagaggattgccccacctgcagatgggactcgttttgtttctgtggaaaccatggagtttttagtgggcaacagatgaggatgaggatgagggtgggttcttgccggcagcagcacctctgtccagccagggctgatgtcgtgctagccttggcctgtaccctaccctcctcctgccccttgccctaaaacccagccaggcagacactgcctcccccttttctacctcctgcctccttcccctcccatagtcttggagcaggaagtcagacatattccttctagggtcatgtggactagattcaccccatcagcttggcatcagcctcaggctcttctgtggccctcttgcacctgtactctgaaatggcctttcttgtttccaaaaagcttctgg

SEQ ID NO: 540555 - DNA, 426 bp, Homo sapiens
tcagaaactgcccttatgcccgacaataatcctacattaaatcaccccagcaaaccaaacccttatctaggctggaccaccccaracttaccctgtgtgttaaactttggaaagcttttggtttcactgatttcaagaatgaatccataaacccttggggtgagtgttacagttcttaaagacaatgtgtccaaacttcgttctttctgacgttcagacgtattcagagtttttcttctaatagtaggttcacgctctcactgactcaatagccaagccgcagaccttcatggtgtgcattacagctcataaagggaacatagacctaaacagcaaacaacaacaagatttaccgcagaacaaaagaacagaactcacacaatataaacacacaccacaaaagaaaaccgaccaggttataattgc

SEQ ID NO: 540556 - DNA, 426 bp, Homo sapiens
tcagaaactgcccttatgcccgacaataatcctacattaaatcaccccagcaaaccaaacccttatctaggctggaccaccccaaacttaccctgtgtgttaaactttggaaagcttttggtttcactgatttcaagaatgaatccataaacccttggggtgagtgttacagttcttaaagacaatgtgtccaaacttcgttctttctgacgttcagacgtattcagagtttttcttctaatagtaggttcacgctctcactgactcaatagccaagccgcagaccttcatggtgtgcrttacagctcataaagggaacatagacctaaacagcaaacaacaacaagatttaccgcagaacaaaagaacagaactcacacaatataaacacacaccacaaaagaaaaccgaccaggttataattgc

SEQ ID NO: 540557 - DNA, 426 bp, Homo sapiens
tcagaaactgcccttatgcccgacaataatcctacattaaatcaccccagcaaaccaaacccttatctaggctggaccaccccaaacttaccctgtgtgttaaactttggaaagcttttggtttcactgatttcaagaatgaatccataaacccttggggtgagtgttacagttcttaaagacaatgtgtccaaacttcgttctttctgacgttcagacgtattcagagtttttcttctaatagtaggttcacgctctcactgactcaatagccaagccgcagaccttcatggtgtgcattacagctcataaagggaacatagacctaaacagcaaacaacaacaagatttaccgcagaacaaaagaacagaactcrcacaatataaacacacaccacaaaagaaaaccgaccaggttataattgc

SEQ ID NO: 540558 - DNA, 463 bp, Homo sapiens
gtttctaagggctgcagcagccatacccaaagaaaacattttatatatgatgatgtagtaactatacttcaagtcttgacttaaaaatgtataattcaacaacaaaattacaatttctctgtaaaaggagcactttttaaaaatccaagccacttacactggtttgaaaatatttggggggtcttaactgcttctgaggctatagcaagtggtttctcataaaatcagacccaagggaactctctgagaggaccctaggcacttagattttattcygggtataatttattccaaacagtttagcaaaatgatggtcacattataagagcatactctggatgcaaaatgtccaggaaagacagaagtagaggtggggtccaagaaacaattccagtctcctagaaaccatgccttctgctcaagccaagtgcttctcctgatcacgtcctcctggtaactccta

SEQ ID NO: 540559 - DNA, 478 bp, Homo sapiens
tattaatgagtaaagaattcaaaggacttcatttcctcccaccagagcattgcacccagtggagaagcatgtgtggccagggagctgcatgaaggtgaaatcagaacctgtccttggagcactcctggaagtatgagcaggggtgcagtcaggacggcctgactctctgaccctgtgactgagccacaggggtctcttctatgcttcactgtgcttcttcaatcttgccatcactgtgttgaaaaagcatccctgggcatttgtggtgaagccattggcagagcatcaacagtctttccaatgtaccagtcccacagggaccagccccggctcctttacttggttcatcatcccacaaaaaaggctccagagtgatgagtggagggaatgtgtatacaagctgggagaygcttcagggatggggcatgactctgagaagctccacatgcaaaacagggttatgatggtctaggagcca

SEQ ID NO: 540560 - DNA, 516 bp, Homo sapiens
tgaactctatgcttacaacttttcaaaattcacatattgagtacagggttcaagtgtttggttgcttcgaatattgtaattgtttccatcagttgtgaaacccacaaaaaggagggtcacaccaatatccttagaattgaggtcattgaaatccatgtaggcatttgggtcttccccacattaaagcaccaactgttaggcaaaaagccaatgtcaaaagagcaggctggcatgtggacctcttgctttatctatcttccctctaattagctttccttttagcctacagtccttctctccactccttcaagtgcaaattcagctacctcttctttgagccactctctcagtttaagccctaaaatgcttctgtttacttcttcagacctatactgcagtgggatttatgctctctgaagttacagtggaatggagatygggtgtggcttaagcacaggtagttcacatttgagagccagccttcctctctttgaacagggtcctgctcctcaccag

SEQ ID NO: 540561 - DNA, 599 bp, Homo sapiens
ttttctctctctaaaacctcagcttcttgctttattaaaatgaaggtgttgatgtaaaagattatcccaaggctttgatttcattattccatgaaattataaagaggcaggcctgctttggacaaagctgtcagttggacatgtttcccggtggtcaacaggacacagttgggagtcttatgggtacctgctgccttgcttccccatgcttggagcaayttctgaccagtactcaatccaaatctatcccttgcttggatagttcctaatgcctcaatagcccacagctttaaatatacacacatttaatatatgtgaataacaagttctatctgcttctaaagaatattacgaagtaaaccatgttaacaggaaattgactaagaaagacaagcccacaaattccatgctagccctgcgttcttcccaccttcttatacaaccctcttaggtaacacacatgaatgtaagcgaccttctctacaccagtcacctgacttgtattgttcctcaagggtgaggaagtgtctagacgaaagggaggggagacccagtggtaggtggaactttgtgctccacctttcacataacaggttgcc

SEQ ID NO: 540562 - DNA, 506 bp, Homo sapiens
ttaaatcttttgaaatatatcaatgttgatttttctagactttgtttttttctggctaatctctgtttcttctgtcttagctttaagttttctcaggatatcatgatgccttgcagtatttctctttagctcttatgcataaggtgatagcattttaagatctcttgggtgaagattaggcctgcaaatatgagttctttttaaggacattctcttttgtttaattatttcacatagattcagtgattcaagaatgcatttgtgaatatggctgtttatcctcctcccccacctgtttgagcctgggtttgaccctcaaaaccaaggcagtggttggtgagctgaggccacccacagckgaatctcatctacagccacagccaatatggggtgaggatagaggggtgtgactggcaatcaaagcctgtctcccccatcaccatcaggatgcagtgggcggccaaagtggctatacataactcagcagagaggtggcgccatgttcc

SEQ ID NO: 540563 - DNA, 533 bp, Homo sapiens
aatatgcttaagtacaaagttttgactttccagaggaaaacttctatttcttaccttctgcatctgcagatcagatttggccatttccgcaaaataatcagtgggtcgcttsgtagggactttgagctgatggaggcggggtaagactgcaagcactgcggcctggtcttggcgatagctgagaatcgtaggacaaaatgtgtgaatgaggtgaaggaggaggccttacgttcctttggcaccgccaatgcatgagttatgccaagctgctagaaggactgctgcatatatgctgacctccattgagcaagaacaaacatacaaaaactgcctcactgatttagtatctaaaagaaatgtagccgtatactagtttttataaaggggagggttgttgctatatatagtttaagagaatgactactctaaaggtacccattaacacaaacgaatgtcgattatggattcttatgtaattactaaagcaattccacacaagaacatcccataagcaatgtttgtttgtttgtttt

SEQ ID NO: 540564 - DNA, 596 bp, Homo sapiens
taagcctcagtccctgtaaagatttgctgtctacaatgggagaatagagttaagtctcagttattgtgagtggattaacaacttgatgactatccaggtaatgaataattatagattcaaaggaaggtacaaaaagtagtttagagggggactgtgtactcttcacccaattttccccaatatcacagccagacagttgacagtagtataatacacacaccttatttaaagttygctagttttgcatctgattttatacattcttagcacacgtaaattcatgtaacaaccaccataatcaagacacagaactgttctagcactacagagatatctctcatgctatgcctttgtagtcacatccccaattccctactccctagcccctggtactgttgagtgttgagagttcatgtattttagatatgagtcctttgtcatatgtgtgttttgcaaatattttctagtagtctatagcatgtcttttcatctcttttatagtctttcacagagcaaaattttaaaatttaaatgaagtacaacttaatggatttcttcttttgttgattgtgcttttagtgtcatgtctaagaact

SEQ ID NO: 540565 - DNA, 596 bp, Homo sapiens
taagcctcagtccctgtaaagatttgctgtctacaatgggagaatagagttaagtctcagttattgtgagtggattaacaacttgatgactatccaggtaatgaataattatagattcaaaggaaggtacaaaaagtagtttagagggggactgtgtactcttcacccaattttccccaatatcacagccagacagttgacagtagtataatacacacaccttatttaaagttcgctagttttgcatctgattttatacattcttagcacaygtaaattcatgtaacaaccaccataatcaagacacagaactgttctagcactacagagatatctctcatgctatgcctttgtagtcacatccccaattccctactccctagcccctggtactgttgagtgttgagagttcatgtattttagatatgagtcctttgtcatatgtgtgttttgcaaatattttctagtagtctatagcatgtcttttcatctcttttatagtctttcacagagcaaaattttaaaatttaaatgaagtacaacttaatggatttcttcttttgttgattgtgcttttagtgtcatgtctaagaact

SEQ ID NO: 540566 - DNA, 596 bp, Homo sapiens
taagcctcagtccctgtaaagatttgctgtctacaatgggagaatagagttaagtctcagttattgtgagtggattaacaacttgatgactatccaggtaatgaataattatagattcaaaggaaggtacaaaaagtagtttagagggggactgtgtactcttcacccaattttccccaatatcacagccagacagttgacagtagtataatacacacaccttatttaaagttcgctagttttgcatctgattttatacattcttagcacacgtaaattcatgtaacaaccaccataatcaagacacagaactgttctagcactrcagagatatctctcatgctatgcctttgtagtcacatccccaattccctactccctagcccctggtactgttgagtgttgagagttcatgtattttagatatgagtcctttgtcatatgtgtgttttgcaaatattttctagtagtctatagcatgtcttttcatctcttttatagtctttcacagagcaaaattttaaaatttaaatgaagtacaacttaatggatttcttcttttgttgattgtgcttttagtgtcatgtctaagaact

SEQ ID NO: 540567 - DNA, 596 bp, Homo sapiens
taagcctcagtccctgtaaagatttgctgtctacaatgggagaatagagttaagtctcagttattgtgagtggattaacaacttgatgactatccaggtaatgaataattatagattcaaaggaaggtacaaaaagtagtttagagggggactgtgtactcttcacccaattttccccaatatcacagccagacagttgacagtagtataatacacacaccttatttaaagttcgctagttttgcatctgattttatacattcttagcacacgtaaattcatgtaacaaccaccataatcaagacacagaactgttctagcactacagagatatctctcatgctatgcctttgtagtcacatccccaattccctactccctagcmcctggtactgttgagtgttgagagttcatgtattttagatatgagtcctttgtcatatgtgtgttttgcaaatattttctagtagtctatagcatgtcttttcatctcttttatagtctttcacagagcaaaattttaaaatttaaatgaagtacaacttaatggatttcttcttttgttgattgtgcttttagtgtcatgtctaagaact

SEQ ID NO: 540568 - DNA, 515 bp, Homo sapiens
gaggggcaaggtcgtcctggttccagaatctcccaatctgcgggtctccaatgagaccaacacgattcaccgctctcatcgctccagttttccaaggcstttcacagttgtactgccgggtgggctctgaggatgggaggttggggagtgtttggtgagtgcacccttcctatagcgcccagaagaaggtacactacgtgtctctgtggcacaatcggttagcgcgtttggctgttaatctaaagtttggtggttagagcccactgagggacgcctgctccaggtgttttgttttgttttgttttgtttcgttttgttttgtttttcttcttccctgagacacagtcttgctctttcgccaggctggagtgcagtggagcgatcttggctcactgcaacctcggcctcccgggttcaagcgattcccctgcctcagcctctggagtagctgggaatacaggcgcgcgccaccccgcccagctaatgttttgtgttttagtagaaacagaggtttc

SEQ ID NO: 540569 - DNA, 479 bp, Homo sapiens
agggaaactcccattttaaaaatgatcagatctcatgagacttactcactaacacaagaacagcacaggaaagacccatcctcatgattcagttatctcccactgggcccctcccacaacatgtgggaattatgggagctacaagatgagattgggtgtggacacagccaaaccatatcaattgtcatcactcaaggcagatgagtatatagaaagctatcagttgtaaggaattggactaagtttaagagaataataattaagatagaacaaatgtttggtcctgcttaagggctaggatagatgrggcacaatagaatcatgtggggagctgtaaaaatgcccaggccctactctgtgtcaattaaatcagaatccagaatctctgcttgagtgtgtctagagtattggtcaaaggaaacagtgattttgatgtgcagccagttaagagctgatatcctcaaggatcatgatgtgac

SEQ ID NO: 540570 - DNA, 188 bp, Homo sapiens
tggttttatgaataaatatagatattatattacaaaattagatttatatcgttgagcttgatactagacagtaaatattatttcttaggaaaaggttaatacmtcattaaattttaaaagttgaacacaaaatctctaacaaattaaatttaaatatttccatttcaatatcattgcagacagttcat

SEQ ID NO: 540571 - DNA, 496 bp, Homo sapiens
ctctatgtggtccacgcatagtttgcctgagcaagggacagaaggtctatcctcttcctcccaatgagctgatcctatttctcctaacaactggtatggggctgccccctggaggtttaagaaagcctgttcccttcaaggcaggctagagggtctaactagaggcatttcagatgttgaaactggcagacatcatctgaccacctaatccaacctttcagaaatgaggatatccaagttcaaacatagggaatcaacatgcgcagatgcaatacttttcaaagagcccaccgagcaatgtgatcaccaggaaactaacttactgcagctttttaaaactagggaaagtggccttacattacctacttaagatccagattgttcagggagtacgtttcttgatagcatttgttgaacatctactrtagataagaccatgacctccaaatgtgtatatatgctatgcctagaaaagccattatgtttggatatcagt

SEQ ID NO: 540572 - DNA, 584 bp, Homo sapiens
ttttaaaaataactaaaagagtggaattgaactattcctaacacaaagaaataaatgcttgtgatgatggatacaccaattaccttgctttgatcattatacattatatgcctatatgaaaacattacatatactccataaatatatacagttattatgtatcaataataatttttaaaatataaattttaaaaatgagctaaaaattctgatatttagggtgttctggcaaagacattattttgactgcctatttcatgatttggagaaaaacatacctagtaagttatctctctaccaaattttttctctgcagaaattgggaaataattaagaaacttatggagttctcatttactaagggtcctactgtttcatttccagctgccaccttgactctctctgtagagacttaaaatcagtgaygtgctattaaactttttcttcctgtgtcataattttgctgaggcctggctgcttggtttttataaataatttttaaattttatttttaattgacaagtaataattgtatatatttaaggagtatgatgtgatgttttgatatgagtatttaacaacta

SEQ ID NO: 540573 - DNA, 584 bp, Homo sapiens
ttttaaaaataactaaaagagtggaattgaactattcctaacacaaagaaataaatgcttgtgatgatggatacaccaattaccttgctttgatcattatacattatatgcctatatgaaaacattacatatactccataaatatatacagttattatgtatcaataataatttttaaaatataaattttaaaaatgagctaaaaattctgatatttagggtgttctggcaaagacattattttgactgcctatttcatgatttggagaaaaacatacctagtaagttatctctctaccaaattttttctctgcagaaattgggaaataattaagaaacttatggagttctcatttactaagggtcctactgtttcatttccagctgccaccttgactctctctgtagagacttaaaatcagtgacgtgctattaaactttttcttcctgtgtcataattttgctgaggcctggctgcttggtttttataaataatttttwaattttatttttaattgacaagtaataattgtatatatttaaggagtatgatgtgatgttttgatatgagtatttaacaacta

SEQ ID NO: 540574 - DNA, 573 bp, Homo sapiens
cccaagttgacccctgggcactgtggaatgattcccagcccttatggcatgcaacccatttaaatatttgaaatatttctgtggcctctcttctctgaatcttcaactacaatctacaatcattcctcaaatgacaaagtctgaaattcttctaccttcttgatgattggcctctgacacatagaatagattctatgtcctcagtaattttaggtctcagaagtaatccagccagcctgatgtggtttaactaacactaagaacagtaaataattgcytctctctagaaacacattaggtttggggagtcttatttgtatgtttgtctgtttggggtatccaaattataatactggctcatgtttagctaaatagtaactaaaaccccaggtcagcaaagcatgcatttgaaaatatttcacaaaaattttcacttttgtaaatgacaaaaacaattaatgagcaaagactgcccccagctaaatgtccccacttaggcaaatctgcaagtatcacataggcctcacttgggacaattcctgtctcccatttgcacaattatgaccgtcagta

SEQ ID NO: 540575 - DNA, 663 bp, Homo sapiens
ttaattaacagtaagatacttatcttggggggaaaaaagacccacctaccctttcaaaactcttttgttataactcaattattgagggagtttactctttgaatttcatcagcagtttttgctctatgctgcattacagaatgaaatactggagtttctcattatgaatgaagatgactttttgtcaaataagacataaaatggtcacttttcttatttatttatttttgctttctctctgaagaaaaaattatgtaaagaacagagaaaaaagtaagaatrcaataacattgggaattatatgaagcttgattcatcttacattcaaaatgctagaattaaatttttaattaaattattttttcttgagaaaccacacaagaaagaaaacatttgtatgttatctggaaaaatttagacatagtaatattagttccaaaaaaaatattgttttgcaaacttaaaaataaattttatcttcacaatatatggtgaattctactccctatttttaacatttggtttcaaatcatcaagttttatatcaggagtcaaactgtttaattggcataaaagctcaaattgttcaacttggcatagctactatttcattttagaaactgccacgtaaatagcctttccttctccaagattaccaatatt

SEQ ID NO: 540576 - DNA, 409 bp, Homo sapiens
agctgaaacaaattcctcactggacaatgacatgaggtcatttaagaaaggcaagcaggccaggtgcagtggctcatgcctataattccagtgctttgggcggcctaggtgggaggactgctttaggcagtctgagaccagcctgggcaacatagcaagacccctatctctacaaaaaaaaagaaacmaatgtagctgggcatggtggtgcgtgcttgtagtcctagctacttgggaggctgaggtgggaggatcacttgaacccaggagtacaaggctgcaatgagctataattgcaccactgtactccagcctgggcatcagggtaagagtaagaccatgtcactattttttttttaaaaggaaattaaaaaaaaaaaaaaaaaaaaggaaaggcagggggcagggg

SEQ ID NO: 540577 - DNA, 599 bp, Homo sapiens
gacaaaggcttccagcacggccatgacactgtccttgtgctctcgcagcacctccatcactgtgtggcatgtgattctgtagttgccatccaggcctgtaacctagaaatgggacagagccactcaccacaggagttactaactctccacccaaagcaagccgagggggtctgttaccctcacttaggaagcagacacaggccatgttgacgtatcagggtgagaatgtcttaggagaaggaatcagggcaggactgtgatccacaggaaaccaggtcagaagtgaagtggtaagcctttcatagataggtcatttctaacacaataggaaataacagaaaactgctacaaaaatcacaaaggcactttggagaactgatgggctctaacaagcgtgttctcagaaggctgtaactgtcctgatcccatttggaagcagctygttcccgatatccactcacctccatagcattggtcaacattcttgttagtctaaatggaatcttctctggaaacttctctcgggtcatagcaacctacagaataataaatgggaaaagccaaatcaatgtttattttctttacctggagccaggtgg

SEQ ID NO: 540578 - DNA, 301 bp, Homo sapiens
aacttctctcgggtcatagcaacctacagaataataaatgggaaaagccaaatcaatgtttattttctttacctggagccaggtggagcaggtggctttcctctgcatcacctgcactgattttaattatagcagggaaaggaagcagcttgggtttagtgagaggacttgtcacagggatttgaaagacaacttaaaaaaaaaaagaaacgaacaacagaaaagaagagaaaacaaaaaggaaaaaagacaaaygtgcatcgtgtccaggctcttgggcaacaggtggtatggagggtag

SEQ ID NO: 540579 - DNA, 555 bp, Homo sapiens
tgaactgtacctaaaagaaggtgtaaaaaaaaaaaggtggctatagggcttcaagtttgaaataatgtctattgcctctgatacatcctcacccaactgccactgtaatgtaatgtctagaaaacactgagaaaagatgaacaaaataaacactgaaaagtagggctggacttcagtctgttgtcagaatcaatgagaaatttctcttactttggcacagaaagctcacttgtctgaaaatgctgtcagtggcttgtgcatgctgtgctacgaagtccctcayccttcttctgctgtctgcccgtcccaccagttcagaaacatagtctgttgcaagcagaaaggtgggctgcccttccttgtacaaatacagtgtcattgttgcattccgtcccagtgcaattattgtatccctcttctcacttcatagacacccccctttccacaccaatgtggagactccaataataataaaatgagtagacaggaagtggggaacaccggattgggccattggggttcatttctgtgttccgtcttccgtcttctgcaggt

SEQ ID NO: 540580 - DNA, 555 bp, Homo sapiens
tgaactgtacctaaaagaaggtgtaaaaaaaaaaaggtggctatagggcttcaagtttgaaataatgtctattgcctctgatacatcctcacccaactgccactgtaatgtaatgtctagaaaacactgagaaaagatgaacaaaataaacactgaaaagtagggctggacttcagtctgttgtcagaatcaatgagaaatttctcttactttggcacagaaagctcacttgtctgaaaatgctgtcagtggcttgtgcatgctgtgctacgaagtccctcacccttctkctgctgtctgcccgtcccaccagttcagaaacatagtctgttgcaagcagaaaggtgggctgcccttccttgtacaaatacagtgtcattgttgcattccgtcccagtgcaattattgtatccctcttctcacttcatagacacccccctttccacaccaatgtggagactccaataataataaaatgagtagacaggaagtggggaacaccggattgggccattggggttcatttctgtgttccgtcttccgtcttctgcaggt

SEQ ID NO: 540581 - DNA, 555 bp, Homo sapiens
tgaactgtacctaaaagaaggtgtaaaaaaaaaaaggtggctatagggcttcaagtttgaaataatgtctattgcctctgatacatcctcacccaactgccactgtaatgtaatgtctagaaaacactgagaaaagatgaacaaaataaacactgaaaagtagggctggacttcagtctgttgtcagaatcaatgagaaatttctcttactttggcacagaaagctcacttgtctgaaaatgctgtcagtggcttgtgcatgctgtgctacgaagtccctcacccttcttctgctgtctgccygtcccaccagttcagaaacatagtctgttgcaagcagaaaggtgggctgcccttccttgtacaaatacagtgtcattgttgcattccgtcccagtgcaattattgtatccctcttctcacttcatagacacccccctttccacaccaatgtggagactccaataataataaaatgagtagacaggaagtggggaacaccggattgggccattggggttcatttctgtgttccgtcttccgtcttctgcaggt

SEQ ID NO: 540582 - DNA, 553 bp, Homo sapiens
tgaactgtacctaaaagaaggtgtaaaaaaaaaaaggtggctatagggcttcaagtttgaaataatgtctattgcctctgatacatcctcacccaactgccactgtaatgtaatgtctagaaaacactgagaaaagatgaacaaaataaacactgaaaagtagggctggacttcagtctgttgtcagaatcaatgagaaatttctcttactttggcacagaaagctcacttgtctgaaaatgctgtcagtggcttgtgcatgctgtgctacgaagtccctcacccttcttctgctgtctgcccgtcccaccagttcagaaacatagtctgttgcaagcagaaaggtgggctgcccttccttgtacaaatacagtgtcattgttgcattccgtcccagygcaattattgtatccctcttctcacttcatagacacccccctttccacaccaatgtggagactccaataataataaaatgagtagacaggaagtggggaacaccggattgggccattggggttcatttctgtgttccgtcttccgtcttctgcag

SEQ ID NO: 540583 - DNA, 656 bp, Homo sapiens
aaagttgtgtgagtccctgaagaatctacctggaaaattccattgccccgaggagctttctcaaaatgtattcctgccacctgcttccctgcgtataatcctcgctctccacaagtctgtttatccatagacacaaaatgttagagctgtcaccaggaatacaaatggggagaaagccaccctcaagccaatcaataatgctggagacgaagcaactgcagcactctgcgggtcatagattatgaagcacaaagaaaggaaactcaactcctagcattgtattrtagctgatggtcagtaaggaaagctcatgttccaatctgattctattttagccacttggcagaaaatcatcactgaggcacaaatgagatggccttgaaggtgaataaaaatcttgggttcactttccaagacttcaacatcacagaacttttcaggagctctgcctctctgcaaggcttgcacgtctatttacaaaggcaaaagcttctgtaaagtacctgggttaccaaagcaggctgggagctgataatccaattagttttcccttcaataaatcgttcattaatgttgctaagaaatttacagcttaaaatggttttatgactagagattaaaaaagaaccgttccaataaatttcatataactgaga

SEQ ID NO: 540584 - DNA, 651 bp, Homo sapiens
tgtatctacagcaacttacagactacacaggtcaaggattgaacccaaccaagggggcccaaagccctccaagcactgcttggaaatgaggggcaactgatcctaagagatcacagttcttttcaagcaagcctccacttaaaagccctcactctacactagccccctcaagggtccctgagctatatgctgtgtgctgtttgccataacatttgactaaggtccatatgacagacatgatgatccacaaaggtaccagcatgaacctggaagtacaggaccaactcaccatgccaagagccccagatatcttcaggaattgtcagtgctagttttgataaggctatgggcccatagaagatatattacaactaataataaatcaactactagtgtttcttaactttatgtaagctaaaatttgcttcygtgcatgctcaatgtgattctgagataaaatgtctgtactttggaaatcaccctgtcatgaatgaaacaaatgattatgacctaaatgtttgggtgtcagggaatatgactacataaccagttaagcttaaattaaactctcatttaagtgactatttaagcttgttagcctctcctttaagtgacacttgaagagaaaaacacaaaaactcatttcaggca

SEQ ID NO: 540585 - DNA, 652 bp, Homo sapiens
aatgattatgacctaaatgtttgggtgtcagggaatatgactacataaccagttaagcttaaattaractctcatttaagtgactatttaagcttgttagcctctcctttaagtgacacttgaagagaaaaacacaaaaactcatttcaggcaaactgatatttactatgtccttaaaaaagaaagaataacagtcttgtcatgtaagaaagaaaaactatttcagtcttctatcttttattaaaatcaagtttatttatgtacctgtacaaatttcttaaatggagcaatctaaaacctaagagattaaagttggagtttggaggaatacacaataaaaatgtagtttttcaaattaatgtacacatagctgatgctgaataaacagattaaaaaaaaaaagaatacaaaaatatttctgaataaacctgtaacgactccacagtgcttgaatacaaccaaagctgtttttccagaaaatcaaaagaagtattatcatcatccttgtgataccagcttcaatttaagggcaagccattgaaatttttctttttaatcttccttcatttatatggaaatgagatgtttcctaaaacatatctgtacccagtacctacgtcaacaccagagctcaaagcacacaaattcctcc

SEQ ID NO: 540586 - DNA, 536 bp, Homo sapiens
ctgccaggttagaatgagctgaaagctttacactgccctgtctttccctgatttcagtaggatgtcagtgagatcaaaaaacattctcatgtctcctcccaccaaaggaggtctggagggcttttgtagtagcaatggcaggaagggrgctagtaagcatgaagaactgcagggccagccaatgaaacagcaaggagtaaccatggtttcattttaccttaaaacttcaaccacaagatgccccaattgttgtatagcaatgcaggataacatgaagacaaaggtcaaaacctaagcaagacaagatacataggggaggcgagggacgaccaggggaccacagactggatggacaccttccttctctcaatgcttcccatgcactgagaaactcacatttctgcatatccacaagtgtattttctctttattgcttaacaatttacaattttcacaggttagagaatcataaattattacaatatcaaggttatcctaaagtgtgattcttaacatattggtttaaaatgtctttc

SEQ ID NO: 540587 - DNA, 508 bp, Homo sapiens
aatggtgaagaagtctgccaggttagaatgagctgaaagctttacactgccctgtctttccctgatttcagtaggatgtcagtgagatcaaaaaacattctcatgtctcctcccaccaaaggaggtctggagggcttttgtagtagcaatggcaggaagggagctagtaagcatgaagaactgcagggccagccaatgaaacagcaaggagtaaccatggtttyattttaccttaaaacttcaaccacaagatgccccaattgttgtatagcaatgcaggataacatgaagacaaaggtcaaaacctaagcaagacaagatacataggggaggcgagggacgaccaggggaccacagactggatggacaccttccttctctcaatgcttcccatgcactgagaaactcacatttctgcatatccacaagtgtattttctctttattgcttaacaatttacaattttcacaggttagagaatcataaattattacaatatcaaggttat

SEQ ID NO: 540588 - DNA, 655 bp, Homo sapiens
tgcaagaggtagtgtatctgaggcacctattaaaatataaagctctgtattgttgatgttattgtcttgtctaaggtcttatgtagcttgtttgctgcagaactaccaattacaacagccattcattatcatgttgcaaaataaaacagttcaaaaatataaattagcactttttcagcttttttacgtagtaaaatatttttaaaaatattttgttcttttcagttcacttcactaagaatatatctgcactgctaatttggttctgcgttcttcagttattataatattgcctttaaccaatatatttgctgtttattaccaattgaagttgatattttatcttccyttttggacaagttaactttttgagagacgagtacaactattaatatttgctcagcaaatacggtcaaaacaaagtatagggaagccgccaaccagaatcatgtttgtttagtttcgcaaccgtgagtcacattttggttctaacactaaatggattatctttcctttttttttgaacattacatctgagttcacacctctgagcattcttacaatattattagattttcctctgcattttggacggtgaatttgagaagattttagaaaaaaatttgggactgaaaaattcatataatgaacttat

SEQ ID NO: 540589 - DNA, 586 bp, Homo sapiens
tacgttcattagcgttagcagctcctgggctaaatgcattgttgcaagttgtctctgctgctttacgacatttttgaacttgaataggaaaattgctcaaatttgctttttgtctaacatcatttccatagtctaaaataaacataaaataaacagcaagtaatgtcatcagcaaaataaataaataaataaataaagcgagagtgtccattaaaataatgtataacataaccacatttatttgagagtgtatcscaatatcaaaaggcaaattccaacaatgcaaaaactgctgttccttttgcgtcattagtataactaatgatggatataatgaccggactatgtgtctcctcattttgtggagttggtgagaaattcacttatataaagtttaaccgaatctttttaggtagaaacatagagttgttttattgttgtatggaagtttgaatgtgtgtaaatgggtgcatatggaagccaaagggatgaattgtgccatttattaatttattgcttctcagatccaaatgtacccttctttgccatgctatttaatattggagatggaccctgtaaacaggtt

SEQ ID NO: 540590 - DNA, 599 bp, Homo sapiens
ctgccttctgtgatggaataccttaaatatcaataaagttatttttctccacatgaaattttattataattttattcattctaactcacatatgccacagttttttcaatgtagatatcttttgttcccccaaacaatatagattaaaacaaattacatataaaaatcaacaaactgtaatacttgttactgataaatttcataaaagttatactacagaaaaatttcacagacctgtttattgatgatatacaagtgtacacaattttaaacttactacttgatgtttaagttatagataacttcctgaaatgggccactttttatatttccattattgactttgtaattgtacctcttccacataaggtaatacttagcattctggttctagtcttgaagacttcaagaacaaatcatgtacttattaaaaaatgtgtagactaaaactatggggttttgttgaagtcacctgtcaaaatctacttaaaatttctggataaatacgtacataactaagatgtaccaggcgcagaaggcccctgcatgcctttagccaatttttaaaactaaayatccaagtaaatataacatttctg

SEQ ID NO: 540591 - DNA, 265 bp, Homo sapiens
tttttaatgccaagtatccttggtggccagtgcctagtgaaagtgtagaaactacagagagcaggattcaartgctccctgagggcatggcttgtagctttcccttcattcatggaatcaagcctggagagccagtctcttgtttgagctcattggtactgctcgccagagagggacagaagagataagaggatctgaagaatataaaatggaagatacgtggatggtgataaaatttaagggatttagtgatttgggggattca

SEQ ID NO: 540592 - DNA, 551 bp, Homo sapiens
gggatgacataacgaatgtgagaattcctggccccagtttgggtacactcagtaaatgtcctctgaattccaacctgaggacctactgtgcacagggaactgtggtgagtgttgtgtagatgtcagaacttgtcattttgtgtccgctctccagcctcacattagatgtgaagtccaggtaggcagggtctgccttgagccctgccgcccccctagtgcccagcacagtgcccagtgcactgtgagtggtcaggaagatgaaggagctggactttgggtgagggaatcaggcacatgctgctgtgcccrcgagctagtgcagatccaccgggtgccaggctgtgttccaagcacttgcaagtgtgatcacattcctccctcactgcagccacaggagggaggttccaccagtctccctgcttcagatgagaaaactgaggctgagaggtgaagccacaagaatcctaagtgccagagccaggattcaggcccagggagtctggccctggagccctcactcctaaccactatgctgtatttggcagacggca

SEQ ID NO: 540593 - DNA, 693 bp, Homo sapiens
ctgcccccctccctctggggggaccctgtctcagctctgcaacaacttggggatcaactgcctctaattatggataaggtgatagtcagccccaagagaggagatgggcacaggacagcgagaagcacaggcttgatgtcagcctgggttccaaacccagctcgatggcttccacgggtgtgacccacagcaaggcaccatgcccttctgacccttggtttccacatttgtaaggatggaataataacatctgactcaggtgtggtggggatcacakgagatgctgcataaaaggtgttgtatactttgggaggccgaggcgggtggatcatgaggtgaagggatcaagaccatcctggccaacatggtgaaaccccgtctctactaaaattacaaaaactagccgggcgtggtggcacatgcctgtaatcccagctactctcgaggctgaggcaggagaatcgctagaacccgggaggcggaggttgcagtgagccaagatcgcgccactgcactccagcctggtgatacagcaagactccgtctccaaaaaaaaataaaaataaaaaaaataaaaaggcgttgtataaactgtaaagtgctctactgcattgtgctgtcctatggccaagaatatgggctggagccagatagaatgggggtgaatcctgcccctgcccctgactagctggg

SEQ ID NO: 540594 - DNA, 516 bp, Homo sapiens
ggtgctacgaaactaagaagtaagctaggcacagcaatgcttgcttctaaatcattcctgcaagacagaaatactaactgaacatccagttgcattacaaactttctggacagcatcctctacttcatctctcaggtcgtcttcagagtccattccctttgtcttgatcttttctcttttatttgattcatcttgatgaagcatctgaaactaaaggaaacaagtaataatcagggaactatgttgagaatcaaactatgttcagaatctttaacacaagacactctaaatctggaaaaattcatatatataggggaaaaccttctagaaacaaccttaagagaacagcaatgactaggctccattttatccactcattgtactttgagtcacaacagaggaattgaaaagaaaggcccaaaagacrgaataactgctcagtaagaaaggcattcgcactcccatgtctaaatgccaacactggcaaatgactgctgcctctgacagcacacagtc

SEQ ID NO: 540595 - DNA, 612 bp, Homo sapiens
tggcgccagaccactagaatctgagggctgagatgtcacttctgagccctctcccttctactctctgtacctggtctgcagcagttctgcagcatgaagaatggtaccgggggcagcccctcacccctcctctctctgctytccttgctgaagccggccatctgcatacctgcccaggtgaaatccatcccactctccctcctcaggcttccaactggcccaaagcccgcccactgcactgctgccctgctgaccttcccctgcggctccttcccactatgaaattctgctcttcctcctcctccttccactaggagggttccagtggggagccaggcaaaagtttccctattacagggtttggaggatgctggcaatttcttctatgttgtgtttcctccctgcttgccatcagaataaacatcagaggtcactgcataaaagcgtctccccagtttagagaacagaagaagccacttatgcaataatagggaagccctggcagagaggagctggtgggaagaagttggactggagctgtgggggtggggaggagctcaggaggcagcccgcatagtggcttaatgcaggcatcctggaatggtagacagc

SEQ ID NO: 540596 - DNA, 612 bp, Homo sapiens
tggcgccagaccactagaatctgagggctgagatgtcacttctgagccctctcccttctactctctgtacctggtctgcagcagttctgcagcatgaagaatggtaccgggggcagcccctcacccctcctctctctgctttccttgctgaagccggccatctgcatacctgcccaggtgaaatccatcccactctccctcctcaggcttccaactggcccaaagcccgcccactgcactgctgccctgctgaccttcccctgcggctccttcccactatgaaattctgctcttcctcctcctccttccactaggagggttccagtggggagccaggcaaaagtttccctattacagggtttggaggatgctggcaatttcttctatgttgtgtttcctccctgcttgccatcagaataaacatcagaggtcactgcataaaagcgtctccccagtttagagaacagaagaagccacttatgcaataakagggaagccctggcagagaggagctggtgggaagaagttggactggagctgtgggggtggggaggagctcaggaggcagcccgcatagtggcttaatgcaggcatcctggaatggtagacagc

SEQ ID NO: 540597 - DNA, 631 bp, Homo sapiens
atttaaattaattaaaattaaataaaactatttactttctaagtcacacttgttatttcaaatgctcattatctacatataactagtggttatcatattgggcacttcagatatacaacttttccaacactgcagaaagttttattgaagagcactgctctacagggtatgatattccaacagtttctgtttcatatatcgtcaagattaggtggacacagattaaatccatagttcttgcaatgttctgatatgtcttaaattatttcaaaatcacataagcctgaacaaattgaggtgtgttgacatctgaacctgaaagaaatagccaattaataaggatacaatagtttaccagaaaattttacccaaactatagcacgccttggacaattattcagttggctcaatactggcaacatggaaagaaaggaaggtggtttagaatgaggaggcagatttgttaaatatcagtttgataatgtttcataaaggccgaaataaaatcggtgtggttgcatggtgctagcmcaaaggagaacatgatcaattctttcctgtatgttgtcctgacattgtatgtcatctggtagcacacaacgttttctagagttgaatctcaaaattaaag

SEQ ID NO: 540598 - DNA, 570 bp, Homo sapiens
cccatcatgcaaggctgttacataactataagcattttgcatcaacttttcttcacttagaaagactttaacctcttttgtgtgagctgtcctacattttatgtcttatttgagtttctctgaatctagcacatgaatacaaatattctaattattgccagtttattagcatagctcattagataacattttccttctgctgcaaagtacaagagtgcataggacatatattatctttttattggtgttattcttgttttatcctctcacacacatagtcagtattcaggaaatgttaattgatgtactgattagaaattatgaagcaattcttacccttaatttgtacagaggtgtacatgaatggccactggattttattgcctatgctataagyagagaaatccaaagccacgtctaaggcctcatcaggacattcactcagcatataactccaatggtcttgttgcattaagggtaagggcatgaaataaaaacgtgctcaaatatgagctaactcatagcaaattttcatggacttctttctcccagaagaaagacaggatgaca

SEQ ID NO: 540599 - DNA, 686 bp, Homo sapiens
ggatggaaataagacaaaagggagcgagtcaccttctgtgctcaagcaatcctcctgcctcagcctcccaaaatgctgggattacaggcgcgagccaccatgcccagcatgattatgtttatatcttattaattatgcttattttggtaaatgtatatatttcttaattatatatgttatgtaattttctgtgtctctttattttttttttgagatggagtctcactgtgtcatccrggctagagtgcaatggcatgctcttagctcactgcaacctctgccttgcaggttcaagagattctcttgcttcaggctcctgagtagctgggactaccagtgtgcaccaccgttcccagctaatttttgtatttttagtagagacagggtttcatcacgttgaccagactggtctcgaactcctgatctcaagtgatctgcccaccttaacctcccaaagtgctgagattacaggtgtgagccactgcacctagccaattttctatgtttatgccctaattttttttccctaaagtaagtttctctctcttttactctaggatatggaaatggctagaaaggttttcaccaaatgtggagggttcgtctgagacaaactgacttaaaatatagactgtgtggcctgcaggtcattcccttaaactgggcttcatccagaggcctgtgag

SEQ ID NO: 540600 - DNA, 686 bp, Homo sapiens
ggatggaaataagacaaaagggagcgagtcaccttctgtgctcaagcaatcctcctgcctcagcctcccaaaatgctgggattacaggcgcgagccaccatgcccagcatgattatgtttatatcttattaattatgcttattttggtaaatgtatatatttcttaattatatatgttatgtaattttctgtgtctctttattttttttttgagatggagtctcactgtgtcatccgggctagagtgcaatggcatgctcttagctcactgcaacctctgccttgcaggttcaagagattctcttgcttcaggctcctgagtagctgggactaccagtgtgcaccaccgttcccagctaatttttgtatttttagtagagacagggtttcatcacgttgaccagactggtctcgaactcctgatctcaagtgatctgcccaccttaacctcccaaagtgctgagattacaggtgtgagccactgcacctagccarttttctatgtttatgccctaattttttttccctaaagtaagtttctctctcttttactctaggatatggaaatggctagaaaggttttcaccaaatgtggagggttcgtctgagacaaactgacttaaaatatagactgtgtggcctgcaggtcattcccttaaactgggcttcatccagaggcctgtgag

SEQ ID NO: 540601 - DNA, 591 bp, Homo sapiens
gaagctgaccgacaccttgatcgccatgttgcagaggacctacacagcccacaccagactcctgaaccacagaaactgagagacaatgaatatgtgttgttttaggctactacatttgcgrtaatatttttatgcagcaacagattaatacaattaatacaatagtctttgctctcatggagcacacgttttagttactgaagacggataaagaaacaacatactcaaaactatgcttggaacagactggaagacggattaagcggggacaaaaattgaagattattactgcaggatgaggacttgaattaggaatggcagtgggaatgaaagaggagggaaccaaggctaagcttactaatcctcatttggggaatcacagcagtgggtgaaaggtatggtagtcagctccaagatggccttcaacgagcccagtgatccctgactcctgatattcattcacacatatgtataatcgcccacccaaataaatcagggatggctcgtgtaactaatagaatatggaggaagcaacaatatgtgacttctgaagctgcatcataaaacgcattacactttgtgcttcaagac

SEQ ID NO: 540602 - DNA, 455 bp, Homo sapiens
ccttgtttctttcttggcatatatcataggcttatttgtgatactcagcgttttatttgtctgtttgcctgcagaatgtcagtctctaccaccaggatgtgatgtcaggaggacagagcccagcacagtgcctgggacacacagaacagctcaataaagaggtgctgaatgaatacacaggmcctcagaggggaggagaatccccctgttctactcccctacagaaaactacttctagtcagcgctcctgtgtttgaatctaattccttgattctgtgaagctaatgcccatgggtgcttcagaccccagtggtggggctcaagtcccagcccagcaacacccaggccacagccctgccagattccaaaccttacccaaatgtaccacctcctccccaggttccaggggcccaacaagccctccgacgggcagaccaacccagaagaatgacaga

SEQ ID NO: 540603 - DNA, 480 bp, Homo sapiens
ctggcagcaggaggccactcctcttggcccttctctctccttccctcctgggtgccagcggggaaaaggggagaggtcccctcagaagacccctcactagggactaacccagcttagtcctccccactcagaactaacccctaacccctccacacaataagggtttgaagagctctttctataagccatgctcttctgtgggcttttcaggcatgatgtcagtatcctcataaaaactcagaaagattactagtggtcattccagcaagatggttttcttggcctcagacctcagrgtggcaggaaagggaatgtgcaacctttagactcaatgccccccattaacccccatgagctggtcaggttcttggtgggaggagcacctgaaatgcccaggtctttgggggcagcaggtgcaggggacaccgtggaatatgcagatggagggagctgtgagatctggaagagggttaggagggg

SEQ ID NO: 540604 - DNA, 481 bp, Homo sapiens
ccttctttattagtttggttgcaaactctgtgagactcaaacaaatgtgaaagaactgcagaaaactgcttcctaattgtcagacttgcgtactgtgttcagaaaaacacaataacaagtcttgcttcagaattgcttctgtttaccctcattttgatcaaaagcaagtaattaagaaattttctctctggaagacttctaataagcacatttccattatctttaaccacacagtgtgagctgactttcttttcttactgaatcctrtaatgtggatgtggacatgcattaatccagccatggctgagcagagcttatcaaagacaagaatcaagggtccgcccccctcaatacacagattaataagtgcaggatgtagccttcacagctaaggagttgaaaagaacgagaaaatctggacctctttgcatcccaagggactagacattatttatgtttttaacgtaaccgtgttttactg

SEQ ID NO: 540605 - DNA, 643 bp, Homo sapiens
tttgatgttttatttggtttgactatgttgttaactctcatgttgacagagtactttattaaattgtyaaatacccatttgtttgaaatatgggtaatttgcagttactgatttacatgctgtgagacatgacccaccacactgcaggtagatgatcagagagtatctctccatagttgaagtttgcccagctatagcccagtagactaatgactgtggaagtgagctgcatggaactcaactaactggagccttcaaataattggattttttcctcttgtactatttttttctgtttaaaaaagaagcaatgccatgacaataacccagataagtttttttaaagtggggttcctaattgtggttctggagcagtacatattaagcccaatttcctggcccgcttccatctacagttctgcttagtgaaaactattattgctaaggatgatgctggaaaaccccaacttttaaagaagtattacttttgtttgcaacattgaaatgaagtagacaaacagattcagaaacattttttaaccataagaattgaggcagaaattttgtatgtaactctagttcattttactgaaaccacagttttatttattcagctctacttctatcattgaggtaattaagt

SEQ ID NO: 540606 - DNA, 643 bp, Homo sapiens
tttgatgttttatttggtttgactatgttgttaactctcatgttgacagagtactttattaaattgttaaatacccatttgtttgaaatatgggtaatttgcagttactgatttacatgctgtgagacatgacccaccacactgcaggtagatgatcagagagtatctctccatagttgaagtttgcccagctatagcccagtagactaatgactgtggaagtgagctgcatggaactcaactaactggagccttcaaataattggattttttcctcttgtactatttttttctgtttaaaaaagaagcaatgccatgacaataacccagataagtttttttaaagtggggttcctaattgtggttctggagcagtacatattaagcccaatttcctggcccgcttccatctacagttctgcttagtgaaaactattattgctaaggatgatgctggaaaaccccaacttttaaagaagtattacttttgtttgcaayattgaaatgaagtagacaaacagattcagaaacattttttaaccataagaattgaggcagaaattttgtatgtaactctagttcattttactgaaaccacagttttatttattcagctctacttctatcattgaggtaattaagt

SEQ ID NO: 540607 - DNA, 643 bp, Homo sapiens
tttgatgttttatttggtttgactatgttgttaactctcatgttgacagagtactttattaaattgttaaatacccatttgtttgaaatatgggtaatttgcagttactgatttacatgctgtgagacatgacccaccacactgcaggtagatgatcagagagtatctctccatagttgaagtttgcccagctatagcccagtagactaatgactgtggaagtgagctgcatggaactcaactaactggagccttcaaataattggattttttcctcttgtactatttttttctgtttaaaaaagaagcaatgccatgacaataacccagataagtttttttaaagtggggttcctaattgtggttctggagcagtacatattaagcccaatttcctggcccgcttccatctacagttctgcttagtgaaaactattattgctaaggatgatgctggaaaaccccaacttttaaagaagtattacttttgtttgcaacattgaaatgaagtagacaaacagattcagaaacattttttaaccataagaattgaggcagaaattttstatgtaactctagttcattttactgaaaccacagttttatttattcagctctacttctatcattgaggtaattaagt

SEQ ID NO: 540608 - DNA, 510 bp, Homo sapiens
taattttcttgttaaatttaaactcaaaaacctccccaggggaaaatgagtaaaggatgttgtaaaagaaagaagagtcaaaatggaatgatgagagtaccaaaaataggctgggtttagtggctcatgcctgtaatctgagcactttgggagaccacggtggaagagtcgcttgaggccaggagttcaagaccagcataagcaacatagcaagaccccatctctattaaaaaaaaaaaaagtaaacaaatagacaaacaaaaaataccaaaaataatgaaaaaccaaaaaaaacaggtcaagaaaagagtagagcayaggcattaaacttttaaaaatgtctttagacaaatgttgtttaaaaatattttagattcatccaatggttatgctaatagacatacttttgctgaaaatatggacaagggctagtttatagggagagaggtggttgactattcttcactaatttttaaatggcaaagttttattacagttaaagaatggaaa

SEQ ID NO: 540609 - DNA, 510 bp, Homo sapiens
taattttcttgttaaatttaaactcaaaaacctccccaggggaaaatgagtaaaggatgttgtaaaagaaagaagagtcaaaatggaatgatgagagtaccaaaaataggctgggtttagtggctcatgcctgtaatctgagcactttgggagaccacggtggaagagtcgcttgaggccaggagttcaagaccagcataagcaacatagcaagaccccatctctattaaaaaaaaaaaaagtaaacaaatagacaaacaaaaaataccaaaaataatgaaaaaccaaaaaaaacaggtcaagaaaagagtagagcataggcattaaacttttaaaaatgtctttagacaaatgttgtttaaaaatattttagattcatccartggttatgctaatagacatacttttgctgaaaatatggacaagggctagtttatagggagagaggtggttgactattcttcactaatttttaaatggcaaagttttattacagttaaagaatggaaa

SEQ ID NO: 540610 - DNA, 425 bp, Homo sapiens
cagctggtgagctaaaaaaaaagcaaatcgcaaaagaaatctcataatgttttaagaatgtttacaaatttgtgttgggccrcattcaaagctgtcctgcgctgcgggttggacaagctatagagcttgtcttttaccttcagtgccaatttagtaaatatttatagggattctgaatttatttcaccatcttctaccccagacaatatccagtctagacaacttcctaatctggtggcctgatggggaccacttttagctgtgtcgtttttatttgttcctttaagtttcctttgtgacagaagactagaggaactagaggggctgcaaagactgaggagataagaaggctttaattctgtttaattctgaatagatctttgaccctgggcaagttatgtgaacctatgtgtcctttttggggg

SEQ ID NO: 540611 - DNA, 425 bp, Homo sapiens
cagctggtgagctaaaaaaaaagcaaatcgcaaaagaaatctcataatgttttaagaatgtttacaaatttgtgttgggccgcattcaaagctgtcctgcgctgcgggttggacaagctatagagcttgtcttttaccttcagtgccaattwagtaaatatttatagggattctgaatttatttcaccatcttctaccccagacaatatccagtctagacaacttcctaatctggtggcctgatggggaccacttttagctgtgtcgtttttatttgttcctttaagtttcctttgtgacagaagactagaggaactagaggggctgcaaagactgaggagataagaaggctttaattctgtttaattctgaatagatctttgaccctgggcaagttatgtgaacctatgtgtcctttttggggg

SEQ ID NO: 540612 - DNA, 425 bp, Homo sapiens
cagctggtgagctaaaaaaaaagcaaatcgcaaaagaaatctcataatgttttaagaatgtttacaaatttgtgttgggccgcattcaaagctgtcctgcgctgcgggttggacaagctatagagcttgtcttttaccttcagtgccaatttagwaaatatttatagggattctgaatttatttcaccatcttctaccccagacaatatccagtctagacaacttcctaatctggtggcctgatggggaccacttttagctgtgtcgtttttatttgttcctttaagtttcctttgtgacagaagactagaggaactagaggggctgcaaagactgaggagataagaaggctttaattctgtttaattctgaatagatctttgaccctgggcaagttatgtgaacctatgtgtcctttttggggg

SEQ ID NO: 540613 - DNA, 573 bp, Homo sapiens
ctgcgttttggttggaggtgatttgaagctgtttgttatttcacatggcagggatgaggaaaaatgggtggaggggaggaaggtctacttgtttattttccatctcctgtggagtatttgacatctggaagttccaattagcatttttaaagttgtgtttcagatcacccttatgattttcaattggcattaatctgagatgccccagatgatcttttacactttcgttaaacattgtgatgatgcctttataacttcttcaaatarctgaaccactggccaaattttgaaaagcagatcatcaatccagaaagtgtgacactgtgttcacacaaccaaggattgcaaatgatgcaattttagcaccatattcttcatctaagacaacttaccagaatcctttgcataaattaatagttaaggttctttttataattctctagtgatccactagtgcaccttctctagtgactgactatgcgcagacatcagtatctacatagagtctaatcaagttgtccagttgatatgctgagatccctggaaaaaaccaggaatcttcagaaaagcatt

SEQ ID NO: 540614 - DNA, 614 bp, Homo sapiens
ccactactcctgggttcactttttttttttttgtaattttagtaagacgaggtttcgccatgctggccaggctgatcttgaactcctgacctcaggtgatccacccgcctctgcctcccaaagtgctgggagtacaggcgtgagccactgcgcctggccgggagggtggctcttgacttacagggcctcccctcccctccaaggtcttctttaattctgcacattattttaattatttctaacaagtaccttgatcttcatttgtgaaatctagtgacccaaaggcagctcccaacctccctgggagttgataggggtggggttgggaagagaggggagagaggaagagctgctcttcccaagaagggtttttgttttgttttgtgtttatttgttttggctttkggtttttagtagatgggggatgtacacgtgagaggtgagggagagagcagactgcaaaccctgtaactgatccatgtattatctgttcttttaactgagtaacatgcttttcaaaagtgtttttccatgtttcagagacagaaaaggggagaaaaagaagaagaaaagggagaggaaaaggtaaaagaaaagaagagaatgaattgcag

SEQ ID NO: 540615 - DNA, 650 bp, Homo sapiens
aagatatgccattttagagcaagaatcaaagctagtctgtgtgatttggggtgatccaacaaacttcagtgtcacttattaaattgggctgaaagtgcctctatttcccagaagtactttcaggataaattcaattatatagttttaaagtacttttagaagaaagacatatgaatttgaataatgatagccttttctgacatgtctttatatccatataagaacaaaggcttctagcatttcgtctctcctgagtctatggagtaatcaagcatgtatgctattgtartttcagtggtagcaaagaaaaaaaaataattcacagagaaaatcactatagagatgtacttctgagatccattcccattatacttggacaaaatagccgcccataagtgacacagaagtatacagaatctcagaactagacttttgacaccccagtggagtgcagattctgtaacatcatgcagaaacgaacagaatggttttgaagcaagtttaaagacaaaattaatatacagttattttaagaggagaaacatactatgtttgtgggtagactgattcaagttgaaacatgctaaattttcatgagcaagagaatgaatgaatacaattgaatattatgtagcagtgaaaattaacag

SEQ ID NO: 540616 - DNA, 605 bp, Homo sapiens
atgaggcaaggaagattcctaaggagaagcttcactggtggaggagccttggatcttttaattgcatttcattacagtggagataagagtgttgggaaatgctgtgtctttttgcccctgccatatttctggccatgctagtgattcgcacatagcggaggaagccacagagttagtgttggttgacctgttgggtcctggggccattccgagttttgaagctcaacagatgggagcatgacccatggaggtaaggcaagtagaaatgaggaattagtaatgagcaccattttgaatatgtcatccttaaacttgtagtgagacattccaatggagaggtatgtcaaaggtatgaaattaaagagtagggctgaaagttccaaccctctctctactcatggcttcatctttctggtggtagctcccagcctggagctacctaggggctcctgccaggagtcatcttatcagcatacaaaagaaattcttatcactctasagattctgtgccaccgggaacaatatacagtcaggcaccagactcaatatacagttgtgcaccacggagggggtgccttctgagaaaaggccatttcctcactgtg

SEQ ID NO: 540617 - DNA, 624 bp, Homo sapiens
cacagcccatcgtttaatagcccgggatttttggaggtagagatcttatctgaaaaactagggacaaggtgttcctgtggccgttgagcacacactaggaacacatgctgtacattctgtcacaatagttaacattttctaacatttttaatgtaccaggcactgttcccaatgttgaaaatgaattctctccttgaaccttcattacaaccctatgaaataggtgcaattattgtcctctcttcataggtaaaaactaaggtacaaaaggaaacagaggttcagtcaaagaaagtgaccttgttaacgttagtgacctgcaactcgaatccaggttgactaaattcaaaccctatatacctgttagaggcaatagtcactgaggaggacatctcaaagtctgccccccttttccactgaaggtgggatagtagcaacatttttctgattsaggaagggaaatctgtactgcacattagggataactttgtgaccataaaacttgggctaaatagaatctccaaagaaatttgaaaatctcctttcctattcatattctcccccaccttttctctttatatccaaaaatccctccttgcctttaaagaggttgccaatttcttt

SEQ ID NO: 540618 - DNA, 607 bp, Homo sapiens
gcagtttctgatagagttaaacatacctctgattagacaattccactcctaaatatatttatcgtggagaaatgaaaaacatatatgtccacaaaaagatctatacacaamtgttcatagaagctttattcacaacagtgaaaaactggaaagaaaccaaaatgtccatcaatagcagaatggattttaataatcattaatgagaaaatacttggcaataaaactgttacatactacggatgcatgagcaatgtggatgaatctcaaacacactgtgttggacaaagaagccagacacaacagaacccatactgtgtaatttctcatgtataaaattcaataataggtggaacaaatctacgatgatggaaatcagaacctcaattgcctctagtggagaagaaattaaatggagaggaacataagaaaatttttggaggatgatgaaaatgttctgtatactgcctggactatattgctagatacattagacaaaacatttgtctttatgttaaatgccttttaaaaatatttaagaaggaagcattaggcaataaggaattagagtcaatgagtatcaattgttgaagtgtcatggagaaagaaa

SEQ ID NO: 540619 - DNA, 631 bp, Homo sapiens
tgcatctagaatacagcaggcagaggaacacggaaggactaggctggctgagtcttctggcctccatctttctaccatgctggatgcttcctgccctcaaacatcagagtccaagttcttcagcttttggactcttggacttacaccagtggtttaccagggactctcaggcctttggccacagactgaaggtgcactgtcagcttccctacttttgaagttctgggactcagactggctcctcagcttgcagatggccaattgtgggacttcaccttgtgatcatgtgagtcaacactccttaataaactccctttcatgtatacatctatcctgttagttctgtccctctagagaacctggactaatacagagacttcccctggagtggattggactggcttatgaagttatgggctctgcatcttgacctgtttatggacaggggatccctctggtgtgccagaggttggaataggcaacctctaagattcctcrtggcacaaagtgaacaagagcaaggcccaaatggtaaaagactgagaaggttgtggggccactatccttcctgtgaggcatcaattcaggtagtcctgtatgttaagatttcagagtgtgtgtagtcatggaa

SEQ ID NO: 540620 - DNA, 637 bp, Homo sapiens
tgaggtttttcttattgtgcaagtcttcttttaatcaattgttttagcttttgytttacttatatattttccttcatttaagattcatagtcctgtgttagttcccgttcaatgcctaaaaagagttgaatcatttattttatccagatttatgaatatttttaatggtgtctagtgtgggtgccagtcagggctggtcatggctggaagtagaatacatcatttttattttataatcacaaattattcttatcactttactgtaagaaacaatggcacacacacaaaaaaatctgcaaatgaccctggacttctaattctaaagattacacatgaattaattattggatctgtgtgtataaaaagaggttaatttaacatggttttttttttcagtaagaaatgagacaaataatttaggcatacttctttttataagataaatgagacttgagttcctgttattatatccttctacaaaaataaaagaatactttttttaagattatacatgactttctttgtacaagtgattcgacaatgtatcatacaaggcagttttctatctagaaaggataggacaagattaatattactgagaacaagtgtgggccaggttctaagcttgattaaattt

SEQ ID NO: 540621 - DNA, 641 bp, Homo sapiens
ttcccctgatcccaaaggagtgagttaaacattgcaaataactgattgctcagatcacatgaactcaaattatattgcaaaatgttaatgtgaatattactgaagatgcttataatgttttatttgcttcaaatataaaatgccacaaaaatattaatttttttacttagataatatcaaaaaattaatattagacaaagcaaaatagtacctaaatgctactaatctagaggtaataatcactattattttcataaaataaacttctattttactctaaaaaacccttaacttatgcaaaaatatgataattcaatgctgttttataattcgatttattttacttaacattatatgctaaataattttcttgaccattaaatawacctcaaaacataatttaaagtaattgcttaatattctattattttaatgtaatatatctgttgtaggttatttaatttatttcaaaaatgccactgtcttaaatatagctaagatgaagaaatcagtgattattttttttggaaaaaaatttccacagaaggaattactagatatttaagtgtttaaacttctgatattttttgccaaataccccacagaaatatggcaccaatttacattctaactacctttat

SEQ ID NO: 540622 - DNA, 641 bp, Homo sapiens
ttcccctgatcccaaaggagtgagttaaacattgcaaataactgattgctcagatcacatgaactcaaattatattgcaaaatgttaatgtgaatattactgaagatgcttataatgttttatttgcttcaaatataaaatgccacaaaaatattaatttttttacttagataatatcaaaaaattaatattagacaaagcaaaatagtacctaaatgctactaatctagaggtaataatcactattattttcataaaataaacttctattttactctaaaaaacccttaacttatgcaaaaatatgataattcaatgctgttttataattcgatttattttacttaacattatatgctaaataattttcttgaccattaaatatacctcaaaacataatttaaagtaattgcttaatattctattattttaatgtaatatatctgttgtaggttatttaatttatttcaaaaatgccactgtcttaaatatagctaagatgaagaaatcagtgattattttttttggaaaaaaatttccacagaaggaattactagatatttaagtgtttaaacttctgatattttttgccaaataccccacagaaatayggcaccaatttacattctaactacctttat

SEQ ID NO: 540623 - DNA, 659 bp, Homo sapiens
atagtgaccctattcataggttcataagtgacaagaggattttctatataagacatacgttactggtctattttaaaatgtgcaaacaaaatcaacagttatttttatttgagtaaataatgttatcctctaaaaagggagaccaatatgattgtggttaagaaataaaattaatcttattctaagaattataaatgacaggaaatatttatgtcgcttatgaaaaaaagcattctaaaaaagcttgattgaatttaatctatcaagcatatatagatccttcgtgaaaaacaatttattttacttttcaatacctttatcattgaggtaaaataatttwtccaggccatagatacatttttctttttaaatcaacttacaatattgccatactctgggatttactgtattttgtgaccttcctggagtctttttgataaagattttctttatttagtctgaacatattgataatcttaaagtagaaactaactgtcagaaacttggaagtaaaacttcagtagaaataaagcagaaaatccccaaccatttatcatgtgatttcaaaatagtttcaacctcaactttttaaaactggatactatcctaataaatatgagaattcttgtttccttatttttctgtctttttcctttgtc

SEQ ID NO: 540624 - DNA, 459 bp, Homo sapiens
aaaatgagtgactctgtgattacattccctttatagttcatctttttgtttcttttttttctttccattttccaacttggtcttaycaatccacagaccaaagaaagataaatttgggagttgttggtaggtagctgaaagtgaatgaaatgattacaattaaaaaagggaccatagcaggagtgagagagaaaaacctagatggcagtggcaattttaagagagatgtaatggctggaataaagtaggaggaagaaaagaaacctttaaaaacaaaggagaggagtatgcagaacatatgggaaaggaatatggggaagcagctttctgtaatgtttactcatttgaaaagattattctgagatttctctgtattataaaattagtatataggttgcatagttgattcatgtgcataatttatagtttaaaagtaaagtggtcagtacatatggctta

SEQ ID NO: 540625 - DNA, 529 bp, Homo sapiens
aaaatgagtgactctgtgattacattccctttatagttcatctttttgtttcttttttttctttccattttccaacttggtcttatcaatccacagaccaaagaaagataaatttgggagttgttggtaggtagctgaaagtgaatgaaatgattacarttaaaaaagggaccatagcaggagtgagagagaaaaacctagatggcagtggcaattttaagagagatgtaatggctggaataaagtaggaggaagaaaagaaacctttaaaaacaaaggagaggagtatgcagaacatatgggaaaggaatatggggaagcagctttctgtaatgtttactcatttgaaaagattattctgagatttctctgtattataaaattagtatataggttgcatagttgattcatgtgcataatttatagtttaaaagtaaagtggtcagtacatatggcttagctctatgtgttagtttttaaaaaaatctacattgttttgagtgtttggttattaatagtttatggatat

SEQ ID NO: 540626 - DNA, 645 bp, Homo sapiens
actatgcaggaaaaatctttgagacaagtggcattacaagcaagtggatgaagtatagactattcaatcaatggtatcaggatagctggttatcaattattttgaatcaataaatacatacacacgtacacacacagaaacaaaggattaccaccttgtactatacagagyagattaaagaactaaatatgaaaagcagaactttacaactttttgaagaaaatagacaagtatttcttcacaacatctaggtaaagaaaaatacacttcaggacaagtattacaaactataaaaaaacgactaacaaatttaattacattaaaattagaaatatctgttcatcaagagaggtaatttaaaaagtacaaagaaaagtcacagatcaataaaaagaatatgtacaatgcatacaacttagaattcatatctaggatttatgaaaaaaatcaatacgcgaaagtcaacctaattttttttaactggcaaaagacattaacaagtaatttgtagaagagcatatgaaaatattctcaatctcatcacaaatcagggagatgcaaattaaacaacaggataccacttcatacttatcagatgggctaaaaaaattaaattctgtcaaaataaaacaaggatatggaaca

SEQ ID NO: 540627 - DNA, 670 bp, Homo sapiens
gggaaaactggccccttttctccaactagtctcttgttctggaacgttccatgccgtggccatctaagggatcagtccaagaggctcaagatggaaactgtaaggccttttgatgttcaggctctaaaattcagagcatcatttctgccacatcctattggttgtaataagtcacagttagagcccaggttcaaaggtggtagagaaatagactccatatttggataagagaaatgacaaggtcacatctcaaagggagraatttactgggatggtaggttgtggccactacaccatctaccaggggtgatttgtaagacttggtgctcaggtcaagcgtaatgaggggccatttttttttgactgggcaaatgctaatagactgcaaaacagatgtactggtatttttacatccgtgcccactggatctttgtaatcattggatttggtgaagtatcgaatcttggctcagaaagtggctggcatgctgtagagctcagtaaatattatatgtgttgaatgaagaaaatatggataaagcattactctttttataaaaattaatttgtaagaaaagaatgtcatggttttcttgaagaggcagtgggcagaggtggaactggttccacacttggagtcagattcaaattccctccatcacagtttcctg

SEQ ID NO: 540628 - DNA, 579 bp, Homo sapiens
ctggcacagcccttccaagaacagcttcatctccagcctctctctcatccctgtgccatctaggggaggagatgaccttttgtgccaaggtccaggaagccttgatgtcttacctccaaggggtgattttcagtgaaatcgtgtgctggagaggtgactatagacagggctggctacagcagagcacggcccaccatggcgtcaccttgcacagttgccagcagcttccctgacagtcaaggagacagggtggggggtgtttgtgtgcctgttgtgcgtgtgcacctgtgtgtgtgcgcttaggcatgtgtgcattggaggttgtrtcgcagcttctctccttccacgtctgttctgtggatggctgatttctggacaaaggtcaccgccctcctgcaggctgtgaggccgtcgcagcccccaggcatctcagtctcaggtttaggacctgcaggcccttccctgccgctctgggaggatcccacagtgatacagtggctgtcaccaagcatacctgcctttaatgttcagaagtcctcacacctgtgctctcccccgagcctcaccactgtcctggga

SEQ ID NO: 540629 - DNA, 496 bp, Homo sapiens
ggccttccaccataattgtgaggcctttgcagccatgtggaactgtgagtgcattaaaactctttcctttataaattacccagtctcggttagcagcgtgagaacaractaatagagggcaccacccctagagctgggtgagaccaatgccactcaaattgatggtgactacacaatggggaggagaatgggtgataaacattcccaatgtctaccacaccttggtagccatttaaactttttttttatttaaagcgtactgtctaggtttaaggtactgtaagagatataaagatacacagttgacaatctattagatataaaaagacaagctgacaaataactacaatacactattattaggtgtaatgtaaaaatgacacatgtaaatgctaaaacgaagtacagtaaatgtaaaggagagagacagattgtttctgaggtgatcagagaggtgtcgcatagcaaataacactggaattaggtcttaaagagt

SEQ ID NO: 540630 - DNA, 498 bp, Homo sapiens
atgtgcacatctccgttggctaagtgacttctagatggcaacattttatcaagcatccatttccctcctcargagaggatatcagatgtaaacagagtcaattatgagccatccttttagttaaagaccaagtactgctttctgctgaagcaatctgacaatttccccaaatgcatcagtgttcataccttgagccacaattgaagcactgacaatatattccattttcaagttatcacgatagtactgtcttccttttaacctgagtgtcaaagtcctttcccacaaagccaagttacttgtacctgtctgcccctgacacacacacacagacacccaagaagtcttgatctttaataccttttgaaacgtaaacaaaagaggactcattgagcagacaaatttgtgatcagtgacttgaggcagcagcacaacccttttcttcagggcagggctgccctaaatcttaggtaccactcttgctcctagtgatgagca

SEQ ID NO: 540631 - DNA, 538 bp, Homo sapiens
tttgcttactatatgcttgagattcatatggaatcaaaaaaagagcctgaaaagccaaagcaatcctaagggaaaaaaaaaaaaaagctaaaggtatcagatcacctgacttcaaattgtactacaaggatatagataaggaagatatttctcttctaacactgcagtccacatggaaaaagatagatctttgtgatcttaaatcatagaattggaaaactaataacaacacactttatatctttggagaacctcagaaaagaaaaatcaaatttatctgggaaaaatataggatagagtcaaaagaagatacagatattatttattttttataattagaatttcaaatttcttcaacatcttttgatatattattaagttcatgtttattaagggtttgctattttgctaggtgctagaaacagaatggttaacaaatatggtacattaaartataggttcacaatcctccagttgcaatgctgtacaccagatgtttcatattcagaattttttgtattttagaaagacaatacaa

SEQ ID NO: 540632 - DNA, 329 bp, Homo sapiens
ctgttttttttctctctctcttttttagttcttatttaacgtatttattttaggcacttcagagaaccactgttagttttaggaaagaaacaatgtgtttcctcaaattatcagtatgtatgacattgtatttgtcgatttttaattaatttaaggttaattttgataataactaaactacttgcctaagtagtttaaatagtcaatctgtatttaaaaattaccattaaaatastttttatgaaactctaataagaagagttagaaaaaccattttctctactcacatgaatgacaagtctctcaagaaaacctaaggaagtgtttta

SEQ ID NO: 540633 - DNA, 577 bp, Homo sapiens
gctgtttagcatgatctttctctgacagacttcaatatttttcataatatacatagtccgtgagagacatggtaggrctatttcagtccccttctctttctaaaatgacacaatagaatttgtactatactgtgaacagcacccattaagagtcgttcatttccaaaattcccagagaaaaatggaactgaaacctttctccttagacttctaattacctttattcactctcatcctccatcttgcttccttcttcttcccgtagtaattacttgccctggcctagaaggacttttattagcgttctctaataaacaaaatggcccttatgtctaatgctctaaacattagagaaaaaattctctagagtaaaagttgtctattagagtaaaatgattctgctgtgaatccactgagatctgactctcaaagtaaagtcttaaacatttatttactttaatgcttagtttttgcaaacaaagagcaccttggtttcataccatatagccagttgaaactgaagaaagacattcagcactttgattggcactgttttcatcctcggagaaaaaaaccc

SEQ ID NO: 540634 - DNA, 595 bp, Homo sapiens
attaaatatatgcttctagacttaaagatgacaatatgcatccttgacttattaaagttcaatataaattagtacttttttcaattcctggactatgttaaggacattggaatgtgtcaactcccttttcctccttcttattttttgtgtattattttaattctacatatattctctctcaagatattattttatacagtcagtattaattttgattttcccatgtgtttaccctttacaatgctcttcattcctttctgcaactccttgcttccatctgaaattcttttccttttacctgaaaaactatttagtttttcctttagtgtctgtcagctacttataaaccatctcagtttttgtctgtctggaaatctctttatttcactttcatttttgagtgatattttttctgggtatagaattttaggttgtttagctgtctttttgtttgggtttttttgtttccttttttgcctttacagacataattttgttctttggcttccattgtttttgttgaaaaawtagctgaatattgtgtctgcgtataatgtattttttattttcttttacactagctacttttgcaatt

SEQ ID NO: 540635 - DNA, 501 bp, Homo sapiens
aagttttataaaacacacataaaccatttaaagttccagcttcattcttggtaaagtagaaatctctccatatacccctccaaaagaaggggaaaaaaatacttaggtgaccaccaggaagttgacgttttctacactgtacttggcttctctacatctataagggtcaagcaggatgacctgaaaaaacactgccagttgacaccagcagatcactagctcaaacgtagtgccagctttctctattaccatgtgcttcacttgcctttggtatgtctcactgtctaaatatgggaaggaggagggatttccgcaggtcccatcctgacccaggtgcacgaaaaggcatctgcagccatatcatggtgcctcaaataatgcaacgcacagtgggttaggggagaaagagaaattactcaagaattatgtgagataaaactagttttagaaaagagcatagytgctattatatggtaaagtattacatttctgtattaattt

SEQ ID NO: 540636 - DNA, 592 bp, Homo sapiens
tatacagtaagtgaatgaaagattggaaagagaaaaccctttttacccatttgcatcacatcccatttcatgtattcaacaaatgtttatcaaaggcatgctgcttgcagagcatttgccaggacttagggatatagtggtagcagaaggcagataaagttccagttcactcacaggagttcatattctgatggaggagacagaaaataagctatagcatatctgtgctttgtgaatttgtcattgctgcctattcccgttgccttttttttacatctgtatttctgctttctctagtacttcaactctgctaagaagttgctgggaagtggcaaatttgatgtggggcatggcttggagctrgcctttaactctctgcagatcattttgagcttgctttggagatgcaaaaccaccgtaccatggctcctgtggattgggtctgtttgggagaagctttggttttccaagctccacctggattagatagagcacatctttggccctggactgatctgggatccccagttctgtctcccagggcctgatgtagatctggccttcctctggagtggatgtggagccttgatgc

SEQ ID NO: 540637 - DNA, 531 bp, Homo sapiens
ttaaactcagctctgttctgtttttcgcccaccttattacttactttgagcaaaactggattctaaaatgtgcagattaaagagctgaccactacccttgcatcgtccatctgcagaagtttcacatctttttcttttccttttttgagatggagtctcactctgtcttccaggctggagtgcagtggtgtgatctcagctcactgcaacctccacctcctaggttcaagtgattctcctgcctcagcctccagagtagctgggatgacaggtgcctgccaccatgcccgactgatttttgtatttttagtagagacggggtttcaccatgttggccaggctggtctcaaactcctgacctcaggtgatccacccacctcggcctcccaaagtgctgggattacaggcatgagccaccgcgcccggccagaagttttrcatctttaaaaccagaaaacactgggttgagaatgggaagagtcagggggtctccccagccaaaggggcttgttgactttgaataagtaccag

SEQ ID NO: 540638 - DNA, 470 bp, Homo sapiens
taaaataaatttgtatgcctttttctcctgttaatgtgacttttgtcagtttattttcagcaaatcttgactgcaaaggggaagtcttccctcttcactcctatgcttctttcttttcttcatttttttttctgccttccaatttaccttgactacctttttttcaattatctcacaatcttgaataaatcaacgtttagtagttatgtagttaagcacttttacatttgagcaacgtgaataatgtaatatagttgacttytttaatggaaggccttcccttgggcttttacagtaattttaaaaagagaaaaaaataaatttttataaatggaaacaaattaaaaatattttctgtcacaggtgtaaatttatactaaatttcaattaaaatacaactacttatatatttcataaatttgtggtagagggcattgataatcaaatatattgatgttcagaaaagaata

SEQ ID NO: 540639 - DNA, 619 bp, Homo sapiens
tgattttatatatatatattcatatttaatgaaatatatatttcaaattactgatacactaagctgacttggcacctgctgggacttaactgacataggtaagtggataaagagagaatgttaatattctctcattaacattaggcaaaactagggagagaacaggttgactaccaaggtgaggttatcagtggtatcatgtcttcctgaggaacatcataagcacaartttgaaatggactgatgtttctgttgtattgacttcaagtattggttgaaaataagaaataatttccagcctttttgagggtaagacattactaagagcatcagctaatcacattggagttgagagcacagccccagtgggtgataagaagctgaagctgaaactcacagtgaaggttgggaatgtacaggcaagcactgtggcttcagcatactctgagttctcatcatctcacccatgctctaggtatattgcaacaaaacaagttgtcaactgcattactgtggggttaaaactttctactttgatctgcattcactgaagaacttaggcggagcctggctctgtgaataaagtcgtcattacaagaaatgtaatgaccaccatcag

SEQ ID NO: 540640 - DNA, 469 bp, Homo sapiens
aagattctcacgtgacctctatgcacaaatctgtctgataagcactgctttgggaaaacttaccagatctctacagttggacaaaggttggctctttgcagarcactctaagaacaccctgtacacatctgttttgaccactaaactgtgggctgctggagggcaagaaatctatcttatcatctccaaattttcagcccctcctatggtccctggcacatggagcgattcagcaaatgtttgtttatttaaactgaactgacctacaggtcagcctggaactgaaatgctgcatccctggtgaaatattcttttgcacagattggtcgcactttcatttttggatgctcttgcttttggctaagctgatgctgtttttgcctcttctttctaaattcacagatggtctcgagcatttactcatggagagtggattgctgcccgatgtggattgctatgggccaggcag

SEQ ID NO: 540641 - DNA, 621 bp, Homo sapiens
gtgagtgttgcagctcataaaggtagtgttgacctgaagagtgggcagcaagatttattgtgaagagcaaaagaacaaagcttccacatcgtggaaggggaccccagcaagttgcccctgctggctccgtggcctgtttttattcccttatttggccccacacgcatcctgctgattggtccattttacagagtactgattggtccgttttacagagggctgattggtccgtttttacagagtgctgattggtgcgtttacaaacctttagctagacacagagcactgattgatgcatttacaatcctttagctatacacaaaagttctccaagtcccctacccgattagctagacacagagtgctgattggtgcatttacaaacctttagctagacacagagcattgattggtgcatttacaatcctttagctagacagaaaagttctccaagtccccacccaacccagaagcccaaccggcttcacctctcagtagcgyggcttttatgtcacaaggtcactgtttcctggaaaaactcattctgattttgttgatgctatcattcagatatatttgtgataggtaactctgaactttcattgttcttaatgctcttgc

SEQ ID NO: 540642 - DNA, 565 bp, Homo sapiens
cgaagaagagagactctcacttggatgctgggggtaggtgactcgggagggggstgcaatctcagaagccttcttttctggggatcagtctctgtcagaagcaggacagagtaatctgatcccactcccgccaccccacactgcatcaggcctccatctgggtgctccagttcagatgctaggacctcagagggaaggcagagatagaccaagtggggagtagacaccctaggcctggtgtacagaaagtagtagagaagcccttccagggcaggagtttgagacagcggcctggaagttagagttggaggcaagttctctttgtccagttcctttatttggggcagggcaccaagaagaggccctccgctccccaaacccagaggcaaaaggggttggcacgctccctcccagcctagtccttgcgtcactgtccatgggcaattcctctgccctgcatcttcaggccatgtcaggtagaggtatccatctcagggacctcagtggacacttccgtgggcactgccagccgcctggggggcacataggatcccatacccgctgc

SEQ ID NO: 540643 - DNA, 598 bp, Homo sapiens
tctaggagctgcccaggactccagaggaggggatggaattgatttaggtcagtgaggggttgcgyggggctgggagggggttgaggttgggaggctgaaggaggagactcccttcaacctgggaggtggaggttgcagtgagcagagatcgtgccactgcacaatcctttctatctcccttcctgggctgtgagtttctcggggcagggaaacagatcactcatccatctgtcacgttgtgatgtatactagttgcctgatgtatatactagtactcagaaaaatgtctgatgaatgaataaaattcattcatcgaacattttcatcatagcattggctattaaccccttgaatccccgtggctcacttgctgggtcccatccctgacccactagcctggtgccggggggagaccaatttctggaggaagctctgggtacccagtcttgccctaagcctgcctctgaacaggctgttcttgtttatgacccccgtcccagcagaatagtgattgctcatccctgcatgtgatttgagagggccagtctttcaggcctggaggaaactcaagccccaccagccgcttggcatcggaatg

SEQ ID NO: 540644 - DNA, 566 bp, Homo sapiens
tgtccggccccacccaagatgtgggggatggaggagtgaaccagacagacgtggtccctgagctcagggagtgtcccatcaataattctcagtatttattcagcacaaattgttttcagagcacagttcttcagtgtgctgtagaccaacacttcccaaactttgaagtgcgtgaaaattacgctgggatcatgttgaaattcaggttttgattcagttggtttggaatgaggcataagagctgcatttctagccagttcccaggattygcccaagctgctgggtccacagaccacatgttgagtagtgagactgttgagggcagaagggaacttttctatccctgaaaaaagcttccacgattttccatgttcacttggggtagggatctggagatgagatgaggggaaggggtcatcataattgctagtggatgaagagttgggcgaagggtaggaaggaggggaacattgtgatcacccacgagaggctcccggtctgatgagatgctattgtcacacccattttatagaaaagaacatagagagaagggagcttcggttgag

SEQ ID NO: 540645 - DNA, 515 bp, Homo sapiens
ggtaatcattgactctcaaaatatctctctgggggaaccaagatctccaatatcccttttcaaagtattttaaacagttagcttaatttgcaatcataatgctatcattaactgagtgtttattacctgtcagttactttgctaagtgctttatgtattttgtcttctttcatcctcatgacaactctatgaaaaaagttccattatcgtctccattttatagttcaggaaactgaggctcagaaaaatgaattgactggcttaaagtcacatagctagttaaaggatgaaactgggacttgaacctacatttatctggcaccaaaaacctgagtgcctgatcactagaccatcctgcctcacagcctatctggccaaagtagggagagtcaacatgtytcatttcctgcatggctagaagctcagaaaagtgagaggtttgttcagagtcccataatggactggacactaagccagggtatggtgggtctggccccaggtcccaaacctgcccc

SEQ ID NO: 540646 - DNA, 620 bp, Homo sapiens
agaggtaagtagacagagaaaagaaagagagattgagttttggaggcaaatagtgtacaaggaaagctaatatccagccaatatatgaacatgaagagttatatcaacaaaaattaacattactgaaatctttataagtttctgtttgacatttttcactaaaaaagacagagatatgaatatgagaattacagtaaaagatgtaaaacaatatctggggacacaaatgggctggggagatgggtagcgaagggagggccatcactttcctgtcagagacttctgtactgtttgatttttttttttaaatagaacacatagtcttgtttttttgcgtaatctttaaaaatgatttaactgctaacttaaaaaataaaaagcaatcttgataatgaactggaaattaaggatatggaactctaatgttttttaatatttcaaaaatcctgaggaaaatctttcttccctttgattctactccattgactgctgcctgtttacacactgagagtgatgcattcattcttgattcaatcagaatyagtcagatttgcaaactcatcaggaagaaatggaggaagagggagtcctttgagaccaggactcttctaccacatcag

SEQ ID NO: 540647 - DNA, 606 bp, Homo sapiens
cttatcaaaagcagctaaatccccccatctgcccatttaaaaattggtggggtgaacaaagagcatgaaaatgttgaagaccaaaaccaaaatttactcaaatcaaagttaagtacagagtttatttttaacaaatgtcatagctatgtcaccttactacagaatccagcagtcagaaaataacacaaaaaatgccgaggtttggcgtagctggtagctggggacagtgtcttcgtttgattactgccagttatttccagcatgctaaatccctacccacgtyccagcctctaggtgagtcagtgcgtcactctgtctcccgtccaattaattatttctcatcactccctcaatccaagtaacaaaccttgaaacacgaacatagacaccaggcttattggggcgtgcacagccaagaccccaagaagtgactccttgtaaaatgtatttgtccttctcgaagcaaaccagaggacctccactgtcaccctatacagagggagagaaaaatgcatgtgagggttaggctgcctgccttttattatgggatgccatccttctactatccatatatacattttcccagtaattgaaatcagaaaggaa

SEQ ID NO: 540648 - DNA, 604 bp, Homo sapiens
ctgcattcctttaagcgggtgtgctttttagcatagaaatttttcaagttttaaatcacattatcttttttttttctgatcaatgagttctctccctccaccctaacacatcacatatgcacacattttaatgttcaataagtgcttgttgaatgactgaacgttaagaatggatttctcagtgttgtaaaacagagagagacctgaattttgagtatgagtggtattggaatatatggggaaaactccagatttgtgcatataataaactgatagcattaagtagtatgagtgttacaacttaggtgtatcttctgtgtttaaccatctattttgtgtgaygaatggtgatttatcaatttcttcaaatgaaagctttaaatgaatttttctaaaggtgactttctcaaggatagagctttggattttaaagatgatggataaactaaagagagtgaattttattttagaggttatctttattttaggaattttaaaaatatattatagaaaaggctggaaatttatgcctatgggagacaattttatttctcttgtttcaataatagcaattaaaaaacaagacattaactgtcagtaatct

SEQ ID NO: 540649 - DNA, 606 bp, Homo sapiens
acgggaggccttcaggccaaagctggggttttcagatgctaatttcaaggctctctctggcccacttggttagcaaactctttctagttacacgcctccggtctacagaaatacgggcactccaaccagtctctgcttcagagggccttctccacttgttccgagttccaactccacttctccaacttccaaagatttgctcaaaagcctggggcccaaagcagcccgctccacccccttgataaggatctacagcaaagaggccgcagacaaaggcgctctccacctcagctcacaggcacttggtgagctctctgagtgacctcggcaaggggggcatagccccrggggaatgacttgggagagagaagaaaggaagaagaaagggcgagctgcagcccccgcgctgcggctccttgatgaatgcccgccagcgcttgggaggcctgacgcgaggatcaatagcgggtggcttttctcgcgggtgtttgaactcctcctgccgtgggccctggcgaggaggagccgccgataaatcacggcgctgcagccgggaaggcagtggtggcttgctcgggagagcaaggggagggaggatgctttacc

SEQ ID NO: 540650 - DNA, 606 bp, Homo sapiens
acgggaggccttcaggccaaagctggggttttcagatgctaatttcaaggctctctctggcccacttggttagcaaactctttctagttacacgcctccggtctacagaaatacgggcactccaaccagtctctgcttcagagggccttctccacttgttccgagttccaactccacttctccaacttccaaagatttgctcaaaagcctggggcccaaagcagcccgctccacccccttgataaggatctacagcaaagaggccgcagacaaaggcgctctccacctcagctcacaggcacttggtgagctctctgagtgacctcggcaaggggggcatagccccaggggaatgacttgggagagagaagaaaggaagaagaaagggcgagctgcagcccccgcgctgcggctccttgatgaatgcccgccagcgcttgggaggcctgacgcgrggatcaatagcgggtggcttttctcgcgggtgtttgaactcctcctgccgtgggccctggcgaggaggagccgccgataaatcacggcgctgcagccgggaaggcagtggtggcttgctcgggagagcaaggggagggaggatgctttacc

SEQ ID NO: 540651 - DNA, 578 bp, Homo sapiens
cacaagttcctaagtttcaccgcagggagggaaggaagtaggccccagtaattgtgatgatggagaacactgttaatggttcccctaaattaaacagggtgggagcttcagctcctcactggcttggcatttcattagcagtaacactacagccttgcacggagaygggaccagtatggctggatcagggaaattaattagagtctgacaatacccttaatggaaattggttatttctcccaaataaagcagctattacaagtgcaagggaagaaataactcagccctccccccgcgttcctttcatgaatgtgtgtgtagatgctgccatagcgggtgcacaggagccaggaatcatcactgccttatcccaggccttgctcattttctcacattcagcaaaacctcgatcattgcccgtggagctggcacagacatgtaaactgtctactgtgactgcagtgcagagagctctctataaaatacgtgaaaaaagtgctgagggaacagaggaaagtgtccttggttctgcttaggagggtccttaaagggagtatgcaggctgggctttgaagtat

SEQ ID NO: 540652 - DNA, 578 bp, Homo sapiens
cacaagttcctaagtttcaccgcagggagggaaggaagtaggccccagtaattgtgatgatggagaacactgttaatggttcccctaaattaaacagggtgggagcttcagctcctcactggcttggcatttcattagcagtaacactacagccttgcacggagacgggaccagtatggctggatcagggaaattaattagrgtctgacaatacccttaatggaaattggttatttctcccaaataaagcagctattacaagtgcaagggaagaaataactcagccctccccccgcgttcctttcatgaatgtgtgtgtagatgctgccatagcgggtgcacaggagccaggaatcatcactgccttatcccaggccttgctcattttctcacattcagcaaaacctcgatcattgcccgtggagctggcacagacatgtaaactgtctactgtgactgcagtgcagagagctctctataaaatacgtgaaaaaagtgctgagggaacagaggaaagtgtccttggttctgcttaggagggtccttaaagggagtatgcaggctgggctttgaagtat

SEQ ID NO: 540653 - DNA, 474 bp, Homo sapiens
atgaaaacggctcctcccattggtagcatatttgaaaaattcctaggccactttcattgtatcctgaagtaaacaggggtagctgtgtatggctggttggaggactggagagaaaggtgtaagtacagttgagcagggtctttctaccaggttctgtgctaaactttacttttttctcatgtttcttaggaaagtgttagtcccactttacagatgagaaagttgaggctgactgaaagtaacatgtccaaggccacagaaagcttcagtggcagagccagggtttgacccggaagactgtaactccagagcccacatagggaacctctctcctgctgggcytccctctgtcggctgaatattaacctcaaaaaggggtccctgaatctttgccaacacggccagtacaagctaaagcagacgatttagtgtataaagaaattctttcctggaagactatttgggttttctctg

SEQ ID NO: 540654 - DNA, 640 bp, Homo sapiens
gtggctttggggttgaatgttcttgtttgaatcacaattttggctctttttggccagaaagccctggtcaaattattttatttatctaaacctcagtttcctcatctgtaaaatggggtagatatgagtacctgggatcaccatgtgggataagtgagttcatggatactcaaggcagtgcctgttacagagaaaatgcagaacttaatgtyggttgcatcatgactgaaaggggctaggaatcagatcttttcctaatccagatgcccttccctgacctgtcctggctctgtatgtctaaagaggcaaaactgatgataaccgtaccatcattaatgcctatctgtctgtctaacccagaaggtacatactttggtatttacaaggtatttacaaggctgtggcttgcaacacttggttaaaaaaagttccacaaccagcctgcccaccttctaccgaggccctgctccatttcactctcacaccctcgaatcccctgaaatccctcctctgggggcgagaatgctaagctccatcttaaaaccaaagctctggcttccttaatcctcttacctggctctttcctctacagaattaattgctgccaatggcttttttaactccttgggcagccatggca

SEQ ID NO: 540655 - DNA, 663 bp, Homo sapiens
tgtgtgcagactggaaacatacatggaaagaggcgcaaactcacacgcaagagattataaattgagcagatttatggaaacacatcrtgagatgtccttacaacgttttcatgaaggctgtgtctatatacactccaaagaactgactgatgaattcagtgaaaacgtccattttattgttatacaagggaaataactgtttctttttttctttttcaactgcttgtcctgactccataaggaatgttaacaatatccagacacggtgctaggtactttatgtatttctttctttctttttttttgagacggagtctccctctgtcacccaggctggagtgcagtggcgcgatctcggttcactgcaagccccgcctcctgggttcacgccattctcctgcctcaacctcctgagtagctgggactacaggcgcccgccaccacacccggctaattttttttgtatttttagtagagacggggtttcaccgtgttagccaggatggtctcgatctcctgacctcgtgatctgctcgcctcggcctcccaaagtgctgggattacaggcgtgagccaccgcgcccggcctgcactttatgtatttctagcacttacaatgacccctgaagtcaggagtctccttaccattcctgccttcccaga

SEQ ID NO: 540656 - DNA, 375 bp, Homo sapiens
ggagtgggagccctaagctggcctctcactgaccatgggtggtggcccattcctccagcctcttgtatgtgtctcataaacgggtctcccaaggtctccagcascaccgttgcgaggtcgtctcattcttggggcttggactggaagggcactgtgctccctaaggccgcatggggttggggccctacaccctgagaaggggacacctggaccgtgggcagagcccgacccatagcaaggcctgggaaacagttttaggagaaacaggaagaggaaggaagttggggatgggcaaagaccgaggatggtgtggctgcaaattctaaatgcacacaggaagaacatgtcagtgtgttctgtgtggctgccccagga

SEQ ID NO: 540657 - DNA, 421 bp, Homo sapiens
tggctggaccccaagggccacctcaacatggctcgactcacagaccctctgcccagaaatgcaggggctcacagaccctgacaaactatgggtagacctcaaggaagaagtccttgtgcaaatcactggcgggcttcagaagtccagggtgcagactctcacctctcattccccaagagggaaatgaaagtgggcacgtgggtgccggccacgcttacttcctccagagctgacacaygctaggacctccctgatggctgccggagggacagccaggcagcttctctctgggacagacaagtggcaagcacacttgtgcccctctgtcccctgaccttctcaggctctcctgttacagtggccatgctggaaggagggataagcccccagatggcaccaccctccacagggcacagcaagg

SEQ ID NO: 540658 - DNA, 588 bp, Homo sapiens
ctccatccccagagagtcccacagcaacccagtagaagggtctggtggctttctgagtcgcggggaacctctctctcagtttcccttcccatgacagatgctatcctggaccccaaacccctcaagcataaccagacagatgaagtccatggcctcatcctacctaaggaccattgtctaggctggcagcacaggttgtatgacccagtgactggcactggtaatgatctcagccttcatgatatttaatattatagaaaccccacctcatgcccacaccggggctaccttcacccccagcccctcctggagggtctctccagaacaactgtaactttgtaccccacgacaaccacagcgttcactcctgccacacacagggctacctgggagaggttygttcagcagttccagcatctcaggacaccataacctcctgtccctgtctttgtccttctgaatccccagggtgaagctcagggctcagaacacagtaggtgctctgaaaacatgtctgctgagtgaactttgcagaaagggccctggggagagtgaagagagggtctgaccacagtcctggtactgccc

SEQ ID NO: 540659 - DNA, 588 bp, Homo sapiens
ctccatccccagagagtcccacagcaacccagtagaagggtctggtggctttctgagtcgcggggaacctctctctcagtttcccttcccatgacagatgctatcctggaccccaaacccctcaagcataaccagacagatgaagtccatggcctcatcctacctaaggaccattgtctaggctggcagcacaggttgtatgacccagtgactggcactggtaatgatctcagccttcatgatatttaatattatagaaaccccacctcatgcccacaccggggctaccttcacccccagcccctcctggagggtctctccagaacaactgtaactttgtaccccacgacaaccacagcgttcactcctgccacacacagggctacctgggagaggtttgttcagcagttccagcatctyaggacaccataacctcctgtccctgtctttgtccttctgaatccccagggtgaagctcagggctcagaacacagtaggtgctctgaaaacatgtctgctgagtgaactttgcagaaagggccctggggagagtgaagagagggtctgaccacagtcctggtactgccc

SEQ ID NO: 540660 - DNA, 469 bp, Homo sapiens
catgtgccaggtaatgtagtttcctcttctgtaaggggggatgagagcaggagctgccttgtgggtgtgtgaagatgcctggtatgaggaaggtgctgagcagagcagctgcagttgctctgtcagccaggctgccctccctgcattagccctgtatccaggcttcactgcacatggaagcccagccccaacccgctgccactccaggycagtggcaggccctgcccgggggactgggaggtggagtctatcaagagagagctgggttgggagatggatgtgctgggggtggccttgaagactttgaagagccagcatattccagtggtctctgaccttgtcccctgtgtgcccctgagcactggtgtgggagataagagagggagagagagaagtggaggaggcggaggaggaagacaggtccagggcaggaacacacacgccaggacttggggcttcccttcccaga

SEQ ID NO: 540661 - DNA, 616 bp, Homo sapiens
gaggtttgggggtaggtgttgtagcaggagcttcctgtgggtcaggacccaggtggtgttggggctggtcttctattagcacagaccttcaagatcagggattgggtgtcctgggcaggcagagcctggaggcaggggcatggctgtcatgacctctttgaagaccttcctgcctggaattctctccccattccctccaccctgacccagtggccgtcatcgtaccgtggtaagtggcagcgggttgggactggaygtctatgtgcggcgaagcctggatacggggtgaacacagggacggcaggcctggcccagccctaaggctgatggtaaagtaggagctgaggtggaagtcctgagccagggtgggaactccagcgcgggagggctccctggcacaaggcggtggcaccgggagtccagaccagagtcctgagtcatccgttgggagggatatcaattagggagcacctaattgacacctgtggatgcttcagctgggctggtcagttcccctctcttacccacggatcccatctcaggaaaacagcagccagccatggcctgggctgggcagcgctaggcataggggctgctaccaggctcttctggccat

SEQ ID NO: 540662 - DNA, 531 bp, Homo sapiens
ctgagcccagtcagtgctaagaactgcgagaaaggatgatagagtgaggttgtttcacaccactaggtctggggtgatttgttacacagctagagataaccagaactcctgttgagggcatgcagtggattcctgatggcgtttgacaggagccctggtcaggcacctccttcagcctgggctctgttcatgtggtaggtctacagaaccccccaaacaccatagccctgtgggaaktcattatccatccccaccccacctcacctctccttctagacacccatgtcagataacggcatgaccacccacccaggcatcccagtacaaactgggtgtcatcttgtcatatttggctggtgcatccctatgtaattttttttttttttttttttttgagatgaggtctccttatgttgctcaggtcggtcttggactcctggccttaagcagtcctcctgcctcagtctcctgaagtgctgggattacaggcgtgagccactgtgcacaaccccccatctaatttactcctat

SEQ ID NO: 540663 - DNA, 599 bp, Homo sapiens
gagcccagtcagtgctaagaactgcgagaaaggatgatagagtgaggttgtttcacaccactaggtctggggtgatttgttacacagctagagataaccagaactcctgttgagggcatgcagtggattcctgatggcgtttgacaggagccctggtcaggcacctccttcagcctgggctctgttcatgtggtaggtctacagaaccccccaaacaccatagccctgtgggaagtcattatccatccccaccccacctcacctctccttctagacacccatgtcagataacggcatgaccacccacccaggcatcccagtacaaactgggtgtcatcttgtcatatttggctggtgcatccctatgtaattttttttttttttttttttttgagatgaggtctccttatgttgctcaggtcggtcttggactcctggccttaagcagtcctcctgcctcagtctccygaagtgctgggattacaggcgtgagccactgtgcacaaccccccatctaatttactcctatccattcattcctctagcaaacctttatggagcacccactggtgtcaagctttgtgctaaatggacctgcc

SEQ ID NO: 540664 - DNA, 636 bp, Homo sapiens
tcctggtctcgcctggcgccagcctgacccgctcagctcagcccctcctcaaggctgtccccacaagccatctcctccaacaaagggtcagtgtcctcgagagggcaggtgctgccaggcgggaccacagccaggcctgctggggagttctgggcagtcagttctcagaggagtgaccagggcctggctatgttgaggacagggctggcgggatctttgttgtttttgttggttttgagccactgcccctaggaagaggtcaaggtgagagaggcaggcagaggctagggctggggagctgcggtacwttagcccagttcatggctagagtccagatgggggcctctcaggaggagtagaggcctactgacctccctgccactatccccatgccccacctcaagaccctaggccccagcttgacctgagacccggcaaaaaagagccagaatccaccctattttcaagccaggaaggagtctaccctttagtgtgacagcttatacccacccccattttcctctctgcccactccgtcagcctgttgaaactcctgctgaggcccactgcctgcctctctgctgccagactgggccacctgccagtcccacagagccagccttcaaacccccacag

SEQ ID NO: 540665 - DNA, 655 bp, Homo sapiens
gagtgctgtgaaaaaaattccattgccactgctacggggcgagacctgtcatgtaggactctgcttttttatgcgaggagggcgggggaggcccctccagcgatcttagacaggaataaatctacgggctggccaggctgagaagtctagggcagagggtatccaggcaggggaggggcaagtatgagcagacagtggtgtggtcctgccctccaggctggtcgcctctgcaggagcccgtcagacttgaccagcattgccaagagctcagccgggcaaggcacagagcacaagacttggctgccctgatctccgctgcctgcgggtcatgcagccctccgcctccctctgggaagtcctcacctctgggctgggctccttgcatccccagaggtgcctcctcagcacctccatccccagttgccctggctgctagggttggactggccactcagctagggtacaagtctgccaggtgkgactgagaacctttgccatttgctgtctcctgtgactaagacagacacaagccagacagaggcatgaggctctttcctgttgcccggcccttctcccaatttccctcccccaacacacatacgcacacacacatacacacacacacaccctgtgccctgggtagaggcagtggcac

SEQ ID NO: 540666 - DNA, 691 bp, Homo sapiens
gaaataaaccgtccctccccacccctgcactttttcgatttaacaagcctgctggaaaacaatagtgatttccgcatcgatcataaacagaagtgattaccatacaattacagcctgaaccatcagtctggatgcaatcacagagccgcattgtaaatcggaagacaattgcctgcagaattacccccaaattggtttaagtggcaacaaaggagtgttggcattttggtattttggaaagggatggggggaatgcgggtgtcctggtggcagagggtccccactgggagccccccagggccccttccttggcattgaggaggctcttgctggggagagctgcctgccaccttcctccccatgattttcccttcaattactgctccctgcccgtcttggcacagcttgtcataaactcatttatactaatgtgtgagtggctaagtgtgccttcgaacttggccggcagaggggtgaatctgatggagggaattctggggggcctcctcagctccccaatatccccctttctccattcccatctcacctgtggctcttccatgtcaccccatccctctatgctcctggcctggcacccacccsacagtagccttccccactatctcccagccctcggtggactctggccagcatctcccacatcccatccagagcagccccctccctcctg

SEQ ID NO: 540667 - DNA, 243 bp, Homo sapiens
atgtctatggaagactaaacatgtaaatgcttccgtatgaatccatcaactccactagaaagacatcatagaaagtcaggaaattggccaggtgcagtggctcacacctataattccagcgctttgggaggccgaggcgcgtggatcacctgaggttaggagttggagaccrgcctggtcaacacagcagaaccccgtctctactaaaaattagccagatgtggtggcaggtgcctgtcatct

SEQ ID NO: 540668 - DNA, 607 bp, Homo sapiens
tgataatgacaaggtagtctgggwgcacttattttaggacctgatatgatctggtcctggactaccttcttcaacatatgtgtcttgttctctttcctttccccttaagtccggcagaattggattccttgtatttttccaaacactctgtgccatttaaagacaccatgcttttgaacattctaatctgtctggatgccctctgcctttaaaagaaattcttctagaacagagctcagccattgtttcctttattaatcttcagccggctaggtctagatacttaattaccccctcctctgcgctacttctgagccttatacttccataaatgcattttttcccattgaaatgtatgcgacacatgtgcctctgctactgggccataagctccttgaagacggagctgttagtcatctaatcccaatgccagcactgcaccagacgtatgacagatccctcttcaactctaaacaccatctcctatgccttacacattggctgatataccacctattagatatctattcagatcaacacacatctttcttcccataattaagaaggcctaccggttttatgaactattaggaatactttcccagca

SEQ ID NO: 540669 - DNA, 475 bp, Homo sapiens
ctcttaggacctgtgtgataatgggcaagttcttagaattctgagcctcagtcctctctctgaaatatggggataatggtagtgtcaatgtcagagaggtgttgccagaatttgcrttaaggggaccgaacaactgccctcgttggtccaggactgagaggattctcaggacagtccttggccaaacaggatgagttggtcactttaatttaataagacaatctatgtaaagtgcttggacttggctcattgaagtgctcttagatgctccaatgatagtatctcttcaacaacatttatttagtaagcacctactatgtgttcaatgctgtatgatacactgggggtaaaacatagataaagccctgccctcaaggagtttgcaggtgttcacggaatgctcagagcaaatccttggggtccaaccatgacagggttaatagtggggctgtgtctaaatgggaggacaaaggtc

SEQ ID NO: 540670 - DNA, 456 bp, Homo sapiens
tgaatcaaacaatactctcataccactcatagtctaccctccggctctggtgaatctaactcacaatatttttttctttttttgagacaggktctcactctgttgcccaggtgagagtgcagtggcacgaacacagctcactgcagcttcaaccccctgggctcaagcaattctcttgcctcagcttcccatgtagctgagaccaaagtcattcaccaccaggaccagctaattttttttttttaaatttttcatagaaacagggcctcactttgttgcccaggctggtctcaaactcctgggctcaagcaaacctcccgcctcggacttccaaagtgctgggattacaggagtgagccaccatgcctggcccaactcacaatactctcataccattcatgatataccccttagtccaccaaacttctcaacaagttcaaaaagcctccttcgcca

SEQ ID NO: 540671 - DNA, 601 bp, Homo sapiens
ctgtacccattcacagtttctctccaatccctgccccaagcctccagcaaccactaatctactttctgcctgtgtatgtgtttttaattttcataaaattactatagaacttgtcctttttattacattttcacacaacactctgtgtaaaatctgttcatgttgctgaacgtatagctggtttggtgttytaaatgctgcatggtgttccatagtggatagccagaatgttatttttatccattcctttggagatggacatttaagttacttcccattactactgatagagccacaggggaatccttgaccatgatcttactggatctgtgaggcaattcctttaggatgtagctgccatgggactgttggaccacagtgtatgcgttccctcagaattgcctctccaccagtagtgcctaaggttttctgttttcctacatcatagcctacatttggtattgttcacttcccaatttggctaagctaatgggcatgaagcgttatctcattctttcagtttgaatgtccctgattcctaacaactttgtgcctctcttcatatatttgttagcctgtcaggtgtgaaattgggagctaa

SEQ ID NO: 540672 - DNA, 540 bp, Homo sapiens
tctactttctgcctgtgtatgtgtttttaattttcataaaattactatagaacttgtcctttttattacattttcacacaacactctgtgtaaaatctgttcatgttgctgaacgtatagctggtttggtgttctaaatgctgcatggtgttccatagtggatagccagaatgttatttttatccattcctttggagatggacatttaagttacttcccattactactgatagagccacaggggaatccttgaccatgatyttactggatctgtgaggcaattcctttaggatgtagctgccatgggactgttggaccacagtgtatgcgttccctcagaattgcctctccaccagtagtgcctaaggttttctgttttcctacatcatagcctacatttggtattgttcacttcccaatttggctaagctaatgggcatgaagcgttatctcattctttcagtttgaatgtccctgattcctaacaactttgtgcctctcttcatatatttgttagcctgtcaggtgtgaaattgggag

SEQ ID NO: 540673 - DNA, 484 bp, Homo sapiens
tggcacctaagcacctacatgtggcctctccactatggtggcctcagggtagtagtcagacttcttacaatgttcttgcagcaaaagctacatgcctttatgacctggcctcagaagtcctataatgaacattcatttcccattctcttttggttgaagtagtcacaagcccccccagattcaaggggaggggctgtagatcacacctctccgtgggaggcataccacaaaggccatgttttaaaatcaccacactggcattatttcctgattctagatgagagatggtaattcagtggagattaaatgatttgtcaaggaatagtaactgggatagttagtggggaagggggcttaggggaggagaatgacttttaccataattctgmctctaaattcttgctctttcaattagtatatattatatcagctaacatatacttgctaatatgtaaaagttcaaagaaaaaaaactaactggttt

SEQ ID NO: 540674 - DNA, 614 bp, Homo sapiens
gtgtttacagtgaccacttcaatgccaaatagggtctttcctctcatcataaaaaaagattttacatattgccttgtggtgggaattatcagarggtcccagagcttgatatcatagtccctggaacatggcaaggtagataccattttaacatgagtgaaactaaggaaatgacttgcttcaaatcacccagtaagttggtgaccggccaagatgcttcctggtgtcctggctagttcacacagcacaataaaatacagatttcagatccatcatattctggaatgcaatttctaagtggaaatagtggaacaatttacagtgtaattgttacagtgtaatagcccagccagtggttgaaatgaagtacctgcccagtgtgaagagtggcagaacttgagttggaggagatctgtaaaattgaaaagaccctggtacattattatacttaagacaatgaatctcaatcaaggttgatgaaggaagcattagtgttcagtagaactctggatgggtgagggacgggctacaggactttggcaaaccttagttctctaaaggaaatctccatcatccatcacattagggactactcctgggattctaatatgtta

SEQ ID NO: 540675 - DNA, 551 bp, Homo sapiens
ccaagagtgtgctgtgaaggttcagaggaaaggggagatgcacattttaaaagactttcagcccaaaagatcaaagcgaggatgtgttttcctttttaattaaccttcagttaaccagatgacctagttaattgtaacttcccagttaaaggaaggttaattctagttcatctgtattgattattataaagtccatgataacccaatgtcagacagagatgaaagtgattccctcctgctgtgcagaacccccaggaagtgctgagacttctgatccaactctgggtggtgtcatgtgcccctgagagtattttcaactttccccccttttccatgactgtggatattcaacacaacaggagattagtgtcaacacaatggaaaccctacccataaagaggtaagcttattcccacccttggtttaactctgcagggtggagcaatggtgggtacagtgggagaaaaccagaggtagggaatgcctmgtttctcctttggcttattcctctccaccttgtgtctggtctctatctagagctaatcactgtg

SEQ ID NO: 540676 - DNA, 637 bp, Homo sapiens
cctattctgtggtatttcctctgtcactcttgcttttgttccawatcattaaaagaagtagcctcagaggtctgggatttttgtagaaagaagttccaggtaacttctggccctgtaagcacagactttggaaccaagggctcttattcagtgctcgatcgtccattcatagtgtgcattgagatcaacaatgatgccattttctcctagaatataccaaagtacctaaaaattttttttactttgcaaaatgtgctaagtggaaatattgatttctgatccagatacattaatttacatatatgctaaatctcaaccgtatcttatatgggaggaaaataaatcctagagattagtagggtcttgaagtctaagaaagaattgtcattgtctgatttgactccccacaatcactttgggagataggcaggaatagtcattgaaaaacaacagattaaaaaacaggttctgagaaagtcagtcagtgttgtatgtgtattaggtaggcagagggacaaggactggaatctaagtcttagatcctgctctccacctactgcctgggaccttgctgtacctctgaatatagacattttatgccccctagagggctgtgatttatttgcattttgaaagc

SEQ ID NO: 540677 - DNA, 521 bp, Homo sapiens
acagagtttcagtttgggaagatgaaaaagtcctagagatgaatggtggtgatagtagcaggacaacatgaatgcatttaatgccactgagttggaagaatagttgaaatggtaaattttatgtatgttttactrtaataaaggaaaagaaaagcagagcctgccctgaggataatccaaccctccaaacccttaatgcctggggccacccaggcactgatccttcctacccagaccttaaaaaccgtcaccctcataggcaacagggagatactcaaaggctttggaggatgggaatttaccccggccggacaagtttaacacatttcataaaggagaaagaaagggcctgaagagacctcattttccaagactgaactcataactccaacagtgctgatataagccaaagtgcctaagtacctagtgtatctcactggtaggacaaaggtgacactttcttcctacctttcccaggcccttctgaagtatggggacaggagatggtccctcacctccag

SEQ ID NO: 540678 - DNA, 521 bp, Homo sapiens
acagagtttcagtttgggaagatgaaaaagtcctagagatgaatggtggtgatagtagcaggacaacatgaatgcatttaatgccactgagttggaagaatagttgaaatggtaaattttatgtatgttttactataataaaggaaaagaaaagcagagcctgccctgaggataatccaaccctccaaacccttaatgcctggggccacccaggcactgatccttcctacccagaccttaaaaaccgtcaccctcataggcaacagggagatactcaaaggctttggaggatgggaatttaccccrgccggacaagtttaacacatttcataaaggagaaagaaagggcctgaagagacctcattttccaagactgaactcataactccaacagtgctgatataagccaaagtgcctaagtacctagtgtatctcactggtaggacaaaggtgacactttcttcctacctttcccaggcccttctgaagtatggggacaggagatggtccctcacctccag

SEQ ID NO: 540679 - DNA, 521 bp, Homo sapiens
acagagtttcagtttgggaagatgaaaaagtcctagagatgaatggtggtgatagtagcaggacaacatgaatgcatttaatgccactgagttggaagaatagttgaaatggtaaattttatgtatgttttactataataaaggaaaagaaaagcagagcctgccctgaggataatccaaccctccaaacccttaatgcctggggccacccaggcactgatccttcctacccagaccttaaaaaccgtcaccctcataggcaacagggagatactcaaaggctttggaggatgggaatttaccccggccggacaagtttaacacatttcataaaggagaaagaaagggcctgaagagacctcrttttccaagactgaactcataactccaacagtgctgatataagccaaagtgcctaagtacctagtgtatctcactggtaggacaaaggtgacactttcttcctacctttcccaggcccttctgaagtatggggacaggagatggtccctcacctccag

SEQ ID NO: 540680 - DNA, 521 bp, Homo sapiens
acagagtttcagtttgggaagatgaaaaagtcctagagatgaatggtggtgatagtagcaggacaacatgaatgcatttaatgccactgagttggaagaatagttgaaatggtaaattttatgtatgttttactataataaaggaaaagaaaagcagagcctgccctgaggataatccaaccctccaaacccttaatgcctggggccacccaggcactgatccttcctacccagaccttaaaaaccgtcaccctcataggcaacagggagatactcaaaggctttggaggatgggaatttaccccggccggacaagtttaacacatttcataaaggagaaagaaagggcctgaagagacctcattttccaagactgaactcataactccaacagtgytgatataagccaaagtgcctaagtacctagtgtatctcactggtaggacaaaggtgacactttcttcctacctttcccaggcccttctgaagtatggggacaggagatggtccctcacctccag

SEQ ID NO: 540681 - DNA, 474 bp, Homo sapiens
tgctgttcgcagatggcctcactgagctctctgttaaataccatggctactttcaggttctccaattttcagacccactggaacacccttttgtgttgctctgcttcctcccacagagacgatgcagcttatgtgactactggtgctgtatcctcatgagcttgtattttggggtctgtggggaaaatgttgtgacctaattttgttgtaattgtccatggtaacttggttttgctttctagttgctttatctgtttygtttgtttgtgggaattcagagagattaacaaactgtgcccctgcctccatcgtctccacatttctctctctatattattcctgtttggaactttttgtaacacaactggaaaaataaggcatgcaggtgtatctgattggttgaggttaaaacgcatgtttttgccgtagttgcagaggaaggaggctggcttccaccttgggaaagtggggctc

SEQ ID NO: 540682 - DNA, 400 bp, Homo sapiens
aggtttatggaaaaccagctggctagcactggggaaaccgtggccagccgaagcctgaaggggcaagaagaaagagtccctcaagtgcagggaagcctcctgatggaagcattggtaaggagcagatcctgtgccaatctgcagcctggtagggagggactcctccttctctccatctattctcccttctcctcctagagcctccttctagtcagccctaaggggagccagaaggaaaatgagccctttgatagagttcttaaaggccaggcagggcctggggctggagcaggatagagagtgtgcccggaggggcagagggtgtgtccagcacctgcccaagtgtgtggccctgcagggtgccaacttscacatgcccacgaaagattcctcaagtcag

SEQ ID NO: 540683 - DNA, 562 bp, Homo sapiens
ctgctgactgaggaagcgatggctctgtgcccaaggtgggctttgtgaccaggggaagtcctttccagaggaagcccttgaagccaagtatcctrtaaggggaggattctgtgtcttctttttcttactttccttttttgagaaagcctctagactcgtaccacccgagtcactgtttatttagcgctcttgcaaggctggctcttgtcacccgtgtctgagcctgtccctgcattagcctcttccagggaagcctggaaatttccatcactcctctctaatgcaaccctactctgccccagccagactgccctgggaatgtgttagcttgacagcagagagcagtcgttctcattcttgactgctcacttgaagcacctggatggattttaaaagttcagatgcccagatgatacatggtgcagtcaaatcagaatctctaggggtggatcccaggctcgggagtttctagaactccccagggtgattccaatggctgccaagcttgagggtcagcatggggcttctgagtgcatccagattgcctggactcgattctcat

SEQ ID NO: 540684 - DNA, 524 bp, Homo sapiens
gaagggactaaaatcatattctttgaatataccgctaagcattatcttttatgtattaaaaactaaatgaatagggtctcatgctcttgtcccaggagggcattcctgggcctcatgtgaagaacaawggaataattacagaacaggaattttaaataggctcccaaggccctttgcaattagacaatcaaagaaagcacagagattacggggtgaggaggaaggcgcatccacagcctagaaagatcaagagccagcggtgaatttcaaggccaaggtttatcatgaagtttcttgaaaagtttcctttccccttcagtcatgtcccagacgtgtgtcttcctttctttgtactaaggtgaggactcttagaacgtacgcaaactccaagagtctctctagggacagcaagcggagcacacaccctgtacctggatgctgtagtttcctggaaagaggcagccaaagggcagaggaaagagaattaggtgagccagtcatcaagcctgcagcagaagacaaag

SEQ ID NO: 540685 - DNA, 555 bp, Homo sapiens
gcaccaaaccagggaggaaatccatgtatccatttgcttcttaaacagattttcaaccatttctctccctcacttccagaagtacctgaagccacaaagcctggggctctggatgggtcttaggtttccgcaytgctggcttgggattcagttgtactgggtctgctaagttctttaccatttgaccctcgactttccagtttcaaaaaatgggttactcttgccttttatcccattctattcatttttttagacttacaaacttaacaactacaacaacaccttaaaaccccttcactgtaattttagcatggtgacataagggagcttaggtgaatacatagatttaattctccatcttcaaccagaagtcaaaagtgtttaacaaataccacttttgctgtctcattctgttcatccacaacactcagtggttcagaagttcacactacaatctaaatgttccaaatggcttctatgctactgtaacatactactgatctacgtatggatctgaatacttactgtccttcacaaaccaggaagcccccttcg

SEQ ID NO: 540686 - DNA, 551 bp, Homo sapiens
tagtgtttggaacggacgttacctgctggtttgtgcacaacagtggaaaaggattcattgacgggcattacaaggattacttcgtgcctcagctctacagctttctcaaacggccttaaaggtttatagtttgggaaattatatatattaatatacatctttcccctgtcacttttgcagatattcttcggtttgaataattaaaatgaaccagatatcagggtggttaattaaaatgaaccagatatcagggtggtttataaagcctgtaaacacacctaagaaaataaacattttacaaatgagcttttaggattttgttgcatttttagatgccgaagtgtgtggatcaaggtggtgccgagacaagccagcgtctggaagagccttaaatttggtgtttactgtgatcatttattaatatcttttctttcttttttttgagacagggtctcgctctgttgcccaggttggagtgcagtggcgtgatcatggctcacttcagcctcaagcygggcacaagcaatccacccacttcaacctccctagca

SEQ ID NO: 540687 - DNA, 563 bp, Homo sapiens
ctgccaccggcttttgtaaataaatgtactggaacccagccatgctcagttccttcctgcactgtccatggctgccttctcactacaacagcagagttcagttattgtgacaaagacatctggccgaaaagcctaaaatatttactatgtggctctttacagaaaaagtttgctgacccctgccctgtgctagactacctagaagggcgggcaatgactactgagtgtttcctggtgtatttacactgtactggggacgaaggagagaggttgataatctctattctcagaaaactcacaatgcagcaagtaaaagaaaaatgcakatccagctaacatttaaactgtgacaagtgggctaagacaggaaaagaaacagttttatatagcgaataaggaaccgttaaatggagaaggattcatggagaagcaaaagtttattgatgtgaaacatataatcaaaatgaggctttcctcaaaaaacacaatcatctcataacaggcaaataggaaaagaacagttgctagctgggcacagtagggcgtgcctgtaatcccagcta

SEQ ID NO: 540688 - DNA, 548 bp, Homo sapiens
atccccactttccctgctccaagactctattctttgccagccttagttgtgggcagcctgccaggcatgatctartcagtgaagcacatgagtcatgagaggatgactgactccctttcaggttctcttagtacttggctcctggaaggtgctcctccttgataatccttcctcccaactgcattgacatagatggagtctttctgctattgactggtctgattggacaggcaagccatgaagatggagagggaggaagctcctgaatggaatgtggctgccggaaaatcagccccctcctaatacactgcaatgaattaaattactctctatttagtagcttttcctcatctattggaacatgtacaattgctatctgctatgatcatgtattcccagcctttcaggtgggataggtccaagcactcattttgtttggagcttcacacagtatgaatatagcacagatttacctagggaagaagttgacttgatgctagtgcctgtgattcagccacagggaatatttatacagcaaagccagccag

SEQ ID NO: 540689 - DNA, 497 bp, Homo sapiens
  misc_feature (1)...(497): n = A,T,C or G
tccccactgtatttatcttcttccccctttcctactagctcaggccaccagatacttcactttcttttatcaaagtctaaaatatttgggtgctttaaaaataggttttcagaaatgttaccaattaacnctatatatatatatatatatatatatwttttgtgacagggtctgctctgtcacccaggctcaagtgcagtggcacaatcatggctcactggtgccttgacctccctgggctgaagtgatcctcccgtctcagtctctcgagtagctgggaccacaggtgcatgccaccacacctggaaaatttttttttttttttgtagagacaagatctccctgtgttgcccaggctggtgtcaaactcctgggcacaaggatcctcttgccttggcctcccaatgtgctgggattacaggcatgagccaccgtgtctgacctaattaatactattattatctaatcacattgattttcagtgggggctttctatt

SEQ ID NO: 540690 - DNA, 651 bp, Homo sapiens
gctaaatcaggggatgagatgaacagaggatgagggcctgagcagctcagtttccagacagcatggagggctggcagttctgactgctttatgcatatgcacttaatttgcttccctggtccttctaagtggcaactcattaacacctccaggctgagggctcacattttatactctagttgaatatgcagtagcataatggaatgtctactatggctgcctctctggaaaagctgccctatttattcagccaccctggagaaaagtggcagattttttcttgcagtggcaagaaatacccgtatgctgcttttaaacaccttggaggtttaactttttaaatgttattcatttatgctactttgtaacattatatgttatattaatgttacatatgtaatgatacatgatattgggaggacagatattattattgtcctcacttggcaaatgagaaaaccaagatatagagatgtacaaatgatttgcctgcagtcacacagctcaacaaggatgaggyagggaagtctaccttgactgtaaaccttgagttctctctaccacatcacataattatgaatttacaattatatttgcttgtttccatgtgagtctaacccagtttagaaccagcagaggaacagaaagatg

SEQ ID NO: 540691 - DNA, 683 bp, Homo sapiens
tttagaaccagcagaggaacagaaagatggtatggcattgctgagagtctgtgaaagaagccattaaggtayggaaaaattgagatgtatgaccaatgacattgaaaacattaaaaatttcctagagtgagattcttctccagtaagaagcttggatgatctgagccccggtactgggagtgggatgcagagctgagcgctacaaatgtagttataagccgcagagtttccttcatcacaggacactgatcacgggaagtttggggccgagtgagaaataggctttatctcttatgactacattcagcaagtggagaatgattctggggcaaagtccaggtgcagcaggaaagagtaccatgatcaatttgcagtgtctgtcgaggactcaggagggctttgaaagctgtggctaagagtgtgtcatcccaaggcaggagtctgtcagatgcttcctccaggatgatagagctctctgccctccctccacttgcttaaaagcaaaacatagatttacaaaggcaaaagataccttgtcccctctccaccagggtgaacacaggttaaccactgaagacagctttagaccttcaccacctggaaatgataccggagggatttatattaacaagctttacaaaccagcctttatctgccatttgtttacctttccgcacattgcc

SEQ ID NO: 540692 - DNA, 285 bp, Homo sapiens
taaaagtagagttaaaatgttaagtttttaaaaattaaatagttcaytgatcccgctataccatactgtagaatataaacatggaatacgatgagaataaaaaaaaatgaacctcaaatcactgagctaaacagaattaattatactggaagaatttgcagaaggctgaattgtggcaacttttgcatcttttcctcccccattatctctatcacctcctccaattaaattaagttccaattaattaaaatggcaagcatttattgagtatctaatctattcagt

SEQ ID NO: 540693 - DNA, 618 bp, Homo sapiens
cactcatgtcccagaatcctcagatttagctttctcaagaaaactttccatgaaacacgacttgccaggacaaggccttgcggaggctccttgtgtacctgtggccctcatccccagagtgctgtgctgttaccctgtgggttactgtgtcgaaatggaagcggtgacgttcttccttcagggacattccttttgtttttacctagcagcatacaccaataatttgtaagtaggaagagttttctgttcatttttttcttaatggacagatttagacagcccaaaggtagggctcggtatgtgctgsggggaggggctcagagggccggcatgagggaggatttgtgcccaaaggcttctcacagactccgtaactagatgaggaaatgagccaggatccacaagactcctcagcggccaaatcccgagttctccttctgtcaatcatctgcactgcagagacttagagtacactccggcagcaagaaggctgctctcccagtgctcctgccttgaccatgccctggagttacctggaagctttattagagactgtaccctctgggccccatgccagggctgggtgcggccggggctccatgattttcagtcactcct

SEQ ID NO: 540694 - DNA, 499 bp, Homo sapiens
agccatcttgatctctatgtcagcaagtttagcccaattgcatcatgccatacttgatgctagttaaaacctgattatgtgtcccagttttagttgctgtgtttctaccctgctattatcacttggtctcccacaggtaccttgtttctgtatctgtatcttggccttgttgtcctcagtggctgcctggataacccartctatatagaatgataactcttattttcctttttaatccttaatcatgtggagacacacattttattcctgagccaaagcctggaaactccactactattatcaatactgctagtactactagtaataggattactagctagcattggctgagcatttatgtgccatgcattgagataaacacacaacacacatggccacacttgattcagctatccagtgagatagacttttttatgcaacctttaaaaatgatgaaactgaagcaaagagaggataggtaccttttcttagatcacaa

SEQ ID NO: 540695 - DNA, 696 bp, Homo sapiens
cctgaggcatcccagctaaatgtcagatgcagatgcagaggttctttcagggctaagaagaaaaccttgaaaagagtggggaaggggtgttagggatatttgcatgtgagtgggggtaatgatgccctctgaatctaagctgcaaagttatagaagttataatatatataatagtaatatattataatatataataacaatgtatgcagacagaggaaaataatggaggagtcagtgggttagagatcttatagaastcctagaattgtactagtggggtgccagagaaagtgagctaaaatgacaatgaaaatgagtccttggaatctagaggttagaagtggcccattttctggtgatggcaaagggcaggaaatgaccatgcagtgggtggctggagtagtgtggaggaaatgtcagtgaaattgagggttggagtgtgggatgactcacccatgtggaactttcagctacaaatgatgtcatgagttgggtagagaggaagacaatgagaattttttttaaaattaaacttgagaactctttattatgtaagaaacagctataactctcattttcttggttgctaggtgtgctgtccaggatctggaaagaaaagtgcacacaacatctaaatttttctcccagtgggagattctactgctggtattagaatcacaggcagacattactgca

SEQ ID NO: 540696 - DNA, 518 bp, Homo sapiens
ggataacagtctcttgattccccagaatttcgagacgtttcagatgccaccaagctgaaactcctgcctcatgcggcccttgttcctgtcactctctttcttctcttctctcagtctccagcttgcctgctactcctcctccacgtggccaatggttgtggtatctgcctgcttcccctctggcttgtctgatggtcccacgaagaggctggaaggcgaacttttctgggactgtctccatggggacttggaatgtaatagacagtcttcctgctgcaggcaggcaggcaggcaggcaggaggggcaggagagggaggcaaggtctcaggtccctttcctctcttgccctggagtgaactgcatgccccatattctgggaggagagaattcagagcaggtgtttcctcctctgaraggcaaaacattcctctagcacttcatcttttctctgccatctctgacatttgctcaccactccccagaaatgtattccctgtggagtaaaatctagagttca

SEQ ID NO: 540697 - DNA, 592 bp, Homo sapiens
tagccaagacgtccttgaccactggacactaaacccttaactccccactgggaccctttgactcagaccccaagcttgcagttacctcaaattttktgttgttttggggggataaattattgcagaggaaaaacataaggttttttctcaaatgaagactcaaactgaaatccattaaatcccaacatgagctaaatctaagggtggaaagaggaatcaaaatctaaaagcctcttggactttattgaggcttattgaagaccttattgagataacatcatcataccaagtttaaccagaatctcaggcaaattagaaaggtgtaacctttagactaggtgcctgagctgtgcctagactaatgaaatcttctgaattattagaccatggcctgcacattagaccatggggcttcatgtgggtatataaggtcatgattggctgtgcagataagttgtcatgggagggttggatgtctggccaagaagcagaaggaatggattgtgacttcttgacagggataccttgaactgttatacaggttgttcactgcacaaaagtgcctgggcaaggaggcaaatgggaggctcac

SEQ ID NO: 540698 - DNA, 650 bp, Homo sapiens
ctgcagaatttcttcccaagcagtaaggccaatggcagataaggaatgcaacataaatgtctagctacatgtatctcaattatgaccatgccagagggagtaataataggcagctatgtgtccaaaatgatctcagcgcatgatctcagagtttccctttgtccagataatctcttcccctatgwttttattctttattctctttcctctattcagatctccccccccaacaaaaaaaagcttattaaaatatcatcagcatgaagagggagtaccatgtaaggggagcgaactggcagtgtgctgtggacgtcagctccacatggccagattccagctaagatggttgcttgggtgactcctatggcaaaatccagagcacacctttcagccttatgttttctagggcttcatatatcatagtcaccctgtagtgctctgttaagacacatactttgtacattacagtatgattaaatgtagcatgcaatatatttttgagcatataaaataactaaacatttataaccttgatgattatattttatgcatatactaacatatttttttcccaaatggctgccaaatctgctcctctccatgaggccatcatctttattgtcctgctaatctctttcatacttacccat

SEQ ID NO: 540699 - DNA, 650 bp, Homo sapiens
ctgcagaatttcttcccaagcagtaaggccaatggcagataaggaatgcaacataaatgtctagctacatgtatctcaattatgaccatgccagagggagtaataataggcagctatgtgtccaaaatgatctcagcgcatgatctcagagtttccctttgtccagataatctcttcccctatgattttattctttattctctttcctctattcagatctccccccccaacaaaaaaaagcttattaaaatatcatcagcatgaagagggagtaccatgtaaggggagcgaactggcagtgtgctgtggacgtcagctccacatggccagattccagctaagatggttgcttgggtgactcctatggcaaaatccagagcacacctttcagccttatgttttctagggcttcatatatcatagtcaccctgtagtgctctgttaagacacatactttgtrcattacagtatgattaaatgtagcatgcaatatatttttgagcatataaaataactaaacatttataaccttgatgattatattttatgcatatactaacatatttttttcccaaatggctgccaaatctgctcctctccatgaggccatcatctttattgtcctgctaatctctttcatacttacccat

SEQ ID NO: 540700 - DNA, 650 bp, Homo sapiens
ctgcagaatttcttcccaagcagtaaggccaatggcagataaggaatgcaacataaatgtctagctacatgtatctcaattatgaccatgccagagggagtaataataggcagctatgtgtccaaaatgatctcagcgcatgatctcagagtttccctttgtccagataatctcttcccctatgattttattctttattctctttcctctattcagatctccccccccaacaaaaaaaagcttattaaaatatcatcagcatgaagagggagtaccatgtaaggggagcgaactggcagtgtgctgtggacgtcagctccacatggccagattccagctaagatggttgcttgggtgactcctatggcaaaatccagagcacacctttcagccttatgttttctagggcttcatatatcatagtcaccctgtagtgctctgttaagacacatactttgtacattacagtatgattaaatgtagcatgcaatatatttttgagcatataaaataactaaacatttataaccttgatgattatattttatgcatatactaayatatttttttcccaaatggctgccaaatctgctcctctccatgaggccatcatctttattgtcctgctaatctctttcatacttacccat

SEQ ID NO: 540701 - DNA, 650 bp, Homo sapiens
ctgcagaatttcttcccaagcagtaaggccaatggcagataaggaatgcaacataaatgtctagctacatgtatctcaattatgaccatgccagagggagtaataataggcagctatgtgtccaaaatgatctcagcgcatgatctcagagtttccctttgtccagataatctcttcccctatgattttattctttattctctttcctctattcagatctccccccccaacaaaaaaaagcttattaaaatatcatcagcatgaagagggagtaccatgtaaggggagcgaactggcagtgtgctgtggacgtcagctccacatggccagattccagctaagatggttgcttgggtgactcctatggcaaaatccagagcacacctttcagccttatgttttctagggcttcatatatcatagtcaccctgtagtgctctgttaagacacatactttgtacattacagtatgattaaatgtagcatgcaatatatttttgagcatataaaataactaaacatttataaccttgatgattatattttatgcatatactaacayatttttttcccaaatggctgccaaatctgctcctctccatgaggccatcatctttattgtcctgctaatctctttcatacttacccat

SEQ ID NO: 540702 - DNA, 515 bp, Homo sapiens
tccttaattcagcatacagaggattttaaaaatctttaacaaagatgcagatgaagctttgtaactcgacatacgaagccatgttctaaacaagctgctttctattttaattaaatcctaattagaagtcataatttaactgagctgcacaaatactccctatgagctatgaaaagcttactatggctgttcaaaacccatgggtgttaagataataacaaagctgtttcacctggatgtgatgagacaaatatagaataatttcttagatgcaagagtaacttcctgacatatttcataaaatgggctttctgtaggctatwgagtctgtcctatatttaatccatttttgactctgctcacagttatttaaaaacgtggccttgcaggtctagctgctttccttaggatctggtggattttccttcagcagatatgctccaaagcccactgagcagccccacacccacccctctgtcaggagaaacagtctggggaacatgcccctaagccag

SEQ ID NO: 540703 - DNA, 515 bp, Homo sapiens
tccttaattcagcatacagaggattttaaaaatctttaacaaagatgcagatgaagctttgtaactcgacatacgaagccatgttctaaacaagctgctttctattttaattaaatcctaattagaagtcataatttaactgagctgcacaaatactccctatgagctatgaaaagcttactatggctgttcaaaacccatgggtgttaagataataacaaagctgtttcacctggatgtgatgagacaaatatagaataatttcttagatgcaagagtaacttcctgacatatttcataaaatgggctttctgtaggctattgagtctgtcctatatttaatccatttttgactctgctcacagttatttaaamacgtggccttgcaggtctagctgctttccttaggatctggtggattttccttcagcagatatgctccaaagcccactgagcagccccacacccacccctctgtcaggagaaacagtctggggaacatgcccctaagccag

SEQ ID NO: 540704 - DNA, 536 bp, Homo sapiens
acacttgagtgaatcagtggaaacatggtcatgttcagtrttctgtggtttagaattgatacaagtggtctaggatgatatggaaattccatcaatgcactacctcagcctctatgctcagctgcccatccatgcatgttataagatccaattgttctgctaaaaagatttattttatagttgtttcctcttatataaagtcactagcagccaagctttcttacggtttttattctttcatgtcttctatcctgtggggtacaaatagactggtaatttcaataacattggagtattttttgattgaagatagaattaatgattgcatagacagttctgattatatgtgttagtagaataatttatatggtatacaaaaatttgaaggaagcatgaatccctttttagggtattctgagatgagcaccatcaacattttgatgagtatctttctgttcatctctctctctctctctctgtcacacacacacacaagattttatataaatgggatgataaatgtagatttgtcatta

SEQ ID NO: 540705 - DNA, 536 bp, Homo sapiens
acacttgagtgaatcagtggaaacatggtcatgttcagtattctgtggtttagaattgatacaagtggtctaggatgatatggaaattccatcaatgcactacctcagcctctatgctcagctgcccatccatgcatgttataagatccaattgttctgctaaaaagatttattttatagttgtttcctcttatataaagtcactagcagccaagctttcttacggtttttattctttcatgtcttctatcctgtggggtacaaatagactggtaatttcaataacattggagtattttttgattgaagatagaattaatgattgcatagacagttctgattatatgtgttagtagaataatttatatggtatacaaaaatttgaaggaagcrtgaatccctttttagggtattctgagatgagcaccatcaacattttgatgagtatctttctgttcatctctctctctctctctctgtcacacacacacacaagattttatataaatgggatgataaatgtagatttgtcatta

SEQ ID NO: 540706 - DNA, 585 bp, Homo sapiens
aatatacaaaggattttatatccccttataaatatgacatgttcaactattctgcaaggtaagcaaggcttagatgaaattaagcctcagaaaacttgaggtttttctcaaggtcacattgctacttgttcattgagtcttgtcttcaacttcaaactctatgtccttcctctatagctaaacttcctttaaaatgtgaaattactttattgactattattgggaagttattagcctctgctgctctgatgagaccaggaacaatcatggagataaaaggttttgaatctattagttttttatggctgttgaaacaagttactacaaacttagtggcttaacaatacaaatgcattactatgcagttctgtagggcagaaatccaacacacgcctctgtcagctaaaatcaagatgttggcaggacgtcctttttggagtttctaaagaataatccatttccttgccttttacattttctagggaaaggcctgcgtttcttggattgtggctcctttcctttatcttcaaagctagcaatggcagattgagcacttcyaatatagtatatttctaaccaaggcag

SEQ ID NO: 540707 - DNA, 602 bp, Homo sapiens
tgggcaacagagcaagacttcctaaaaaaaaaaaaaaaaaagccatggaaatcatctcctaatgtttatacaaatacatgtaacaacaatatcccagttctcatacaggctgaatatgtaacaatatcccagttctcatacaggctgatcatgttttaagttgttcgcctaacattgtgattagatgcaggtgtgctttactgttttaaactggttaagaaagagtaaaattacctacttatgtagcttccttttataaatacttcttcacatttcttggtaactatgtttaaattttttcttgaatgctgcttctttcagtcatagtagagtggacaactataattttgtgacttaaaatttaagaatgggctttctcaataataaatagctgagaaaggtttgttaaggtaactatcaagatgacccttgaaagatgaaaagtgaaacaaatttcttttaaggtcacagaaaataatttagcaagagatcttttttcatccacatctaagtgagatggaactttgtggttgcagtatgtcttratccatcagcatattgtccaactccgcctgtgagccctgtatgcataattctcaact

SEQ ID NO: 540708 - DNA, 430 bp, Homo sapiens
atttggatttagaagaaatttaacaaattaggcagaaatgctaaggtaaaaaggtgcaaaacaaagtaagaaaggtaatagttcttttacactctaaaatttgaattggaagaaaagcaaggctaatgagttatcataacacattttcttacaacaaaaattcaatatatgtttaagattctgatttttaaggtataaacagaaatggtattctgattcaagatggctgactgaacaggtttctctcttgtctctatagagattctgttggaatggcagtatgtaaatgagtcaaatacagacccaccacaaagaagatgatctgagagggctaatgagaagtgggtaattttcattcattgytaaaagatagaaaacaattggaagagtatagatcaaagaaggtgagcaaagaaagctgaagaccaga

SEQ ID NO: 540709 - DNA, 591 bp, Homo sapiens
gagactctacatgcttctaaattgaaaaccaaagtcgcatgtgcagacttcagattttttttcagccactataatggaatatagaaaacacaggagcaagaattttccaaattctgaaaaaaaactttcaatctaacaatgcatacctagtgtgaagatgatgcaggacaggtragcctcaaaaaactggggcttagctcggaatagttcttggcttcacccagtaaagacttcaacagcaagctggtagcattggacagtaatcttttgttgaatggtactgctttttgcagagcaggattaactcatagccagcccagagtgagcaacactcactctggtgttggcaaccctatttatactctcttatacccactttcaattacatgcaaattgaggagtgggttaatgcaaactaaagggggcggtatatagaactttctaggaaagggcagtaactcctgggtcattaccatggaggagggtggtagcttccaggtcattgcccatagcatttgtaaactgtcatggtgctggtggaagtctcttatactaatgagcaatgagggcagctagggagcgctttattcc

SEQ ID NO: 540710 - DNA, 591 bp, Homo sapiens
gagactctacatgcttctaaattgaaaaccaaagtcgcatgtgcagacttcagattttttttcagccactataatggaatatagaaaacacaggagcaagaattttccaaattctgaaaaaaaactttcaatctaacaatgcatacctagtgtgaagatgatgcaggacaggtgagcctcaaaaaactggggcttagctcggaakagttcttggcttcacccagtaaagacttcaacagcaagctggtagcattggacagtaatcttttgttgaatggtactgctttttgcagagcaggattaactcatagccagcccagagtgagcaacactcactctggtgttggcaaccctatttatactctcttatacccactttcaattacatgcaaattgaggagtgggttaatgcaaactaaagggggcggtatatagaactttctaggaaagggcagtaactcctgggtcattaccatggaggagggtggtagcttccaggtcattgcccatagcatttgtaaactgtcatggtgctggtggaagtctcttatactaatgagcaatgagggcagctagggagcgctttattcc

SEQ ID NO: 540711 - DNA, 605 bp, Homo sapiens
tgtcactctgggttggacaggggaacaaaggctatcatttcagtgagtgaatatgatgacatgcaaggctgcaaagaggcaccatgattgaattctgcattcagccaatttttccagtgatcacattttagatttacctaaccagctacatgccaaccagtttagttcaatgaagacacacaaagcatgcataaccttgttgtaggcctcttccttttcccctgtttgttttaatctctgggagttctctgtgtatcacctttattgtcagcactttaactctccttttctttcagcttatgtttcgcacaggagatatgaaataaaaaycagaattattacataaacaaagcttcactgaagttctgttgtacatatttttcatttactgaaagcagggggtgctatatgcaaagaaatcagctagagtaagcaggtagaatttctaaagacaggcacctgaagacatttatagtgtcccattatagaagtgctttaaaatgtatcatttcttccaggttctgccaaatgtacaatgatgcatgtccttactgagatatacagacagcaaatgtcacacacatattcttctcatcgaagaagca

SEQ ID NO: 540712 - DNA, 590 bp, Homo sapiens
ttctcaagccccttaaaaaatcattcttgcttttctactcatttccacttgttaaacttgacccagttttctcttggtttcatattttaycattcaacttttattccactctctaccctctccaactcccctaaataaattgttttttcaggtcataatacccctatttgtttttcctacacaacgggtaagctcagatggaacattatcgaatggtgaaaagcataagtttgtcttaggacacaaagtttctaacaaagattgattcttctcatatgaaataactgcttctttatacttttcatggcattttagaatacagggtaggattgcagtccctgaaatgtaccaattctgaattaaactaattaattaattaattttcttagcaccccacagagattgtgccatcacttttttgtatcatgctgcccctgattttcctcctagtgggcccgaaacatccatctttccacgagtgtggtcaggagattaggactgttataaatgaagtgcaaagagatttactattccaagcagaattttgcagtcagtaagatgttaaagattatctaaagaatatcaagtca

SEQ ID NO: 540713 - DNA, 590 bp, Homo sapiens
ttctcaagccccttaaaaaatcattcttgcttttctactcatttccacttgttaaacttgacccagttttctcttggtttcatattttaccattcaacttttattccactctctaccctctccaactcccctaaataaattgttttttcaggtcataatacccctatttgtttttcctacamaacgggtaagctcagatggaacattatcgaatggtgaaaagcataagtttgtcttaggacacaaagtttctaacaaagattgattcttctcatatgaaataactgcttctttatacttttcatggcattttagaatacagggtaggattgcagtccctgaaatgtaccaattctgaattaaactaattaattaattaattttcttagcaccccacagagattgtgccatcacttttttgtatcatgctgcccctgattttcctcctagtgggcccgaaacatccatctttccacgagtgtggtcaggagattaggactgttataaatgaagtgcaaagagatttactattccaagcagaattttgcagtcagtaagatgttaaagattatctaaagaatatcaagtca

SEQ ID NO: 540714 - DNA, 590 bp, Homo sapiens
ttctcaagccccttaaaaaatcattcttgcttttctactcatttccacttgttaaacttgacccagttttctcttggtttcatattttaccattcaacttttattccactctctaccctctccaactcccctaaataaattgttttttcaggtcataatacccctatttgtttttcctacacaacgggtaagctcagatggaacattatcgaatggtgaaaagcataagtttgtcttaggacacaaagtttctaacaaagattgattcttctcatatgaaataactgcttctttatacttttcatggcattttagaatacagggtaggattgcagtccctgaaatgtaccaattctgaattaaactaattaattaattaattttcttagcaccccacagagattgtgccatcacttttttgtatcatgctgcccctgattttcctcctagtgggcccgaaacatccatctttccacgagtgtggtcaggagattaggactgttataaatgaagtgcaaagagawttactattccaagcagaattttgcagtcagtaagatgttaaagattatctaaagaatatcaagtca

SEQ ID NO: 540715 - DNA, 563 bp, Homo sapiens
gtcaaagtagtgagtgagggctaaagaagtgagagcacacttaatatcagaaatatttcagtccatgggcaaaaggatattcttaccatgggtaagaggaggaagtttgcagaaatctgaaacactgaaacaattctcttaaagacactgggaaaggcttcagtgtccaaactgttttaaaccaaatgagtctgtttttaattttttctccaactggagaaaattgaaaattgttttggttggggccaagggtgaaggagtcttgaagaacattggatcagatataccaaatgaccaatttgatagattgattgattgaytaatttttttttaaacttttaagttactatgggagtaaattcattactttgctacaaatgttgtgggaaagtggacaagtcaatgcactactgtgaatacttattcactaattcacgtttccattttggaaaaataaaggagttgggctgcataattcttaaggtcttctttagttgagagaacctatatgtatttatagtctgtccttcttatgtagagaacacgaatgtctaattatttac

SEQ ID NO: 540716 - DNA, 563 bp, Homo sapiens
gtcaaagtagtgagtgagggctaaagaagtgagagcacacttaatatcagaaatatttcagtccatgggcaaaaggatattcttaccatgggtaagaggaggaagtttgcagaaatctgaaacactgaaacaattctcttaaagacactgggaaaggcttcagtgtccaaactgttttaaaccaaatgagtctgtttttaattttttctccaactggagaaaattgaaaattgttttggttggggccaagggtgaaggagtcttgaagaacattggatcagatataccaaatgaccaatttgatagattgattgattgactaatktttttttaaacttttaagttactatgggagtaaattcattactttgctacaaatgttgtgggaaagtggacaagtcaatgcactactgtgaatacttattcactaattcacgtttccattttggaaaaataaaggagttgggctgcataattcttaaggtcttctttagttgagagaacctatatgtatttatagtctgtccttcttatgtagagaacacgaatgtctaattatttac

SEQ ID NO: 540717 - DNA, 620 bp, Homo sapiens
ttgcagtaaggttttttttttttgtagctgtgattaaagttcgtaatcaactgactttaactaagggagaccattcttgataatgtgaatgggccttactcaatcaggtgcaaggccttaaaagcaccgctaaggttttcccaaagaagaagaaatgtgagcaggactttccccacccataccaccatggccaagtgttctagcctgccctatgaatttcaaacttgcatctccaactcccacaaatgtttaagccaattctttgcaaaaatattttaatgtatatctccgactgattctgcttctctggttgaacccctgacaactccccatcatcttggttgtagaggaggaggccagacacttcaatgtaaagaagccacagtcaggtggtttctatgggccttgacataattaataagccatgttctacctcctcaaatggtgcttcaagcttagctttaatctttgaaactattcaaagagaaagaacactagaaaaaagctgaaaaaatwgcctaggtaatgtataataattttttaatgttatcttgagtagaaaactacagaacttttttgaaaaatctttctgactgatgtctctatagagttctgtacat

SEQ ID NO: 540718 - DNA, 401 bp, Homo sapiens
tatagtattagaaatccctgttcttacagcttgtcaatgctgctcatctctgggaattatttaaatggcttctataagagattaaagcacattttcaaaaattccttccactaaaaggtggagtcttatttacctctcctggaatctgggttggccttatttgcctacagcttgctttatctacagcaaaatgaaactattctagttatgggctagccttttataagaggcctggatccttccaccttttatctttgagtcctaggaccccatgtaagaactccaactactgtgrtgcgaggattccctcatcacacagagtgagataacacagaggtgctcaattggcaactccggctaagcaatgggccaacagggagtgtccatggtcagcccagccc

SEQ ID NO: 540719 - DNA, 658 bp, Homo sapiens
aaaagaataattgatttcaggtagaaatcttctagtctattatcagcattagatgaaatagtaaatttattttttcttacgttgtataaagtataggggtttttaacacatgttttatgaatcattatgaagtctttggataggcattatacataaatatctaaaattctgtgcttatttgtatgtgtgcattatctgtgtagatgacccatgtctttcatcagattttcagagaaaagaagcctagatggtttcaaattataactagaatttaattaaaaagaattcaccacagagtaaaagctacctgaaagaacaccagaataaaatagacacgatattagaatagattatggaacactttagattctatgtaaaccttatctctcaatgttatagaagcctctcctctgggactgaccataccaccctggtttattgcactactataattttagttcccagccttctggcagcmtatagtatttattgcctatctagctcgggtttgtgtaatagatgagactcaggagggaaagtttcatcttttctattatcttttgtaaactgcaatgttgatcacttgtaagacagtaataattcagttaaagtgtcataaatatatatgtgacatagaatggtctacatggtacattca

SEQ ID NO: 540720 - DNA, 649 bp, Homo sapiens
tatgactatgaatatgtatggggtaggggtcgcagaggttgagagggtgtttaattgtaaaatgtgtggtgtgaaaatgtgactcatctacactggggcctgatcacaaataacataagtagtgttccagggaattctgatttattatgacagacagattctgtagattggattggcagtcaacactatagaggtgattataagacagtagggmtgggcatggtgggtggctcacgcctgtaatcacagcactttgggaggtcaaggtgagcagatcacaagggcaagagattgagacaatcctggccagcatggtgaaaccccatctctactaaaaacacaaaaattagctgggcgtggtggcgagtgcctgtagtcccagctacttgggagggtgaggcaggagaatcacttgaatcccagaggcagaggttgcagtgagctgagatcatgccactgcattccagcctggcaacagagtgaggctaactctcaaaaaaagaaaaaaaaagtagaatagataaagtatctgagggagaaagtggaaagagaaaaggatgaagaaggagagctgagatctgcaaagctcttacaactagagtatcattctaaaaatgaacaaatgataaacatgaaaataagcaagcag

SEQ ID NO: 540721 - DNA, 649 bp, Homo sapiens
tatgactatgaatatgtatggggtaggggtcgcagaggttgagagggtgtttaattgtaaaatgtgtggtgtgaaaatgtgactcatctacactggggcctgatcacaaataacataagtagtgttccagggaattctgatttattatgacagacagattctgtagattggattggcagtcaacactatagaggtgattataagacagtagggaygggcatggtgggtggctcacgcctgtaatcacagcactttgggaggtcaaggtgagcagatcacaagggcaagagattgagacaatcctggccagcatggtgaaaccccatctctactaaaaacacaaaaattagctgggcgtggtggcgagtgcctgtagtcccagctacttgggagggtgaggcaggagaatcacttgaatcccagaggcagaggttgcagtgagctgagatcatgccactgcattccagcctggcaacagagtgaggctaactctcaaaaaaagaaaaaaaaagtagaatagataaagtatctgagggagaaagtggaaagagaaaaggatgaagaaggagagctgagatctgcaaagctcttacaactagagtatcattctaaaaatgaacaaatgataaacatgaaaataagcaagcag

SEQ ID NO: 540722 - DNA, 476 bp, Homo sapiens
ggattggcagtcaacactatagaggtgattataagacagtagggatgggcatggtgggtggctcacgcctgtaatcacagcactttgggaggycaaggtgagcagatcacaagggcaagagattgagacaatcctggccagcatggtgaaaccccatctctactaaaaacacaaaaattagctgggcgtggtggcgagtgcctgtagtcccagctacttgggagggtgaggcaggagaatcacttgaatcccagaggcagaggttgcagtgagctgagatcatgccactgcattccagcctggcaacagagtgaggctaactctcaaaaaaagaaaaaaaaagtagaatagataaagtatctgagggagaaagtggaaagagaaaaggatgaagaaggagagctgagatctgcaaagctcttacaactagagtatcattctaaaaatgaacaaatgataaacatgaaaataagcaa

SEQ ID NO: 540723 - DNA, 556 bp, Homo sapiens
gctcccactcagctccacagaagggtatgaggctagttggagctggactgcacaagctcacccttggatcctccactggcaagcacaagcaccagccctgacagaggtgcttgggaagctcatggtgaaatgtgttgggatatcctcagggtatgggggtggggttgccccagctctatttcctgggtaggcaggaacatgacccatttctctgtcacacccttatcctggtactcaggacacacagttctgtcagacactcctgtctatatcygggctgcaatgctgccaagggccataaaagacacctgccttgtaagctcattgtcaaaatggctgtggtacagaacctcccccctcagctccagacacaaaaccctctagctctccactacaggaatactggtgctttgtgtagagaggcgacagggccccacctttcacataactctgggcctagtgtgaacactgccagtggggatgcagctacccctagtcacctcagaaaggctgtcctccagcatgcttatgccaacttcctatgggagtggccaca

SEQ ID NO: 540724 - DNA, 645 bp, Homo sapiens
caataattgtaatttatcagctggtattatcactgtattagtccattctcatgctgctgataaagacatagctgagactaggcaattttcaaaagaaagaagttcattagacttacacttccacatggccagggaggcctcacaatcatggtggaaggcaaggaggagcaagtcacatcttacatggatggcagcaggcaaagagagagcttgtgcagagaaactcccatttttaaaaccttcagatctcatgagacccattcactatcacaagaacagcacggcaaagacccacccccatgattcaatcatctgccaccgggtccgtcccacaacatgtgggaattatgggagctacaggatgagattttggtggggmcatagccaagccgtatcaaccacaaagtgaaggaagcaggaacacctgctttagtagatttagcaaagctttagtagatttagttatttacactttattactacatacagcaaatttccaagactctacagcaaactaggttcataaaaacagttcaaatctcacatattgagagttcatgactgatacatgaacagcagtagtaagtaaatcttcactaaagtgcaataccaaattcacaaggtgtccaagatccttaacaaaaa

SEQ ID NO: 540725 - DNA, 645 bp, Homo sapiens
caataattgtaatttatcagctggtattatcactgtattagtccattctcatgctgctgataaagacatagctgagactaggcaattttcaaaagaaagaagttcattagacttacacttccacatggccagggaggcctcacaatcatggtggaaggcaaggaggagcaagtcacatcttacatggatggcagcaggcaaagagagagcttgtgcagagaaactcccatttttaaaaccttcagatctcatgagacccattcactatcacaagaacagcacggcaaagacccacccccatgattcaatcatctgccaccgggtccgtcccacaacatgtgggaattatgggagctacaggatgagattttggtggggacatagccaagccgtatcaaccacaaagtgaaggaagcaggaacacctgctttagtagatttarcaaagctttagtagatttagttatttacactttattactacatacagcaaatttccaagactctacagcaaactaggttcataaaaacagttcaaatctcacatattgagagttcatgactgatacatgaacagcagtagtaagtaaatcttcactaaagtgcaataccaaattcacaaggtgtccaagatccttaacaaaaa

SEQ ID NO: 540726 - DNA, 577 bp, Homo sapiens
gcttatggctatgatttcaggctaattacagttttctcacatatactaataacgctaatttagaatttttaaataatcacactctcaggtagaactgacaagcttctgagaagtgaaagctttgtgtatatcctggaggaaatttaggttgttgcagacttcatgccctgccctacagtaatgagatgtattatttttcttgagtgccaatatattttatgcataggaccctttgaagcaacttcaattagaaaaaatatatatatcctgaagaattctttgacttattgcaatttagaacacccatttatcttttaccgtgtagttgactcttgaccttcacagatttaacaggagagtctcagtgtttcccaagtgatccagagtaatttgcaattctgctgagacatgaatgcgtttggagttctggaaggctgaggcgcagaagcaattcacttggtgaacaaacctagccacccactcaggacgtgccamccattgcactctgactgtcctatattatttgtttgcacctaggaaggaaattatgtgctagagggatccgtgaatttgggga

SEQ ID NO: 540727 - DNA, 215 bp, Homo sapiens
ctgtccagctcctgggagggtgctgagcccttctctgagcgacagcttccttgatccaaacatgatgggattcttcaggatcacacagatccagtccagctctaaagttctgagtcctcataaattctattgttcttagtcactccttcatttacacaaccagggagcygctgtgccttccaaggcctggtaccagttccttttggtccagtcgt

SEQ ID NO: 540728 - DNA, 506 bp, Homo sapiens
tacatcaaatcattggatctgtgttttcagatcctagaagaaacatgctgtcatctctcttaggactagatgttgacctttctaaattgaaaagaaactgaggccaggtgcggtggctcatgcctgtaatcccagcactttgggaggtcaaggtgggcggatcgcctgagttcaggagttcgagaccagcctggccaacatggtcaaaatcccatctctactaaaaatacaacaatcagcccggcacggtggcggccgcctgtaatctcagctactcaggagtctgaggcagtagaatcacttgaacccgagaggcagaggttgcagtgggctgagattgcaccactgtattccagcctggcaacagagygagactctgtctcaaaaaaaaaaagaaagaaagaaagaaagaaactgaaatacacaatgagatacgatttcatacccaccagaatggtgagaattaaaaagactgataacaccaaggtctggtgaggatactgaac

SEQ ID NO: 540729 - DNA, 601 bp, Homo sapiens
tgagccaagaaatgcaggtggcctctggaagctaaaaaaggcaaagaattggattctcccctagagcctccagaaggaatgcagccctgctggtacttcaagtttaggacttcttacctccagaactataataataaatctgttgttttaagccactaagtatatggtaatttcttgcagtagtgacaagaaacaaatacagggatccaggtccctcacctgaaaaatgtggcaagtctctaagtgtgggccactgataggctaaaacttgatctgaaaattccaggcttttcttgggatgcaatgagtgtagggcattgtctatgttagggttgcatttggctacatgtaacagaaacccagccatagttgcccaaccaaatcagattttacttttcctcatatatcaagaagccaagagggaggaaatcctggatgggacaacagctcccaggaccatcaggctgcctcctgctttctgctccaccactctcagcatgtggcctgytcctcacgctagcaagattcctgctccacccgaggcatcatgactgcatttcaggcaggaaggaggggaaagaaaagaaaaaagggcatgtga

SEQ ID NO: 540730 - DNA, 530 bp, Homo sapiens
  misc_feature (1)...(530): n = A,T,C or G
agcagggctggttgtcacataagtgaaggctttggtgccagacgttagaagctatggacctcaatgtagcttctcatttatattcattcattctcattctcattttctatctctctctgtctctctctctgtctctttctcaacaggagctagaactccgccacattgacaattccctggtcgcttggtccatcctagatcatgaaagagagcctaggattttcctcccaggagccatccagaacctgctctaaggaccctatggtgtgaggnctacgaatggacagagctgggtcctaacctgcccacagtccccagcaggaagtgcaatgaggttgttacccccaacccatgagtgttggtggcctagctcagtcagtggtttggcccagtgaaaraggctctctgcacagcccccaccctgggaaaggggagctttcacccccgtgaggtcctggtgtccgacaggcctaccgtcatggatgagcaggtatggtcgcaggcctcgctccttcaggatctggcaggca

SEQ ID NO: 540731 - DNA, 684 bp, Homo sapiens
tgcctgctccaacagactctacagtttgtcaacatgagttttttaattgcataaataattcatgaatacattctgattgaaagagttaagcagtatatagaacaaagtttctaagttccttcaacattygcccctactcccctcccactgtcaacaatgtgaggtcccctcctagttcccttttatatactggcatatatatgtatacacttttttacagtaatatactaaatttgcattccaattgttattcaatttgcttattttccttcaactgtattttgtagattttttcctctgatgataaaataagcctgcttcgttcttttaattcttcagaatggatatatcctaatttggttcaacaaatcccctattgatagatattcatgtggtttctaattttcccccttttaaaacggcactacaatcaacgtctttgtgcacacatcttcacacaggcaaatgaatatttcttagggtagattccaggaagtggatttgctgggtcaaatggtgtgtgaattttttgtttcactgaatactgccaaattgccttccaattcaaacttctaccagctttgggggaaggttttgtttttgttttatttatttatttttgttttaaacagaggtttgtttttatttaaaggaggggttttcttaaggcagttggtctcagca

SEQ ID NO: 540732 - DNA, 626 bp, Homo sapiens
aggcttgtggcccgaggttgcttgtcaccccccaagagtagaggaagcaaatgactggatagcagaaaaaagatagaaatcttttcaagggcttgtcaacgtgggatccaagtttttctctcctggtggcctttaaaatcaagtgaactgctcaagcagaaaagagttaacggctccctcattggggtctatgagtcaggccacgtgttgggtgttttttatgctgcaatggaggggctagtattacatcaatggcataaaagagactttattcattgaaagcatccaaaatagaaatgttgctgtaaaagtaattagacttgaatttaaaaggatcagttcctcattaagggtttcctcaaaggctttttacaagcttacagctcaactctaatctccagtgtcaactgtgcaaaggagcaatgcagagatgcatattcacatcctaagaagtgtgcccactggtttcaccgaaaaagcacagsgaggatttcaccgtacacaaatataaatacgtgctcgtcaccaccagcagcccatcccacacccctgaaatgtagacccaggagatcaaagtcaactcttacacttataaaacccagaagaaaactctgtaagtcatgttt

SEQ ID NO: 540733 - DNA, 626 bp, Homo sapiens
aggcttgtggcccgaggttgcttgtcaccccccaagagtagaggaagcaaatgactggatagcagaaaaaagatagaaatcttttcaagggcttgtcaacgtgggatccaagtttttctctcctggtggcctttaaaatcaagtgaactgctcaagcagaaaagagttaacggctccctcattggggtctatgagtcaggccacgtgttgggtgttttttatgctgcaatggaggggctagtattacatcaatggcataaaagagactttattcattgaaagcatccaaaatagaaatgttgctgtaaaagtaattagacttgaatttaaaaggatcagttcctcattaagggtttcctcaaaggctttttacaagcttacagctcaactctaatctccagtgtcaactgtgcaaaggagcaatgcagagatgcatattcacatcctaagaagtgtgcccactggtttcaccgaaaaagcacagggaggatttcaccgtacacaaatataaatacgtgctcgtcaccaccagcagcccatcccacamccctgaaatgtagacccaggagatcaaagtcaactcttacacttataaaacccagaagaaaactctgtaagtcatgttt

SEQ ID NO: 540734 - DNA, 622 bp, Homo sapiens
ttctgctggggtcccagacttcacttctaaggcctcataaaaggaatctaattcctcttccccatgacagctcttgcagattagtcactccttyccccaaatcacttcttcaggacagtggcctcagttcctcctagagttcctgatgcgacatggtttcatatcccctctctgccctggatactgccctctgaaagtgttttgacttatctatattgctcatcaagtgtggcacccagaactgaatttagttctccaggcatgacctttctggtggacccctcacccactccattctagatggtgtcctctgttcatgcaccctaagagtgcactagggttttgccaaccacatcacaccactgatgttacaactatgttgtcagcacatggattccaacctgggtatcccagcttctaagtgggacccctttgcattgagtcacacaccctggaggcttccagggcacctgcctagtagtaaagataggtgtaagcacatctttgctgctaacagctccagaatgagccacagaagttcaactgaagatgctgtcctttcctgtgccccagagagtactggtgagacattctatcctccatgtgtaaccagaaaggactc

SEQ ID NO: 540735 - DNA, 654 bp, Homo sapiens
aaaacagtatgaaggtgttcctcaaagaaattaaaaatagaactaatatatgatccagcaattccacttctggaaatttatcaaaaacagttgaaatcaggttcttgaagaggtatgagcacttccatgttcattgcagrtttattcaaaaacccaagatatggaaacaactcaagtgtccatcaatagatgaatggatagagaatatggggtatatatatgttcaaggggaatattagccttaaaaaagaaggaaatcatgaaatatgtgacaacatggatgaacttcaaggatataaagtgaataacaatatcaagtgaataaagttgctaatcaatgggctaaagtttcagttatgcaagatgaatccattctggagacctattgcacaacattgtgcctatagctaacaatactgtattatacactgaaaaatttgtaagagttatatcttacattgtgtttgtaccataacaaaatgaaagataatagatgtatatgtgtgtatttatgtatgtatacaatgtggattattttttaaaaatacccaaaagctattttcttctgcttttgaaaaaaagtttcattattagaaataattggtcatttattttaaattaacactatagcaaaagggggaaaagtttttttaa

SEQ ID NO: 540736 - DNA, 654 bp, Homo sapiens
aaaacagtatgaaggtgttcctcaaagaaattaaaaatagaactaatatatgatccagcaattccacttctggaaatttatcaaaaacagttgaaatcaggttcttgaagaggtatgagcacttccatgttcattgcagatttattcaaaaacccaagatatggaaacaactcaagtgtccatcaatagatgaatggatagagaatatggggtatatatatgttcaaggggaatattagccttaaaaaagaaggaaatcatgaaatatgtgacarcatggatgaacttcaaggatataaagtgaataacaatatcaagtgaataaagttgctaatcaatgggctaaagtttcagttatgcaagatgaatccattctggagacctattgcacaacattgtgcctatagctaacaatactgtattatacactgaaaaatttgtaagagttatatcttacattgtgtttgtaccataacaaaatgaaagataatagatgtatatgtgtgtatttatgtatgtatacaatgtggattattttttaaaaatacccaaaagctattttcttctgcttttgaaaaaaagtttcattattagaaataattggtcatttattttaaattaacactatagcaaaagggggaaaagtttttttaa

SEQ ID NO: 540737 - DNA, 654 bp, Homo sapiens
aaaacagtatgaaggtgttcctcaaagaaattaaaaatagaactaatatatgatccagcaattccacttctggaaatttatcaaaaacagttgaaatcaggttcttgaagaggtatgagcacttccatgttcattgcagatttattcaaaaacccaagatatggaaacaactcaagtgtccatcaatagatgaatggatagagaatatggggtatatatatgttcaaggggaatattagccttaaaaaagaaggaaatcatgaaatatgtgacaacatggatgaacttcaaggatataaagtgaataacaatatcaagtgaataaagttgctaatcaatgggctaaagtttcagttatgcaagatgaatccattctggagacctattgcacaacattgtgcctatagytaacaatactgtattatacactgaaaaatttgtaagagttatatcttacattgtgtttgtaccataacaaaatgaaagataatagatgtatatgtgtgtatttatgtatgtatacaatgtggattattttttaaaaatacccaaaagctattttcttctgcttttgaaaaaaagtttcattattagaaataattggtcatttattttaaattaacactatagcaaaagggggaaaagtttttttaa

SEQ ID NO: 540738 - DNA, 654 bp, Homo sapiens
aaaacagtatgaaggtgttcctcaaagaaattaaaaatagaactaatatatgatccagcaattccacttctggaaatttatcaaaaacagttgaaatcaggttcttgaagaggtatgagcacttccatgttcattgcagatttattcaaaaacccaagatatggaaacaactcaagtgtccatcaatagatgaatggatagagaatatggggtatatatatgttcaaggggaatattagccttaaaaaagaaggaaatcatgaaatatgtgacaacatggatgaacttcaaggatataaagtgaataacaatatcaagtgaataaagttgctaatcaatgggctaaagtttcagttatgcaagatgaatccattctggagacctattgcacaacattgtgcctatagctaacaatactgtattatacactgaaaaatttgtaagagttatatcttacattgtgtttgtaccataacaaaatraaagataatagatgtatatgtgtgtatttatgtatgtatacaatgtggattattttttaaaaatacccaaaagctattttcttctgcttttgaaaaaaagtttcattattagaaataattggtcatttattttaaattaacactatagcaaaagggggaaaagtttttttaa

SEQ ID NO: 540739 - DNA, 446 bp, Homo sapiens
gtccctgctttgtttttaacagcaccctttacttccccaaccagggcactcattacatttaacttgcttgtttggttttctcttcctcactaaactttaagttctgtgagaacaggaaacaactgttctgttcactattatatttccagctcctacattggggcagcaggagcaggggcggagacagagggcctaaatacactcataccccacatcaccactttcttccttgaattccagattaaggatgttgttaagtaataatgagtcaataatgtgaattaagaaacattggtacaaattcatgcttttaatttttttaatttttaaaaatataggaatacttttaaattagaatactcctatgaatgtgagaataatttcatgtttgaaggagtatcttctcrtatttttttgatgacctaaagaaatttagtgttttccat

SEQ ID NO: 540740 - DNA, 403 bp, Homo sapiens
gtttctgggaatccatctgcttcaatgattttcctaaaacacaaatctgatcccatcacatctttttttttaaaactccttcagtgaagatagttaagaacttgtggcagactgcttctagagaacaaaacaggaacactggggtacagaaataagagatttacttttcatggatacccttgtgtagtgtttggggaaaaattataaccatgtacatatattcactattcaaaggaaggtcaaaagcctctcaaaagtttctacagctttccactatccctaggagaaagaraagcctttacttggtctataatgctcttcaccgtatggccctacccaactcttcaacctaatctcatgttaatctcgcttcctgtggcccttgtggacttggctagactgg

SEQ ID NO: 540741 - DNA, 526 bp, Homo sapiens
gtgggaaagtctagtacacctatcacaggttgattgtgaatttacatgttaaaggcaagttatattgacatttaagagtttaagatcaatacttattatagagtatattggggtaaacaagaacctacactatgttttaagtawaatattttagaaaaattttagctttctttgtaaaataaatttttgttatgaggaaatatctttaactatgttctcaagttattaaaaaaatacaattttctataccaattgagcttactaaagttacagcaaccacatccttgaagttattttccttacagaatcaaagagaagaaaatcaaagttcttgtaagtatagattatatcgttgagtccaaataatgtctgtaacaccctcattaatttagtccatataaaaatgtttaatatctgagtcataagttcaaaatccttatatatattagggttgttgtttcaaatcaactgtgtaatgtgccaaagatgtccattgttattagagatcttccttatcaaatggcag

SEQ ID NO: 540742 - DNA, 563 bp, Homo sapiens
tgtaaagaaagtttgtctcaggattaagcttatctgatttagatgatattttaatgaaactttgcactttagactttagatatgatgctggatctagttaagacttttggacctgtttggatgaaatgaatatattttgcatgtaagcaggacatggatgtaatgtagggaagggygtcagttgctgatgctgtgggctgattgtgcctcccccaacactcatatgtcgaagccctaaccctcaacgtgatagtgtttagcaatgacgcccttaggggataatttaatttagatgaagtcttgagggtggagctccatgattgaactagtgtccttataagatctctctttctctctctctctctctctgtctctttctccttctctccacttatgatcaaggttcccattggcaagccatgaagaaggccctcaccaggaactaaattactggtgttttgatcatagacattagagccttcagaataaatggcgtaggccatttttcagccactcagtttatggtattttgttatagtagcaaaaagtgattaagaaaatct

SEQ ID NO: 540743 - DNA, 455 bp, Homo sapiens
aacataaaatgaaacatttcaaagatcttgtgtactggtatattttctcaagatgttattgtgaatgcctgcttccaatacaaaaaagtagcaaaaagtgggatggggaaaataagattagataactrggtaataaccataaacgatgccctttttaagaaatccaattgttgtttatcttagaatctaaagcaatgtaatgagatgcttttgttcataaaagtcactcaaaatccagagttataaatgtcaacaagctgcatgaaagctcaattttaagatttagtactatgtacaaatgaagacaaaaataagcacaaacataagagttgcattttaatataggtatccattatctaatgtttatataatggaagccaaatgacttcattattatctgtgctattacactgaataccagatgaactcatcatacaggcatacttgctttaaaa

SEQ ID NO: 540744 - DNA, 521 bp, Homo sapiens
tgatctgaatagctctctggattgtggccttggacaacagttcagactgcattattgagtatgaaccttgagctttctgagtctcttctttttgctcttttactagcagacccatacatattctagtcattctcctttaccatataaaagagaatcagatctcaagttagatataaaacaagctctctggtgtttctctcccatacgttaaagcaatgtccaagaaactagtctatcactaatcttttttcaaggatttaagaggactttaccattgytcaatttgttctcacatttatcttggaatatttccttaagattaagcataaatggggaagcactaaaattatttatgtacgaacactgtaagaatctcacaattctcttaaagcattttttagtttgtttattttacatggatgttgtacagtaaacaaccaaaagaaagttgttgtacagtccttcttaaagaggcagggcttcacagtaacatagttcttctcttggatgaaattaaaatg

SEQ ID NO: 540745 - DNA, 628 bp, Homo sapiens
tttggtaaatactttttcagtcaagttgggtacatttccaaatattgattccaggaatataggattaaggtaaaaaatggcagtgggaagcccccaaagcggtttcatgtatacgagtcatcaaactatcactctccaaatcatgaggatttccttctgatcatatactactctaaagactgatgggcatgaaaataacattgttgtgaataagtgagaaagtaactaacatactagtcatataatatgttattcgtaattattggtccaagatgtatccccttgatagagtcaggatgattattctccattctctttggaatgtcaaaatgaaaatgccagtatctttcttccatgttctttgaaatgataaaatactattctagttaaatcacttgctttsagtttaaagagaagacgcatttatgaaaatagtactaatattttagtaattttaaacctttcccgaaatccaaattgattatggaaatttacaattaatagacaagaaatgaaaaggatttaggcaatctccgattttctgacagctcattttaaattgaccccaagttgttgttttttaacatatatttatcacttttaaacgtgttaattgtgtggcaagcgc

SEQ ID NO: 540746 - DNA, 604 bp, Homo sapiens
ctgcttgggtcaaaaaactggkaatcatcttcagctctctctcactgcccgcaaccagtctattggcaaaagccaaatggcttttccttcaaaatgtatcctgaacccaacctcctcatatccctttcacctctctcacccttgatgatccaagctaccatcattccttgcctagaatacaataaaatactcccaactagtccacctccctcctctcttgccccattctcctcctagcagccagagtgatcttttaaaaacatacatgagaccagttcatgagcccctgcttaaacctcagactacaatctgagaaaacagcagcttcatctgtctttatagtcacattacctacaatagtagctggcacattgttggaacttaataaatataaaatggattgaacaaatggattaatgaatgagggaataaatgaatgaatttaagacctttacaagttcacacttgtctatttcaaaaatgtgggcaatatgacccacagggaatgtcatcaacaggctcaaacagggctgatgattcttttgcatcggatatggaaataacctctcaatatcatttaacatgttgcaaattattcaaactt

SEQ ID NO: 540747 - DNA, 604 bp, Homo sapiens
ctgcttgggtcaaaaaactggtaatcatcttcagcyctctctcactgcccgcaaccagtctattggcaaaagccaaatggcttttccttcaaaatgtatcctgaacccaacctcctcatatccctttcacctctctcacccttgatgatccaagctaccatcattccttgcctagaatacaataaaatactcccaactagtccacctccctcctctcttgccccattctcctcctagcagccagagtgatcttttaaaaacatacatgagaccagttcatgagcccctgcttaaacctcagactacaatctgagaaaacagcagcttcatctgtctttatagtcacattacctacaatagtagctggcacattgttggaacttaataaatataaaatggattgaacaaatggattaatgaatgagggaataaatgaatgaatttaagacctttacaagttcacacttgtctatttcaaaaatgtgggcaatatgacccacagggaatgtcatcaacaggctcaaacagggctgatgattcttttgcatcggatatggaaataacctctcaatatcatttaacatgttgcaaattattcaaactt

SEQ ID NO: 540748 - DNA, 640 bp, Homo sapiens
gtcactgtccacgcagacctcaaggaatttagttccaaagggatctcatgttttcccaaattgcatccttcctcttgagtttccactctgagaatagcaccattaccccatcacccaagctggaaatttgggcatcttcctaaacatcccacactctctcattcctcaccgcccacgaagtcacctccttcttgatacctctcaaatctgcccctctctctttacccaatgctgctgtcctcaccatttctcatttgaacacttgctgggggaaaaacgtaatttctcctcaaccctcataagttcgtagtaggggcagacccctgaaacaaaaaataagcaagtttattaatgtgtgtwatgcacagcaatgccagagaaacttcaatgaaaggtgactcaaagcagtgacttagaacactggcttatgtagtaccttaaacaaaaaacaataaatctgtagagaaatgacaggacaaagagaagcagtcttaggctttcaaaggtaggaaactatgggaaggtaaacagatgaaaattaactaacagagcaaggctcgtttgtagatttctttcctggagctgtctccagtaaaggagaatttatattctgtctttgggaagcaaaggggaagcacag

SEQ ID NO: 540749 - DNA, 573 bp, Homo sapiens
agaataacttctctcaattcagtaaaaccacacctagctacacttaccaagtgtaaattacaaagaaaagtttaaaggaaactacatcaattttatataaaacaaaaccttttacaatgtaaatacaaaagagaaataaagattcacacattattcccttacttttcctgctttgtgtataacactgttgacagaaactgcctataaagatcccatttgggagtggagtcaacatctgtatatatgtaatattggccacaacaatctaagtgatttccaaggtaataatttatttccccagtaagcgccgttaaaaattgtgttgctttgaaaaataaaccaaattccttttgtgttagattccccagaggactctagtttcattttgaakccagccttacacatgaaagcctcaatctaggaaggctgactgctcagttcagggtgctaaactatactgtcatactgtatttaagaggtttaaagtaaattaactcagagttgcttcaaagtgtgagctcatctataaatacggcacaacaaatcagatttgtctcccataagtagttttaa

SEQ ID NO: 540750 - DNA, 323 bp, Homo sapiens
aagtcttccatcgggaaaacatgcagagcctcttcccagcgccaatgggaaagagctaagtgactccgaattttctaggtcacggagtaaaaggtattctttactttaaaaataaagattcaagttacaattcctgacctcagatgaactgtgttgatgtcttctgctaatcctaagtctacaagaggccccaggargcaaaacccaccgtggtgtacagtgtggcaaggctgtgggctgatggagtgaccatgacctccaatctctaaggcaggaaggccaatgaaaagctgacaatgaatgggtttgagaagggacatggt

SEQ ID NO: 540751 - DNA, 514 bp, Homo sapiens
ctatagttcactttttgacttaaagggccaaattccccctcattttaaagctaaaacaccaccccaaaatgaacgtgtgatgtatggtacatatgtatttatcsaatgcacatgtgcttggctccccttataaatatgtacagctcttccccaaaatcctactgtgtaatacaaactctgtgaggcatgaaacccaacctgtcccttccctccttgagaagagggtaccttcagcccatgccagataatatctcctcccaggttgcaaactgatatcaccaataaaactctcctttctactatttagcatggtggtcttttgatgacaaagcaaatgtggtaatattctagagtcaggattcagctaccaagccaaagcagggtcacaaaaatcctccaatcagcatctgagcacagggtaagtttgagatcaaaatcctagagagaaggtaatggccctgcagaatccttatatcctgtttatgtaaaggtgagaatactcaaacaatatttt

SEQ ID NO: 540752 - DNA, 514 bp, Homo sapiens
ctatagttcactttttgacttaaagggccaaattccccctcattttaaagctaaaacaccaccccaaaatgaacgtgtgatgtatggtacatatgtatttatcgaatgcacatgtgcttggctccccttataaatatgtacagctcttccccaaaatcctactgtgtaatacaaactctgtgaggcatgaaacccaayctgtcccttccctccttgagaagagggtaccttcagcccatgccagataatatctcctcccaggttgcaaactgatatcaccaataaaactctcctttctactatttagcatggtggtcttttgatgacaaagcaaatgtggtaatattctagagtcaggattcagctaccaagccaaagcagggtcacaaaaatcctccaatcagcatctgagcacagggtaagtttgagatcaaaatcctagagagaaggtaatggccctgcagaatccttatatcctgtttatgtaaaggtgagaatactcaaacaatatttt

SEQ ID NO: 540753 - DNA, 653 bp, Homo sapiens
tgagtactaaaatgtttcctcaaaaagtgtcagtttgagatgtaaaaagaaaatgtttatttaaaagtactgcattctgctgtttttaatcccaagctgaatggagtccttcttagttgctcctgagctaaatccttttcactaataatagttttattcttaaaggtttcagtagctctgaatcaaattctgttgtgactcatgcgatgtgtgggtagcagctaaagactttcaagaagggtaagttactacagaggaaacatcccaaatgattttgaaaaataaattgtaacagttataaaacatccatggcagaatctgcaggcagccctagaattaactgtgctgaggattagcagcaggtaaatggttagaaatggaataaactggaaaaataacctttggaagagtgggttggaacaaaggtctatgctcatcaaaagcatctgacarttggcctaacaggaagacaggtgccatagaatgaggggttaggagagctgaagtaccggcagatgctagctcagcctctagacaagatttctctctctctctctctctctctctctctctctctctctctctgtctgtcttatgcacacgcacacacacagcaaactatctaagagccataaaatcagactaatcctacc

SEQ ID NO: 540754 - DNA, 653 bp, Homo sapiens
tgagtactaaaatgtttcctcaaaaagtgtcagtttgagatgtaaaaagaaaatgtttatttaaaagtactgcattctgctgtttttaatcccaagctgaatggagtccttcttagttgctcctgagctaaatccttttcactaataatagttttattcttaaaggtttcagtagctctgaatcaaattctgttgtgactcatgcgatgtgtgggtagcagctaaagactttcaagaagggtaagttactacagaggaaacatcccaaatgattttgaaaaataaattgtaacagttataaaacatccatggcagaatctgcaggcagccctagaattaactgtgctgaggattagcagcaggtaaatggttagaaatggaataaactggaaaaataacctttggaagagtgggttggaacaaaggtctatgctcatcaaaagcatctgacaattggcctaacaggaagacaggtgccatagaatgaggggttaggagagctgaagtaccggcagatgctagctcagcctctagacaagatttctctctctctctctctctctctctctctctctctctctctctstctgtcttatgcacacgcacacacacagcaaactatctaagagccataaaatcagactaatcctacc

SEQ ID NO: 540755 - DNA, 541 bp, Homo sapiens
cttaggttagtgcacaagtaatcacagtttttgccattacttttaatggcatccaactaatatatggcaggagaaggagcaagaaagagagagagagaggaggtgctacacacttttaaacaactagatcttatgagaactcactcagcatcatgagaatagygccaaggggatggcgctaaaccattcgtgagacgcctgcccccaagatccagtcacctcccaccaggccccacctccaacactgaggattataatacaacctaagattttgtggggacacagatcatatcacttggcaaaacaacaacatagaaaagttatcaccagcctcttgcttttcctttctgtaccttacgccctgcaaagtgcgtgccccaagctctcccccaactcaattattccctctctgacgaagcagttggtgtgacccactcagtgaagtgtccttattaagggagagtttccacaacaggactttttccaactccccttctccaccctccagtttcccattctgtgagtcctaaaatcccccttc

SEQ ID NO: 540756 - DNA, 541 bp, Homo sapiens
cttaggttagtgcacaagtaatcacagtttttgccattacttttaatggcatccaactaatatatggcaggagaaggagcaagaaagagagagagagaggaggtgctacacacttttaaacaactagatcttatgagaactcactcagcatcatgagaatagcgccaaggggatggcgytaaaccattcgtgagacgcctgcccccaagatccagtcacctcccaccaggccccacctccaacactgaggattataatacaacctaagattttgtggggacacagatcatatcacttggcaaaacaacaacatagaaaagttatcaccagcctcttgcttttcctttctgtaccttacgccctgcaaagtgcgtgccccaagctctcccccaactcaattattccctctctgacgaagcagttggtgtgacccactcagtgaagtgtccttattaagggagagtttccacaacaggactttttccaactccccttctccaccctccagtttcccattctgtgagtcctaaaatcccccttc

SEQ ID NO: 540757 - DNA, 541 bp, Homo sapiens
cttaggttagtgcacaagtaatcacagtttttgccattacttttaatggcatccaactaatatatggcaggagaaggagcaagaaagagagagagagaggaggtgctacacacttttaaacaactagatcttatgagaactcactcagcatcatgagaatagcgccaaggggatggcgctaaaccattcgtgagacgcctgcccccaagatccagtcacctcccaccaggccccacctccaacactgaggattataatacaacctaagattttgtggggacacagatcatatcacttggcaaaacaacaacatagaaaagttatcaccagcctcttgcttttcctttctgtaccttacgccctgcaaagtgcgtgccccaagctctcccccaactcaattatyccctctctgacgaagcagttggtgtgacccactcagtgaagtgtccttattaagggagagtttccacaacaggactttttccaactccccttctccaccctccagtttcccattctgtgagtcctaaaatcccccttc

SEQ ID NO: 540758 - DNA, 482 bp, Homo sapiens
ctgcacttctgggaatcacatccacatcccaggcagaaggctgggtgtagtggctcacgcctgtagtctcagcactttgggagaccaaggcgggcagatcatttgagatcaggagttcaagatcagcctggtcaacatggtgaaatcctatctctactaaaaattcaaaaattagctgggcctggtggtgggcgtctgtaatcccaactactcgggagtctgaggagggaaaatcacttgaactcgggaggcagagtttgcagtgggactccatctcaaaaacaaacaaacaaaaaaacaaccattccaggcaaaaagaaggaagacccaggttaaaaggcaaatgttaaaaggctactttcagcatgagagaaaaagacagggtgctgggggagcagtaaaattcasggaccaccacatggaaattctaattcagcaccaaacaaatgtgaagctcagaggtaagataagcttaaaaagcc

SEQ ID NO: 540759 - DNA, 328 bp, Homo sapiens
gtttgtggctctaaatgttcctctcattcagaaattcaaggtttgataatgaaggagttgaagtcttgaggagcctccttttgatcaaatttgactgcaaccagtctgttctctaggaattcagagagaatgtaagcatgattacctaactttacagtttaaaaaagaattccttagactctgctttcatacaagataaagtaacagggactggcttaactctccagcctaaatcaatcaaaaaagtagacawtatacgaaataatcatattcaagtcactgtacatcagaaaatgaagcacagcaatcccagtgagactgtgagccc

SEQ ID NO: 540760 - DNA, 328 bp, Homo sapiens
gtttgtggctctaaatgttcctctcattcagaaattcaaggtttgataatgaaggagttgaagtcttgaggagcctccttttgatcaaatttgactgcaaccagtctgttctctaggaattcagagagaatgtaagcatgattacctaactttacagtttaaaaaagaattccttagactctgctttcatacaagataaagtaacagggactggcttaactctccagcctaaatcaatcaaaaaagtagacattataygaaataatcatattcaagtcactgtacatcagaaaatgaagcacagcaatcccagtgagactgtgagccc

SEQ ID NO: 540761 - DNA, 552 bp, Homo sapiens
gccaggagagagtagacagggaaggcatctcagaaaatgtgttatttaagatcagtcctatagaatgagatggacctaataatgtaaagaattctgggaccagagcaggcaggacaaaagtagtgtttaatggacaaagaccctaaagtgggcaggaaccaggcatattctaaaggccccaagaaagccagtgtggctggagcatgttgtacatgagacagatttaaggtgtggttggagagataaacagaaataaacatagaccatcacacgagacttattagtactgggaagaaatttagattttactctatattaagtrtgaagtcaccaaaggattttaagctgggaatgacatgatctggtttttattttaagaaggtcattcttcagaatgtctgacataaacacagttatgcaaatcagcatctttttccttctcctggaaattatacagaagcaataaaaagaataaaaaaaaaccacaaactcaatttcagctatactaggagataaatacagttcgcagacatcaaaatatgctaaaaggga

SEQ ID NO: 540762 - DNA, 618 bp, Homo sapiens
atactccataaggagctgaaggcttctttattcactgtttgtgccccagtgtctggtcaggtgcagaatgtctagtttggcttaktaaaagaaatatattaataataaatttactattatggcatctaactggaattacttaaaagtctgattaattacttgaaataacagtccaaccctgtggaaaataagataaaaatgttggaacaacttaattttagtatacattagtattattaaattttgtttgttttctattataaatcgtagcacttgggctgatacactgtagtgttatttttgttaaacattttatgtacatttaacttatggctagtctgtaaaaactcatatggtttctttatgttgagcttcataatgctgttatttgagtgttcactgatttttccccccattttttagtttagttcaaccaaggtgaaaaacaaaagcaagaaaaagaagccaaaggattcaaaggtatggagtattttctgtattaattcttgtctaaactctccaaaatagttagttggacatatacattagaattgagcaattcttgggatattttgaaacatttgtagagaaagactttctaggacttaaagatgtttt

SEQ ID NO: 540763 - DNA, 618 bp, Homo sapiens
atactccataaggagctgaaggcttctttattcactgtttgtgccccagtgtctggtcaggtgcagaatgtctagtttggcttagtaaaagaaatatattaataataaawttactattatggcatctaactggaattacttaaaagtctgattaattacttgaaataacagtccaaccctgtggaaaataagataaaaatgttggaacaacttaattttagtatacattagtattattaaattttgtttgttttctattataaatcgtagcacttgggctgatacactgtagtgttatttttgttaaacattttatgtacatttaacttatggctagtctgtaaaaactcatatggtttctttatgttgagcttcataatgctgttatttgagtgttcactgatttttccccccattttttagtttagttcaaccaaggtgaaaaacaaaagcaagaaaaagaagccaaaggattcaaaggtatggagtattttctgtattaattcttgtctaaactctccaaaatagttagttggacatatacattagaattgagcaattcttgggatattttgaaacatttgtagagaaagactttctaggacttaaagatgtttt

SEQ ID NO: 540764 - DNA, 618 bp, Homo sapiens
atactccataaggagctgaaggcttctttattcactgtttgtgccccagtgtctggtcaggtgcagaatgtctagtttggcttagtaaaagaaatatattaataataaatwtactattatggcatctaactggaattacttaaaagtctgattaattacttgaaataacagtccaaccctgtggaaaataagataaaaatgttggaacaacttaattttagtatacattagtattattaaattttgtttgttttctattataaatcgtagcacttgggctgatacactgtagtgttatttttgttaaacattttatgtacatttaacttatggctagtctgtaaaaactcatatggtttctttatgttgagcttcataatgctgttatttgagtgttcactgatttttccccccattttttagtttagttcaaccaaggtgaaaaacaaaagcaagaaaaagaagccaaaggattcaaaggtatggagtattttctgtattaattcttgtctaaactctccaaaatagttagttggacatatacattagaattgagcaattcttgggatattttgaaacatttgtagagaaagactttctaggacttaaagatgtttt

SEQ ID NO: 540765 - DNA, 535 bp, Homo sapiens
cagctcctcagaaagagaaggaaaaaggaagactctgacctacacaggcccagcttctcctgtcaaaccaggggaggaatgagaatgttaaaaagagacagccaggtagaaacaagagggatgtgtatgagttctttcctaacaaggaagagatgaaatcaagattctcctatggttgcctttatagggtatgaattcattaaatccttattgaattgccccactcattatgttttctaggaagctttgaaaaaaataggttaagagcaatggatcataatcatttycagatatgctaattctaaataactttcctaatatacatgtttacggaaagcatggaacatgatctaaatgggaaaaaaaacttgaaaaaattgtgggtgtgttttaaagtgttactacttgatgggcttattttactagagcgattgagataaagtgaattttattttttgttttgcccacaggtatcttggaacataatacaccaagaagtcaatactgagccatataatccttttgaggaacgaca

SEQ ID NO: 540766 - DNA, 535 bp, Homo sapiens
cagctcctcagaaagagaaggaaaaaggaagactctgacctacacaggcccagcttctcctgtcaaaccaggggaggaatgagaatgttaaaaagagacagccaggtagaaacaagagggatgtgtatgagttctttcctaacaaggaagagatgaaatcaagattctcctatggttgcctttatagggtatgaattcattaaatccttattgaattgccccactcattatgttttctaggaagctttgaaaaaaataggttaagagcaatggatcataatcatttccagatatrctaattctaaataactttcctaatatacatgtttacggaaagcatggaacatgatctaaatgggaaaaaaaacttgaaaaaattgtgggtgtgttttaaagtgttactacttgatgggcttattttactagagcgattgagataaagtgaattttattttttgttttgcccacaggtatcttggaacataatacaccaagaagtcaatactgagccatataatccttttgaggaacgaca

SEQ ID NO: 540767 - DNA, 535 bp, Homo sapiens
cagctcctcagaaagagaaggaaaaaggaagactctgacctacacaggcccagcttctcctgtcaaaccaggggaggaatgagaatgttaaaaagagacagccaggtagaaacaagagggatgtgtatgagttctttcctaacaaggaagagatgaaatcaagattctcctatggttgcctttatagggtatgaattcattaaatccttattgaattgccccactcattatgttttctaggaagctttgaaaaaaataggttaagagcaatggatcataatcatttccagatatgctaattctaaataactttcctaatatacatgtttacrgaaagcatggaacatgatctaaatgggaaaaaaaacttgaaaaaattgtgggtgtgttttaaagtgttactacttgatgggcttattttactagagcgattgagataaagtgaattttattttttgttttgcccacaggtatcttggaacataatacaccaagaagtcaatactgagccatataatccttttgaggaacgaca

SEQ ID NO: 540768 - DNA, 535 bp, Homo sapiens
cagctcctcagaaagagaaggaaaaaggaagactctgacctacacaggcccagcttctcctgtcaaaccaggggaggaatgagaatgttaaaaagagacagccaggtagaaacaagagggatgtgtatgagttctttcctaacaaggaagagatgaaatcaagattctcctatggttgcctttatagggtatgaattcattaaatccttattgaattgccccactcattatgttttctaggaagctttgaaaaaaataggttaagagcaatggatcataatcatttccagatatgctaattctaaataactttcctaatatacatgtttacggaaagcatggaacatgatctaaatgggaaaaaaaacttgaaaaaattgtgggtgtgttttaaagtgttactacttgatgggcttattttactagagcgattgagataaagtgaattttawtttttgttttgcccacaggtatcttggaacataatacaccaagaagtcaatactgagccatataatccttttgaggaacgaca

SEQ ID NO: 540769 - DNA, 611 bp, Homo sapiens
gatgggcttattttactagagcgattgagataaagtgaattttattttttrttttgcccacaggtatcttggaacataatacaccaagaagtcaatactgagccatataatccttttgaggaacgacaagtgagtcaaaattacattaaactgtttaaaggtttagttttcattaatttatctagatggaatgatgaactagaactattttggagtcagcttattccacacaaagttatcatggaataagcttgagaacataacaaaaaaatgattttgtttttattgttgaaatttgagaagggaaggaaaaggtaatttttttccagcatacttatttcaaattataacagcgttattgttttattttattatttttaaaattttatttatttttattttaattatttttgagacacggtctcactgtcatccaggctggccagctttattgttttaactggtataatgagcatataataatttataagtaagcttattcatgcgaataatacagaaagataaagaccttctctactataataatgattcaattagaaaacctactaatataatttagttcgttaatatgcatcataagagaaaagttg

SEQ ID NO: 540770 - DNA, 611 bp, Homo sapiens
gatgggcttattttactagagcgattgagataaagtgaattttattttttgttttgcccacaggtatcttggaacataatacaccaagaagtcaatactgagccatataatccttttgaggaacgacaagtgagtcaaaattacattaaactgtttaaaggtttagttttcattaatttatctagatggaatgatgaactagaactattttggagtcagcttattccacacaaagttatcatggaataagcttgagaacataacaaaaaaatgattttgtttttattgttgaaatwtgagaagggaaggaaaaggtaatttttttccagcatacttatttcaaattataacagcgttattgttttattttattatttttaaaattttatttatttttattttaattatttttgagacacggtctcactgtcatccaggctggccagctttattgttttaactggtataatgagcatataataatttataagtaagcttattcatgcgaataatacagaaagataaagaccttctctactataataatgattcaattagaaaacctactaatataatttagttcgttaatatgcatcataagagaaaagttg

SEQ ID NO: 540771 - DNA, 509 bp, Homo sapiens
cagctggggtaacatagcaagacctggtctctacaaaaaatttttaaaaattagcttggcatggtggggtgcacttgtagtcctagctacttgggagactgagatgagaggatcccttgggcctgggagayggaggctgcagtgagctgtgattgcaccactgccctccaacctgggtgacagaccctgtctctaaaaatatgtgtgtgtgtgtgtgtgtgtgtgtgtatagtgggtgtgtatatatatatgtaacaaaatattgggtattgtaatctcattttctacataaataatcccctatgttatttctgatatcgaagatagaaatccagatccatttttactaggtattgggttcttgatgatttttggaggtcattgatgggtcttctttcaccttggtttctcaggaaggagaactaatgaaaatgaaaggaaatgaagagttttccaaagaaagatttgatatagctattatctattacaccagagccattgaatatagg

SEQ ID NO: 540772 - DNA, 472 bp, Homo sapiens
cagtgtactttagtcgtcattactgttaycaccatcattttcattattattagaatgactctggcctacagcttgctttttgtcttttacaaaatatcttgtgtttcttcccatgttcagaacacagaggctcttccattcttcatttgctgtacagtattttgtaatatggctgtatcccccatttttgtgcatttaggctcttcattcctcttttcctccctcactttctatccctctatccatctctctctttttcttcttcctttgagagggatagatcagacagtacttcaaacatccttgcacatacacctttgtgcacctgttcatgtatatttacaataaatactttgtaaataatgtatagaagttgtttctgtagtgggattgctgtatcaaaggggatatgtaattttatctttgacagatattgtgaaatggttctcttagaaaataggcactgttcaca

SEQ ID NO: 540773 - DNA, 571 bp, Homo sapiens
atgggtaaccaaactgctttttcctctgtgatttgtgcagtggggcctccttttggatcttcattgttaggaatggtgaggaatacaacatacatatttgcatttgcggcccctttgaatggcgcacacgtgtatagcaaggagtgaggagattttaggcttaatgtctagccttgcctctccaatctttgtggaactttggtgacttacagctattcccatgtcactaaaatatgaattcaaattataatgcgtattcaaattacaaagtttttctcactttaagggcacatgatagcaattttgtttttattttttattccttatgttattccttttgcatttaacctattgttatctctcccagtaattttatctacttatattcaaatatatgttaggcaggagtacagttaacaattacagtatttatttcttgcttagaattaaggtttgtttcagagcaggatggcagttgttaaaatctggtagtgatcagaatttgattgtatgttcttaagtgtctattgttctrctcccaaacaattacttatttaaatgatggctgttg

SEQ ID NO: 540774 - DNA, 598 bp, Homo sapiens
gctcccaggatttccattagtcatgctcctgcctggctctcctggaatgtttacctacctatactgtttggcattataactttgctttctgaggttttgagtttgctataaatgttgaaatgctctagaattactcaagtataatatataatttggtctctatttttccctgtctagatgaaggtttaactctaacttgccacctagtgaggatctaagtagtcttttacgttctgttctctcccagaagttgacagtgcccaagattcattttccttgatctcwgtgtcacagattaataatgtctcccatgaatgctctctaattctattttccaagagacagttggagacagaacttcatgattttcattttattcctgacagaataataataaataccatattttaccttattagaattgaagaaatcatttattacatttgtgatttaatgtaaaatagcgagactgatttagaaaaaaaaaatgtgttatagtagaacttacatgtttaaaagaatttcatcagaggacagcccttgcttcaaacgtttttagaatgcctcctttggaactggcctcaaagctccattttgt

SEQ ID NO: 540775 - DNA, 639 bp, Homo sapiens
ccctgtagtaattccaatacaagaagcctagcccaaggacacaatttcataaagtttatccacaaaagatgtttgttgtactcattgtttaaaataggggaaaacaggagacagcccaagtggctagtgtctgggagccatcatgtttttgcctcaacaattgcaacacttcagtctttttggggtagtagtgaggaagccacttctgccactctgtcttccctatattcttttttattttttgagatggagtttcactcttgttgcccaggctggagtgcaatggagcaatctcggctcactgcaacctccacctcccgggttcaagcgattgtcctgcctcagcctcctgagtagctgggattataggcgcccacctccacgcccggctaatttgtgtttttagtagagacagggtttctccatgttggtcaggctggtctcaaacttccgacctcaggtgatccacctgcctcccaaattgctgagattacaggtgtgagccaccgcgcccarccccccatattctttatacccctgggaagagctgtgacttagccgatgggtgaaaacgagccaagagtgactgcatggagttgtctgctatccacctggccctgccacctcctgagcatgcag

SEQ ID NO: 540776 - DNA, 494 bp, Homo sapiens
aaaaggggtttcccccacccctgtacattccctcaaataggagctaaaaaggaaaataaaattgcaccaaaccatgagaggggaacatttaagcattctaatattgtaaatagacattcaggctgagtyttccatccaaaagctaggacaggaaataaatccttaagcataactaagagactaataaggaaatattttcaggggtttaaagcaaatagtttttttaatgcaaaaacaacataatcaagacatattatcacatgtcatatatgacagcaaatatgcttaccaggcttcttccaagagcaaatgagataaaagtactttgaaaccataaaacgttatgcaaatgtgcagtgatattagcgttatttgggaaaataaaagcactgggcttctcccttttcctgtttctcattccttttatttaccttaaaatacaagtttatttcttctcaatatacctgaggagttgcctagtaggaaatggaaca

SEQ ID NO: 540777 - DNA, 617 bp, Homo sapiens
ctgctggcaatggaggtgagggggagggtggggccgtgggtttccacttaatttgtttctcctggatctttggccctggcagcctcccttcagcatttygaggtacggataaacccccggagaaggtttgttcagattccatttgacaccagttatctcggtcaccctgtgtctgagtgccggctaagtagctgtccgcctgcatttcccactgcagtcttctcacttccaggacttgttagggtgcattagccagagctaattagcagtgagattgttgctgtggctcagagggtttcatagggcggctcttcgtggcttcagcatgggtgcacaccaagggatgacgtgaatagcgatcctgacagttgtgttttcatcagggagctgctgtgaccctctcgttggaatgccgtgaatatgatgtggttctgtcttccttgttgctactttttggcggggaagtgatgtgtgaattcggagaaggaagcagaggagggccgggtgggcgttgccctgggcaggtgctgtagagggaggggacagtgtggaaactgggctgagggagttaacccctctcaccaggccccttcccagcccagcgtccgcagaagtgg

SEQ ID NO: 540778 - DNA, 561 bp, Homo sapiens
ctgctggcaatggaggtgagggggagggtggggccgtgggtttccacttaatttgtttctcctggatctttggccctggcagcctcccttcagcatttcgaggtacggataaacccccggagaaggtttgttcagattccatttgacaccagttatctcggtcaccctgtgtctgagtgccggctaagtagctgtccgcctgcatttcccaytgcagtcttctcacttccaggacttgttagggtgcattagccagagctaattagcagtgagattgttgctgtggctcagagggtttcatagggcggctcttcgtggcttcagcatgggtgcacaccaagggatgacgtgaatagcgatcctgacagttgtgttttcatcagggagctgctgtgaccctctcgttggaatgccgtgaatatgatgtggttctgtcttccttgttgctactttttggcggggaagtgatgtgtgaattcggagaaggaagcagaggagggccgggtgggcgttgccctgggcaggtgctgtagagggaggggacagtgtggaaactgggct

SEQ ID NO: 540779 - DNA, 617 bp, Homo sapiens
ctgctggcaatggaggtgagggggagggtggggccgtgggtttccacttaatttgtttctcctggatctttggccctggcagcctcccttcagcatttcgaggtacggataaacccccggagaaggtttgttcagattccatttgacaccagttatctcggtcaccctgtgtctgagtgccggctaagtagctgtccgcctgcatttcccactgcagtcttctcacttccaggacttgttagggtgcattagccagagctaattagcagtgagattgttgctgtggctcagagggtttcatagggcggctcttcgtggcttcagcatgggtgcamaccaagggatgacgtgaatagcgatcctgacagttgtgttttcatcagggagctgctgtgaccctctcgttggaatgccgtgaatatgatgtggttctgtcttccttgttgctactttttggcggggaagtgatgtgtgaattcggagaaggaagcagaggagggccgggtgggcgttgccctgggcaggtgctgtagagggaggggacagtgtggaaactgggctgagggagttaacccctctcaccaggccccttcccagcccagcgtccgcagaagtgg

SEQ ID NO: 540780 - DNA, 615 bp, Homo sapiens
agtgtagttatgaaaatcaaatgtgaaagtggatgtgaaaatattgataaactaaagcaacctcacaagtggaacaagctaatacatgggattaagtgtaagtttcttttttttctttctttttttttttacttattcccctagattttctggtctttttcacaaagattatggattcttcttagaatcaggaaaaaagtaatttccatttcagtaaaagatgctgtagacctggaataagtacttagatatttatttgaaaaaataggtccataagtagaggtgatgatagaatttatcttctatggagatgacttttgaaagtgaaagagtatgctatcattaattacaccagtgcaagtgtcatacactgaaatgatctggggaaattagagacaattggtcatctctatataagggacacttaagctaatactcatccacaaatgcctcttaaaaataaaaaaggtaccacctgaggaaagaggggtgtgggaggatgaagaagttggtgaatgggtmcaaaaatatagctagatagaaggaataagttctagtatttgatagaaaagtagggaaattatagttaacagtaatttattacgtatttcaaga

SEQ ID NO: 540781 - DNA, 588 bp, Homo sapiens
ccaaaataggacagggaaggcgtgaaggagaggaggcttatgtgtctgagataaatactgcttctaaggacttgctaaaaatcccataagaaaccatttcacgtccttcacgaatctctggccttgacaaggtttaccaccagacattctttaggactgcagtgatccagatgagatgctcttgaaagaacacttgcccagtgacagcatctttaccaatgaactgacaacaactggctttgagcctctggaccaatggactctgtttctaagcagcttatgtggacctctctcttttgctaataaaatcttccctttgccttccctcacgggaggcactggcagtttaccatcctatgcattctatgttataatcctcatttctcactcccgcataaactccatatatttggagataattttcttcactgtcttttttttttcaggctgacacccatgygctgaaagaggaaataatggatgtcagtttcaggcccaggcctctaagagctggagcctcatcttctggtttctctcccacagtgaccgtggatgccttttctcccaaaaagggcagctctcgaaggc

SEQ ID NO: 540782 - DNA, 588 bp, Homo sapiens
ccaaaataggacagggaaggcgtgaaggagaggaggcttatgtgtctgagataaatactgcttctaaggacttgctaaaaatcccataagaaaccatttcacgtccttcacgaatctctggccttgacaaggtttaccaccagacattctttaggactgcagtgatccagatgagatgctcttgaaagaacacttgcccagtgacagcatctttaccaatgaactgacaacaactggctttgagcctctggaccaatggactctgtttctaagcagcttatgtggacctctctcttttgctaataaaatcttccctttgccttccctcacgggaggcactggcagtttaccatcctatgcattctatgttataatcctcatttctcactcccgcataaactccatatatttggagataattttcttcactgtcttttttttttcaggctgacacccatgcgctgaaagaggaaataayggatgtcagtttcaggcccaggcctctaagagctggagcctcatcttctggtttctctcccacagtgaccgtggatgccttttctcccaaaaagggcagctctcgaaggc

SEQ ID NO: 540783 - DNA, 585 bp, Homo sapiens
cttatcatggtattgtgattaagtggaacatctctttgtatttcccacatatgcaagagtccattttaaaagaatttctacccacacttcttttatcacatttgttcatgtttcatgttgtaaacataatatttgcttttggaggaaaatgtagaaaacgtgaatgtaaaaaaaaatcatggattgacattattctcttggttgtattttatttccatctctgaaaaaatgcatacaccattattatttttataaaattaagattatatgactgctttgcatgcttatttttaaatttggtattatgttttgaaaaattttctaggtcattaaatacttttggaaatcagcatgatttgaaacacagagagagaactccatgtgaagatgaaggtagagattgaggtgacacagctacaagccaaggaayaccgaagagtgccagcaaccactggacgctatgggagggcctggaggaggttctctcccatgacctcagaaggaaccagacccgcctggtctcagacttctggccttgagagctattttgattcaaggctaaaagaacatcaaaggagcacttga

SEQ ID NO: 540784 - DNA, 628 bp, Homo sapiens
agggtgaaccggtacttatttcctaactagaaattaccatttttgtgcttttaaattgataattatcagcaccatactttattcacttttgtcataaggtccttccttttaattaaaattgagatgcttcacatttcttgcgttcccttaagaaaatctttcaagtgtttaagtccctgatattggaaagctttaattacagcatagaaaaagaagagtggaaagagctggggcggggggatgtgtcccttcatttcccgtgaacatgatcacactgggaactcagggaggtccagtgcatttgtcaacttgccaaacattatgttcattaaaggccagaaagtatccctggggggtggatacacttgagctcatttccaatcattttacctgctctgcctcatttcagagcccagtcagatcattaccagacttcycacattgtcctaaaaaaatgcattaaaattaagtcacaacagacatccaggtttgcacctgtatctcacacctgtgaggatcgcttttatattgaaataagacaaggttctccagagaaacagaatatatatatatatatatatgtatgtattaccacacacgcatatatatatgtatgtatacatatatg

SEQ ID NO: 540785 - DNA, 591 bp, Homo sapiens
gaaaacttaggcagaagttaatgctactgtcttgaggcagaatttgttttttttgtttgtttgttttgttttttttttcaggaaacctcagtttttgctctgaaggccttcagctgactgaatgagggccatgcacatgatccagttatcaaggagaatctctttacttaaagtcagctgagtaaattgtctaaaaaatacctccacagcacctagatgagtttgatgacataactgtgtattrtatagcctagccaagttaatacataaaactcatcatcacaggcatcaagctcaaatgttagggtttgcagtggactaatgcatacttaagtacctagatgacacccagaagggacaaaagccctgagcttccccactcagcatgctgccacctccatacccatgttgactctctttctgttttcaggttgtaacccacgtattctggttctgacctgctctattttctctttatcctcctggagcaggagtgaagtagcaagtatgttgagtcataagacagatttcactattccttgaatgctgacagaactcagagtcttatgtctcatgattttccacttgatt

SEQ ID NO: 540786 - DNA, 591 bp, Homo sapiens
gaaaacttaggcagaagttaatgctactgtcttgaggcagaatttgttttttttgtttgtttgttttgttttttttttcaggaaacctcagtttttgctctgaaggccttcagctgactgaatgagggccatgcacatgatccagttatcaaggagaatctctttacttaaagtcagctgagtaaattgtctaaaaaatacctccacagcacctagatgagtttgatgacataactgtgtattgtatagcctagccaagttaatacataaaactcatcatcacaggcatcaagctcaaatgttagggtttgcagtggactaatgcatacttaagtacctagatgacacccagaagggacaaaagccctgagcttccccactcagcatgctgccacctccatacccatgttgactctctttctgttttcaggttgtaacccacgtattctggttctgacctgctctattttctctttatcctcctggagcaggagtgaagtagcaagtatgttgagtcatargacagatttcactattccttgaatgctgacagaactcagagtcttatgtctcatgattttccacttgatt

SEQ ID NO: 540787 - DNA, 517 bp, Homo sapiens
tttcttaattgaaggggtcaagctaaagttcttatcaacaaaagtgatgttgcttaggaaagtcatattccttagctaattttaggtgctgttttgtgcttcctgtgttaccaaccttctaaacagtaaataagagaacattgctgtctataaaaaaatcttttasttgtagtgtcaacttacaaaagaattgacaaaaaggagtggaagttcttttaagtccttgccaggctgcagagcagagctagaagaacataaagtcttaatcctttccctgctctttaccttgggggtggtggatgtttttcagggctctgtgggggactggcgtggtgtttggtcatgctgactggggagccagatgatctatctgagctctggtgttggctttgccatgtattctgaaccgtcgaatcaacccctattccaggatggttgattttatgtgtcaacttggagacattttgggatgaaattaacgtttaaattgatacactaagtaaagtgcattgctctt

SEQ ID NO: 540788 - DNA, 589 bp, Homo sapiens
tgaggtcatctcttggtgagcccatgcctggccttacagagcagtgacagatcacctgtcacccccgcaacaggcaagtggccccatgtccatgagccacagggtgccagggatgtgggattgyagctcccctgtgggtcccctcaatgaagggaattattcctccaaggagatttgggtcctctgctgctctcagacagtcagttgctttctgactcgtccacacaatggatactgcgtccaattgtatcacaccatcgtggacggctggagtcacatctaaaatgtccttgtacctccagcctccatcactgcacacctgtaactctgctcaccctaagtgcttaatgaacatggtggatgggctggtatacaaatgccttttgggggtggtttgacttacagccatctctgctctcactacagaaagaggagaggagcctcacagaggtaatgtcagtggaagaacctccaaccctcctttgaacacattcctaacaaagaaacctgcatgctttccccaccttttctcctacctgtcttgtgtcagagcagtgcctccctgctgctgatttagaaccaaccaaca

SEQ ID NO: 540789 - DNA, 589 bp, Homo sapiens
tgaggtcatctcttggtgagcccatgcctggccttacagagcagtgacagatcacctgtcacccccgcaacaggcaagtggccccatgtccatgagccacagggtgccagggatgtgggattgtagctcccctgtgggtcccctcaatgaagggaattattcctccaaggagatttgggtcctctgctgctctcagacagtcagttgctttctgactcgtccacacaatggatactgcgtccaattgtatcacaccatcgtggacggctggagtcacatctaaaatgtccttgtacctccagcctccatcactgcacacctgtaactctgctcaccctaagtgcttaatgaacatggtggatgggctggtatacaaatgccttttkggggtggtttgacttacagccatctctgctctcactacagaaagaggagaggagcctcacagaggtaatgtcagtggaagaacctccaaccctcctttgaacacattcctaacaaagaaacctgcatgctttccccaccttttctcctacctgtcttgtgtcagagcagtgcctccctgctgctgatttagaaccaaccaaca

SEQ ID NO: 540790 - DNA, 448 bp, Homo sapiens
cagaaattgcccagctttggtcttctggaagtctaagcccctgggggatttcagagaatctactgagctggcaaaataaaagggcttaggggtatgtattagcccattattgctataaagaactacctgaaactgggtaattgattaagaaaagaggtttaattgattcagttctgcaggcttaacaggaagcatgactgggaggcctcaagaaacttacaatcatggcggaaggtgaaggggaagcacgttttaccatagtggagcaggagggagagagagacaaggggaaagtgccacacacttttaaatgatcagatctcatgagaactcactatcacgagaacaacaaaaggggaagtccaccccccrtgagccaatcacctcccaccaggtccctctctcaacactggagattacaactcaacatgagatttggatggggaca

SEQ ID NO: 540791 - DNA, 586 bp, Homo sapiens
caagaaaacaaaagtagactttgcagacagagtcaggtttcwaacctgacctcccttatcattggctgtgtgacacaggaaaagttacttaacttctctggacttctaattccttttctgtaggatggagatagtaacctcccagggctgttatgagacacagaagggaccacagacattctatggggggcattctgcgggatgggagctgtttgattgttatttcacatgattgtattaacattcccagagtgtttcagcttccgtcattttcttttttctaatctatcctgaacattgctgccagatcagtcttcctgaagcatgactgataataatcatctcaaaacatagtcattatttttatttgaatggttatatggcagagttgcaaatgaaaagctgagcagaaggctgagaagagaccacagcctcaggagcctgggctactagatgaaagccagcatgagcaaaaagggcctgtggctctgtgtttgggacaatgttgtaactacctgtgtccatctctccacggaccaaaagcaccctgagctaaaggactatatctcattatccttggcattca

SEQ ID NO: 540792 - DNA, 608 bp, Homo sapiens
gccatggcgagcacaaacaccccacaggatgcaggccacgtcgtcacactccagtgctacctatgggacagggagagcagggcccgggggagaaggagcaggtgatctccaacagaaacgccagccgggatgtcctgtggtaaacaccctcagtggtagggtcttcagagtgtggtaaatggggcggctgctcccttgggccccgagccctgagagacacatgggcagggagttggagccctgagttctaatcycaccatttctccactttctggaccttgctgtgggcagctatttctcctttctgtgtctgtcccacctgtaaactaagagcactgatctcagttcccgggacaagcccttaggggtcaggcatgccaggatgttccagtcctcttgaatgaaagtcaggtgtgggagtcacattttagctaatactttcagatccttgtttgtttggtcccactaatattttaggctactcaagaatggagcatgtagtatgctgctgcaatacatttttaggtttgcagaggtaaaccgtaataatagtgagaaacagccagccagtcatacacccagagttctcttcctctccctccttccct

SEQ ID NO: 540793 - DNA, 407 bp, Homo sapiens
ctagatagatagatagatagacagatagagacatagatagagaaaaaaatagatatagatagaataaatagatgataaatacataggatagataaatagctagatgataggtaatatatatagatatgtagatgtttaatrgatacataaaataggtagataaataggatggatagatacataattgatagataactaggacagatagatacatgatagatacattgatacacaggatagataaatgatagatagataagatggatagatacatagataaatagattagataggagagatgatagataggtagatagatagatagaataagatggttgatagtcacatagaataagaaggatgatagatgatagagagagggatagaaagataggatagatgatggg

SEQ ID NO: 540794 - DNA, 233 bp, Homo sapiens
tagattgtagattcaatagataaatacacagagaatacattaaatagatgaatggatagatggatgaatggatagacacagacatagatagatagatagataggtggtcttcatgtaaagacaaggtgtttcttctggaagattcatcaggaaggygccatcttggaggcaaagaagagccctcatcagggctgtttatctatccacctacctatctatcaatatctattgat

SEQ ID NO: 540795 - DNA, 427 bp, Homo sapiens
gtgtggggcacaggtttcctggtgacccagggaagggatcaaattgctgtgtccactttgcaacaccagcatctaccaggtactgcgaggcagaagctcaaaaccatgcatgactttccttggctttttttttttttaataaacctctgttcaaaaataaacttaacaygtttttctgagcagcctgaacctgttcccaatttcttgtccacacaataaaaaatatacaagtgcattattttaagggtgactctagctgacctttctgtggggagaaaaacggcacctgcctggagccagaagcgtgttcggagagtttgatggcgtttgatgttaaggcaggggccacctgggtcggcctgtcatcgaatgacgttttcacaccagtccccaaaacaggagatctggaaaatctgacatccaaggt

SEQ ID NO: 540796 - DNA, 637 bp, Homo sapiens
gtgtgcagtggacacatggtggattgacatatttttttctttacttttgaatagttggattttttttttcaagacagagtctcactctgtcacccaggctggagtgcagtggcgcgatctcagctcactgcaagctcgcaagctctaccttctgggttcacgccattctcctgcctcagcctcctgagtagctgggactacaggtgcccaccaccaggcccagctaatttttttgtatttttaggcgagactggatttcactgtattagccacgatgttcttgatctcctgacctcctgatccgcccaccttggccttccaaagtgctgggattacaggtgtgagccaccaagcccagccgaagatgacttcttaaaatagacacgaagtatgaaaatacttgtagcccaagtaaattcttattagagggaatccactgaagaggagtaatcgtatgcatacaatgacatgttatataatagatgttagtcagctgatacttgttcaatgggctcatgracagatgcacataatattaaggatagaaggtattcacgactttacataatcaaattgtatctggaccaatgtagaacaactaaggctaatatgacagccttccctcaggggctaccca

SEQ ID NO: 540797 - DNA, 250 bp, Homo sapiens
attttccagtgttaggagtatgcttcaatgctggtgaccggtactactttctggtaaactatagatgacatgtgtgctttcattgcctaaactcactttgtagaacaccattaaatgaaaatcatcaccagyaatttgggaggctaaggcgggcagatcatttgaggtcaggagtttgagaccagcctggccaacatgatgaaaccccgtctctactgaaaatacaaaaacttatccaggcatggcggga

SEQ ID NO: 540798 - DNA, 552 bp, Homo sapiens
gcagcagctggggaaattactgccatcagaattgaaagaagggactgaaacccacactacagtattcagtacataatcccctcctccagaagtattaccccatctacacatagccagaatcacatttaggtgattacttactgactttcactaagaatatttctatgagagtcaaattatttaaaaacattatagagtacatagtattccattttatggatacaccataattcatttaacatcatttcaaaggtcagtgattccaattttccctcctaaaaataacattactgtaataacctgggaagcaaatatttatgtacwtcttcaatgactttctcaaaaaagacatgagagtcaagaaaaaccattaagagtcaatactccaaatactcaaaatctactaaaatttgctttctaataaggttcataatatcctagcaaatgttaccatgtgacttttccagaaaccttgaaaaagggtatcttagtgtcataaacatactccactgattggtgttaaaattaaagagtatcgtagcataattttct

SEQ ID NO: 540799 - DNA, 552 bp, Homo sapiens
gcagcagctggggaaattactgccatcagaattgaaagaagggactgaaacccacactacagtattcagtacataatcccctcctccagaagtattaccccatctacacatagccagaatcacatttaggtgattacttactgactttcactaagaatatttctatgagagtcaaattatttaaaaacattatagagtacatagtattccattttatggatacaccataattcatttaacatcatttcaaaggtcagtgattccaattttccctcctaaaaataacattactgtaataacctgggaagcaaatatttatgtacttcttcaatgactttctcaaaaaagacatgagagtcaagaaaaaccattaasagtcaatactccaaatactcaaaatctactaaaatttgctttctaataaggttcataatatcctagcaaatgttaccatgtgacttttccagaaaccttgaaaaagggtatcttagtgtcataaacatactccactgattggtgttaaaattaaagagtatcgtagcataattttct

SEQ ID NO: 540800 - DNA, 633 bp, Homo sapiens
tactgccatcagaattgaaagaagggactgaaacccacactacagtattcagtacataatcccctcctccagaagtattaccccatctacacatagccagaatcacatttaggtgattacttactgactttcactaagaatatttctatgagagtcaaattatttaaaaacattatagagtacatagtattccattttatggatacaccataattcatttaacatcatttcaaaggtcagtgattccaattttccctcctaaaaataacattactgtaataacctgggaagcaaatatttatgtacttcttcaatgactttctcaaaaaagacatgagagtcaagaaaaaccattaagagtcaatactccaaatactcaaaatctactaaaatttgctttctaataaggttcataatatcctagcaaatgttaccatgtgacttttccagaaaccttgaaaaagggtatcttagtgtcataaacatactccactgattggtgttaaaattaaagagtatcgtagcataattttctgcaaattaccatttcttttgtctatttatcaaatgtgttagtgtacctccaactgacccatagaagtacrtcacttattttaggcatagaaaagccat

SEQ ID NO: 540801 - DNA, 477 bp, Homo sapiens
gattgttttcaaagaaagttaaaagcatatgtttgttaactttagaaattaatcagtgacataactgaaattttaaatccaggattgtaggccttagtagcacaccaaagtttacacattaaagagtaaccaattagtctctgctggcagactagctggtccacaccacacagcagtgstgtcttcatactcacttgtagtcactaagcaattatttggtgtcaagaaatatttaaatccaggctttctgacccctaaactattacagtctctttcttgtgcaactaaatgtccttaaccacaacttcttttccaagggcttgaaaagagcaaatgttgaactccacacactaaaaaagaatattaacaacaaaaacataaaacagctacaacttcagcttttgccattccgtaggagagaatatttatcactctctgtatttctcttttaattcatattgcaagcttatcagggaa

SEQ ID NO: 540802 - DNA, 667 bp, Homo sapiens
tgtgctgcactctgttactaaaggtgaaagttacctttccggaatttggagacagatccaactcttgggaagttggttcactggatgtgcaaggaaatgcaaactaataataaagaagtgaaatattcaatcctttggttattgttatctgtaatagctaaaataaaaataaaagagagcactaggaattagggtgtatgactgtgatagccacctcttggaattggtggcttcatgttttgctgtgatgattaaatgatatagtgggcataagcatctttttttttctttaccataaaccactgcacatctctaaggtattacaattatactgtaagggtttttttatttgtttgttttttgagatggagtttcgctcttcttgcccaggctggagtgcaatggcgcaatcttggctcactgcaacctcygcctcctgggttcaggagattcttctgcctcagcctcacaagtagctgggaattacaggtccttgccacaaagcctggctaatttttttgtatttttagtagaggcagggtttcaccatgttggtcaggctgatctccaactcctgacctcaggtgatccacccacctaggcctcccaaagtgcaggcatgagccactgtaccctgccatgtactgtaaatcttaaagaacactaa

SEQ ID NO: 540803 - DNA, 557 bp, Homo sapiens
agcagggtgaccttgccctctggtctggccgcagttggggaattgagcctttttgcctgcaagctttctcctcctcctcacccatgccactgaggaaatggtaggaaatgattctgggaagttcttctcaaatttcattgtcattcttggcatggatggtcagaaccaggaagagacttgtcttgtaacagctttttgaggggatccacacatattcatcagaagaaagataaatttytgccaggcacagtggctcacacctataatcctagcattttgggaggctgaggtggggagattgcttgagaccagcctgggcaacatagtgaaaccctgtctctacaaaaattagccgggcgtggtggcacatgcctgtagtcccagctactctggaggctgaggtgggaggatcacctgagcccaggcagttgaggctgtagtgagctgagatcacactactgcactccagtctgggtgacagagtgagaccctgtctttttttttttttttttttaaagaaaagaaactttttaataataaaaaagattaacacaaaa

SEQ ID NO: 540804 - DNA, 634 bp, Homo sapiens
ggtaaaacaagtttgcttgtcttctaaactattatttgtcacttttgcatccatcccaamcataaaattttgctgtaaaattaaagaaaaacatttactaacaggataaaataccttaccacaaagcttcctgggtataatactcccaatgataagtggtaaaaataaacctatctatccatatatatttttaatttttcagagcagtgcttatgttttgtatagctaattgctgtaagtctgtaacaaaaaccaaactcacagcagctcaacacatagaagttaaaaataagtcagtcttgcaactttgccttttggtttttctgctggcctttttacttaaactaataatttttaaaagtaacaaatggctgtccacaacccttcctatctggcctagaacaattaattggctataagtcttttaactcttatggtcctcagccatagatagtcctgccaaggaaaaaaataacactgtagaattatataacttctcctgcgacaaaaccttttccctccaaataccagtatatggtgcaacacaaaagtcggttggtgggggtggtgggcgggaaatagatttgtctactgttaacaagtctatcacaatttaaacactgaggaccaggtg

SEQ ID NO: 540805 - DNA, 523 bp, Homo sapiens
tggtaaaacaagtttgcttgtcttctaaactattatttgtcacttttgcatccatcccaaccataaaattttgctrtaaaattaaagaaaaacatttactaacaggataaaataccttaccacaaagcttcctgggtataatactcccaatgataagtggtaaaaataaacctatctatccatatatatttttaatttttcagagcagtgcttatgttttgtatagctaattgctgtaagtctgtaacaaaaaccaaactcacagcagctcaacacatagaagttaaaaataagtcagtcttgcaactttgccttttggtttttctgctggcctttttacttaaactaataatttttaaaagtaacaaatggctgtccacaacccttcctatctggcctagaacaattaattggctataagtcttttaactcttatggtcctcagccatagatagtcctgccaaggaaaaaaataacactgtagaattatataacttctcctgcgacaaaaccttttccctcc

SEQ ID NO: 540806 - DNA, 523 bp, Homo sapiens
tggtaaaacaagtttgcttgtcttctaaactattatttgtcacttttgcatccatcccaaccataaaattttgctgtaaaattaaagaaaaacatttactaacaggataaaataccttaccacaaagcttcctgggtataatactcccaatgataagtggtaaaaataaacctatctatccatatatatttttaatttttcagagcagtgcttatgttttgtatagctaattgctgtaagtctgtaacaaaaaccaaactcacagcagctcaacacatagaagttaaaaataagtcagtcttgcaactttgccttttggtttttctgctggcctttttacttaaamtaataatttttaaaagtaacaaatggctgtccacaacccttcctatctggcctagaacaattaattggctataagtcttttaactcttatggtcctcagccatagatagtcctgccaaggaaaaaaataacactgtagaattatataacttctcctgcgacaaaaccttttccctcc

SEQ ID NO: 540807 - DNA, 634 bp, Homo sapiens
ggtaaaacaagtttgcttgtcttctaaactattatttgtcacttttgcatccatcccaaccataaaattttgctgtaaaattaaagaaaaacatttactaacaggataaaataccttaccacaaagcttcctgggtataatactcccaatgataagtggtaaaaataaacctatctatccatatatatttttaatttttcagagcagtgcttatgttttgtatagctaattgctgtaagtctgtaacaaaaaccaaactcacagcagctcaacacatagaagttaaaaataagtcagtcttgcaactttgccttttggtttttctgctggcctttttacttaaactaataatttttaaaagtaacaaatggctgtccacaacccttcctatctggcctagaacaattaattggctataagtcttttaactcttatggtcctcagccatagrtagtcctgccaaggaaaaaaataacactgtagaattatataacttctcctgcgacaaaaccttttccctccaaataccagtatatggtgcaacacaaaagtcggttggtgggggtggtgggcgggaaatagatttgtctactgttaacaagtctatcacaatttaaacactgaggaccaggtg

SEQ ID NO: 540808 - DNA, 627 bp, Homo sapiens
atgtgttccaagtatgaagtgccaagtgaagatcaattaaaaagtcaagagaccagaatcttgaagtataaagcatctaagggagaaagactgcttgagttaccgtggacttttcaggggaccttaaaagcggtratgtgacgaccttagacctggaattggattagcctccttgtgagttacacaaagagatcatcctaaacctgcaggaggaaacacctattcattttagactgaaagctttaagcctgtcttggaatccttcattctcttccccttggccaatggctgttactaaatagaatggtgggtaaacaggattcagatttagactgtgggaaagcagttggcctccacctacaagacatactaatagcagattacattccctccagggagataatctttaacacaaggcagaccccagccctccaatctaacagcaggccaggaaggcaagataaagctaaatggccactccatccgtaaaccatttgcacagcacattggtacaaataggaattctggatcccagggccaacatttaagactagccctttacctttcgtttgctgcaaaaaaatagttccagttctcttttgatgccaagactcttaggtcagattt

SEQ ID NO: 540809 - DNA, 604 bp, Homo sapiens
aggttcctccctaaaggcttcattttaacttactcacctctttaaatgccctatctctaagtagtcacattctgaggtactggggctgagggtttcaacatatgaatttgtggaggaaagaattcagcccaaaacactctccttaaatattaacatttaccaatgctaattcttttattttaaaaaagtaactctttactaagaggtgctataattgtgtgacaatgggaaaaggctagtccagttttggggtacctttaaatggtaggcatctcggccaggcacggtggctcatgcctgtaatcctggaactttgggagtccaaggcgggcatatcacttgaggtcaggagtccaagaccggcctggccaacayggtgaaaccctcgtctctactaaaaatacaaacattagctgggcatggtggcatgtgcctatagtctcagctactcaggaggctgaggcacaagaatcgcttgaacccaggaggtggaggttgcagtgaaccgagattgcgccactgcattccagcctgggtgacagagggagactccatctcaaaacaaaagcaaaaacaaaaacaaagaacaaataaatggcaggca

SEQ ID NO: 540810 - DNA, 578 bp, Homo sapiens
tggtaattggcaaaatattatacaactcaagtctttctgggaytaagacaatatgagctgtacactctaactgtccgtccttcagctctttgcacaccttccactactcctgctggagtcttcctctttcctcatacccaaacccctgaaaaaagagcctgcactcatgtctcttccacctcacttcccactcagttgttagcctaccctgtctccacctcccccttccccagagaggttcaggcaaagcttacccatgaccaccacgcttaaatccccagtagactctcatcagcccatgtggcttaattctctgcagctagaacaccgttgatccttccatccattcttggcacatgcttttctttgcttggtttttagagcacctctgttctcttcctctctttccatccagcccctctcagtctcctacatgggctccctccctctgccctcttcctctctttccatccagcccctctcagtctcctacgtgggctccctccctctgcccatgccttgcatgttgatgtgcccatctacctgtgcttggccttcctttgactcataaattcatt

SEQ ID NO: 540811 - DNA, 487 bp, Homo sapiens
aaataatactcaaactgattctgaatagtagctctggtttttaaacatgtccagtgatttaaaggctcaaatatttaayaatcatgcacaaaggctcaaatatttaataagtaagcacataggccgggtgtggtggctcacgcctgtaatcccagcactctgggaggccaaggcaggtagatcacgaggtcaggagttcgagaccagcctgaccaatgcggtgaaaccctgtctctactaaaaatacaaaaattagctggccatggtggcatgtgcctgtaatcccagctactcaggaggctgaggcaggagaatcgcttgaacccaggaggcagaggttgcagtgagctgagatcgcgccattgcactccagagtgagactctgtctcaaaaaaacaaaaaaaaaaccaaaaaaaaaaaaaacatgcacagtttttagcatcttgactgaaaaatttggatgtgtagacatcccctgagtatttgt

SEQ ID NO: 540812 - DNA, 487 bp, Homo sapiens
aaataatactcaaactgattctgaatagtagctctggtttttaaacatgtccagtgatttaaaggctcaaatatttaataatcatgcacaaaggctcaaatatttaataagtaagcacataggccgggtgtggtggctcacgcctgtaatcccagcactctgggaggccaaggcaggtagatcacgaggtcaggagttcsagaccagcctgaccaatgcggtgaaaccctgtctctactaaaaatacaaaaattagctggccatggtggcatgtgcctgtaatcccagctactcaggaggctgaggcaggagaatcgcttgaacccaggaggcagaggttgcagtgagctgagatcgcgccattgcactccagagtgagactctgtctcaaaaaaacaaaaaaaaaaccaaaaaaaaaaaaaacatgcacagtttttagcatcttgactgaaaaatttggatgtgtagacatcccctgagtatttgt

SEQ ID NO: 540813 - DNA, 430 bp, Homo sapiens
aaaacactttatttctgatctccaactgtgcctaatggatgttatagtaggtcaaataatggtccctaaaggtgcctgtgtcctaatacctgggccctgtgaatacattaccttacatggccataaggcctctacagatgytattaaattaagaaacttgagataaggagatgatcctagattatctgggtgggcccaatgtaatcaacagggtccttataagaagaaggcaatatgacaactgaagcagagattggagcaatgtggctacaagctgagaaatgcgagcagcctctaggagctgaaagaggcaaggaacagattttcccttggagtctccagaaggaaccaggcctactgacaccctcacagtagcctggtcagactggttttgaacttctgacctccagaagtgtaaaataatatagat

SEQ ID NO: 540814 - DNA, 430 bp, Homo sapiens
aaaacactttatttctgatctccaactgtgcctaatggatgttatagtaggtcaaataatggtccctaaaggtgcctgtgtcctaatacctgggccctgtgaatacattaccttacatggccataaggcctctacagatgctattaaattaagaaacttgagataaggagatgatcctagattatctgggtgggcccaatgtaatcaacagggtccttataagaagaaggcaatatgacaactgaagcagagattggagcaatgtggctacargctgagaaatgcgagcagcctctaggagctgaaagaggcaaggaacagattttcccttggagtctccagaaggaaccaggcctactgacaccctcacagtagcctggtcagactggttttgaacttctgacctccagaagtgtaaaataatatagat

SEQ ID NO: 540815 - DNA, 604 bp, Homo sapiens
gaagacgatatgggagggcccagggcagggaagagcagagggatgggacagtggcatttgtgtctttccagcccaaacgtatgcctgaggctgagtccggtcaggtagcaagcagaggctgcaagaagtgcttttaagaattctgagatgtgaggcacaagtggccccctgcccaggcaagaaagggygacattgagtggtggacagaagcattttctccacttctgtactgagtacagctcagctctagcacagtgaggaatgagggacagatggcactatttgaccctttctcaagaacagactggggctacccctggattttgctctctggtcatcaagcaacagggagccccatggccaaggtaagggacagtcagcatccagtgggggctggggacagaagcagatgaaaggaccattgtgcgcataggcaagacccctggggactcaaagaagcacctagaggaaattctgttttgtagacgtagtggtgggaggaggcaaggacctgtatctggtaggtgggagcacgagccaacagaatacaagctattcgtgttcacttaacttcatctgtgccctctggctggtgaagccagga

SEQ ID NO: 540816 - DNA, 604 bp, Homo sapiens
gaagacgatatgggagggcccagggcagggaagagcagagggatgggacagtggcatttgtgtctttccagcccaaacgtatgcctgaggctgagtccggtcaggtagcaagcagaggctgcaagaagtgcttttaagaattctgagatgtgaggcacaagtggccccctgcccaggcaagaaagggtgacattgagtggtggacagaagcattttctccacttctgtactgagtacagctcagctctagcacagtgaggaatgagggacagatggcactatttgaccctttctcaagaacagactggggctacccctggattttgctctctggtcatcaagcaacagggagccccatggccaaggtaagggacagtcagcatccagtgggggctggggacagaagcagatgaaaggaccattgtgcgcataggcaagacccctggggactcaaagaagcacctagaggaaattctgttttgtagacrtagtggtgggaggaggcaaggacctgtatctggtaggtgggagcacgagccaacagaatacaagctattcgtgttcacttaacttcatctgtgccctctggctggtgaagccagga

SEQ ID NO: 540817 - DNA, 636 bp, Homo sapiens
gactaaaggtaatgtgggatcctggatgagatcctgggacaaaaaaaaggacaatgggtgaaatctaaggacatctgaataatgtttggactttattttataataataatgtgtcaatactggttcattaattgtgacaaatataccatactcatgtaagatgttaactctatataagaactctctattatcttcacgatttttctgtaaacctgaaactattgcaaaataagaattttatttaaaaagagtgaatcctgatctcattgatgactctttgamgattagttttgtgacagcagcagagctccagtagataatctggcatcacaatttgggctaaaccgagtgcccatgaaatagtgtctaggcacaactccaaatgaattcttcagacctcctggccacagagaagattctttttttgttttttttaatgacccagagaccaggcatttcagagatggaaatgcgaagtaatccttttatgggaagtggatcaaaactgggaaaggagaggcatcacggcatgttgtggggacaagcctcgaggggtgcgtgtgtgtgtgtgtgtgtgtgtgtgtgtgtgtgtgtgtgtgatgtctcactgggcttttgttgttctttcttcttttc

SEQ ID NO: 540818 - DNA, 622 bp, Homo sapiens
ctgccaaaataaaagaggaaggacagtctgtgtgtatagagtaaccagatgtcctttcttggaagaaatagtcctttattctgaaattatgtgcctttttttctctttcatgttaakatgagaaaatttctttatttctataaacaatgatgctaatatatggtagtctgtgagtttatcttcatacccttacttggaaaactgaaatgtagtaaaagctataggccctcctcaattttttattttatctttaaaaaattttatctggtaggtgaaatataacagcctaggagtccctgatctaggattttcctttttttaaaaaaactataactctggacatctcaataattctattctggaaaaaggctgaagaaataatgtaataattttttagattgatttagaccttactttgatgaaggcagttctgcagtaacttaaagtagaatgtcaactcatgggtgccacggtttgaatgtatcccccaaaattcatgtgttggaaacttaattcccaatgtaacaatgttgagaggtgagacattaagacattaggtcatgaagggtctgccctcatgaatggattcatgtggtggtcgctggattagtgggttagttat

SEQ ID NO: 540819 - DNA, 622 bp, Homo sapiens
ctgccaaaataaaagaggaaggacagtctgtgtgtatagagtaaccagatgtcctttcttggaagaaatagtcctttattctgaaattatgtgcctttttttctctttcatgttaagatgagaaaatttctttatttctataaacaatgatgctaatatatggtagtctgtgagtttatcttcatacccttacttggaaaactgaaatgtagtaaaagctataggccctcctcaattttttattttatctttaaaaaattttatctggtaggtgaaatataacagcctaggagtccctgatctaggattttcctttttttaaaaaaactataactctggacatctcaataattctrttctggaaaaaggctgaagaaataatgtaataattttttagattgatttagaccttactttgatgaaggcagttctgcagtaacttaaagtagaatgtcaactcatgggtgccacggtttgaatgtatcccccaaaattcatgtgttggaaacttaattcccaatgtaacaatgttgagaggtgagacattaagacattaggtcatgaagggtctgccctcatgaatggattcatgtggtggtcgctggattagtgggttagttat

SEQ ID NO: 540820 - DNA, 646 bp, Homo sapiens
acccttggcagtccttctgtctactttttcttgccttagctaccttctcaagggcaccaaatgaaggaagggtcatggctcccaggtcctgtgagaaaaacctgttcccaagttggaatatttcattgagttaaacttctaaccaatctgcactgatcactgggtgtcttagtccattygggctgctctaacaaaatatcttagactaggtaatttataaataatagaaatttatgtctcacagttctggaggctggaaagtttaagatcaaggtgccagcagattttgtgtctggtgaagcctccatctctgctccacagagggcaccttttcctgtgtcctcagacagtagaagggcaaaaaggaactaacagactccctcaaacccttttataagaacactaatcccatccatgaaggtggagccctcatgacataaaccacctcttaaaggccccatcgcctaatactatggcagtggggattaggtttcaacatgaatttaaggagggaggcaaacactcaaactgtagcactgagtaccaagaagaattaaaaaggggaaaagaaatggctaggtagtcttagaatcttcccaaatctccctgtaaaatagaaagagcaactagaatagcaaagcgaaaa

SEQ ID NO: 540821 - DNA, 646 bp, Homo sapiens
acccttggcagtccttctgtctactttttcttgccttagctaccttctcaagggcaccaaatgaaggaagggtcatggctcccaggtcctgtgagaaaaacctgttcccaagttggaatatttcattgagttaaacttctaaccaatctgcactgatcactgggtgtcttagtccattcgggctgctctaacaaaatatcttagactaggtaatttataaataatagaaatttatgtctcacagttctggaggctggaaagtttaagatcaaggtgccagcagattttgtgtctggtgaagcctccatctctgctccacagagggcaccttttcctgtgtcctcagacagtagaagggcaaaaaggaactaacagactccctcaaacccttttataagaacactaatcccatccatgaaggtggagccctcatgacataaaccacctcttaaaggccccatcgcytaatactatggcagtggggattaggtttcaacatgaatttaaggagggaggcaaacactcaaactgtagcactgagtaccaagaagaattaaaaaggggaaaagaaatggctaggtagtcttagaatcttcccaaatctccctgtaaaatagaaagagcaactagaatagcaaagcgaaaa

SEQ ID NO: 540822 - DNA, 622 bp, Homo sapiens
ttatcctgtattgatatatatcaaagctgrttgatgagtacttgattgttctttgtattatactctctacttttgactgtctgaatattactgtaattcaaagcttaatgaacaaacaaataataagggaagtcttagagcttggcatccaccaggaaggaataccttttgcttctttcctgagagggctgtgctacctggagagggtttcaatagatgcagacatacattgtaacccatccccttcagcccttcttcccattcaagtgttccagtatatttgtccctaaactgaactagatgtgttactctgtcacttgctagaatataagatctatgaaggcaagaatttgtcaattgtgttaccattgtatccccaggacccagaatagtgcctggcacgtaataggccttctgtaaatatttgctgtttaattgagtgaatcgtcatgactgatcccaggacataatcccaggctgtaactaccactgtgtgttttttcttggagagaagagggagaattctttactttgtagacctaagcttgggttacctgcagaagtggcctctaaaatgtgagataaacaatgtctgaccttgtagcaatggagaacttcaggc

SEQ ID NO: 540823 - DNA, 622 bp, Homo sapiens
ttatcctgtattgatatatatcaaagctgattgatgagtacttgattgttctttgtattatactctctacttttgactgtctgaatattactgtaattcaaagcttaatgaacaaacaaataataagggaagtcttagagcttggcatccaccaggaaggaataccttttgcttctttcctgagagggctgtgctacctggagagggtttcaatagatgcagacatacattgtaacccatccccttcagcccttcttcccattcaagtgttccagtatatttgtccctaaactgaactagatgtgttactctgtcacttgctagaatataagatctatgaaggcaagaatttgtcaattgtgttaccattgtatccccaggacccagaatagtgyctggcacgtaataggccttctgtaaatatttgctgtttaattgagtgaatcgtcatgactgatcccaggacataatcccaggctgtaactaccactgtgtgttttttcttggagagaagagggagaattctttactttgtagacctaagcttgggttacctgcagaagtggcctctaaaatgtgagataaacaatgtctgaccttgtagcaatggagaacttcaggc

SEQ ID NO: 540824 - DNA, 556 bp, Homo sapiens
ttacagattaggcacccgatgaaaaatacagtaaccatttctaataagtagaaaggaaactacttaaatatgtgagactactatccatgaaaagagtcaaactctgtaaaatatttgaaaaggtttattccaagccgaatatgagtcaccaatggcctgtgacacagccctcaggagatcctgagaccatttgcccaaggtggttggtatataacatggttttatacattttagggagacataagacatcaatcaatatatgtaaaatgtacactatttcggtctggaacaatgggacaactggaagcagaggcttccaggtcatacgtggattcaagagtttttaattggcatttcattgaaagagttattatccaaagagctggaatcaatagamgggaatgtgtgggttatcataagtggttttggagaacaaagttttgtcatgcgggtgaagcctcccggtagtagacttcagagaaaatagatggtaaatatttcttatcagactttaagagcctcctttatcagtcttaaggcctgtgttgatgctaat

SEQ ID NO: 540825 - DNA, 498 bp, Homo sapiens
gctgctcgggaggctgaggcaggagaatcacttgaacttcatcacggcagaggatgcagagagccaagatcatgccactgcatcccagcctgggcaacagagcaagactccatctcaaataaataaataaatgaataaccaatcagtatatatttttctgtatagtcctctcagttttaatgcatcgagaatgaataaatgtagcctggtacagtgacatrtatctcaggaggctgaggtgggaggatcacatgaagccagacgttcaaggctatgatcgtgcctgtgagtagccgctgtactccagcctggacaacacatgtctctaaataaataaattttttaaatgaatgaataaatttataattttatgataaatgggctatcagtttaccttgatttgggtatagtttctgtgttctgaaatcgttatttttcaaaattttccatacaggcacaagttctcacctcatggggtttgttaactggccttcttta

SEQ ID NO: 540826 - DNA, 404 bp, Homo sapiens
ccttggctctactgggcactttgactcatctgatttatcgctggcccacataagacgagtttcagtgactcaatctattggtgaccatttgatttctatggaatcagggagtttcttcctcagcagacgtttccttattcttcctattttcaggtgtctaaacttgtgacttgagtactttaaatatcatagaatgcattttattttcagtagcctgctaaggaaattactgctattcctgcagctagtagtatcaagtgaggaaattggatccaaggtattcatcatcaaattatagctttttacttttaacctgatwgctggtttagtttggggcagttagcgacttgaaggatagatttagtaagaaaagatgctctggaagaggagcaacttgaagaaaa

SEQ ID NO: 540827 - DNA, 597 bp, Homo sapiens
ctaaggtcaggaagtgtgaagctgggccactagccaggatttgatgtgggtgagaataaagagaactgaacccagattagtattttaacagagggtcctayaaggccttgagagcgtgacactttccccaggtgcccaccatcagggatcattgtttctgcctcctgggctcctccaggctctcacctctgtctaggtcatcgctttggaggtactgggctttcttggcccctccccaaactttaacccatttaaggcagccgtcactttttgcagggcctccaagctcactcagaaatcttgtgttgaatggtgcagagctaagttgttcactctgcagtatcatattagaagagatttggtttaccctgaatccactctgacgatgtttgttcgtttgaccttcaggtgtgcaagttggttgtcttcagggaagagagcagttctcactcaacaatcagacataactctgtcttataacaaaattgcacccatggagcgtctaggaactccctacccaaagtgtggtctgtgggccagcagcacctgcgtcatctgggaacttgtaagaaatgggattcttagcagatcccagac

SEQ ID NO: 540828 - DNA, 597 bp, Homo sapiens
ctaaggtcaggaagtgtgaagctgggccactagccaggatttgatgtgggtgagaataaagagaactgaacccagattagtattttaacagagggtcctataaggccttgagagcgtgacactttccccaggtgcccaccatcagggatcattgtttctgcctcctgggctcctccaggctctcacctctgtctaggtcatcgctttggaggtactgggctttcttggcccctccccaaactttaacccrtttaaggcagccgtcactttttgcagggcctccaagctcactcagaaatcttgtgttgaatggtgcagagctaagttgttcactctgcagtatcatattagaagagatttggtttaccctgaatccactctgacgatgtttgttcgtttgaccttcaggtgtgcaagttggttgtcttcagggaagagagcagttctcactcaacaatcagacataactctgtcttataacaaaattgcacccatggagcgtctaggaactccctacccaaagtgtggtctgtgggccagcagcacctgcgtcatctgggaacttgtaagaaatgggattcttagcagatcccagac

SEQ ID NO: 540829 - DNA, 597 bp, Homo sapiens
ctaaggtcaggaagtgtgaagctgggccactagccaggatttgatgtgggtgagaataaagagaactgaacccagattagtattttaacagagggtcctataaggccttgagagcgtgacactttccccaggtgcccaccatcagggatcattgtttctgcctcctgggctcctccaggctctcacctctgtctaggtcatcgctttggaggtactgggctttcttggcccctccccaaactttaacccatttaaggcagccgtcactttttgcagggcctccaagctcactcagaaatcttgtgttgaatggtgcagagctaagttgttcactctgcagtatcatattagaagagatttggtttaccctgaatccactctgacgaygtttgttcgtttgaccttcaggtgtgcaagttggttgtcttcagggaagagagcagttctcactcaacaatcagacataactctgtcttataacaaaattgcacccatggagcgtctaggaactccctacccaaagtgtggtctgtgggccagcagcacctgcgtcatctgggaacttgtaagaaatgggattcttagcagatcccagac

SEQ ID NO: 540830 - DNA, 610 bp, Homo sapiens
tcacatatttggggggtttctgcaaatacacttataaaccatgggaagccaccaatcactgtacttcaacatcgcttttgggccctagcacaatgctgagccactaacaggagatgagcatatatttgtaaatcgacatgaagctccgtaaataccaggtgcttaaggaacagtgatggtgactatggctgaatttcagaaagaatgcattcattcaagttgctcaaatattttgtctcaagtgctcaagtttcaaccccaaacctagcacagggggaggaggagagacttaggraattcttgggagagttgagttcaatgccctgtggtcaggtcacactagtcctcagctccattcttcagtctttgtatccaggtggtgctatttgtcctgcttactgacttggttgacagaaaagtatgtaaaagtgcttgtaaagtgctcttctaatatacagaccaaggacccgaatagccgcatccttcaccatatttatgctatgttcttcctccagtcatctgtaagcaaggataaaaggactagtttgtatcgattacacacgtttttcctctttctttcttgagttaaggaagcagaaagccaggattg

SEQ ID NO: 540831 - DNA, 378 bp, Homo sapiens
cctgcttggtgatctattggaatcaccggrggagcttttagaaaataatggttcctggatctcacccctagagattttaatgtctttggtctgggttcctgcctgactcagagactttttagaaacctcccaaatgatcctaatttgtagccaagattgagaaccactgggctgtggtgtgggaccctaggaaaatgaccaatggccttttgtgctgcagggtacctggaagaattttgcaaaaatatagaaatatgatctcactgactgtttttcaaatcttgtttgttttttacattttcttttttggccttgtttgcctctgatacagtctgaaaagaaattgcagaaagaaactctccagtcttcagtgtaacc

SEQ ID NO: 540832 - DNA, 592 bp, Homo sapiens
cacacatcaggagggaaggaaggactctcatcttcagcaaatgacataaatctggggagcctcagtttcctcacctgaacagtgagaatgatggaatctaccctgagtatatatcccaggtctttgtgcagcatggaatcagcccccagccttcctagctcttgctttattttattttattttagagaccaagcctcgctctgtcactcaggctggagtgcagtggcgcgatcttgacttactacaacctcctccgcctcctgggttcaagtgattctcctgcctcagcctcctaagtagttgggtttacaggtgcatgccactatgcctggytaatttttgtatttttagtagagacggggtttcaccatgttgcccaggctcaacatgcctgggctgaagcgatccacctgccttggcctcccaaagtgctaggattacaggcgtgagccaccgtgcctggcctcttgttttatgtttgctgttctcgctgtaggtgaggcattcccaccatattcccttgttaaaatcctactggcccttcaaatgccagctcatatccacactgtgtctgaccctgatccagaatcct

SEQ ID NO: 540833 - DNA, 592 bp, Homo sapiens
cacacatcaggagggaaggaaggactctcatcttcagcaaatgacataaatctggggagcctcagtttcctcacctgaacagtgagaatgatggaatctaccctgagtatatatcccaggtctttgtgcagcatggaatcagcccccagccttcctagctcttgctttattttattttattttagagaccaagcctcgctctgtcactcaggctggagtgcagtggcgcgatcttgacttactacaacctcctccgcctcctgggttcaagtgattctcctgcctcagcctcctaagtagttgggtttacaggtgcatgccactatgcctggttaatttttgtatttttagtagagacggggtttcaccatgttgcccaggctcaacatgcctgggctgaagcgatccrcctgccttggcctcccaaagtgctaggattacaggcgtgagccaccgtgcctggcctcttgttttatgtttgctgttctcgctgtaggtgaggcattcccaccatattcccttgttaaaatcctactggcccttcaaatgccagctcatatccacactgtgtctgaccctgatccagaatcct

SEQ ID NO: 540834 - DNA, 592 bp, Homo sapiens
cacacatcaggagggaaggaaggactctcatcttcagcaaatgacataaatctggggagcctcagtttcctcacctgaacagtgagaatgatggaatctaccctgagtatatatcccaggtctttgtgcagcatggaatcagcccccagccttcctagctcttgctttattttattttattttagagaccaagcctcgctctgtcactcaggctggagtgcagtggcgcgatcttgacttactacaacctcctccgcctcctgggttcaagtgattctcctgcctcagcctcctaagtagttgggtttacaggtgcatgccactatgcctggttaatttttgtatttttagtagagacggggtttcaccatgttgcccaggctcaacatgcctgggctgaagcgatccacctgccttggcctcccaaagtgctagkattacaggcgtgagccaccgtgcctggcctcttgttttatgtttgctgttctcgctgtaggtgaggcattcccaccatattcccttgttaaaatcctactggcccttcaaatgccagctcatatccacactgtgtctgaccctgatccagaatcct

SEQ ID NO: 540835 - DNA, 508 bp, Homo sapiens
catggccgaaggggaagcaaacatgtccttctttacatggcagcaggagagagaagtgcagagcaaagtggaaggaaaagccccgtataaaaccatcagatctcgtgagaactcactyattatcatgaaaacagcatggaagaaccgcctccatgatccaatcacttcccacaaagtccctcctgcaacatgtggggattacaatttggattacaattcaagatgagatttgggtggggacacagccaaaccatatcaaactctatgtactttaatatttaaggaaaattacataaactttatctgaaaattccctggattcttctcctcaaggtcatgctgtacatatgcaggatcctcctgcctacatctccaaatggataatggattgaagcaaaatgtttgtcccaccaaacattgatgtgtaacccttttagtaacaattcatagaccaggtaaacatgtgtggagcagcccagatcagctggagggagcattattctcatca

SEQ ID NO: 540836 - DNA, 568 bp, Homo sapiens
agcctaggatttctttcttcaataataatgatttttatgctttatagttcatgaggctttcatattcattatgttgagatttattttcaaaaaagtgtttagagtcttaagttrtttgcaactttgtagcaaagctcatttcacattaaaacatccttttagcaaagtctcaacatactatagtgaaattaatacaggtttttctaagcatttataagtgttaataagccatgccagtctgctggcatagcatatatggtgctgcggtattctgaatattcagtatctaaatctgttcatttcatacacacatgcacgtgtgttcacaaacacacatgcatgcaggcacacaccactgcaaaatttttaagctgcaggaccccctggcctgaaaaaatgcacacagcttctgaaagtgcctaagttactcatgggaaaataaagcttattatttaatggacttaacaatattttcttgttcatgatgatgttttacttccactgatacacaaatatttattaagtgcctactatgtggcaggcactgtcccaggaacaggttaagcag

SEQ ID NO: 540837 - DNA, 621 bp, Homo sapiens
caagcattagcatttatttctcaattgcaatatttttattttaagttgtgctaagaagcctaggatttctttcttcaataataatgatttttatgctttatagttcatgaggctttcatattcattatgttgagatttattttcaaaaaagtgtttagagtcttaagttgtttgcaactttgtagcaaagctcatttcacattaaaacatccttttagcaaagtctcaacatactatagtgaaattaatacaggtttttctaagcatttataagtgttaataagccatgccagtctgctggcatagcatatatggtgctgcggtattctgaatattcagtatctaaatctgttcatttcatayacacatgcacgtgtgttcacaaacacacatgcatgcaggcacacaccactgcaaaatttttaagctgcaggaccccctggcctgaaaaaatgcacacagcttctgaaagtgcctaagttactcatgggaaaataaagcttattatttaatggacttaacaatattttcttgttcatgatgatgttttacttccactgatacacaaatatttattaagtgcctactatgtggcaggcactgtcccaggaacaggttaag

SEQ ID NO: 540838 - DNA, 595 bp, Homo sapiens
agactaggatcttttatgatgttcccaatcttgctttagttatggagaagctcattataaaatagtcttacaggaaaaacctgatcacagaggggaacactatagtgaagcaccaatacttttcatcaaaaatgttcaagtattggcaatttcatgtgtttcaacataatacyactagccctcacccaaccacaggttacagagtgcctggagctgctagaataggcacaactgttctcaccatatgcaaggctcatcctcctccaaccttctcaatacatcattaccaattatcaaatcattacatctttatgaaaaagacttggcttatatgacacaggcagaagtgccaccctttcacaacattatgaaacgatgccaaataaggctagcacacctgccaccttttgcatttactgaagagctcttatgcatggacccacttggcctgtctcttagtcacagaagggggcatggggcagcctggctcggaacacctgtgcctgctgatagcagacgtgccagcctgccagagactgagaagctggacctcaaggtgttgggaggtcgggctgaggctgtggctgctgggcca

SEQ ID NO: 540839 - DNA, 595 bp, Homo sapiens
agactaggatcttttatgatgttcccaatcttgctttagttatggagaagctcattataaaatagtcttacaggaaaaacctgatcacagaggggaacactatagtgaagcaccaatacttttcatcaaaaatgttcaagtattggcaatttcatgtgtttcaacataatactactagccctcacccaaccacaggttacagagtgcctggagctgctagaataggcacaactgttctcaccatatgcaaggctcatcctcctccaaccttctcaatacatcattaccaattatcaaatcattacatctttatgaaaaagacttggcttatatgacacaggcagaagtgccaccctttcacaacattatgaaacgatgccaaataaggctagcacacctgccaccttttgcatttactgaagagctcttatgcatggacccacttggcctgtctcttagtcacagaagggggcatggggcagcctggctcggaacacctgtgcctgctgatagcagaygtgccagcctgccagagactgagaagctggacctcaaggtgttgggaggtcgggctgaggctgtggctgctgggcca

SEQ ID NO: 540840 - DNA, 595 bp, Homo sapiens
agactaggatcttttatgatgttcccaatcttgctttagttatggagaagctcattataaaatagtcttacaggaaaaacctgatcacagaggggaacactatagtgaagcaccaatacttttcatcaaaaatgttcaagtattggcaatttcatgtgtttcaacataatactactagccctcacccaaccacaggttacagagtgcctggagctgctagaataggcacaactgttctcaccatatgcaaggctcatcctcctccaaccttctcaatacatcattaccaattatcaaatcattacatctttatgaaaaagacttggcttatatgacacaggcagaagtgccaccctttcacaacattatgaaacgatgccaaataaggctagcacacctgccaccttttgcatttactgaagagctcttatgcatggacccacttggcctgtctcttagtcacagaagggggcatggggcagcctggctcggaacacctgtgcctgctgatagcagacgtgccagcctgccagagactgagaagctggacctcaaggtgttgggaggtcrggctgaggctgtggctgctgggcca

SEQ ID NO: 540841 - DNA, 633 bp, Homo sapiens
gaagaccgagttcacgctgtgcaaatgagaaaggacagcgagggtttgtgcctaagttttctagcctctcttaggttgcctccattctcttttcctgacgtgctctatccctcacctttattaaagctgtagatgagtgcacctgtggcatacctttgagtccttccaatgattccatcctagaaggatctgctctagcctgatcactcaccccttcctttgcaaactcctcaaacaccctagaaatagggcatttctagctctattgacttgcttgtgtttggaatcatgccaggatctctcctcgctctgaaccttggcattacccttagattcccaaatgtctcgtttggccccttaaggcttataatggtgcccctcttctgtgctctcagagctcttggtgcttgtcctccactagcayttaccagcctgtgctggacttgcctgctttctggcttgaaccctccgggactgtcttaatctgcttaggctgccataacaaagtaccaccgactggtggcttcaacaacagaaatgtattttcccacagctctggagactggaattctgagatcatgggactagcgtggctccattcctggtgaagactcttcctggcttgcagacagc

SEQ ID NO: 540842 - DNA, 676 bp, Homo sapiens
accaagagcctgcaattctcaagtataacattacgccctcagagaagtgggtgggaagattccagagacttgctcattttacaaacatttatggtagattgatttggggtccaagaaaggagaatgaaactctcttttttccatcctcycctttcggccctctcttcccaggactcacatgaatgaacgtctctggacacctaatcaccatttatcaatctcacttctatgagaaaaacacatttcaagtacctaccctccagcttgtcaacaaattcattaaaaaagaagggaacatcagttatataaagccatggtgtttttgccttactatcaagcttttggatgaaatggaaaagttaaatccgcccgggaggcatttctaactctccacatttagccacggaatagttagactaatacctgaattctccatttacattttcagcttgcattcacagatctggagtcatagagaaattactggtgtggtgtcaagtctaagttttaatgccttgaggggaagcaacttcacaattctgaacaaggttatcatgagtggaggagaaacattctcctggttcttgagccggagttcatgagctcacactttggcagatctcatcactgatcatttgagctcacacagctccaaatacaatggaaaccactgggt

SEQ ID NO: 540843 - DNA, 676 bp, Homo sapiens
accaagagcctgcaattctcaagtataacattacgccctcagagaagtgggtgggaagattccagagacttgctcattttacaaacatttatggtagattgatttggggtccaagaaaggagaatgaaactctcttttttccatcctctcctttcggccctctcttcccaggactcacatgaatgaacgtctctggacacctaatcaccatttatcaatctcacttctatgagaaaaacacatttcaagtacctaccctccagcttgtcaacaaattcattaaaaaagaagggaacatcagttatataaagccatggtgtttttgccttactatcaagcttttggatgaaatggaaaagttaaatccrcccgggaggcatttctaactctccacatttagccacggaatagttagactaatacctgaattctccatttacattttcagcttgcattcacagatctggagtcatagagaaattactggtgtggtgtcaagtctaagttttaatgccttgaggggaagcaacttcacaattctgaacaaggttatcatgagtggaggagaaacattctcctggttcttgagccggagttcatgagctcacactttggcagatctcatcactgatcatttgagctcacacagctccaaatacaatggaaaccactgggt

SEQ ID NO: 540844 - DNA, 676 bp, Homo sapiens
accaagagcctgcaattctcaagtataacattacgccctcagagaagtgggtgggaagattccagagacttgctcattttacaaacatttatggtagattgatttggggtccaagaaaggagaatgaaactctcttttttccatcctctcctttcggccctctcttcccaggactcacatgaatgaacgtctctggacacctaatcaccatttatcaatctcacttctatgagaaaaacacatttcaagtacctaccctccagcttgtcaacaaattcattaaaaaagaagggaacatcagttatataaagccatggtgtttttgccttactatcaagcttttggatgaaatggaaaagttaaatccgcccgggaggcatttctaactctccacatttagccacggaatagttagactaatacctgaattctccatttacattttcagcttgcattcacagatctggagtcatagagmaattactggtgtggtgtcaagtctaagttttaatgccttgaggggaagcaacttcacaattctgaacaaggttatcatgagtggaggagaaacattctcctggttcttgagccggagttcatgagctcacactttggcagatctcatcactgatcatttgagctcacacagctccaaatacaatggaaaccactgggt

SEQ ID NO: 540845 - DNA, 676 bp, Homo sapiens
accaagagcctgcaattctcaagtataacattacgccctcagagaagtgggtgggaagattccagagacttgctcattttacaaacatttatggtagattgatttggggtccaagaaaggagaatgaaactctcttttttccatcctctcctttcggccctctcttcccaggactcacatgaatgaacgtctctggacacctaatcaccatttatcaatctcacttctatgagaaaaacacatttcaagtacctaccctccagcttgtcaacaaattcattaaaaaagaagggaacatcagttatataaagccatggtgtttttgccttactatcaagcttttggatgaaatggaaaagttaaatccgcccgggaggcatttctaactctccacatttagccacggaatagttagactaatacctgaattctccatttacattttcagcttgcattcacagatctggagtcatagagaaattactggtgtggtgtcaagtctaagttttaatgccttgaggggaagcaacttcacaattctgaacaaggttatcatgagtggaggagaaacattctcctggttcttgagccggagttcatgagctcacactttggcagatctcatcactgatcatttgagctcacrcagctccaaatacaatggaaaccactgggt

SEQ ID NO: 540846 - DNA, 377 bp, Homo sapiens
tggtaccccatcaagtgaaagggattatccaaaagcacagaactcgtggagtcaaacacatatgtctccaaggggaatatgcagcaaagccaagtctctcactactggcagaccacccttcttagcccttatctctttctggtccacctggattgaactcaaccaaattaaaaagaaaaactcaaatgttagtaagatactctacaatagaatcataagctaaatgatttcattttatgtgtgctgcataaacacattttcaaacactcaattccaagtttttaagaaatatagttcaaattaygagtagtaaaaataattttacaaagtgtggtcttgacatattttggcttatagggtgtagttagggaacttca

SEQ ID NO: 540847 - DNA, 496 bp, Homo sapiens
aaaaggccccaggctgaggaagagaaccactgtaaatcattctccagascacagggctacttgttcttgaaagagttgcctctgataagtcaatccatctaaaagaacaaaagcttattgaacatttacagtgtgccaggaatgtgctaatttacctggcaggagagtgatgaataagaccaacatggtccctgccccacaggcacttacagtcagtgaagatcccaggatcttgtgatgcttggaaaggcatcttcctgtggcattaatcatcatactgggtgttgcttcattcatttattcattcatgtgttcatgaaattactttttcattcactcatatttccaacaaacatttttgcttcacttgggccactgttttggggactcactagtgaatggaaggttcctgccttctggaagttacagctactagggtgcccaagggctgtatctgggctaactgctagattagctgcctaatttggacttgcaa

SEQ ID NO: 540848 - DNA, 496 bp, Homo sapiens
aaaaggccccaggctgaggaagagaaccactgtaaatcattctccagagcacagggctacttgttcttgaaagagttgcctctgataagtcaatccatctaaaagaacaaaagcttattgaacatttacagtgtgccaggaatgtgctaatttacctggcaggagagtgatgaataagaccaacatggtccctgccccacaggcacttacagtcagtgaagatcccaggatcttgtgatgcttggaaaggcatcttcctgtggcattaatcatcatactgggtgttgcttcattcatttattcattcatgtgttcatgaaattactttttcattcactcatatttccaacaaacatttttgcttcacttgggccactgttttggggactcactagtgaatggaagkttcctgccttctggaagttacagctactagggtgcccaagggctgtatctgggctaactgctagattagctgcctaatttggacttgcaa

SEQ ID NO: 540849 - DNA, 583 bp, Homo sapiens
acttatattcccagcttgtaagctaacattatagtaaataaatacacagtccggtggggaagggctgggtggggaatcccggcagggtcaagcagtagtggaggttgcagcggcgacggcaggtggggagggaggaggagggagagggaggagggtgagggggctggggtggaggaagagctgtagttactggtatcccagcgccgaggctgaagctagtctctgtccatacagcgcgtatggcgaatagtagggtccggctgtggggagggacggcacggccaggccccccgctgtggataagtggctcttgccataggggtggtaccggcttaggcccaaagtgtgtggattccgcaaggacagcgacccggggctgccgggcggcgggcggggggaggtgcagatggcaggaggcggcggcggcggcggcggcggcggcgctgcccagggccccgaggccccggggggagggcggccagaagtttctcggctcccggcagccgtgttgggtccgtaggtggctgagcagctcctccgaggtggcgaagcgcttgtcgmccggcccactggctgccaccca

SEQ ID NO: 540850 - DNA, 583 bp, Homo sapiens
acttatattcccagcttgtaagctaacattatagtaaataaatacacagtccggtggggaagggctgggtggggaatcccggcagggtcaagcagtagtggaggttgcagcggcgacggcaggtggggagggaggaggagggagagggaggagggtgagggggctggggtggaggaagagctgtagttactggtatcccagcgccgaggctgaagctagtctctgtccatacagcgcgtatggcgaatagtagggtccggctgtggggagggacggcacggccaggccccccgctgtggataagtggctcttgccataggggtggtaccggcttaggcccaaagtgtgtggattccgcaaggacagcgacccggggctgccgggcggcgggcggggggaggtgcagatggcaggaggcggcggcggcggcggcggcggcggcgctgcccagggccccgaggccccggggggagggcggccagaagtttctcggctcccggcagccgtgttgggtccgtaggtggctgagcagctcctccgaggtggcgaagcgcttgtcgamcggcccactggctgccaccca

SEQ ID NO: 540851 - DNA, 457 bp, Homo sapiens
ttttaggttcacaatctcccagctcctcttcttctaaaaaatccacaggaaatgcaggggccttctgatcatctggccaaccatctcagtttctagggagaacgttctttctgagaccccacagttggtggcagggctgggtttcacgcccccttcactcaccatgctttcttcctgtacttgcactcactttgttcctggtcaggatctattttgttctgtgttaatcttgtttgcatcaccatttcaacaccccatatggactgcatgctcttttaagatgaggatcgtgttttgtacttctctgtaattcacacartgctgagcagggtgtcttagacatgaaagctgcttaataaatagctaattgacagggagaaatactgaattgggcagaactagtggtaaccccagttcattgcagaaagattggcactgtgcgtcctgacctaaaaga

SEQ ID NO: 540852 - DNA, 579 bp, Homo sapiens
tcctatttattctcatggaacctttaacaacttatctttaagccttgtttttcttatctataaaatggaaataagagtgctgatcttgtgtgtttttgggaggtttgtgattttctttagctagtcttttcaagcactctatatggatttacagaggggatccttgagctacagaacaataaagtaattttcacaaggtcccaaaaccaatgagtagcacagctatgactggaacgcatgctgtccacctccaggtctatgctcttaaccactctttaatactgatgataaattaactaatcacrtgtaatgcatggagcgcagtgcctggcacatggtaagcctttaataactgttagctcactcagcaaatgaaaatgccttacaaatctaaattaatttccaagtcatggaaagatatactatatctcagatatgatgtttgttaaataataacatatctagataatatctagataatttataatttcatagagaaatgctatgaaattgatagatgatacaaatacagaatgaataagtaaaacaaaaaattacagaaataatattaattttaaa

SEQ ID NO: 540853 - DNA, 621 bp, Homo sapiens
ttagaatagtcttctctccatgtattagcccgttttcacactgctgagtaatttataaagaaaaagaggtttaatggactcacagttccacatgactggggaggacacacaatcatggcagaaggtgaaaggcacgtcttatatggcggcagacarcagagaatgagagccaagccaaaggggaaatcccttataaaataatcagatcttgtgagatttattcactaccatgagaacagtatagggggactgtccccatgattcaattatttcccatgaggtcccacccacaacacctgggaattatgggagctacaattcaagatgagatttgggtggggacacagcaaaaccatataactccacttccattccattgcccaaactgaagatgggatggtggtgaaccaactgctgcttgggcctgagatgggattctgccctccccttgcccagttcttcattttcctcagaacccttggagttctgtttccctttaatatgcctcatgctacctccattgtctttctttagtctgaagttttaatatccccatccttatgtctctaaacagggtaatgcaagcaagcagggatcagacccatactgtgtgggagcgga

SEQ ID NO: 540854 - DNA, 460 bp, Homo sapiens
tgtgttgaactgtattgagggacatgtggcagggggcaaagtccctgatasagttgccaatacaaagtagagtatgagagtgaattgaaaaacagccgaatgaaaacagcatcatcatccccaggccatagcagagtgtgtgccctgttctttagggttaactgggtgatctaggaatgaaatccttttctgggcatggataacctgtgctcctgtcctggccctgtggcgagctgcctgagcttgctcaaggtatgctctagcctctgttttctcatttgtaaaacaataggcaaagacaaggcaattttttggagggtaatttttagtattattactattagaatacttcctcttttttcccttgctggtgcctgcttttgtttgaaggacaggaggctggaggggtaaagccaggaagaactcttctcttttcttccctcctgggccacttcccagc

SEQ ID NO: 540855 - DNA, 534 bp, Homo sapiens
aaaaggatcgattcgattcttaaaaawtacagaacaaacagacaaaaacagattatgctttggcaaggatggccaaaaaagaaagattgaacaagaaatacacaatcagatatgagaaagattgcttgtattagtttcctatgactagtgtaacagattacagcaaatttagtggcttaaaacatcacaaatttattctcttatagttttaggggttgcaagtctgaagtcagtttcactgggctgaatccaaggtgttggcaggctggctccttttggaggctctgagatggatctgcttcctcgcattcctacattccttggcttgtgatcctttctttgaacttttgcttctgttatcacatatcctttgaccttcttgtctcccttttataaagacttgtattgggaggctgaggtgggaggatcacgtgagcccaggagttagaggctgcagtgagctgtgattatgacactgcactccagcctgggccacagagcaagaccgtgtctctgaaaaaaaggccttgtgat

SEQ ID NO: 540856 - DNA, 658 bp, Homo sapiens
cattgaacccacagactcgtaggaaataattaagccagcaagttttgggggtagtttattatgcagcaataggtgtccacattcagagctttgacagaaaaaactgtgttagatttgaaagcaggctttccccaaaatgtacggtatgcatgtagaaaagcatgctgtttaatatcttcttgtgctttcatcctcttgaccaaagatccaacttccacgaggggcaggaatacatttcctccagttagcgccagataacaagcaccacatacaggactgggcaggcaacggcattatgatccaatggatgcagcagaatgatatttgatgatggcagtgatgataggttatgctatctatagacaacattccatcttacctgaagctgtcccaggagaatgatggaggcacctttatctgcacagccaagagaccaacagggaacaagcaactgagggctgagccctccccaggctgaaaccagctcccaggggctcctttgatgatgatgatattgactcatggtgatgtaaagtgggcagccctgtccagcggccgatcttttccagcaattayttggaagtaatgaaagtgaatgcatgacatttaaaaagaaactcctctgtcagcaggaaagctgccacattctcctgcacct

SEQ ID NO: 540857 - DNA, 621 bp, Homo sapiens
  misc_feature (1)...(621): n = A,T,C or G
tgaatctgaatgcctgtgggtcctgcccagcttcttcggcagctagctactccacctttttgctcgcatttctctctcagcagtctcatgatgtgtttcttatttatttatttctgttgatacataataattatacttatatatggggtgcatatgatattttgatacatgcatagaatttgtaatgaccaagtcagggtatttgagatatttacaatctcaaacacttatcattttyttntgtgttggtattatttcaaatctcttctagctattctgaaatatacaatacattgttgttaactacagtcatcctactctgctattgaacattagaatttactccttccacctaactgtatgcttgtactcattcatcaacctttcttcaccccctcccacgcccttctcagcctctggtaactatcgttttactctctacctccatgagaccaattttctagctctcacatatgagtgagaacatgagatatttgtctttttgtgcctggtttatttcagttaacacaatgacctctagtgccatccacgtggctgcaaatgacagggtttcattcttttttatgggtggatagtattccactgtgacatataccacat

SEQ ID NO: 540858 - DNA, 551 bp, Homo sapiens
gcagctgctcttagtgactcttgctgaaccttcttctccccaaactccacctccaaatagtctctgtctttttttttttttttttttttttagtagagacagggtcttgttatgttggccaggctggtcttgaactcctggcctcaaacaatcctcctcgtgggcctcccatagtaccagtttataggcgtgagtcactttgccaggccaattcttttttgatggatcatttatctacaggtttcccttgccctacggttcctgctttctagagcctcaactcccyttcccacacaccaagcccacttttcttcccctctttaccctcttcttctcagtatctaatttttttttttttgtagagatgggttttcaccatgttgcccacactggtctcgaactcttgggctcaagcaatctgcccacctgggcctccaaagtgctagcatcacaggtgtgagccactgtgcccggccagtatatgaattttaaaggcctttatgtagctcaataaagccagcctccacctcagttgcggtcccacatggcag

SEQ ID NO: 540859 - DNA, 541 bp, Homo sapiens
acagtgctgtacaggtttgcaggctaggagcactaggctattccacatagcctaggtgtgtagtaggctagaccatccaggtttgtgtaagctcactctgtgatgttcccacaatgatgaratcaccgaatgaagcatttcccagaacatagccctgttcttacgcaacacatgactgtgcttgagatttgccatcttgatttggttactttgaggaaaaggtctatatcttacatgtctcatctgatgcacttagcatgtttcccatgcccagaaattgcactataatgatattacgataatattttcaagtcagcgaaaccttagtattccaggaggtttcaatatgtgttttatgaaacacaggttctctggcaaaatatgttaggaaagcactaagttagattaaatatgtttcttttctgcaggacttctcagagtctacataacatgcagaatttcctacttgttcatttgatcatgaggtccttcctgtggccctgttcatctctgtgcacactctcagtggtgggttggagac

SEQ ID NO: 540860 - DNA, 541 bp, Homo sapiens
acagtgctgtacaggtttgcaggctaggagcactaggctattccacatagcctaggtgtgtagtaggctagaccatccaggtttgtgtaagctcactctgtgatgttcccacaatgatgaaatcaccgaatgaagcatttcccagaacatagccctgttcttacgcaacacatgactgtgcttgagattygccatcttgatttggttactttgaggaaaaggtctatatcttacatgtctcatctgatgcacttagcatgtttcccatgcccagaaattgcactataatgatattacgataatattttcaagtcagcgaaaccttagtattccaggaggtttcaatatgtgttttatgaaacacaggttctctggcaaaatatgttaggaaagcactaagttagattaaatatgtttcttttctgcaggacttctcagagtctacataacatgcagaatttcctacttgttcatttgatcatgaggtccttcctgtggccctgttcatctctgtgcacactctcagtggtgggttggagac

SEQ ID NO: 540861 - DNA, 578 bp, Homo sapiens
ctggcgccagcttgtgtgagtcaaaattttcaggaactttgcaagccagtagatatcatgttggtaccttgaaattggcccatagtggaagtatttacaccaaatgaattgctaaatgcttcactttctttgttatttttactgctggtgtcccaaggaaagcagacaaatcgtagttcttcaccccaaagagccagtcattaaacatttatcagtacattactgacactagatttctgagaagcacagcttgtgaaatgatgggaactaaggagaaggtggcgaatgtgagagagaaaaaggaagagaaaggaataactcctctgacagccaaaagatcacaggatccttctaagagatttccctggggaagatgggcacagcctggctgatggccttgccggcgataatgaagatggtcaggcctagcgcatgcttcttgctccarcttaatttgtcccttaccaccttacagagcctgtcgccaattaaccaattagtagctaatttaatttcctcttccgggtcgaagcagcaggttttctgatttgagtgtgaggcatgccagagcaggtgca

SEQ ID NO: 540862 - DNA, 421 bp, Homo sapiens
cctgggaagaggtgccttccaccatgattgtaagtttcctgaggcctccccagccatgtggaactgtgagtcaattaaacttcttttcttcagaaatacccagtttggggtatttattcatagcagcatgagaatggactaatgcaccaatacttataaatatctgctgtggaatatttcctgtggcaagtgtgtgttggtggcacagtagggggaggcacagaaataagtaaaatgttattaagaggaaaactttagacaaattgaagttgtctaaacagagcttaattgagcaaagaatgattcrtaagtcaggcagcctcccaaaccaggataggttccaagagattctggtgctgctctgtggttgaagattatttatggacagaaaaaggaaaatgacacacagaaagcagaagtg

SEQ ID NO: 540863 - DNA, 603 bp, Homo sapiens
ctgtgcacgcaccctggggattcagtggaagaggtgacatctgctgaccctcagtcattaatcaagctgcctgagcagaaccatttcccaggcagggctgcagctcattggctcttgggagcttctgaatcaaatggtgaaaggcaggagcttatgtcctgtccccgagttcttgagaggaacgagatgayggggatggaagggagctgatggtagaaacgacagtaaagaaaagggacttgggggaagctgaattggggagatagggcagtcctttgaattgtgggagttttggggtacccattcatcattcatactgactggtcagactacaatccattggcttcaataccgtgttttgttgaaaaggacttatcagaagacctgtaccttcagcctgaggctgccttgtgacatagggtgccatcttcctcctccttaaccctagaggcggcttgcccttggctgttttctgaaggggacctttgaatctcaagggtggagggtgtggcctttgagttgtaactaccaagtagcaacttgttacttggtagtaatttgctgtcgaacacctgtcttgcttccaggagcaatctgaatcca

SEQ ID NO: 540864 - DNA, 622 bp, Homo sapiens
  misc_feature (1)...(622): n = A,T,C or G
cgaggaaacttcctgatgcttgtccagcccttggtggtggtgcccggcagcccgtattcttatcccaaagcaatatgtgtggagacagcccagcaaaagctgagagattgtgtgtccagagacatgttccaggaatggaaacagagagtggaggagtttcttctctcctcccgtctcccgctagagtgggcggkccctttggtgtcatcgcactgtcttcatancctactgcgctccaggcctgtggccccatggcggtcttggaccacgagtgagccatgagccctcccaagccccaaggccaggtctgaagcgggctgatgtgtgcccctggctttgttgcccagatcctcaccacaatcccagcatcccaccactctactgcgagaagagacaagggaggagatgcacacctcagagaaggagcagatttcattcaaagtccgagggaggccagggctcctggtcccggacttcgtgtcaattggttcttcctggaaaagacaattggaggcaccttcaccttgtttttactatatgggtcgcgtggcagtgctggagaaaaagacaatccccaaagagcacattgtcctaaaggaagagtcaacacctgctaacagtt

SEQ ID NO: 540865 - DNA, 601 bp, Homo sapiens
  misc_feature (1)...(601): n = A,T,C or G
ttcttatcccaaagcaatatgtgtggagacagcccagcaaaagctgagagattgtgtgtccagagacatgttccaggaatggaaacagagagtggaggagtttcttctctcctcccgtctcccgctagagtgggcgggccctttggtgtcatcgcactgtcttcatancctactgcgctccaggcctgtgsccccatggcggtcttggaccacgagtgagccatgagccctcccaagccccaaggccaggtctgaagcgggctgatgtgtgcccctggctttgttgcccagatcctcaccacaatcccagcatcccaccactctactgcgagaagagacaagggaggagatgcacacctcagagaaggagcagatttcattcaaagtccgagggaggccagggctcctggtcccggacttcgtgtcaattggttcttcctggaaaagacaattggaggcaccttcaccttgtttttactatatgggtcgcgtggcagtgctggagaaaaagacaatccccaaagagcacattgtcctaaaggaagagtcaacacctgctaacagtttatcttgtcatactaagcctcaagccctgagcacc

SEQ ID NO: 540866 - DNA, 601 bp, Homo sapiens
  misc_feature (1)...(601): n = A,T,C or G
ttcttatcccaaagcaatatgtgtggagacagcccagcaaaagctgagagattgtgtgtccagagacatgttccaggaatggaaacagagagtggaggagtttcttctctcctcccgtctcccgctagagtgggcgggccctttggtgtcatcgcactgtcttcatancctactgcgctccaggcctgtggscccatggcggtcttggaccacgagtgagccatgagccctcccaagccccaaggccaggtctgaagcgggctgatgtgtgcccctggctttgttgcccagatcctcaccacaatcccagcatcccaccactctactgcgagaagagacaagggaggagatgcacacctcagagaaggagcagatttcattcaaagtccgagggaggccagggctcctggtcccggacttcgtgtcaattggttcttcctggaaaagacaattggaggcaccttcaccttgtttttactatatgggtcgcgtggcagtgctggagaaaaagacaatccccaaagagcacattgtcctaaaggaagagtcaacacctgctaacagtttatcttgtcatactaagcctcaagccctgagcacc

SEQ ID NO: 540867 - DNA, 642 bp, Homo sapiens
tgttcctattcaatttagtcagataaaataatatattgaaaaascactttttgaaattacaaagcactgtatacattgaaagtcatgttatgaagatgattgaatacccattgtccttctcctctgatggcctaaacaataaggacaagctacaatacacagacctcttacccattcctgaccccaggagcgaatgcaactggactgtggtcttccttgtctgagtgtgactgacagtggagatgcgatgggagtagacagacacatctcagatttgttttattttgtgcatttcaccaactaatgtgatatattagtcaggatgggataactactgtaataaaattaataaatcagagttggcataatacaagcaaagactgtttcttacattacaatccaaagcatggtgggggaaaggtagagacctgggacccacatagtcattgagggacaagacttctttgtagcactgaacaggaatgtttcttgactctgccacccttctgagctccagaatcttccactttattctatccatccagcctgttgatgagcacaaggagagaccctggagccctatgtggggaatttggaaggctggtcctggcaatggtgtatcacatttctacctatgcctca

SEQ ID NO: 540868 - DNA, 597 bp, Homo sapiens
aaactatcattatgattatattttccttttttttgtaaaatgttcaatgggtgaaacatttcaaggttgcctgtctctaaacaatgaaatgaaaaccctacgctcagagcattagccatatctcagttaactctgcctaaagatatctataaaaaaaatttagatatatgcaaatatatagatatatttattttaatttatttaaaggtcaaagacaataaaacccatgttcgtaagggggctggatgatagaatattgataaattgtttttagagggtaatttggcaacatatatcaaactacttaaaataatttaatcttttttgtttagatatttctcacatgaaggctattaaatctgtgcacaaagatgatcattagagtattattatagtactatttataatagtcaaacattgcraataacctgaatgtttaaaatttttcataaaggtgcaatatgccaagtatacattaaaattcatttcttgtgtaaagtacatgtgacaaaatgctaagtatgcaaagcataaaaggccaaactgttttattccaatcttgttaagtatatttgaaaatgaataaatgcacacaca

SEQ ID NO: 540869 - DNA, 612 bp, Homo sapiens
  misc_feature (1)...(612): n = A,T,C or G
tgaatatagacaactagttaccaagtttgtgacgagaaggcaagagaaaggatgggggcaggagaaaatacgtgtcgttgagcaataaacagaagagtggtccttctttactgcctccttagcacataagctggcctttcccattttcttgccagatgaaatgctgcaaagacattttcttgaaggcaaagaagagtaaaagagmtggtcagcatttccgtatctcagaaaaggaggaagcaaggcttgctgggctatctggtggctaatttaggttgctagagaaaagagtaaattaaggcagaagaaaagactgactcccaccatccgcctgacctgaggagtcactgcatttgtattgtatgaagtcatctttcctgcctttagaaaggcagcactcagaagacacagcacaggggctgccttattttttgttttcaaaaacaagaggagggcttggacatttccaccgctagcttcagggatctattaattggctcaccagtaaaattacagaagcagcctgcctgataatgattgtaaatgacagagacgatcaggtttaccttggggnacgcccaggggacttgcagctagtttagtctgaactta

SEQ ID NO: 540870 - DNA, 664 bp, Homo sapiens
gcacatactttacattttttttccaaaaatgcctactagtctctattaagccatccagtttattttaccactcattgttgttatggcaaacatagatcctctagacatatgttgccaatttgctagctggaactccctttgtcctacaacataaacacaaaacaaacacaaactgttttctatggtactaagtgggagtactctatcactgacccattaacacggtacgtaagtcacctgaactaaccaactctgttgatgaaatatcacagagactcaccstcaaatggaacatatttgttcaaggatataccaccatctaaaaaactctgaagcgtggctctcgtttatttctttaaagctctttaattcatgcaaacctaccttgattttgaattaagaagtgcaagggaattaatcatcagctttagcaatcatcttcatgggttactatcacaatctctggtctacttggggtcaaaagcatatttagggatccccaaccagaaatagggctgacagactgggtctacagatgaaccaggttgtctggatccattctccctttagatgcctgctttaaaccattttcttgtttattacagacgagaattaaaaccaatgggaaaaattctgatatgttaaattatttttgtttttacag

SEQ ID NO: 540871 - DNA, 474 bp, Homo sapiens
tcaccagaattttccacctgtccaaagaagagaaaactcaggaaacatctgaatagaatccaagagaagatttttaaagaataggcaaaacattagattaattgcacttcattcaatccaaatgaaataccaaatggctttcaggttgctatgaaaagtttacataaatggaaragtttgtaaatcatgggtagtgagtgtaaagtcttggtttccttaatcgtgatcattgccgaaatctgagggggcttgtagctgcagcacagcatttgaaaagctccaccggggacagatgcctctgggctctcttttcaagtgggcacaagcattgcatcctggagccagggtactccaaaggcctcagactgagcaattatgacatattctcactttttaactagattaggattatcattaaggaaagaagcacttaaatgagcacttcatttcagtgagcttaagcacatagaatgc

SEQ ID NO: 540872 - DNA, 474 bp, Homo sapiens
tcaccagaattttccacctgtccaaagaagagaaaactcaggaaacatctgaatagaatccaagagaagatttttaaagaataggcaaaacattagattaattgcacttcattcaatccaaatgaaataccaaatggctttcaggttgctatgaaaagtttacataaatggaaaagtttgtaaatcatgggtagtgwgtgtaaagtcttggtttccttaatcgtgatcattgccgaaatctgagggggcttgtagctgcagcacagcatttgaaaagctccaccggggacagatgcctctgggctctcttttcaagtgggcacaagcattgcatcctggagccagggtactccaaaggcctcagactgagcaattatgacatattctcactttttaactagattaggattatcattaaggaaagaagcacttaaatgagcacttcatttcagtgagcttaagcacatagaatgc

SEQ ID NO: 540873 - DNA, 489 bp, Homo sapiens
cattattcctgaggagaaaattccaaattagccgagcaatgtactgatatagcagacaagtgtgactggacattgtactcactcagcagaattgatgaaatagattataagagacccaatgcttagtacaaagacaaggatcacctgaaaatgaaaaacagggacaaatgtctaaatccacttcatttgcattaaataaatcgacaaaagtgtgttttctctttttaccatgcctgtgtacgtgtagccatttattcacatattcacttatgttagtattcattcattcattcatctgtttatcgattcaaggtccaacttgattggaccttttctgagtattaraaaaatgaatatgtacccattttacttatctaattttaacttgcgcacacttcagaatacacagtttgtccttcctgctgcttctagaggcttttaatctttgatctcaagatgtcctttcctgtgatcacttattcactcatc

SEQ ID NO: 540874 - DNA, 624 bp, Homo sapiens
atcaagctggtgattttattggaatgcttaatgtccaccacaaagcggagtgaaggagacagcagtggaggcttactgttggcagttctgaccagcaactctggccaagcttctgatgccagccctttgcccatcctctctacctctcctgtttggaattagtggtctatcattaaaagactaaagcaaatcaccaagcattggcccagtgactggttgcattatttccatgggtgctgtgtgaatgtgtttctgaaatcctaattacaatgagctgtgtatttgtttgagtcccaacttgaggcttaggttaaaaaacagttgtcaccccccaacagcataggaaatgaaagccatcttttctgtatcagatctcgttgaattgcacgttcatgcaaacactcctctccacagcctcctgtcgccttgcgagctctggcaggarttgaaaggactggccgttaggtccacctttggtttgaagacagcccagtagtttttcagttaagagagaaactaaaacaccatagataaaataactctcataatataatttattgtaattcacatatttacaagaaaatacaaacaaatgctataaggtgcatgcatgaggcaaatgaa

SEQ ID NO: 540875 - DNA, 298 bp, Homo sapiens
tgtgtaggaccctctcctcatccttctccacctactgccatgagaatcaccaccacactgttctgatatggcaagacagtcttcttaaaaccgagaatctcagatgaaaatcttgaatttctaaacgtttaggagcactgttgctatggagagttatggctggttcagaaattatcttcagatgrtcgtgatgcagtttggaaaaaaagcaaaacaaaaacaaacacatagacaaacaattctgccctacgaaaaaggacagactatttcaggcattccagtgcctgcttccaccacg

SEQ ID NO: 540876 - DNA, 624 bp, Homo sapiens
attcataaagaccagtcctatctttagttagctggtgaaaattactactttttattaaaaatcaccaatcaaatctaaacaactggaaagatacaaatgggaaacttataactttaggttttgttaggaaaactatatttatgtatactaaaataataaatatttattgtagaaatttggaaaataaggaagtagaggaagatagaaatgaaaaaattctcatatgacattagcatccagagagacaaacactatcaatgtttgatataatctctttataaatgtggaaatccttcacatatatacacatgcacacatatgtacaaagtcctgtggccctcacctggagactgactcagtgcacaggaccattttctacatccctataatttaatccccaascaatcaacattccccattccctagtcttctgcccaccaaattacccttaaaaacccttcacctccacactctcagggaagttgatttgtgtcataactctgtctccctcttggtgtggctggcctcatgtcaattaaactcctgtactgcaaaacaaaacaaaatttaaaaaacccagaaagttgtacatataatgttgtcttactgtaaatatgtggccaa

SEQ ID NO: 540877 - DNA, 399 bp, Homo sapiens
tacagttgagtagggaatgcactggaaaattggagtttgacaatactcaacagtgctaagcttttccaatgcacttacacaatgggtgcattttgcccattgatatcctgtasgtatcagagctcttattatcacggtagcataattataaagacatgtacttaaagaatgtttaaaacagtcccctaagaatatcatgtttttttttctcaagcctcacacacatctctgacttgtctgccactcaaattatatgatgaaaaaaattaagaaagcaaagaaatgtaaaacaacacagagacttgtggtagacttcatgatttgttcatacttattcattcatccctaaagcctgatttccctgtggttagaatactcttctgcatggtgttttcagac

SEQ ID NO: 540878 - DNA, 399 bp, Homo sapiens
tacagttgagtagggaatgcactggaaaattggagtttgacaatactcaacagtgctaagcttttccaatgcacttacacaatgggtgcattttgcccattgatatcctgtacgtatcagagctcttattatcacggwagcataattataaagacatgtacttaaagaatgtttaaaacagtcccctaagaatatcatgtttttttttctcaagcctcacacacatctctgacttgtctgccactcaaattatatgatgaaaaaaattaagaaagcaaagaaatgtaaaacaacacagagacttgtggtagacttcatgatttgttcatacttattcattcatccctaaagcctgatttccctgtggttagaatactcttctgcatggtgttttcagac

SEQ ID NO: 540879 - DNA, 399 bp, Homo sapiens
tacagttgagtagggaatgcactggaaaattggagtttgacaatactcaacagtgctaagcttttccaatgcacttacacaatgggtgcattttgcccattgatatcctgtacgtatcagagctcttattatcacggtagcataattataaagacatgtacttaaagaatgtttaaaasagtcccctaagaatatcatgtttttttttctcaagcctcacacacatctctgacttgtctgccactcaaattatatgatgaaaaaaattaagaaagcaaagaaatgtaaaacaacacagagacttgtggtagacttcatgatttgttcatacttattcattcatccctaaagcctgatttccctgtggttagaatactcttctgcatggtgttttcagac

SEQ ID NO: 540880 - DNA, 614 bp, Homo sapiens
tcaaagcaacaagtacctgctaagaaatatgtgggtcacaacttaaagccaaaattttctcctttgatgttacatttcttttctttttagtgtaaggccagtgatttcctgttttagctgtagaagcttagcctttcttactatctcataaatcccctcttcagtctgattagaataattatataaacagatagtcaaaattgatcaaaaatcaatagaacaatcaataaaagcataagcaccataagaatgaaacataaactaataataactgagcccctgttcatgtaccaggcactttgstaagcattgtaatacatgttatcatttaatgctctaagcctataaggtatttatgccattgcctcaattttagatacaaaaaactaaaattctaaagatcctatagatttagaatttcagaaatttgggaataaaacatgggaagatagtgtaggaacattacaaccacatgaaaactaattccagggaaagactgtcttagtcctgatttgcacttacatgcaactgaatatttgtgtattcattctaaatatcaagcacataaagtaagtaagaaacagtctccatcttggaaacctgagaggtatgga

SEQ ID NO: 540881 - DNA, 621 bp, Homo sapiens
taagtttcctggatatttgaagtctttgaaagaaagactctggattttacaacaaacacttttgttataattaggaaaagaaaatatacctttggatacagtgtatccctgttagaagctacatttgaatataaaccttggacattacaggatattcaaacatayattttgggaatatcattctttcagtcattcaataaatatttattgagcacccactatgggccctaggcactgggaatgcagtagtgagcaaaacagtgtaaactctctgccttcatggaatttacattctagtggtgaaaggtagcataaaaacaagaaaaaaaatatggaaagttggacggaatagtgccactgaggaaattaattgagaaagaaatagaaagtacagtggtaagttaaaatgagctgaccagagtaagccttaagcataaaatgacatttatgcagcaaaatatgcagtgaaatagacatttatgcagtgaagtagaaaaggtagtgagctatacagataattgtagggggagcattccaggtagaagaaacagcgagttctatagagctgttaaagtctttccagattctcaacgtgtcagagcctaaaaaaattaagattga

SEQ ID NO: 540882 - DNA, 627 bp, Homo sapiens
aaatcatatctgctataatatatcaaaatgtagaaagtgtatttcttgaaagtgtgacattttgaaagcctgggatttattagcagcaaaaatcctggaaatcacctacttcaatcttttttatttcataarcaaataagctaaaaccataaaaaagcgtgtgcatttcaggagttcacatggttaattagtggcagatctgaggccacagatttctgactagcaaaccagagctgtagagatttctttcatagctattgtaatatttagctaacgtattcctaaatgaggtttctaatgcagcgaagttttactgcaattgcctatcacttaatctaaatagtgatgatctttgtactttcaattgcaaatcttttcatgctttgtttattcacttctagtgaacatcaatttcagaatattagacttactttatgacaaatattttcattttcaggcaaatgcattggtgatacatctccatgtgtctactgtttggttggggtgggagttccataaggaggatacgagaaagggtatgataggtcaagagagcatttggaaaagaaatactactgctcaatgtccatttgcctttggcaggaaaatagaagctcagtgttttat

SEQ ID NO: 540883 - DNA, 573 bp, Homo sapiens
acctgggttaattttaaggtgagattgattgggaaataagatgaaatagaaatgagaaaaaagaccgttatcctcaaaaatgaaagctgctggaggatttatggtggaacaaaagcaaaaaggaccagaaccagtgcattaggtaaaagttcagtgtgtatcacattggtcattttggcactaatacatttctggaataatcctgcattagacaatatgtgaaagagaataatgtgtatatatggtggtgagatgttgggggctgtagtggtgggggtgttcagaaatattgaaatagaggtgaggttaattcatcttgtgaattaatgtggtcatggtgtaactgatgcaaaaagagactaggtcataaatcgcttaaagggaatcaraaggcacgaaggggcctgaacagactctctgaaaaatagttttagagcatctgctgtgcaatatggtttgaacctttcgaagccccactgtataactcacttgtcacttgatttgaggaagagatgacagatctgccaggaacattcagaaagctttttttttttcaaggaagggtacaagcca

SEQ ID NO: 540884 - DNA, 573 bp, Homo sapiens
acctgggttaattttaaggtgagattgattgggaaataagatgaaatagaaatgagaaaaaagaccgttatcctcaaaaatgaaagctgctggaggatttatggtggaacaaaagcaaaaaggaccagaaccagtgcattaggtaaaagttcagtgtgtatcacattggtcattttggcactaatacatttctggaataatcctgcattagacaatatgtgaaagagaataatgtgtatatatggtggtgagatgttgggggctgtagtggtgggggtgttcagaaatattgaaatagaggtgaggttaattcatcttgtgaattaatgtggtcatggtgtaactgatgcaaaaagagactaggtcataaatcgcttaaagggaatcaaaaggcacgaaggggcctgaacagactctctgaaaaatagttttagagcatctgctgtgcaatatggtttgaacctttygaagccccactgtataactcacttgtcacttgatttgaggaagagatgacagatctgccaggaacattcagaaagctttttttttttcaaggaagggtacaagcca

SEQ ID NO: 540885 - DNA, 573 bp, Homo sapiens
acctgggttaattttaaggtgagattgattgggaaataagatgaaatagaaatgagaaaaaagaccgttatcctcaaaaatgaaagctgctggaggatttatggtggaacaaaagcaaaaaggaccagaaccagtgcattaggtaaaagttcagtgtgtatcacattggtcattttggcactaatacatttctggaataatcctgcattagacaatatgtgaaagagaataatgtgtatatatggtggtgagatgttgggggctgtagtggtgggggtgttcagaaatattgaaatagaggtgaggttaattcatcttgtgaattaatgtggtcatggtgtaactgatgcaaaaagagactaggtcataaatcgcttaaagggaatcaaaaggcacgaaggggcctgaacagactctctgaaaaatagttttagagcatctgctgtgcaatatggtttgaacctttcgaagccccaytgtataactcacttgtcacttgatttgaggaagagatgacagatctgccaggaacattcagaaagctttttttttttcaaggaagggtacaagcca

SEQ ID NO: 540886 - DNA, 590 bp, Homo sapiens
tgcctcaccaactccctgccttaacatactccactcccttctctctctctctctctcttcccctctctctttttttctttttttgagatggggtcttgccctgctgcccaggctggagtgcactaatgccatcatggctcactgcagcctcaatttcccaggctcaagcgatcctccttcctcagcctccagagtagctgggactacaggcatgcaccaccatgccaagctattttttggtggggggagggtagaatagggatctctcttttttgcctatgctggtcttgaacttctggcctcaaggtattctcctgcctcagcctcccaaaatgctgagactataggcgtgaaccatgacgcctggccactactctcttctttctttccagaagtatccattaggattgttcragaagaaattcacagaataatagccaccatctgtgtagtgcttattatgttccagtcactgttctgagcactttacatgtgcacagtcataaaatctgtagaagaactctttcatgtagatggcattattactattttatagataaactgaggcatagagagcttacccaagatta

SEQ ID NO: 540887 - DNA, 590 bp, Homo sapiens
tgcctcaccaactccctgccttaacatactccactcccttctctctctctctctctcttcccctctctctttttttctttttttgagatggggtcttgccctgctgcccaggctggagtgcactaatgccatcatggctcactgcagcctcaatttcccaggctcaagcgatcctccttcctcagcctccagagtagctgggactacaggcatgcaccaccatgccaagctattttttggtggggggagggtagaatagggatctctcttttttgcctatgctggtcttgaacttctggcctcaaggtattctcctgcctcagcctcccaaaatgctgagactataggcgtgaaccatgacgcctggccactactctcttctttctttccagaagtatccattaggattgttcgagaagaaattcacagaataatagccaccatctktgtagtgcttattatgttccagtcactgttctgagcactttacatgtgcacagtcataaaatctgtagaagaactctttcatgtagatggcattattactattttatagataaactgaggcatagagagcttacccaagatta

SEQ ID NO: 540888 - DNA, 590 bp, Homo sapiens
tgcctcaccaactccctgccttaacatactccactcccttctctctctctctctctcttcccctctctctttttttctttttttgagatggggtcttgccctgctgcccaggctggagtgcactaatgccatcatggctcactgcagcctcaatttcccaggctcaagcgatcctccttcctcagcctccagagtagctgggactacaggcatgcaccaccatgccaagctattttttggtggggggagggtagaatagggatctctcttttttgcctatgctggtcttgaacttctggcctcaaggtattctcctgcctcagcctcccaaaatgctgagactataggcgtgaaccatgacgcctggccactactctcttctttctttccagaagtatccattaggattgttcgagaagaaattcacagaataatagccaccatctgtrtagtgcttattatgttccagtcactgttctgagcactttacatgtgcacagtcataaaatctgtagaagaactctttcatgtagatggcattattactattttatagataaactgaggcatagagagcttacccaagatta

SEQ ID NO: 540889 - DNA, 536 bp, Homo sapiens
gaagactgcatgtcccagggatgaatatgcgtacctccctggatgaatatatatcactttgtaggagaaaaacttcttttctaatgggaatagtaagccggagggaggtgattctggacctatttgtaaaaacaagctgacagataagagtaaatagaacctgcaatatttgtatacctgaaccagccacgctaaagtcagcccttcttattgcaaaagtttataaatgtcctaagatattttcagttgggcactttctttccacttgtaactgagagcattttgattaagacattcactgagatttaggtcaattggctcactgaaaagctgtgttttacttgggttccccagaaagcaaagccagaggcaaatgcttaygtgctactactttattaggaagcaaaatccaaggcaggaggaatgagaaaaaaggaaagggaggtagggaaggagaagcaacaatattaaggtgtgttatgttactgatcatggcttagtgtccagctcaattgattgactgcaaaagcttgtag

SEQ ID NO: 540890 - DNA, 624 bp, Homo sapiens
  misc_feature (1)...(624): n = A,T,C or G
tggatgaatggattatagatgcatccctgattggaaaggagaaggcttgtagaggaccataaagttgaatctgtccagacttttacttctaaatgtgcaagagtcatgataaggctttttaattctcttttctggatgatttttccccttctgtaagctcactcttagagttcagccttggaacatgaaacacaatgacataattacaaatagcaggaaaatctcaagtccaactgccttgtatttagagttcaaytgagttcaaaaagtcctttcttgcaggccctgggcaacaagaaagacaggtggaattagccaggctggatggttacattgaggtaggaggcaggacttgactgtggaggcagggacttgaactctgattacttcagacagggaagaggtggaagtacctctccataagacatgcccaccagtgtcatgtcagtttaccattgctatggcaacacttggaagttaccacccacccctccccccttttttagaaatatctgaataacctaccccttaatttgcatgtaattaaaagtgggtgtaaatatgactgcagaactgcctatgagctgctagcctgggcacactgcntatggggtaaccctgctc

SEQ ID NO: 540891 - DNA, 624 bp, Homo sapiens
  misc_feature (1)...(624): n = A,T,C or G
tggatgaatggattatagatgcatccctgattggaaaggagaaggcttgtagaggaccataaagttgaatctgtccagacttttacttctaaatgtgcaagagtcatgataaggctttttaattctcttttctggatgatttttccccttctgtaagctcactcttagagttcagccttggaacatgaaacacaatgacataattacaaatagcaggaaaatctcaagtccaactgccttgtatttagagttcaattgagttcaaaaagtcctttcttgcaggccctgggcarcaagaaagacaggtggaattagccaggctggatggttacattgaggtaggaggcaggacttgactgtggaggcagggacttgaactctgattacttcagacagggaagaggtggaagtacctctccataagacatgcccaccagtgtcatgtcagtttaccattgctatggcaacacttggaagttaccacccacccctccccccttttttagaaatatctgaataacctaccccttaatttgcatgtaattaaaagtgggtgtaaatatgactgcagaactgcctatgagctgctagcctgggcacactgcntatggggtaaccctgctc

SEQ ID NO: 540892 - DNA, 589 bp, Homo sapiens
agacaaaatgtcctgtaaaaaacatctgaggtagttattcggaacacaatcaatagattgaaaatataaaaggagggtgaaagacaaggagaaagcatcagaacatctaaaatacacttcatcataatttacaggaggataatagaatggagaagaagaaatattcaaagacaaaggggctgaaattttccagatatgttgaaagacaccagcacttagatctaggaagtcctatatattccaaacaagatgaataaaaagaaattcataccttaacacatcaaagtgaaactgtagaacaccaaagaagaacagatagccttaaaaaacagccagagagaaaaagccaatcatctacaaataactgacaattcattcttagcctgaatttttactaacaagaaaggatgctggaaaacagtccaagagtatcttcartgtgttgaaagatatgcaagttaactttgaaatttttaccaagtaaaacatctttcaagattaagcgtgaaataatagattaaaacatatgaaaatattgttaccaaagacattttgtataaacaatttaaagggtatactttaaacagat

SEQ ID NO: 540893 - DNA, 581 bp, Homo sapiens
acccaagggtatgtccttctcttgggcataagaaaatctagagttatatttagggtatcataatgtgtggtgaagagtggacagagctggcatgctcacaatgaccaaattatgttggwtatattttaatccaaaacattgatccactattaacttgtaaataaataatgcacttgctttctagacacattccaggaagactagagaaactgacgcttatctatgtggaataatccactagtgaatttcttttaggatagaccaaagctgatctagaacataatctttacatacttggatccttcccaccagacaaagaagaacatctgggctgaaaggcaccattaggagggcaatgtgggatggtgctgtgctgacaactggtagtccctgccctacatctttgtagaggactggagcccagattgggccatggtcaacttacatgttgaagtaaagacctccttctaggtgtgcatgtgcttattacagatatgccacggtgctaagtaccccaggactacaggaaaaaataagaatacatcctgtatccgtgatcaggaggcacacaggccagagtg

SEQ ID NO: 540894 - DNA, 581 bp, Homo sapiens
acccaagggtatgtccttctcttgggcataagaaaatctagagttatatttagggtatcataatgtgtggtgaagagtggacagagctggcatgctcacaatgaccaaattatgttggatatattttaatccaaaacattgatccactattaacttgtaaataaataatgyacttgctttctagacacattccaggaagactagagaaactgacgcttatctatgtggaataatccactagtgaatttcttttaggatagaccaaagctgatctagaacataatctttacatacttggatccttcccaccagacaaagaagaacatctgggctgaaaggcaccattaggagggcaatgtgggatggtgctgtgctgacaactggtagtccctgccctacatctttgtagaggactggagcccagattgggccatggtcaacttacatgttgaagtaaagacctccttctaggtgtgcatgtgcttattacagatatgccacggtgctaagtaccccaggactacaggaaaaaataagaatacatcctgtatccgtgatcaggaggcacacaggccagagtg

SEQ ID NO: 540895 - DNA, 581 bp, Homo sapiens
acccaagggtatgtccttctcttgggcataagaaaatctagagttatatttagggtatcataatgtgtggtgaagagtggacagagctggcatgctcacaatgaccaaattatgttggatatattttaatccaaaacattgatccactattaacttgtaaataaataatgcacttgctttctagacacattccaggaagactagagaaactgacgyttatctatgtggaataatccactagtgaatttcttttaggatagaccaaagctgatctagaacataatctttacatacttggatccttcccaccagacaaagaagaacatctgggctgaaaggcaccattaggagggcaatgtgggatggtgctgtgctgacaactggtagtccctgccctacatctttgtagaggactggagcccagattgggccatggtcaacttacatgttgaagtaaagacctccttctaggtgtgcatgtgcttattacagatatgccacggtgctaagtaccccaggactacaggaaaaaataagaatacatcctgtatccgtgatcaggaggcacacaggccagagtg

SEQ ID NO: 540896 - DNA, 546 bp, Homo sapiens
ccttttctccacatccttgccaacatctgttatatttttaccttaataataaccactctgactgatgtgagatatctcattgtggttttaatttgtattttgctgatgactagtgatgttgaaaatttttgtacatgcctgttggccatttgtatgtcttcttttgaaaaatggattattttcctgttctagaaatgaggaaaatatgtctaggaatgtaagagaattacctgtggtagatggcatgtctggctaagtttctcamtcttctctatccatcctctttaccatgggactttcatttgtcacataaggagtggggaatattaccccactccttgactgggacgctggctttatcacttgcattggccgtcagaaaaagagggaagcaatcattctgagttccagcctcaaagcaacttgcatgcttccatttatgtccttgaccctgcacccccaccatcaggaggacgtgcccaggctgacttatgggtcccaggagaaggatgagaaggacatggagcacagccaccctggctaaac

SEQ ID NO: 540897 - DNA, 546 bp, Homo sapiens
ccttttctccacatccttgccaacatctgttatatttttaccttaataataaccactctgactgatgtgagatatctcattgtggttttaatttgtattttgctgatgactagtgatgttgaaaatttttgtacatgcctgttggccatttgtatgtcttcttttgaaaaatggattattttcctgttctagaaatgaggaaaatatgtctaggaatgtaagagaattacctgtggtagatggcatgtctggctaagtttctcacwcttctctatccatcctctttaccatgggactttcatttgtcacataaggagtggggaatattaccccactccttgactgggacgctggctttatcacttgcattggccgtcagaaaaagagggaagcaatcattctgagttccagcctcaaagcaacttgcatgcttccatttatgtccttgaccctgcacccccaccatcaggaggacgtgcccaggctgacttatgggtcccaggagaaggatgagaaggacatggagcacagccaccctggctaaac

SEQ ID NO: 540898 - DNA, 273 bp, Homo sapiens
aatgtttcaattgttctcttttgcctataggattcggtctgactttattctgacccagaagttccccaggacctggccttgcctatctcagcagtcttccctccagcactctcagacttccccagtctaagctgtggctttcacaaactacttactattaccaaagactgcttgtgctcttttatttccataggatgtttaaggcttctatctatgagagtcaatgatgtcaacaasaacaaaatgagcatttaaattagacaaaagatccca

SEQ ID NO: 540899 - DNA, 633 bp, Homo sapiens
gcttaaaatggaatggaagctgcccctctactggagagggggccgtttctcctgactcagctcacactgtgtacattcttaatgcatgatctgtctaccgggtgattggtccttggactatgcagagaaataaggttgagaaaaagggaatagagtaggggaaaaaaaaaaaaaggagatgggccctttctcatttcagaggtgaattgagttccaggcctgagttagtagttgtctatcaaattctgtccaaattcttwccaaagtcaaacactttaaatctagcaaccctgacaactcaggatacacattttaaaccataaagttcagctcagcattctattttgacattgacagccactgccagaattattaccctgcctcaattcatccagtgactcatgaataagataccaaccaagtgaacagaagacctcagagagtttccattctaattccagaaacttcatcaattctgaacaataaatactcaggaaagtacacagtaaaatacagcagcaacaaacaacatgaaattacatagaaaatattagacatgtagaggccaaaataaaacacaaacaaaaagtgagccaaaattatggatgtttaaaaagcaaatacagttttatt

SEQ ID NO: 540900 - DNA, 633 bp, Homo sapiens
gcttaaaatggaatggaagctgcccctctactggagagggggccgtttctcctgactcagctcacactgtgtacattcttaatgcatgatctgtctaccgggtgattggtccttggactatgcagagaaataaggttgagaaaaagggaatagagtaggggaaaaaaaaaaaaaggagatgggccctttctcatttcagaggtgaattgagttccaggcctgagttagtagttgtctatcaaattctgtccaaattcttaccaaagtcaaacactttaaatctagcaaccctgacaactcaggatacacattttaaaccrtaaagttcagctcagcattctattttgacattgacagccactgccagaattattaccctgcctcaattcatccagtgactcatgaataagataccaaccaagtgaacagaagacctcagagagtttccattctaattccagaaacttcatcaattctgaacaataaatactcaggaaagtacacagtaaaatacagcagcaacaaacaacatgaaattacatagaaaatattagacatgtagaggccaaaataaaacacaaacaaaaagtgagccaaaattatggatgtttaaaaagcaaatacagttttatt

SEQ ID NO: 540901 - DNA, 515 bp, Homo sapiens
tcaggacttttctgctactggatcttacctgaaactatttctatcctgaatcctgagctcacagtgtgtgagaactgagtacgtactaaggcctgaaagagtgatggaataggacaccagaaaggtagatggagatgagtcataaatgtccttaactccatactatgtcctttctaacctccatcaatcaaaagtggtttgaggttctcacttttccttaatcttgctctattaatggggcattgatgttttgtttgatgacacattgctcaaccaaagcaacattttacaagatgtgttctcttatctatcctaactgaaggaagtgagtgatgagaatttcaggtccttttcagctttagcaggacagtatttctgaccaacctgtcctttcccctccctcggattaccctatatgggtactgcctccatgtaactcakggttggaatatcccagaacttggacggcaaggagatgatattaaggatgtcacttctaccccagaaagaactac

SEQ ID NO: 540902 - DNA, 548 bp, Homo sapiens
ctggagctggggacaccttctcttatattacctcccatttacagttgaggctaggtatttttcagtggcaagagcacctcttctacagcawattgtaaccaaccttattatgctaaatattgaacaaaaaatctatagcccggcccggagtggtggctcacgcctgtaatctcagcactttgggaggttgaggcgggtggatcatgaagtcaggagttcaagaccagcctggccaagatggggaaaccctgtttctactaaaaatacaaaaattagtcaggcatggtgtcaggcgcctgcaatctcagctactcgggaggctgaggcaggtaattgctcaaacccggaagggggaagttgcagtgagccgagatcatgccactgcactccagcctggacaacagaatgagactctgtctaaaaaaaaaaaaaaaaaaaagaaaaaaaaattatagcctgcatacaaagtcttactattttttttcttaccaaaattccaatgtggctatgtactggatcatggttgtaactctcttataatagaaaaa

SEQ ID NO: 540903 - DNA, 548 bp, Homo sapiens
ctggagctggggacaccttctcttatattacctcccatttacagttgaggctaggtatttttcagtggcaagagcacctcttctacagcatattgtaaccaaccttattatgctaaatattgaacaaaaaatctatagcccggcccggagtggtggctcacgcctgtaatctcagcactttgggaggttgaggcgggtggatcatgaagtcaggagttcaagaccagcctggccaagatggggaaaccctgtttctactaaaaatacaaaaattagtcaggcatggtgtcaggcgcctgcaatctcagctactcgggaggctgaggcaggtaattgctcaaacccggaagggggaagttgcagtgagccgagatcatgccactgcactccagcctggacaacagaaygagactctgtctaaaaaaaaaaaaaaaaaaaagaaaaaaaaattatagcctgcatacaaagtcttactattttttttcttaccaaaattccaatgtggctatgtactggatcatggttgtaactctcttataatagaaaaa

SEQ ID NO: 540904 - DNA, 605 bp, Homo sapiens
ctgaaatatcagaagcaagactgcctttgttagtaccatgtagcctgtttttctggaactttgtaatcccagaaatgagtagactgtttttcatctgatcccctgaggactcttgtagactcaacagagacacagttctcaaatccatctgatcccctttgcctatctgagcagaatcaaaacacacagaggcccaaatatttggccaaacaacacaagtagccaggcaacagatactaaaaaaaaaagaaaaatcaactgaaaaagacggattaagttgcctgtcttttcttctgataaagacagttttaccattgtcacagaaaacattcatcgatattataaatgtctgattaattcagaataagtctctgttttctgttttaggtcccattggtttatgaattcagaatcattaacaaactgtgtgtcaatgccttaagcttttatttctttttcttcctgggaaaattaaagtcagtccctgttggtttcttcatctttgcccaacaaatgtaccaaaaaaaaaaacaaagcaagcagcttcacaatagagatatctgattgtaragtgtatggtggaggcgtggatgttggtagttaga

SEQ ID NO: 540905 - DNA, 627 bp, Homo sapiens
tggttcttttctgagctcatcttttttttatggtactttgacaaatgtagccaataacacccatgttaccaacagtctttttccctctttattttcctaaagccacacattcattagatacattacttcggacttctgagttattatgggtgaccattttacagagtggagtctgggagtatagtgacaaaacacatttcctcagttaggcaacacccacacatgacccagaatccaaagccacatattttaggttttgtcatggaagcatcaatttttgtattagattttgctagactgtactacaataaccctcaatctttaatggcttacaacaacaaaagtgtatttcttacatcaatgwtgtatgtttgatggctgctccacatcctctttattttgggacccaaactgaaagagcagcctctaatttgggacacccagcctcacaacaagggggaaaaacaaaatggttaaatgattcagtggcacttaattctttgacatgtcaacagacactttcacccacattttattggctaaagtcatatagccaagctaacataatgaattagggaagtattttcctttcacaagtatgagccataaatattttgcacaaatact

SEQ ID NO: 540906 - DNA, 627 bp, Homo sapiens
tggttcttttctgagctcatcttttttttatggtactttgacaaatgtagccaataacacccatgttaccaacagtctttttccctctttattttcctaaagccacacattcattagatacattacttcggacttctgagttattatgggtgaccattttacagagtggagtctgggagtatagtgacaaaacacatttcctcagttaggcaacacccacacatgacccagaatccaaagccacatattttaggttttgtcatggaagcatcaatttttgtattagattttgctagactgtactacaataaccctcaatctttaatggcttacaacaacaaaagtgtatttcttacatcaatgatgtwtgtttgatggctgctccacatcctctttattttgggacccaaactgaaagagcagcctctaatttgggacacccagcctcacaacaagggggaaaaacaaaatggttaaatgattcagtggcacttaattctttgacatgtcaacagacactttcacccacattttattggctaaagtcatatagccaagctaacataatgaattagggaagtattttcctttcacaagtatgagccataaatattttgcacaaatact

SEQ ID NO: 540907 - DNA, 627 bp, Homo sapiens
tggttcttttctgagctcatcttttttttatggtactttgacaaatgtagccaataacacccatgttaccaacagtctttttccctctttattttcctaaagccacacattcattagatacattacttcggacttctgagttattatgggtgaccattttacagagtggagtctgggagtatagtgacaaaacacatttcctcagttaggcaacacccacacatgacccagaatccaaagccacatattttaggttttgtcatggaagcatcaatttttgtattagattttgctagactgtactacaataaccctcaatctttaatggcttacaacaacaaaagtgtatttcttacatcaatgatgtatgtttgwtggctgctccacatcctctttattttgggacccaaactgaaagagcagcctctaatttgggacacccagcctcacaacaagggggaaaaacaaaatggttaaatgattcagtggcacttaattctttgacatgtcaacagacactttcacccacattttattggctaaagtcatatagccaagctaacataatgaattagggaagtattttcctttcacaagtatgagccataaatattttgcacaaatact

SEQ ID NO: 540908 - DNA, 580 bp, Homo sapiens
tggctcaattctgaaggctcaaatgtgagttctgcaggcctggagggtgatggcatgatacagggttgcgtcataattccagagaattttatagtgattctctttggagagtcctgaatgtggtggtgttgcttctgtgccctgttgagcattcatttcctatggaaatgctgagagggtagtgtgaaggttaatactgagtgtcaactagattggattgaaggatgcaaagtattgttcttggttgtgtctgtgagggtgttgccaaaggagattaacatttgaatcagtggactggagaaggcagagggtcataattccagagaattttatagtgattcgctttggagagtcctgaatgtggtggtgttgcttgtgtgccctgttgagcattcatttgctatggaaatgctgagagggtagtgtgaaggttaatactgagtgtcaactagattgggttaaaggatgcaaactattgttcttggttgtgtctgtgakggtgttgcaaaaggagattaacatttgagtcagtggactggagaaggcagactcacccttattctgggagggcatgattcaa

SEQ ID NO: 540909 - DNA, 643 bp, Homo sapiens
tcgatgtagcagaatcacttgaaacctggaggcagaggttgcagtgagccaagatcatgccactgcactccagcctggtgacagagcaagatactccatctcaaaaaaaaaaaagttgtgtataagaacattcatatgaaaactggtgtctccctaagataaactttgcataaaaccaaaggagctcattaattaaaaaaaaaacctccaggcaatcaatattattaattaatcatattaatgtttcatattagaaaaaaatatgagagctatcatttattgaatgtctactcaatacttcattgatttcagtgkttcacatatgccatttcatcttcgcaacatttctgtgagactggtactatgaacttcgttttagagatatccaagcttagaccttggtaaccttaagaaaattggtcagattcactaaagttgggagttgcaacataggaaggtttatctaaatcaaagccctatgcattcacacatctgcctgagctgtcacaacttttcctctaaagtggccatggaagaaggaataagagagattctaactttacattaaaacaggacactttcaatctcttgatctgtaaagaatctatctccattcttccctgtgaaacaaataaaatgggat

SEQ ID NO: 540910 - DNA, 629 bp, Homo sapiens
agctgcttgggaggtcgatgtagcagaatcacttgaaacctggaggcagaggttgcagtgagccaagatcatgccactgcactccagcctggtgacagagcaagatactccatctcaaaaaaaaaaaagttgtgtataagaacattcatatgaaaactggtgtctccctaagataaactttgcataaaaccaaaggagctcattaattaaaaaaaaaacctccaggcaatcaatattattaattaatcatattaatgtttcatattagaaaaaaatatgagagctatcatttattgaatgtctactcaatacttcattgatttcagtggttcacatatgcyatttcatcttcgcaacatttctgtgagactggtactatgaacttcgttttagagatatccaagcttagaccttggtaaccttaagaaaattggtcagattcactaaagttgggagttgcaacataggaaggtttatctaaatcaaagccctatgcattcacacatctgcctgagctgtcacaacttttcctctaaagtggccatggaagaaggaataagagagattctaactttacattaaaacaggacactttcaatctcttgatctgtaaagaatctatctccatt

SEQ ID NO: 540911 - DNA, 629 bp, Homo sapiens
agctgcttgggaggtcgatgtagcagaatcacttgaaacctggaggcagaggttgcagtgagccaagatcatgccactgcactccagcctggtgacagagcaagatactccatctcaaaaaaaaaaaagttgtgtataagaacattcatatgaaaactggtgtctccctaagataaactttgcataaaaccaaaggagctcattaattaaaaaaaaaacctccaggcaatcaatattattaattaatcatattaatgtttcatattagaaaaaaatatgagagctatcatttattgaatgtctactcaatacttcattgatttcagtggttcacatatgccatttcatcttcgcaacatttctgtgagactggtactatgaacytcgttttagagatatccaagcttagaccttggtaaccttaagaaaattggtcagattcactaaagttgggagttgcaacataggaaggtttatctaaatcaaagccctatgcattcacacatctgcctgagctgtcacaacttttcctctaaagtggccatggaagaaggaataagagagattctaactttacattaaaacaggacactttcaatctcttgatctgtaaagaatctatctccatt

SEQ ID NO: 540912 - DNA, 629 bp, Homo sapiens
agctgcttgggaggtcgatgtagcagaatcacttgaaacctggaggcagaggttgcagtgagccaagatcatgccactgcactccagcctggtgacagagcaagatactccatctcaaaaaaaaaaaagttgtgtataagaacattcatatgaaaactggtgtctccctaagataaactttgcataaaaccaaaggagctcattaattaaaaaaaaaacctccaggcaatcaatattattaattaatcatattaatgtttcatattagaaaaaaatatgagagctatcatttattgaatgtctactcaatacttcattgatttcagtggttcacatatgccatttcatcttcgcaacatttctgtgagactggtactatgaacttcgttttagagatatccaagctkagaccttggtaaccttaagaaaattggtcagattcactaaagttgggagttgcaacataggaaggtttatctaaatcaaagccctatgcattcacacatctgcctgagctgtcacaacttttcctctaaagtggccatggaagaaggaataagagagattctaactttacattaaaacaggacactttcaatctcttgatctgtaaagaatctatctccatt

SEQ ID NO: 540913 - DNA, 532 bp, Homo sapiens
cctgagaaacatggccaggggccacccaggatagtcaaacagctatgtaaagcatccaggcccaatccataggccacccctggcaggtatgcccccaggccagccaagccactacacaaccatgcccttcctggccaaagtaacagccccatgaccccaacccaagtgagccaatgccaagttggccaaccactgtgtgcattaatgcttctctggcctgagaaacagttcagtaaacccacccccagcaaagctgcaccaccactaccataaattcttttagcctaggctactgggacacttgcaaacatcactagcctagtttacaaccgaaaaaacttcatggagactacactactgtacccaccttaaactaaagtcaattcacccccactgaactgacacgycaagactcatgtatataaatacatttttccctatgaaaaccctgtaaaattggaagaggtgactgactattccaccagatgcacagaaatcaacatagaaacatatcaaacattaaaaacaaaaa

SEQ ID NO: 540914 - DNA, 526 bp, Homo sapiens
aaactttggagaataacttcagtggttttcaaccatgaaagtttattttgcttatgttggctgtcagtgatggcagctaccagccaattgcggctctgcaactttattccagaatccaggccatagaagcagcccctacttggtcttgtgcttcttgtggcagagggaaaagaatgcagttaaccaccttgtgcactggctcttaagagcttctgttcagactcacctgtgtctcagccacacagtcccctggccccagcaagtcccctggtcaagaycaatgtcaatcaagtaggatgcctcctgcagggagccagtaaatgaggttatatacttcacattcaaggaggaatgcaaatcactggaatcaagattcaataacaacgccaggtttcatggctcactcttgtaatcccagcactgtagagtggctgaagtgagcagctcctttgagctcaggagatggagaccagtctggataacatggcaaaaccctgtctctacaaaacaaatacaaaaaatcagc

SEQ ID NO: 540915 - DNA, 505 bp, Homo sapiens
aaagagccagagggcaccctctccccttccacggtgtaaggactcrgtgagaggcattatccgtgaatcagaaaatgggccctagccagacactgcatctgctggcaaccctttgatcttggacttcccaacctctagaactgtgagaaatacattcctgttgtttataagccacccagtttatggtatttccttatagcaacctgaacaaactacagcacataggttagcaatttgccacattttgctgcttctttatttttctgaagtattttaatataaattatggatagtatgacatttcacttctaattctacagtgcgtatgttttttttaagtaacttttttataaaagatgagttttaattaactaaaactgttgagtttaaaactacagggatttccagtagcaaaaagcttccattattcttcctattgctttttctcctaatagcaaaggtcaagaaaagaacttgaacctgctagaattgttccaagtaccag

SEQ ID NO: 540916 - DNA, 505 bp, Homo sapiens
aaagagccagagggcaccctctccccttccacggtgtaaggactcggtgagaggcattatccgtgaatcagaaaatgggccctagccagacactgcrtctgctggcaaccctttgatcttggacttcccaacctctagaactgtgagaaatacattcctgttgtttataagccacccagtttatggtatttccttatagcaacctgaacaaactacagcacataggttagcaatttgccacattttgctgcttctttatttttctgaagtattttaatataaattatggatagtatgacatttcacttctaattctacagtgcgtatgttttttttaagtaacttttttataaaagatgagttttaattaactaaaactgttgagtttaaaactacagggatttccagtagcaaaaagcttccattattcttcctattgctttttctcctaatagcaaaggtcaagaaaagaacttgaacctgctagaattgttccaagtaccag

SEQ ID NO: 540917 - DNA, 575 bp, Homo sapiens
ccccctcccaaactgcttgcattttcaatcttatcagtgtcattttaagtgtggaggggtaggagagaaacactgccaaatacacacaattatatagtcgcttaacgtacattatcacttcacactagaaagaaaaaagggaaacatgccactatgttgatataatgagaaaggctggtccaagaacagagaagtaaaacaaagtgagaaaattatcaagggacatgggkaacattttcctcagcgaaataaatgagatcacagaggtctcagactggaaaataatacactgtcacatgtatatcaaatataaaaatttttaagacctgaattttctttattacatataatactgggagagttagccttgatttaaagaaagccaacacttacttgctgtgttgaaatatttccaatgccacttttgcttcaacttccagagtttcaaatggaagatctttataaattaaagcatgagcatcttttgtgaaggaacgtaagttctccttaaaaatgaaagtaataacctttagtaacaattcactgaaaagcatttctccataagccagttgaaa

SEQ ID NO: 540918 - DNA, 622 bp, Homo sapiens
ctggtgccaccccgacggagaaactggctcatctgatcttgtggcccccacccggaactgactcagcacagaggacagtttcaacttcctatgatttcatctccaacccaaccaatcagcactctcgacccactggtctttccctcacctaccaagaattatccttaaacactctgatccctgaatgcrgagagactgatatgagtaatgataaaactccatcttccacacagccagctctgcgtgaatgactctttcaccattacaattgccctgtcttgataaatcagctctatctgggcatcgggcaaggtgaacccattgggtggttatattcctaacacaaagaaatgataaatgcttgaggacgtggatattccaattaccctgcttgctacactgtatgcttgtatcaaatcatcacctgtaccccataaatatataaaactattatgtacccataataattaaaaaaatttttaaatatttttaatatatcttatgcattagttgctttactaagtataaaactcaagtctgcaaattttttctacatgttttttggaggcttgctttctctattatccatgtgggcaataccctcatagacactaaatacaag

SEQ ID NO: 540919 - DNA, 622 bp, Homo sapiens
ctggtgccaccccgacggagaaactggctcatctgatcttgtggcccccacccggaactgactcagcacagaggacagtttcaacttcctatgatttcatctccaacccaaccaatcagcactctcgacccactggtctttccctcacctaccaagaattatccttaaacactctgatccctgaatgcagagagactgatatgagtaatgataaaactccatcttccacacagccagctctgcgtgaatgactctttcaccattacaattgccctgtcttgataaatcagctctatctgggcatcgggcaaggtgaacccattgggtggttatattcctaacacaaagaaatgataaatgcttgaggacgtggatattccaattaccctgcttgctacactgtatgcttgtatcaaatcatcacctgtaccccataaatatataaaactattatgtacccataataattaaaaaaawttttaaatatttttaatatatcttatgcattagttgctttactaagtataaaactcaagtctgcaaattttttctacatgttttttggaggcttgctttctctattatccatgtgggcaataccctcatagacactaaatacaag

SEQ ID NO: 540920 - DNA, 622 bp, Homo sapiens
ctggtgccaccccgacggagaaactggctcatctgatcttgtggcccccacccggaactgactcagcacagaggacagtttcaacttcctatgatttcatctccaacccaaccaatcagcactctcgacccactggtctttccctcacctaccaagaattatccttaaacactctgatccctgaatgcagagagactgatatgagtaatgataaaactccatcttccacacagccagctctgcgtgaatgactctttcaccattacaattgccctgtcttgataaatcagctctatctgggcatcgggcaaggtgaacccattgggtggttatattcctaacacaaagaaatgataaatgcttgaggacgtggatattccaattaccctgcttgctacactgtatgcttgtatcaaatcatcacctgtaccccataaatatataaaactattatgtacccataataattaaaaaaatttttaaatatttttaatatatcttatgcattagttgctttactaagtataaaactcaagtctgcaaattttttctacaygttttttggaggcttgctttctctattatccatgtgggcaataccctcatagacactaaatacaag

SEQ ID NO: 540921 - DNA, 576 bp, Homo sapiens
cccagaaaaactggcataagctgttgttaaatctgtgccccttctcctcggttgactggagtacgagttttaacattttgccattttgactttcctttctgggtcccctgggtcctctcctcccaccccctccctgggtactaagttttcatcactgtcaccacggcaacagcaaggatgcctcattcctcacagttctgcacagctaaactctggtcgcctttgtccactgagctagctgaattctttttaaatacaccactaaatcaactatctgctgtacagaacttcatccattattcaacctttaaaaaaaaacaaaaacaaaaacaaacaaaaaaacaaaagaaaaaaactgatgtatactaatttcttctcctgggaatggcctttttccagacctgccaatactcttgaatacaccatacatttttggtccctaggaacaaatataaaaattgccagtgtacgtgcgtccartgtaagtgtggtgcaattttaaagcacgcaacagagcattcataatgggtttcccttttaaaagcacagtagaccaaaaataaacctgacaaaggg

SEQ ID NO: 540922 - DNA, 624 bp, Homo sapiens
gctgaaacgtgtgaaatgaggatatttcattttatatttgccattgttcacaattttccctttttatgtgttctgggtccgacccaaagaaagcagtgtggacagcatgatattcctcaccatcatctgacctttccaaagcacttctgatgctcagaaaatacttccttgttttacgctggcgtttgaagaaacaaggaatggggacaaaagtgaagtttttaggattaataatggtcatagggtaaatgaagccayggaggtaggtgcagggggaagctgctttggtaaggtggcaagtgtaaagggaaaaaggtaagacaaagtgagcacaggtgctgaaggagacacggtgtgctcgatgaaatggcttctaacaatttcagcaaaaccatccagcttactgatgcacacaggccaggcattcaaaggtgggattctcagtccaaatcgattttggatgccacatgttaatagaaacagtgagggagaaaaaaagtggcagtaagccaagtctccaaaatataagaaaatatttccgggagcactaggatatttggatgaaataaaaatttggtcctttctcatgtagagactggcagcatggtggagtcaaaaggaggg

SEQ ID NO: 540923 - DNA, 506 bp, Homo sapiens
tccagatacatgtgttagatgaatctgacccttscatggaataagacacttatctgctgtgtggtctggagcaagcgactcagcctctctgattcttaattctttaaaaactgagtatctccaaactctggagcccattttattttgttttattttattgaaattttatgaaaataaaataccatttttaatccagttaagttaatcttcaataagcatgattacatatatacccaactgcattttagaaccaataggaagctatctagcactcagattaggcaaataaattggacataaattacaggagaaataaggcaaagctatactaagagggaaagtgctagcaaaacttacaagtggttcagagtactttaaatcattttaattaattttcattctacaaacatgtattgattatttacagtgtgccaggatctattctgggttgtaataacaaatcaggattaggcttttccacagaaatttagtcttgagattgttgt

SEQ ID NO: 540924 - DNA, 506 bp, Homo sapiens
tccagatacatgtgttagatgaatctgacccttgcatggaataagacacttatctgctgtgtggtctggagcaagcgactcagcctctctgattcttaattctttaaaaactgagtatctccaaactctggagcccattttattttgttttattttattgaaattttatgaaaataaaataccatttttaatccagttaagttaatcttcaataagcatgattacatatatacccaactgcattttagaaccaataggaagctatctagcactcagattaggcaaataaattggacataaattacaggagaaataaggcaaarctatactaagagggaaagtgctagcaaaacttacaagtggttcagagtactttaaatcattttaattaattttcattctacaaacatgtattgattatttacagtgtgccaggatctattctgggttgtaataacaaatcaggattaggcttttccacagaaatttagtcttgagattgttgt

SEQ ID NO: 540925 - DNA, 495 bp, Homo sapiens
tgaagacgtccaaagttagctgagatacattccctttgcttcaagaagaatttgaagagtgtaatacatgaagaatatacttccatataatggtccagaaacaggttccttttaaaagtgatgaatatgagcaagcctttttcttattagagtcttagagaggtcactgcagcatgtggtgagatatttactaatgcatgccgtttttacctaggaaacaactttctatgaaatgtaaacacagctgtggagtttaattcaggatcctcatccttcttgtattaagctacattggaaaggcgttcaaatcagccttaaaaaagagaatcagttgacttcatggcagtagacccctgaaattttggaaaccagatttttaagactattacagttagargagctgagttaaaaggtttgctttggagtaaaactggtttggtttgaatatcgctctgttatgtgaccttgaacaagttttcagcattactgaactaa

SEQ ID NO: 540926 - DNA, 499 bp, Homo sapiens
atggtttggggctcattgaaattagaaaattctgtagagaaaatgtccttattgagatagcctaggacaaaccaatcttagcatctatcactgcctaccttccagggaggagtagacagcagagggaagagagatcagctttgtataatggacaaatcaaagataaaccagatagagctaacgaaatgcattctacctaaaattaaacccaatattctataactctctactaatgttacagtgtctacattgtcttcctttgttctggtttctgacttctgttctccctctccacatcttccttccattctctttctgatcatgtctatgcatctgtcaagtttatctgctgatagtataatctatgattccaaagacttaagaaggatgtaaataaatactgctgtgccaggcactatattcaccaggtgtttcatataaattagtttaactaaccytaacaacaaccttgaaaacatagcattagaaaataagggaa

SEQ ID NO: 540927 - DNA, 511 bp, Homo sapiens
ccgaggcgggcggatcacgagatcaggagacttgagaccatcctggctaacatggtgaaaccccgtctctactaaaaatacaaaaaattagccgggcatggtggcgggtgcctgtagtcccagctactcgggaggctgaggcaggagaatggcgtgaacctgggaggtggagcttacagtgagccaagattgtgtcactgcactctggtctgggggcagagtgagactcaatctcaaaaaaaaaaraaaagaaaaagaaaagaaaagaagggaactgaagctgttttccaattaagaagatttctgaaggtctcacagaggggagcttctgaagccagaaacttaatcgggacttacctacctcctgtgcagtgctggtgctgagtgactcgcttagctgaaacccctaaattagagctccatgctttgttttgttctgtgtcctggttgtttctctgagctccttgtgcatccagagacagcagatcaaaggcatcccttttgctgcatc

SEQ ID NO: 540928 - DNA, 369 bp, Homo sapiens
cctcttctttaactttgcttytttcatccttttcctctgattttatctgcattctgtcctggttggcttttatattcttaccattcttgcccatgagtattaataaaagttaaagaaaaaaatagttacttagtgttaaggaaaaaaatatgcaatgctttaaaaggcagtattgtacacttttctgatactgatctcggagcacagagctgtgctcttacagttctactgcctcatccaaatatatcttgggaaagagagagttcatcaaaagaataaatttgtatgcatcttccgcaaatgcaaattgcgaagtgtttctgaagctgctgcttttcagtacctgtaatcatcaggataatgtcctgt

SEQ ID NO: 540929 - DNA, 609 bp, Homo sapiens
aagcttgggatcaaacactcaagagcccccaagacaccttatcacttgtacttaagtcgcataagaaggtgaaattaccaagccacatttaggcatatttaaagaaataatgagctccaagatgagggaccacactgaaaataagaaggcattttatattcattcactccaaagaagcaaatctctcatttttaatctccacagttaggggtwacaggaagggaggggggaatgaatcagaaaccattgtcaacattgtgctcatcctcttttgtctcctgagtcaggatgtcatatgctacctttggcagggtgtaggtacctacagagaagatggaatggggtaaccagaagcaatgcctcagcctgctggaggactggcactgaggaaattctgagacaacctaaaacatgcaaaagagaaagtgcacgtgttttttcagatgagtgcataactgaacaaaattttgcaagtatcaggtttcattaggaaacatgaaataaggaacttggtccccaaatttcccccgctgcttcttttttttttttaagttattctcactttgtaaagaagttccaaaactagagtcagaaaaaaaaaaatgaaaa

SEQ ID NO: 540930 - DNA, 449 bp, Homo sapiens
actcttcactttcaacaagctttccatttgaagttctaaagagcctcaaacctcccagaacccacctcaaacctcccagaacccaccatctgctgagtcttttgaatgaggtcaaaggtagcccrctctgtaggctgagataattgcttcttcaggcttagttaattaggacagttatttcattattagccaagctccttttatacatacagcccacatgaactgagtctgaagagtcatctcagaaaccaggccagggcaggaaaacccaaataccgctcagcaatattcctgtttttagcaatgttgacaatgaaagacaaagtcttgagttttatgtagaaaacagtaaaacataaactcatacagttaaaggaatatagtaaatgaaagaaatactcaaggaaagaatttggcaacattttcattctttcatttgagcataaata

SEQ ID NO: 540931 - DNA, 596 bp, Homo sapiens
accaccacgcccatctaatttttgtgtttttagtagagacagggtttcaccatgttggccgggctggtcttgaactcctgacctcaagtaattcaccckcctcggcctcccaaagtgttgggattacaggcacgagccaccacgcccggcctcttagcagttttcaagtgtgcaatacattattgttaagcctggtcaccatgctgtacattggatctcagacttctgtttttttctttatcatgaactatgtccacaaaataatatttgagcccctcactgaaaacatgtattcatctgtatttatttacttattatttatttctgtacttgtacctctgtgtatggcatattgcatataatgcatattgagtgcgttgtgaaacaggtacaaaatgtaattacaaaaaagagaaataacaagaaatggaaggtccactgacttcatcctgcacccggaggctccatagctgtgtatgaaggtgttcctgggatgctcatgtctcagttcatgacagggcatctgggcactggggcagtggttggaatgaaccaggcgggtggtgtaggggaacagagaggaaggacaggtggcg

SEQ ID NO: 540932 - DNA, 464 bp, Homo sapiens
aatgagttaatatatgggaagagcttgggacagtgtttgttacctagtaggtatcaggtaagtgttagctgcttttcttcttgtttgcatagtcatgagaccagttgtttaggtgcctgaaagagccagtgttaaaatggcatgagattmgtgctagggatgatggtgctttcattgtctttgctttacacatagtagacactcaatagcagttttattcaatgaaattgaatcaccattcgaattttgaacttgcccttgaaatcaaggagtgttttccacaaaccaaaccagtcttgcaaatagttaggaaaatcaagcttgtttttaatatcctgttgtttcctaggaaggggctctacaaagaaagtgaatggaaacagcgttcttggcaatgttgccattggtagtgggtgcctgcttttagtactgtatgaaaataaaatcaaacaaatttaaagaaa

SEQ ID NO: 540933 - DNA, 509 bp, Homo sapiens
aaaggtcaattcagagtgatttaccttcagagagggaccctcagagagaaccttgttttggggagttgtaagaagccctgtaggctctatgaccttatatctcagatttttaggacaattctaatttaaactattctggcycagttcccacaaatgtatttgtaagtgtacttgccatggtttttgttgagaaatgtggtcgcagtccctacgggcccctcagctgattgtcatcccttcgtgtcatcttgccctctggtcttcctcctgccaactcaggaaggtctaaactcaggggacagaggactgctccctctgagctgctccccccgagctgcttcctctgagctgctccctccgagctgctccctctggccccctctctgacggactttttctattctaggaactgtaccgcactcattcgtagggaagcttttttttttttttttttttttccttttggagaagttaagcttctttagagattaaagttggtttcctctagc

SEQ ID NO: 540934 - DNA, 633 bp, Homo sapiens
tcttatattgtaaaataaaaatgcattgtaaagggtagaaaagagggaaatcaagtcaaagtgttgtaaggccctagcattaatctgggaagggcaaaggtactaattaatagtagtctttaaaatgacagttgtgatatttaaagtgatcactgaaagagtagtraaaaaatatgcatgtaactaataagctagcattgggaaaaacactaaaacacaatccttttaaagcataaaatgaggaaaaaaggaaaataagaaataagcagcaaacagagtataactagtaggatgatggatatgtacctgaatatgtcagtaatttaatcagtgtaaacaatctacatacttcaattaaaaatcaaagattggtaaggcacttctggattgatggggccctccaaaattccactcctccataaaagcgcagagaacaacagaagcagaattggtcaaaatcacctatgtcagaactctggaaattaaccaaaggctaaccaatatgaggtgcatttattcaagaaaaatagctgaatcttagtaaggataacaatctttgtggttttttaacttgccctggtcccacccccacccctacctttcagcttaaaaaccagcagcctcacaagcacg

SEQ ID NO: 540935 - DNA, 633 bp, Homo sapiens
tcttatattgtaaaataaaaatgcattgtaaagggtagaaaagagggaaatcaagtcaaagtgttgtaaggccctagcattaatctgggaagggcaaaggtactaattaatagtagtctttaaaatgacagttgtgatatttaaagtgatcactgaaagagtagtgaaaaaatatgcatgtaactaataagctagcattgggaaaaacactaaaacacaatcyttttaaagcataaaatgaggaaaaaaggaaaataagaaataagcagcaaacagagtataactagtaggatgatggatatgtacctgaatatgtcagtaatttaatcagtgtaaacaatctacatacttcaattaaaaatcaaagattggtaaggcacttctggattgatggggccctccaaaattccactcctccataaaagcgcagagaacaacagaagcagaattggtcaaaatcacctatgtcagaactctggaaattaaccaaaggctaaccaatatgaggtgcatttattcaagaaaaatagctgaatcttagtaaggataacaatctttgtggttttttaacttgccctggtcccacccccacccctacctttcagcttaaaaaccagcagcctcacaagcacg

SEQ ID NO: 540936 - DNA, 405 bp, Homo sapiens
gctggctgggatatttttagtaatcactgacattctaagacaaatggattttccacgtgtccatgaggaaaagtcagtttcctgttttgtgctcatctctgctactctatgaaaatcttggctttgtaacacttatggaaaagagccgccctcagaatgctgaaaacatrataggctatttaaaaatagttataaatgccattctctttgtttcaagaacctcatgaatagcaacgtggccttaacagaccttcagatcaaaatggcttaaccaggacagttatcaaggattaaaattaaaactgccccagaactgggtgtaatggctcacccagcctcccaaggtgctgtaatcccccagcaacttgggaggctgaggtgggaggattacttggggccaggagt

SEQ ID NO: 540937 - DNA, 627 bp, Homo sapiens
tgggttctcatgcactcatgtacctcactgctagtgaatccttctcctttcctcctggataatccacttcaagactttcttcccgtgagcagctagctccaatgcctgctagcaaaggcaccaggagtaggctccaagagccaaggaggagcttcagaagggatggaggttataaccttccctttgttcattygtcccataattctttgagcatttactgagcatcaggaccagcataagtgctgggagcaggagctccctgtctagtctggatagcgacaaatgagcaaataagtagagccatgaggtgagagcaatacacagaacaggagaggcagagagaaggaaaccactgactgccgcctgggagatggtacaactgagaagacaggggagaaggaagtatttcctagcaggcagaggagcatgtgcaaagataaagagatgtcaagagtcacagcctggctttctggggctgcagtgagacctgcaggctgcgacacaggctggggtgggagaataacggctgtgaaggagctaggaaggtagaaaaggcaagtcatatggggccttgtgcacagttctgaggagtcggacttggtcagatggggggttggggatcttaag

SEQ ID NO: 540938 - DNA, 628 bp, Homo sapiens
atttgttccagctttgtctccccatcctgaatccagcacgaggaggtgtctggatctcacacaggatgcattcacaggggctggggtggaaggatcmatcagcaccttcaaattccagccctcactgctgccaagacagggcaccacgttctcgcgctcacaaagacgatcctgcaccagagctgcatgaacagggctttcaccttttcatttgctcactcattccttccatcagaatcaatggctgcttgcaggacaaacaaaatgcacgtgcctgcatgtgtgtgtctgtgtgtgcttgtgcatgtctgtgtgcatgcctatgtgtgtctctctgtgctcgtccatgtgtgtgtgcatgcatgtgtgcctgtgtgtgcatgctatgtgtctgtgtgtgcatgtgtgtgtgcatgctgagtctgtgtgtgcatgtgtgtgtgcatgatatgtgtctctgtgtgtgcatgtgtgtgcctgcatacatgtgtctgtgtgtgctcatgcatgtgtgtgcatgactgtgtgtctctgtgtgtgcttgtgcgtgcatgtgtgcacgcctatgtgtgtctgtgtgtgcttgtgcatgcatgcctatgtgtgtgtgtgcttgtgcatctgtgtg

SEQ ID NO: 540939 - DNA, 628 bp, Homo sapiens
atttgttccagctttgtctccccatcctgaatccagcacgaggaggtgtctggatctcacacaggatgcattcacaggggctggggtggaaggatcaatcagcaccttcaaattccagccctcactgctgccaagacagggcaccacgttctcgcgctcacaaagacgatcctgcaccagagctgcatgaacagggctttcaccttttcatttgctcactcattccttccatcagaatcaatggctgyttgcaggacaaacaaaatgcacgtgcctgcatgtgtgtgtctgtgtgtgcttgtgcatgtctgtgtgcatgcctatgtgtgtctctctgtgctcgtccatgtgtgtgtgcatgcatgtgtgcctgtgtgtgcatgctatgtgtctgtgtgtgcatgtgtgtgtgcatgctgagtctgtgtgtgcatgtgtgtgtgcatgatatgtgtctctgtgtgtgcatgtgtgtgcctgcatacatgtgtctgtgtgtgctcatgcatgtgtgtgcatgactgtgtgtctctgtgtgtgcttgtgcgtgcatgtgtgcacgcctatgtgtgtctgtgtgtgcttgtgcatgcatgcctatgtgtgtgtgtgcttgtgcatctgtgtg

SEQ ID NO: 540940 - DNA, 575 bp, Homo sapiens
ataggtgtgtgttaccatgcccggctaatttttttatttttagtagagatgggattttaccatgttggtcagattggtctggaactcctgacttcaaatgatcctcccaccttggcctcccaaagtgctgggattacaagtgtgagccaccatacycagcctgttttatagtcttatatggccctgtcccaggttgattctctaaatcattggtcattctgccattggtcagacatagccaggagccagagagtagggaacctgttgctataacccatgcagataaaggacacagaacagagcagaggtaagtgaagaatgggtttggagaagcaaatggcagccctctgagttgctggcttgttgttggtattaatatgatctcggtggtccaagaccaccaacagcacggcaacactgacagttcagcagggaaatggagagtgccgatttccacagaggtaccagggtttcccagggctgcttcctaatctcctttcaagaaatggtagcacttcttatatcccagagagtgtcaagtgagtgcgacttttcgtccctgtgtctatggccaa

SEQ ID NO: 540941 - DNA, 507 bp, Homo sapiens
atccacagcttctgactcacagtccacccacaacacaaacccagactgaaacctgcattctcagggagagggaatgaatttctataggagctgtggggaaaygggaaattttaaataagaatagtccatttttctagcacttgctagtctgtagggccttttacattttacatgtgttacctcctttaaaatgagaagcaggtgcaatgtgcgcaacttccctttcacaggtgaggaggtggcggcgggggcttgcccaggctcccacagtggaaacgagcagagcctaggggtctctgaatgactcccagcccactgggcagcccagacaagctctcagtcccactgacgcaggcatccgtaggctaacatggaataagaccatcataacacgacgtgatgcccttgttcatgcccagcctttgggggctgccctcctaacctctgtgccttccctgaagggggtacaggcagtcatattttgtgtagcttcatgacacagaatca

SEQ ID NO: 540942 - DNA, 638 bp, Homo sapiens
tagtcatctgattagattttattaaaaatttagatgattcgtcctacataatgtcaaagcatttgtttaaaaacttggaagcttttgggggtggggaaggtggtcatagaaatatgatcatcttcaggatttggcaggtatgaagtgatacaaacctcaacttttaagatttttttttttttttttgcttttctctggcaatcaatcttatttatgccagccgttgacacttagaaaggatttaaatcacttttcatagcataattattgtattgcttaatgctttaaaaaggcacgcagatgggattgagacatttctatccaggcagttttttctgcattagacctaagaacctaattttgtagggcagtagtctctaggcattatgtttagctccttttgtcagtgagaagtgtgttgtaaagtttctaatactgtggtctgttttgaacggttttgagaagaggtagctttagtataatttataggacttaaaaggaaaatgcctagaatcatcagaaaaagcatggaaaaacattcttctctgaggttgccttattggaaaaggagaaatcatttagaagttaatgtgtggaaggcattaggttgaataaaawtgttgttcgtattgatctgt

SEQ ID NO: 540943 - DNA, 257 bp, Homo sapiens
aagaccctaacctatgtgttggtctcatctgctcctttctcatttggaatctttctccaataattcgtttcacttattcaaattctcccctctactgccttcttctactttrtctgcaaatgcctctagctttcccttcatacctcaaacttggcttgtctaaaaatgcagttatgttttacctaacaaaaccagtccatctttccagtgggagaaggttctaagcaactgagaccaaactttggagttatttttga

SEQ ID NO: 540944 - DNA, 582 bp, Homo sapiens
ggcccaggaactgccaaggaatgtacagagcagtggtggttcaagaagttttgccaaggagacgagggccttgcagatgaggagcggagtggccggccattggaagctgacaatgaccaaytgagagcaatcatgctttaaaattggtgaggatgtaaagtcatgaagagggaattggtttaggggcaacacacctctgagagtgccctccagagttgtgtgacacagtggcccagagagagtgtagaatctccagggctatccaaaacactaaattctttggtacttattcattgaatcaatggagagactttagggatggcatttggtacagatctgtaagtaatgtatgaacatccttggtctctaatagcagtaacgacaattttaatcatcataattatttagcctgtacctgctctgtgcacagatcctgtgccatgtgccctgtcacacttaaccgttacaagagcctgtgaattacagatgatattcctattttatagaccaggaaactaaagctcggagagagtcagaatctctgatcttacgcagtgtcttggtctgctccggctgccataa

SEQ ID NO: 540945 - DNA, 599 bp, Homo sapiens
ctggtatttttgccagctatataagtgtgacaacttgggagtggaccctccagtcgccagccaagggaaacccagaggatgatgcatggaggagagaagaatcatctctgtgcaaactgcagattcacaagcaaaacagatgactattgttatttacagccattacgttttgggtggcttgytgtgcagcaatagtaactggaacaacatttctgcgatgggcagaagtggcaaggattgtaactcattagactcagaaggcgaggtcacctgagtaagcagggtccttagtggaacagtgggtgtaagaggaaggagagatgggtgggtgtggggcttcttgccatctacatatgtagggtctgccttttacttgcacatctgtgagaggtgtacaacagagttgtagaagtatggactctggagccaggccacctgggtctgaacctggtgttccatttcttagctgtgtgaccttgggcaaggttctcaagtcccatgtgcttcagattcttcatctgtaaagaggataatcacaggacctacctcatgtggtggtggtggcacaaattgacctaatgcctacattgaggcttggt

SEQ ID NO: 540946 - DNA, 599 bp, Homo sapiens
ctggtatttttgccagctatataagtgtgacaacttgggagtggaccctccagtcgccagccaagggaaacccagaggatgatgcatggaggagagaagaatcatctctgtgcaaactgcagattcacaagcaaaacagatgactattgttatttacagccattacgttttgggtggcttgttgtgcagcaatagtaactggaacaacatttctgcgatgggcagaagtggcaaggattgtaactcattagactcagaaggcgaggtcacctgagtaagcagkgtccttagtggaacagtgggtgtaagaggaaggagagatgggtgggtgtggggcttcttgccatctacatatgtagggtctgccttttacttgcacatctgtgagaggtgtacaacagagttgtagaagtatggactctggagccaggccacctgggtctgaacctggtgttccatttcttagctgtgtgaccttgggcaaggttctcaagtcccatgtgcttcagattcttcatctgtaaagaggataatcacaggacctacctcatgtggtggtggtggcacaaattgacctaatgcctacattgaggcttggt

SEQ ID NO: 540947 - DNA, 517 bp, Homo sapiens
cggctctgtcttcatcgtggtttgtcctggagycaatgggtccctgcctgttgcttggaaacccttaggaatacttaccaggaaaaggagaagaaggaaggtgatgaggaaagggaaatagacaagagaaaaaaggaagaaggataggaaaggggaagagaaaacgggaactagataaggataaaggaagagaaatgaagagagaagaaatgaagaaagacacgaaaaggaggagaaaaaaggagaacaaaaagggggaaagatgagtataggaaaaataaaaagaggagaaaacaggagggaaaaaggaaaataaagggggaaaaacccacatttctactactctgaccagaagctatttcccagtagaaaagggcagggaagccagaccaggtgaaggtgtgcgagtgagaactcagtttctggattcccagcctggacaaaaagggaccgaggagagaggctgggaaggcatatctggggggcaggaagccgcacccagtgaacagagcccaca

SEQ ID NO: 540948 - DNA, 530 bp, Homo sapiens
gattttgcctcttgccctacaacacctgaagtatgcactatctggctcttcaccaaaaagggctactgagctctccctggtctaggtgttggtggagaaaatggatgggttcggatgtattttggagtgagagccagtaggactttaattttaatgctggcagaacatagactatgctgcagggtgggacagagtcacttgatccctaagacaagtctaagactatgaggggccatggtccaccaccrtcatagcaggtgtctttcttcttggtgtatgagctttccaaggaagtgttatgtctaaatcagattccaacattcaagggcccaactgtatatgcgaaggcaatggaaggtcttatgcagaggaataacaacaaaatatacctgacccaggttgtccggtgccaggtggaggatggaccacctgggaaccagaatggtggtgatgaggcccccaacatggcctagagcagccctccccatggtcccctctgggttgagtctcgggctcctcccatgccccag

SEQ ID NO: 540949 - DNA, 530 bp, Homo sapiens
gattttgcctcttgccctacaacacctgaagtatgcactatctggctcttcaccaaaaagggctactgagctctccctggtctaggtgttggtggagaaaatggatgggttcggatgtattttggagtgagagccagtaggactttaattttaatgctggcagaacatagactatgctgcagggtgggacagagtcacttgatccctaagacaagtctaagactatgaggggccatggtccaccaccgtcatagcaggtgtctttcttcttggtgtatgagctttccaaggaagtgttatgtctaaatcagattccaacattcaagggcccaaytgtatatgcgaaggcaatggaaggtcttatgcagaggaataacaacaaaatatacctgacccaggttgtccggtgccaggtggaggatggaccacctgggaaccagaatggtggtgatgaggcccccaacatggcctagagcagccctccccatggtcccctctgggttgagtctcgggctcctcccatgccccag

SEQ ID NO: 540950 - DNA, 530 bp, Homo sapiens
gattttgcctcttgccctacaacacctgaagtatgcactatctggctcttcaccaaaaagggctactgagctctccctggtctaggtgttggtggagaaaatggatgggttcggatgtattttggagtgagagccagtaggactttaattttaatgctggcagaacatagactatgctgcagggtgggacagagtcacttgatccctaagacaagtctaagactatgaggggccatggtccaccaccgtcatagcaggtgtctttcttcttggtgtatgagctttccaaggaagtgttatgtctaaatcagattccaacattcaagggcccaactgtatatgcgaaggcaatggaaggtcttatgcagaggaataacaacmaaatatacctgacccaggttgtccggtgccaggtggaggatggaccacctgggaaccagaatggtggtgatgaggcccccaacatggcctagagcagccctccccatggtcccctctgggttgagtctcgggctcctcccatgccccag

SEQ ID NO: 540951 - DNA, 620 bp, Homo sapiens
ctgggacgagccctatagcgtgcctcttttctacttcttttttcactggctttstatctctgggctgtgcaactttgaagagcttactcatcccatcattctaaggcaaggcataaagtcatttttgacatttatgaaaaaaatgtacttacaaatactctctatttgatatctctaaaatctaagggacacagtgaaatgaatgtcactaagagagctggggaaaacaaaatttccgcatgatgttattgcttcagactctcagtggatcctgacctaatggcatctatagcctatcctgacatcttgggaagtcatttctggactcatagtctacacattcatgggctctctcttggatatcacaaaaaatcccaggcaaatagtgctgtgttcatggtttaaacaaatgatttccatggctctcattgccaagattaaagatcttaatttgaaaaacatagcagcctctttgtttcattcatgatagttttattgaggagatagtatgagttcaatgttgtgccttattttgggaacacgacaaagcaggtccctttatggagtgtgtgttttcagttctataggatgccactggagtggattctggttagcagaga

SEQ ID NO: 540952 - DNA, 664 bp, Homo sapiens
ttattgagattttgatagacatatccatgacttcatcacaagtcatgagtgtcatggaaaattcaaaagtagckcatgacaagtgggaggtcaaatttccgaaaatgtcccagagaacatcagccaggggaggcagcttgaggaagcgtctgctttttcattttcctcccctgggactcgaggtaagttggaaagcagtgtctctgaggttgatgagcaaatgaggactgaaggagtggatacggggggaacctggagatgtggggctcagccttcaagggagagaagatgctacacctcggggatttcagccaatcagtagagagcaaatggcgagtatctcctgtagccgaaagccccacagccgttgtagccatagccgaagccatagcccactggagagtaggtgctgccatagccacagccaacgctatatcccagcgggtagccatagctgccccagtagcatcctgggaagacagccccggggaagttgtcgcagagcatggtgtcgggagtggagggcttaggtagcaacagagtgcgtttcctcagtgggatggattcctagtctcagaaccttctttatatatcccagctctggtgggtggtgaaaaacacaaagccctcattttcattcttgacaccaatttacattctaaaa

SEQ ID NO: 540953 - DNA, 635 bp, Homo sapiens
aagctttgacacatgccgtttgttctgtgaggaattctcttccttcctctccttctgatcaactcccatgcaaccttcacatgccagctcaatcacttcctttgggaggcctttctgccattcctgattagctggagcccatctgtagcataacagtaggccaacctcttcctcgtatctgtaggacttaatcgtagttcctatataaccttcacttgtgtgatgggtatctgtctgcctcattaacatgcttatttccaggagagcaagatagtatttttaatcagccttgattcctcactgcctcactcactactgggcgtaatataggttttccataagtttcagttgaatgaattaatgaaagaatattctaaacctaacttggctactcacttgctgtgaggrttgaggcaaatcatttttccgggcctcgcgtgacccgactgaaaaatgggacaagttgacttcctgggacttgccaccctaaacattgtatgattctcccatcaaaaatcactgatgagtcaatatgacaattcaacactctctcattggaatttggtcaattaggcatgcgactatggagagtgctttttctcatcttattacacattcctactaagacaaactaa

SEQ ID NO: 540954 - DNA, 626 bp, Homo sapiens
tcagtaacattgtaggcacaatagaactttaagtaaaatgacaggtgtgaaatataaagagatagtcccaactatccaacaaccaatggagtagatataattcatagtaaagctccctcccacatttctaacaacagaatttgaaagagattttgtaaaacatataaactggtatttcctttataaaatagacagtgcaggataagaccatggaaggaaaactaagggcaacttttggatcacctttcccctctacttacttctataaaatgaagtaaaatagaccgaatggcctcagagaggatgaccaactaactctccaaactcactcaggactggagtttctctagacatgtgcctttcaatgcttaaagcagttacaaacacaccaggatggttggtyactttcctctgtggacaagtcttggaccagaatttaagtcaattagatttgaaaattaacattctttaatgtttagggagagtcaggtgactattttccctgaagaatcatattgtgttgacacccagttacatcctccttcacattgagtgttaacatcattctcacggctgtatctaaattagctttcttagggcactggccaggtgtagcctctcagaat

SEQ ID NO: 540955 - DNA, 612 bp, Homo sapiens
gtttctccaccagtttgtaagcttggggttatttgtcctcttcttaatagttttggtctatatccaatgtatttaaccacttttcwgaggtacacatgagttaatgaaaccaaatttcatcaagaaaaaacataatttgtctttgagtttgcatctcagtggctgagaaacagaatcagagtaaaaaaatctttaacaaaacatgagaaaccaagttcccattccatcttcaggagcagccatttttctgtgaacataggaagcactgtagatcttttaaagaaaagctactagcaaagttgatgttagcacagaaatcttcatggaattaagcacagtccctgccttggaggcctccagacaatgctgaccccttagggctcccatgggaacacctaaggaatacaacgtacttgactcgcagctacagtcaactaaaccaatgatagcacaccaccagcaatgaaatacacgccagttccagccagatgtatctgtcctttctcagtttcagcatacattgaccacaagaatttcaaaagaatacttttctaagagattccactgatcctgtgcttccagtttggctgcaaactgctagagcagcatttt

SEQ ID NO: 540956 - DNA, 612 bp, Homo sapiens
gtttctccaccagtttgtaagcttggggttatttgtcctcttcttaatagttttggtctatatccaatgtatttaaccacttttcagargtacacatgagttaatgaaaccaaatttcatcaagaaaaaacataatttgtctttgagtttgcatctcagtggctgagaaacagaatcagagtaaaaaaatctttaacaaaacatgagaaaccaagttcccattccatcttcaggagcagccatttttctgtgaacataggaagcactgtagatcttttaaagaaaagctactagcaaagttgatgttagcacagaaatcttcatggaattaagcacagtccctgccttggaggcctccagacaatgctgaccccttagggctcccatgggaacacctaaggaatacaacgtacttgactcgcagctacagtcaactaaaccaatgatagcacaccaccagcaatgaaatacacgccagttccagccagatgtatctgtcctttctcagtttcagcatacattgaccacaagaatttcaaaagaatacttttctaagagattccactgatcctgtgcttccagtttggctgcaaactgctagagcagcatttt

SEQ ID NO: 540957 - DNA, 613 bp, Homo sapiens
tgtgcctactaatggccttggtgtatcaggaaaagatgatgcaggcccagtctattctatgtaagcagcaaagtgaaggtaaaatacaatttaaaggtcttctatctaaagagttatgctgttagagagctctgaayctgaagtcaacatattttccaggtcaaaatctcgggtatctaactattatttcttttaagctctattatatgccatgagctatgtacatgttcctccacctcaaagacaaaggccattatccttattaaattgagacacagagaggttaagaaatgttctcggtcacacatatgccacctagttaatccaagatacgtactcttgtctttctgactccaaaatctatgctgtgtcattatcccacgtggctctatgtatccaaaagtcacctttctaaggttactaaaatggtacatttttctctctgtacattttacaaaattaatagtaaaaggtttaagtttataacccagagttatcagtatgcttgagttacatatctgccttagggaataattagatatctaggttgctactgtgtttaatttgtacctaccatatgccctggtgccctgtggaggaatggatgaagaat

SEQ ID NO: 540958 - DNA, 636 bp, Homo sapiens
tgtgtgtttgtgtgtgtatgtgggtttctttttcttttgtaaatgtcacgtcattccagcgtgcagccatgtcaggaaattattgctttgggacatgctacatcttacgaagaagtggaatcagaaggagtcaatttcagtgtaagcccgtaagttgtccttcacgtgttcactgagattagggtgtctctttgctctgctctgctattgaaattcctttcccaggagcctaagaaaaagacttcaaaccttaaacatgggagaaatggcttttaaaagtcaagcrtcttttaatcagatggtgttaaaaatctaagattaaaaagttaggagctttttgcatttttcccccactcctcctatcactggaggatttttagtgactggagagggtgtttcaaaacacccctgaatggtcacaacttcagaaaagagaatatggggataggaaagtaaaatgagattgtttggtacatgagtatcactctggaaaattccatggatgggaggatgttccaggtgcacattttaagcaataactcagcacagagtcagattgtgcagtgtaacaaaactgtccttagctgcatatttgtcagtctttctggaaggttcccagctcccccaagatggcag

SEQ ID NO: 540959 - DNA, 445 bp, Homo sapiens
tgtttgcagctctatttagcaggactagcggttgaatgtgagcccctagggaggtgagccccaggcayatgcaaacccattagggcagctaaaaacaccacttcccttgcaggaagagtgggagttattgaaagcccaggacttttcttgtccagtgtatacaagggaaagtagagtaacaacatttaaaattacaaaagtaatacaaaaatcatgctctttttaaaaattcaaattttgaagaattagatataagagacaaaattacccacttcatcctcttaaaataagaccactcccttaggcaaccagagtatccttccagaactttctttatgcattcatgtgaataaatacagatttataggtacagatatagatttaggtatctttttactcttacaaacattaatttatactacacatattattctgaaactctgaa

SEQ ID NO: 540960 - DNA, 556 bp, Homo sapiens
agatcgagaccatcctggctaacatggtgaaaccccgtctctataaaaatacaaaaaattagctgggcatggtggcacatgcctgtagtcccagccactcgggaggctgaggcagcagaatggcatgaacccaggaggcagaggttgcagtgagccgagatcatgccactgcactccagcctgggcgacagagcaaggctctgtttcaataaataaataaataaatatatatataaataaaagcatgattcaatacgggcacatttaaagccaaatatattaaacgccatctgttggagtcatctatcttrtatttttagaaaaataaaagaataggtttcatatgggagaagacctcaaattctcatggcggagggagagaatacaaggaagggcaaaagagggtggcagggtagaagaaaaacaacaagaaataagtagaagcccacatcatgagcccagcttcccctcaagacgtgcaggtgatcaacacaggctgacctccatatgtgctccaaatgatcaggaatcccgataacaccttcacaagctgtca

SEQ ID NO: 540961 - DNA, 556 bp, Homo sapiens
agatcgagaccatcctggctaacatggtgaaaccccgtctctataaaaatacaaaaaattagctgggcatggtggcacatgcctgtagtcccagccactcgggaggctgaggcagcagaatggcatgaacccaggaggcagaggttgcagtgagccgagatcatgccactgcactccagcctgggcgacagagcaaggctctgtttcaataaataaataaataaatatatatataaataaaagcatgattcaatacgggcacatttaaagccaaatatattaaacgccatctgttggagtcatctatcttgtatttttagaaaaataaaagaataggtttcatatgggagaagacctcaaattctcatggcggagggagagaatacaaggaagggcaaaagagggtggcagggtagaagaaaawcaacaagaaataagtagaagcccacatcatgagcccagcttcccctcaagacgtgcaggtgatcaacacaggctgacctccatatgtgctccaaatgatcaggaatcccgataacaccttcacaagctgtca

SEQ ID NO: 540962 - DNA, 612 bp, Homo sapiens
gtatttatcagtgtgcctcacatcgctattaagtttgtatctgtactgcctgcctggtgaaaagaagctttcctcaagggcagaaaacataacgtggcatgttatagcctccccgtggagccccacatccatcatctttggctttcagactatcaggaggctgctgacccccaactccttttatgtggtgctcccaccctcagctctctgaaggaggactcattagtgactgtatttcaaactctgcagcaccatcccctatagcttattagagcccaagaaaaccaaactgtacgtagcattctttccctcaagggctttcacgaacacacaaaggctgtcgttagataaggaagaaacttgactggaggtgagcataagtctgagccacaggtggcatgtcaacacccatgggtgcatggtggcttgcgcctatagtcccagctactcgggaggctgaggtgggaggacagcttaagcgaggaggtcgaggctgcagtgaactgkgatcacgtcactgcactccagtctgggcaacagagtgagaccccgcctcaaaaaaacaaaaaacaaaaacagaacgtaacaaaaaaacaaagaaaagcccccaaa

SEQ ID NO: 540963 - DNA, 585 bp, Homo sapiens
tagctgcaacctgaaaatacagattccttcatccctgggagtttgtgacyctggagcactggagaaagacccaggactgcatttttaatgggcttctcatgtgatacttacttatacagaaccatttctttggtagtaaaaaggaataccggctttggtctcagaggatttggcgtcaagtcctctctcttcattgaagcaccaaatatttatttaactcctcccatgtgccagaccttggaccaggctctggattgatacaacagtgagcttaatagtcatgctttctacccttcacaagcttacactggagaagaggcaggcattaagtacacaattacagaaataaatcttattcatcaactatgctaagtgctaagaaagaaaatacaaaatgctatgagagagtgttaaaaaagggatctggctttgtttgaaatggggtcaatgattcacttttccctgagataatgactttgaactgagatattatttacgtgacatgagggaaagatgtctgccacccgggcacacgaggtccatttggcttggaacacaaggagagacagagatgaggctgcaaat

SEQ ID NO: 540964 - DNA, 567 bp, Homo sapiens
tacgtccttgggatttaacatatacaggctgggttcagtttagaggattctctagcaatttgagaagccaggaaaacctctcaaaccccttagacccagacagaaagaatcaatgagggaatgattcactcaatgaataattaccaactggagtgaaggattctctagtctagtgattctcaatgaataagcattataycatctctgtcagaaatgtatgtatgttaaaatgcagattcctgggccctacctcaggctaactggagcaaaatttctatgaagtggggtctaagaatatgcatattcacagatatgctagaaggttcttattcatatttacagcagacacttatccttggggatatgtcaaaccagccaagtgggaatgaaggtaaaactttgagcctacagcacaaatgggctgagatattttgggtagagcttcttcttatggataaaacaatagtcacatgagtagcaaaaggcttcataaaatattttgacctccacaggtgacataactttcttttgttgtcaactcctgatttattttagagaaattttgtt

SEQ ID NO: 540965 - DNA, 591 bp, Homo sapiens
caatggagagtggactttgcttaaatactacacactcctgcttttcattctgaatattactagatttaattgaatggatgtttcttcatttgctgtattcctttaggatcatttccaggggttataaaaagttgttttttaaaaaaaaataatttttaccagtttcactggggaataatttttccaacagtcatgctggaagtcctcttataattatattttgcttatctggataattttttctgtcttaaagtcagctaatattttctgtcttgaagtcagctgattgcaaccttatatccatctatcacctcgaattcccctttgctatttaatctaatatatacataagctatggagrcttcaaaacgggctcctatggggaaacaccattctgcctgacacagtgaacccaatacatcagacagtaattttgatctgcattgatcatatcctcatgctgtgatttggtttgagtttgttcccaccaaacctcatgttgaaatttgatccctgaaatggcagtcttgggaagtggagcctagtgagaattgtctgaatcattggagtaaatctctcctgatggcttag

SEQ ID NO: 540966 - DNA, 613 bp, Homo sapiens
ctgtttaggaagtgagcccttagtagacaccaatctgcagacaccttgatcttggatttccagccctagaacagtgagaaataaacttctcttgtttataagcaagccagtttagagtattttttttatagcagcccaaacgggctaagctaccattcaatggaatgttaccagtgataaaaagagatgaacaaatataaatatcaacatggttaaatttcaaaagcattataggaagtgaaagaagtgaaacacaaatggctgcaaactatatggttttgtttatgtaaaaatattttttacaaggcaaaactattattttagaaagaatagagtttgccagtttcagggaggtagggaaagctaattgacaggaaagagctaagtagtacaattttgggggtgacgaagctattttgctagtattactgaccatacatatgttgaattttayaccaaaaattggtacattttattctaaaattatggctgaacaaagctgatttaaaaatttaggtaagcataatattaaatatttggaggtgactaaagaaatatgtaaccaaaaaacccataataaaatgcagaaatgaatatacgtagcaaattaatc

SEQ ID NO: 540967 - DNA, 572 bp, Homo sapiens
atgccactttgtatctttgtgtcctgaaacaaattatttaaaattcagatccccaattttatcacttgaaacattgggataattaaatccaacttaaagacactattcttattaaattaaatgtgatggtaaatgmgctttaaaatgtgatggtaagctacactgtaaaatgataaaaatgatgatctctaaggtcacatggagtggaagtctcctaggagatctataaatgcagccagcttatttctttaaaaatttcaatttgtagaatatacattcaatgttgtatattaatatagcttcattatgaaagccaacatatttctagggtacttatatttgcttgtcatagaagttaagctggttttaatactgattctgttgactgtggaatactgcaattgcatatccaagaactattgactattttactatttacttgaaaattgtaagcatttatcatttatttaccctaatatagttacataaagatgacataaacattaaataaaacctaaagtatatcttatgcctattaaatggtatcaatgttgttcaaaaccatctggccc

SEQ ID NO: 540968 - DNA, 610 bp, Homo sapiens
tttctgaagagaacatgctaacttgttaatgaaataatgaatactaaagttaaatgcatatatagtctcctgtcactgccctcccattgttattttgaaacatttccaagctccagaaaagttacgagaatacaaagtagtggaaaaattggaaccgtcatacagtgctggtagactgtaaagtggtgcagacatttttggaaaataatttggcaactcttcaaaaagttaaagtagctcagcaaaatccactcctaggtatatatccaagagaaatgaaaacatcctctcacataaaaacttgtactagaatgttcataacattattaatagcgaaaaggtagaaataactccaatgtccatcaagagaccagtggttaaacaaaatatgatctatccatacaatggaatattattcarccacagaaaggaatgaggaactgactcatgctatgacaagcatgaacactgaacattactcgaagtaaaagaagcctgtcagtcaaaagggccacatagtgtacgattccatttatatgaaatgtcaagaataggcaactccagagacaaagtcaatttgtgactgccaggggtcaggagggagggggaa

SEQ ID NO: 540969 - DNA, 609 bp, Homo sapiens
agaaaggttcactggcacataggatgcattaaataaacagtaactattattatcattatttatgattattgatggttcccaagagagcctccctggcaaggcaggccatggtgccrgtcgtctgtataagtccatgcgatcattgaaagcattatttctccaggaatgaggtagtcattgttctctggttttacaatatacatttagcaattggcaggatgtggacgaacctcatgggaatcggaagtagctctgaattgtaaagagaaacagccagatcagataggaaagtaatttttaattactccgctgaatttctagcagggagattgcaaccttggtgagtgagtctccatgctggtatgaggtagagctggatttggacagctcaatgcaggtgtgccaacctttccttcctctctcagtggacaaggaagggaggaacaagactaaaatacagttttaggtcgaccaagtgtctgctcgctgacatcattcatccctccctcaagtatcacagacaatttttgtagccgagcgttgctgctgtttagtaattcaaagtgtatctgagaaacacaattatctcgacagagagttggacagcag

SEQ ID NO: 540970 - DNA, 510 bp, Homo sapiens
aggcaggccatggtgccagtcgtctgtataagtccatgcgatcattgaaagcattatttctccaggaatgaggtagtcattgttctctggttttacaatawacatttagcaattggcaggatgtggacgaacctcatgggaatcggaagtagctctgaattgtaaagagaaacagccagatcagataggaaagtaatttttaattactccgctgaatttctagcagggagattgcaaccttggtgagtgagtctccatgctggtatgaggtagagctggatttggacagctcaatgcaggtgtgccaacctttccttcctctctcagtggacaaggaagggaggaacaagactaaaatacagttttaggtcgaccaagtgtctgctcgctgacatcattcatccctccctcaagtatcacagacaatttttgtagccgagcgttgctgctgtttagtaattcaaagtgtatctgagaaacacaattatctcgacagagagttggacagca

SEQ ID NO: 540971 - DNA, 609 bp, Homo sapiens
agaaaggttcactggcacataggatgcattaaataaacagtaactattattatcattatttatgattattgatggttcccaagagagcctccctggcaaggcaggccatggtgccagtcgtctgtataagtccatgcgatcattgaaagcattatttctccaggaatgaggtagtcattgttctctggttttacaatatacatttagcaattggcaggatgtggacgaacctcatgggaatcggaagtagctctgaattgtaaagagaaacagccagatcagatrggaaagtaatttttaattactccgctgaatttctagcagggagattgcaaccttggtgagtgagtctccatgctggtatgaggtagagctggatttggacagctcaatgcaggtgtgccaacctttccttcctctctcagtggacaaggaagggaggaacaagactaaaatacagttttaggtcgaccaagtgtctgctcgctgacatcattcatccctccctcaagtatcacagacaatttttgtagccgagcgttgctgctgtttagtaattcaaagtgtatctgagaaacacaattatctcgacagagagttggacagcag

SEQ ID NO: 540972 - DNA, 591 bp, Homo sapiens
gcacataggatgcattaaataaacagtaactattattatcattatttatgattattgatggttcccaagagagcctccctggcaaggcaggccatggtgccagtcgtctgtataagtccatgcgatcattgaaagcattatttctccaggaatgaggtagtcattgttctctggttttacaatatacatttagcaattggcaggatgtggacgaacctcatgggaatcggaagtagctctgaattgtaaagagaaacagccagatcagataggaaagtaatttttaattactccgctgaatttctagcagggagattgcaaccttggtgagtgagtctccatgctggtrtgaggtagagctggatttggacagctcaatgcaggtgtgccaacctttccttcctctctcagtggacaaggaagggaggaacaagactaaaatacagttttaggtcgaccaagtgtctgctcgctgacatcattcatccctccctcaagtatcacagacaatttttgtagccgagcgttgctgctgtttagtaattcaaagtgtatctgagaaacacaattatctcgacagagagttggaca

SEQ ID NO: 540973 - DNA, 611 bp, Homo sapiens
catagagcaaatcatgccttttttcctgtctctctgatacaaaagtgagatttatagatcccactcattctctctcaactggtttcctctactggctaggagtatatatgaacaacagcttgttttcaactatattatttactcattttttaccttttggagtgaaaaaaggttgtaaagttccatctcagtgcagaaattcctgaggaagaaagccctctcgagacaattcagagtgaaatgttgggcaagacccagcattatgtttctcccccagccctccctgagactgagccagtatccaaggatcttcactcctcgagctcacagaacagttgaccaacgaactctcggctgcacgtggctgctgtcaaattcctgggtatccagactatgayggttaattttatatatcaactcgactgggcatggggcacccagatatttggttaaacaaccttctagatacttccgtgagagtggttctggatgagattagcatttgaatcaatagactgaataaaactgattgcccttattcaatctgctgaagccctgaacagaacaaaaaggcaaagtaaaagagaatctgctccctttgcctgactgta

SEQ ID NO: 540974 - DNA, 611 bp, Homo sapiens
catagagcaaatcatgccttttttcctgtctctctgatacaaaagtgagatttatagatcccactcattctctctcaactggtttcctctactggctaggagtatatatgaacaacagcttgttttcaactatattatttactcattttttaccttttggagtgaaaaaaggttgtaaagttccatctcagtgcagaaattcctgaggaagaaagccctctcgagacaattcagagtgaaatgttgggcaagacccagcattatgtttctcccccagccctccctgagactgagccagtatccaaggatcttcactcctcgagctcacagaacagttgaccaacgaactctcggctgcacgtggctgctgtcaaattcctgggtatccagactatgacggttaattttatatatcaactcgactgggcatggggcacccagatatttggttaaacaaccttctagatacttccgtgagagtggttctggatgagattagcatttgaatcaatagactgaataaaactgattkcccttattcaatctgctgaagccctgaacagaacaaaaaggcaaagtaaaagagaatctgctccctttgcctgactgta

SEQ ID NO: 540975 - DNA, 534 bp, Homo sapiens
ctgccctatttcttcattaaggggaaagaagtctgtcttgtgcatacactggggactggccttggcccatcacattactgtcctgttgcttctttcattccacaaatgttatttgttcaggtggtcaccaggtagacaatagaaggggaggggtggctcgcaaggakggtggattagtttcctgcagccgcagtaacaaattaccacaaacttggaggcttagaacaataaaaaatcattccttcccatttctggaggccagaagtctgaaatcagggtgtcctcagggctgtgcatactctgaagcctctagaggaaggtcctttcttgcttcttctggcttctcagggagtagtgttagcacgtaggctggtcatttggaacaaaatgcaagctgactgcccagccgagccagcagggtcaaagagctcagtctaaaaattaaactattgaaagcactacaagaaaacaagggagcattattttatattggttttataggaatagaggaggcctttccaagtgtaacgtggt

SEQ ID NO: 540976 - DNA, 534 bp, Homo sapiens
ctgccctatttcttcattaaggggaaagaagtctgtcttgtgcatacactggggactggccttggcccatcacattactgtcctgttgcttctttcattccacaaatgttatttgttcaggtggtcaccaggtagacaatagaaggggaggggtggctcgcaaggatggtggattagtttcctgcagccgcagtaacaaattaccacaaacttggaggcttagaacaataaaaaatcattccttcccatttctggaggccagaagtctgaaatcagggtgtcctcagggctgtgcatactctgaagcctctagaggaaggtcctttcttgcttcttctggcttctcagggagtmgtgttagcacgtaggctggtcatttggaacaaaatgcaagctgactgcccagccgagccagcagggtcaaagagctcagtctaaaaattaaactattgaaagcactacaagaaaacaagggagcattattttatattggttttataggaatagaggaggcctttccaagtgtaacgtggt

SEQ ID NO: 540977 - DNA, 534 bp, Homo sapiens
ctgccctatttcttcattaaggggaaagaagtctgtcttgtgcatacactggggactggccttggcccatcacattactgtcctgttgcttctttcattccacaaatgttatttgttcaggtggtcaccaggtagacaatagaaggggaggggtggctcgcaaggatggtggattagtttcctgcagccgcagtaacaaattaccacaaacttggaggcttagaacaataaaaaatcattccttcccatttctggaggccagaagtctgaaatcagggtgtcctcagggctgtgcatactctgaagcctctagaggaaggtcctttcttgcttcttctggcttctcagggagtagtgttagcacgtaggctggtcatttggaacaaaatgcaagctgactgcccagccgagccagcrgggtcaaagagctcagtctaaaaattaaactattgaaagcactacaagaaaacaagggagcattattttatattggttttataggaatagaggaggcctttccaagtgtaacgtggt

SEQ ID NO: 540978 - DNA, 481 bp, Homo sapiens
catgataaaactttggtctccacayctcttatcgcaacctagacattacctttctattgatcccaggtctttagataaactcaacccattgtcgactagaaaacattctaaatctacctataaactggaactaacaacccccctcctttgagttgtcccgcctttctggactgaaccaatgtatttctgaaatgtatttgattgaagtctcatgtctccctaaaatgtatcaaaccaagctgcaccctgaccaccttgggcacatacatgttctcaggacctcctgagggctgtgtcactcatatttggctcagaataaatctcttcaaatattttacagagtttgactcttttcattgacattcttctgccattcccctgttcctggaggctcaaggaccataaacttgaatagcatgatttggctttggtttgagcctatgcctttaggtttagatctttgcctaattgactagtagac

SEQ ID NO: 540979 - DNA, 481 bp, Homo sapiens
catgataaaactttggtctccacatctcttatcgcaaccyagacattacctttctattgatcccaggtctttagataaactcaacccattgtcgactagaaaacattctaaatctacctataaactggaactaacaacccccctcctttgagttgtcccgcctttctggactgaaccaatgtatttctgaaatgtatttgattgaagtctcatgtctccctaaaatgtatcaaaccaagctgcaccctgaccaccttgggcacatacatgttctcaggacctcctgagggctgtgtcactcatatttggctcagaataaatctcttcaaatattttacagagtttgactcttttcattgacattcttctgccattcccctgttcctggaggctcaaggaccataaacttgaatagcatgatttggctttggtttgagcctatgcctttaggtttagatctttgcctaattgactagtagac

SEQ ID NO: 540980 - DNA, 637 bp, Homo sapiens
ttggtctccacatctcttatcgcaacctagacattacctttctattgatcccaggtctttagataaactcaacccattgtcgactagaaaacattctaaatctacctataaactggaactaacaacccccctcctttgagttgtcccgcctttctggactgaaccaatgtatttctgaaatgtatttgattgaagtctcatgtctccctaaaatgtatcaaaccaagctgcaccctgaccaccttgggcacatacatgttctcaggacctcctgagggctgtgtcactcatatttggctcagaataaatctcttcaaatattttacagagtttgactcttttcattgacattcttctgccattcccctgttcctggaggctcaaggaccataaacttgaatagcrtgatttggctttggtttgagcctatgcctttaggtttagatctttgcctaattgactagtagactttgctgctaaaaagcatgactgcaaatctgataaacactccagcttttgcctttagatctctgaccaattctccttctcagtgacttttcctgacttcctcttctgtctgtccccttgaatgttgggggtaccccatggtttgtcttcagcctctttttcttctcat

SEQ ID NO: 540981 - DNA, 593 bp, Homo sapiens
gaggtgactgggaaggaatgcacatgatttggaatgccctggaaacagaaagaatgagaggtccagacagagaaaagctcaggttaggaacgggtctcctctgggatttccaacccaccaagccatgtcctcttgggaggaggagaaaagggcaacaaaactggcagaatccttattccacagcctgtccccaaacaccatctttcactgatggtaataattcaagtaagagaagtggagattaagtagttgctgaactaaggatcagagagcaataactgaagcttggcaggcctggtaatttatctcctatgcaatgtttttcagatgttcctgagatattcaagtctagagaccaggcttatttggagtatgtgtcatagggaaggcaacagtggggggtgtgtaaggatttcactgagttgcaggaatcacaaattaggatggaggttattttcaaacctctttatatggcatatagtaggcagaataatggccccaacgaggcccacatcctgatcccgggaactgtggatatgcatgttacatgtcaaggagaaattatacttscagatggaatggaggttgtcagt

SEQ ID NO: 540982 - DNA, 453 bp, Homo sapiens
ctgcaaacagcttactgtttcgattttcccttattgctggcctcacacttcaatacttatgtgaaacttaaaagtaattttctctttgaaccaggctcagaaggtagaaggaaaaccatggccttttccacagcagccatctcagggtcagtgactatcagtgcccacaaacccrgcctccagaaaatggaactcttgtgctagtctgcaggtgtttccatacaaggaacacctccggtgggcctctcagcccctcatttattcttttagtactaaataattcagggctctaacagcgttggagggtggcttataaagttgaaaagtaatttgtaaagatctgcaagttttgactctgtgttgagctttgaaataatgaagaatcaatggggaccatcgatagtattagccaacatttaatgggctcagaaccagctatataatttgtggggc

SEQ ID NO: 540983 - DNA, 564 bp, Homo sapiens
gaaactagcaaccctcgtcagaggcggatcggggtgtgtgtgtgtgtgtgtgtgtgtgtgtgtgtgtgtgtgtgtctgtgcgcgcgcgcgtcctttttctccccctgaggacagaatcctgtctccactctcagttcagctcaggtctttccctgtcccagtgttcttgattctgaataggtcctctgatgcaccgccatgcataaaatggatgatttgcaagcttctttgcctcacgtaattccgtgggtaatttgatatccagattctgcacgagccaaagactcatttatttatagaaagtgattgacctccagcgaccaaaggagtgggtactgcttgstgggggctgcagacaggtgaggcttcaccctcggcgcctgggctctggccttggtgctgaatccggaacccgctgaggaaccaccacctcggcggcccccaggcaactttcgggaggtttcaggggcacccggccagctctgggcgccctctcgagcgtcgccgtcagggagttgggcacaaccgatgccctgggacccgccacagggcacgcggctggcg

SEQ ID NO: 540984 - DNA, 454 bp, Homo sapiens
ctcttgaatgaatggttgaattaacttatgtaaattttagctgctggctgctctctcaataactctgaaaaatgataagcaaaaaataccwatcatgtttatccatatctagtgatcagtgatatatggaaaaccaatcttaatgctatctagaatgtttcttgtttcattggcaccttgccatgaaaggtaggtccttgtactgtagttgaacctttaggtcatatctcagctcaagggtaagatgctatcaaagctgcttttcctatggtagaatatgtgagtactgaaattaactgtgcgctttttccacctgaaaagcccccaacttaaaacctaaagaacgttatgctagttgtgccactagaccctagaatggtattgaatgcatgaataataagcatcttcctgagcagacttgagggcttgccccagtggaatatctgtgtctttg

SEQ ID NO: 540985 - DNA, 454 bp, Homo sapiens
ctcttgaatgaatggttgaattaacttatgtaaattttagctgctggctgctctctcaataactctgaaaaatgataagcaaaaaatacctatcatgtttatccatatctagtgatcagtgatatatggaaaaccaatcttaatgctatctagaatgtttcttgtttcattggcaccttgccatgaaaggtaggtccttgtactgtagttgaacctttaggtcatatctcagctcaagggtaagatgctatcaaagctgcttttcctatggtagaatatgtgagtactgaaattaactgtgcgctttttccacytgaaaagcccccaacttaaaacctaaagaacgttatgctagttgtgccactagaccctagaatggtattgaatgcatgaataataagcatcttcctgagcagacttgagggcttgccccagtggaatatctgtgtctttg

SEQ ID NO: 540986 - DNA, 639 bp, Homo sapiens
gactatgaaggatgctatagagagaggacaacttgagatggggrcctcaattatgagcctgtgctgtcatgcaagaaataaagtatgtggatctaaaccaaggcagtgtcacccaagaaagaaaatgtgtggatctaaaccaacgcagtgacagtgggaagggagaaaatggacagcttcaagggatgttggggtagactcggggtgctgagtatttttcagtgcctgagggtctacgggaggaagggagttgccctgggtaatggataatgaagctaggctgggtctaatttggggtgtttgtgggcaatcaaagggaggaaccacacacagttgactgttgttctggcagtcttgcaagagcaatctggaacacaaaaagtctaggcttcatgaactacaaaggtaacatctgaaaccatgggagtagatgcaggagtgtgtctttagtgaaaataaaatagttggagcatggagccttggagaaaatgccacttcaagattggcagaagaggaagaacctacagatggaactgagaaggcatcagaaaagtagaggtcaagttgagagaagagagtagcagcagactgaaatgctatggaaatatcaaggaagataaggaatgaaatgtatttgcc

SEQ ID NO: 540987 - DNA, 603 bp, Homo sapiens
caacttgagatggggacctcaattatgagcctgtgctgtcatgcaagaaataaagtatgtggatctaaaccaaggcagtgtcacccaagaaagaaaatgtgtggatctaaaccaacgcagtgacagtgggaagggagaaaatggacagcttcaagggatgttggggtagactcggggtgctgagtatttttcagtgcctgagggtctaygggaggaagggagttgccctgggtaatggataatgaagctaggctgggtctaatttggggtgtttgtgggcaatcaaagggaggaaccacacacagttgactgttgttctggcagtcttgcaagagcaatctggaacacaaaaagtctaggcttcatgaactacaaaggtaacatctgaaaccatgggagtagatgcaggagtgtgtctttagtgaaaataaaatagttggagcatggagccttggagaaaatgccacttcaagattggcagaagaggaagaacctacagatggaactgagaaggcatcagaaaagtagaggtcaagttgagagaagagagtagcagcagactgaaatgctatggaaatatcaaggaagataaggaatgaaatg

SEQ ID NO: 540988 - DNA, 582 bp, Homo sapiens
acacatagtgaattctgtcacatgcccagggagaatttcagtcagaaacatctgtgctgttttcacaagggaaaggtcagaactccatgagtagttcatgtgtctgcatttcttttgatgggcattgtgcctcaactagagaagagatcaataagccaatagccgccactatccaatttgaatccagaagttcacacaacctaattccagaatacagtttgtgcttctagatgaaaaattctaaagcacaagcacacaattccagatattttagccactatacaaagatgaatcagggtcacgtgatcatgctcacgtcagaagatgcaggagaaggacaaagttwtgcattttggtacaaaacacgcatgtgccagccacccgattcgtttccagtagggagcagttgagtggaaggtcatgtctgcactaccttaggactgaggacctacagagggaacactggaaagaattagcaacagaataagccaggttctgtttgattctgtctctcccaccctgcagctccaattcagagcagtcttaatgtgcagggatccgcatagaaccagccaagcaggg

SEQ ID NO: 540989 - DNA, 616 bp, Homo sapiens
tgcctctgcagacaacagcatcagatgaacaaatattattttcatagcagaaatggtcatgtctgctgggctgccaattgacgatgcagtcattttgcctctgtgtagctttatctactactaaaatagactttgattcttccattggagaagaatataatgatcatgtgtgatatgtaggaaagttacacgttcatagcagaaaacacgtaagagagagtttgcccaggcaaatccgggtccacctgccatatcagaatgagagaagaaagaggggccctctagtctcagtcttgagcaccttaaatacacactagcacttaggccccagggaggtttggaacataagcaccaaaaatccccccactgcaacaggggctaactagagaggacctaaaaaaacctttccatccagggagttgaaacatatctgtgaaaacaatagcttgtrgaagctgttgttttagggaagatgtgttagggaagatcccaaccagcgtctataagagtggtttggaaagttctggaacatttcaaatgctgtgatctttgtatcactttgtttccaggtttttttatttttattttttcttcctcccagacaagacctttcagg

SEQ ID NO: 540990 - DNA, 616 bp, Homo sapiens
tgcctctgcagacaacagcatcagatgaacaaatattattttcatagcagaaatggtcatgtctgctgggctgccaattgacgatgcagtcattttgcctctgtgtagctttatctactactaaaatagactttgattcttccattggagaagaatataatgatcatgtgtgatatgtaggaaagttacacgttcatagcagaaaacacgtaagagagagtttgcccaggcaaatccgggtccacctgccatatcagaatgagagaagaaagaggggccctctagtctcagtcttgagcaccttaaatacacactagcacttaggccccagggaggtttggaacataagcaccaaaaatccccccactgcaacaggggctaactagagaggacctaaaaaaacctttccatccagggagttgaaacatatctgtgaaaacaatagcttgtagaagctgttgttttagggaagatgtgttagggaagatcccaaccagcgtctataagagtggtttggaaagttctggaacatttcaaatgctgkgatctttgtatcactttgtttccaggtttttttatttttattttttcttcctcccagacaagacctttcagg

SEQ ID NO: 540991 - DNA, 531 bp, Homo sapiens
aacttcatttattatgtgtcactaatagtcctctttatccggggtcaactggattacttctggtttgaaaagaaagggactggcaactccctgaaatagtgagcctccttggtgcctactggraagaaagggtgtgaagagtatgaatatttctcaccagaatggaacatggagaactgcattagaaacccaggtaccttgatattttttttttttcgagacagagtcttggtctattgcccaggctggagtgcagtggcatgatctctgctcactacaacctccgcctcccgggctcaagcaattctcctacctcagcctcccgagtggctgggattataggcatgcgccactatgcctggctaatctttgtatgcttagtagagatggggtttcatcatgtcggccaggctggtctcaaactcctgacctcgtgatctgcccacctcggcctcccaaagtgctgggactacaggcgtgagccaccgcgcccagcccggtaccttgattttaatatcgtctcctgtaata

SEQ ID NO: 540992 - DNA, 531 bp, Homo sapiens
aacttcatttattatgtgtcactaatagtcctctttatccggggtcaactggattacttctggtttgaaaagaaagggactggcaactccctgaaatagtgagcctccttggtgcctactggaaagaaagggtgtgaagagtatgaatatttctcaccagaatggaacatggagaactgcattagaaacccaggtaccttgatattttttttttttcgagacagagtcttggtctattgcccaggctggagtgcagtggcatgatctctgctcactacaacctccgcctcccgggctcaagcaattctcctacctcagcctcccgagtggctgggattataggcatgcgccactatgcctggctaatctttgtatgcttagtagagatggggtttcatcatgtcggccaggctggtmtcaaactcctgacctcgtgatctgcccacctcggcctcccaaagtgctgggactacaggcgtgagccaccgcgcccagcccggtaccttgattttaatatcgtctcctgtaata

SEQ ID NO: 540993 - DNA, 630 bp, Homo sapiens
gatgcttaattttacctaaaaccaaataagcaatactgtagttgattcgcttataaaaggtaacctattattggcttacaaccaataaatgattatgttataaaaggtaatcattcattggattacaaccaataaatgttctaagatatacaaaaagcagacttcctatcacaaaggaaactttattagaaatctcattctaagctcctattcttagaatattatgatcacaacaatgcagaatcaacaaatacaagtggttttttttctgagtgtctgagtttttatgtcttccaaaaataaggtataaattctaaaaactgaaatcttttcattgatttgcaagtacttaacaataaaatgtttgaaagtgactctcaaacttgtatggagaggaagagtatttacatgcaaggacaaagaaggaaactatatataagaagatgaagtcaaatatacagaatgtgttggaattcacaatctgggataaaaataamtggcaccttaggtcactagatagtctatagccagagcaactagaactgtatggacgtcaagagaagactcctaccccacagactcaacaggagccagaggcatcactttcaccagcactgcacaagcacgctg

SEQ ID NO: 540994 - DNA, 346 bp, Homo sapiens
cagctcagctcactttccggagggttttccctctctggaatcttaactcctctagttgtctttgctgagcagcaacttgctgcctccaaaagatcatttctgcattttattcagtttttaaactcatcttaggcaggagtgctggtctgccaccagtaccctctcctactcggaagcagagtcttccaccatkgtgcttttaaaattcatccatgttattgcgggtagttgtaattcatttatttctgttgaggaatgaatatatcagaatttacttaagcattatgctgttgctggaatacatgggctgtatccagttttagctactagaaacagtgctcccagg

SEQ ID NO: 540995 - DNA, 346 bp, Homo sapiens
cagctcagctcactttccggagggttttccctctctggaatcttaactcctctagttgtctttgctgagcagcaacttgctgcctccaaaagatcatttctgcattttattcagtttttaaactcatcttaggcaggagtgctggtctgccaccagtaccctctcctactcggaagcagagtcttccaccattgtgcttttaaaattcatccatgttattgcgggtagttgtaattcatttatttctgttgaggaatgaatatatcagaatttacttaagcattatrctgttgctggaatacatgggctgtatccagttttagctactagaaacagtgctcccagg

SEQ ID NO: 540996 - DNA, 624 bp, Homo sapiens
ggccaccgcactggccgtggagcccatgaagtttgtctacagaggcaggtgatgcgctgcggacccccacgccgggagtagattccttcatttgcagctcgggaagtctttgtgcagtagatggaaagcccagcaaacttgaattcacaaagcctaaaaattgttgtacatcagaaaactcctaaagtaaaaggaaaatatttgcagcaatgataccagagttaatatccttactgtccaaagagttccttggattccttaagaaaataaggttttgatgtaaaatttggggcaaaggctcaaggggacaaatcagggagggaagaattgagtaaagcaaaggagaaatgggtctaagttcctaataaccttggaatgtgaattaaaacagaaaagtgccattttctctgcgagacacatgacaccctccattgcctctggaataaaaatcaactcaacttttctacatgtgtaaagcaaggaccttagagattctcttgagcaaataatagacctctgggcctatgcccctgggcacaggggccaggaagagaattttgcttcttctaytcccaagctccttgtctgggaggaagctcttcccctaactggtccactcaacca

SEQ ID NO: 540997 - DNA, 622 bp, Homo sapiens
tcattgggatgaaacaaaaaattatcttactacccttgtggtacctgggcttcctataccccaaaattagttacacaggtagctgcttctagaaccatgtttgcatgctgtataacagattctttaataatatgcagyctatcctggatttgcttgctcatccttgggcacttacatggtctcaggatatttaactccctgcaagattatgtttgtatttgcacacattttattcttcatagaaggccgaagatgcttacagactaactcatatgtatcttttctccatatgaggttgaatcttctattttccacaaattgacccaatggggatagaatgtcttgaattctttcatgtcatttctcaattagaataatttgtggattcagttttcaagtatgatggtaaagtggcatgtacatttagtaagagtggttcatttaatggttagagatacaagaagaaagaacaatggccttcaggatttaagcctgtcagattcagattacagagaaccaagagagttaatggtgtaagtctcaatctagggacagtagatgtatgtccccgctcaaaccatcagtcagagaacaaattcttccttcctccactttttgttct

SEQ ID NO: 540998 - DNA, 622 bp, Homo sapiens
tcattgggatgaaacaaaaaattatcttactacccttgtggtacctgggcttcctataccccaaaattagttacacaggtagctgcttctagaaccatgtttgcatgctgtataacagattctttaataatatgcagtctatcctggatttgcttgctcatccttgggcacttacatggtctcaggatatttaactccctgcaagattatgtttgtatttgcacacattttattcttcatagaaggccgaagwtgcttacagactaactcatatgtatcttttctccatatgaggttgaatcttctattttccacaaattgacccaatggggatagaatgtcttgaattctttcatgtcatttctcaattagaataatttgtggattcagttttcaagtatgatggtaaagtggcatgtacatttagtaagagtggttcatttaatggttagagatacaagaagaaagaacaatggccttcaggatttaagcctgtcagattcagattacagagaaccaagagagttaatggtgtaagtctcaatctagggacagtagatgtatgtccccgctcaaaccatcagtcagagaacaaattcttccttcctccactttttgttct

SEQ ID NO: 540999 - DNA, 596 bp, Homo sapiens
ctggtaatttgtcataattkaaaattatttttattttaatgcacctttcactctatggttttgtattttaatgcatctcttaactatacatggttgatttatagtgtgactttggataagttatgtgacccttctttgcttttgtttcctaatttgaagaatagattagtaaaaagatgatataataatcatctttttaatgggttgttttgaggactaaatgagtgaaaactcataaggtgcattataagcacttaataaatattagtgttgttggtagctattgttatggcatgggccagaatggtagactgggagacccacagacagagctagaacttaagcaatggaggttaaagctatgcttaaattacctatgtgatgaaagctggtgtttcctggagtttacgatgcagtttgcattatggacggaaagtttttctgggtagtgaaaggagagtagccagtgggtgttcatgcttgcatggcgagatgaagaatacacttgggtttacacccctttgtgtctttttggatgggccttctctgagtgacatgaggaatactgatacagctccataatagcagtaataaga

SEQ ID NO: 541000 - DNA, 585 bp, Homo sapiens
tgatcgcgccattgcaccccagcctgggcaacaagagagaagctctgtctcaaaaaaccaaaccaaaccaaacaaacaaacaaacaaaaatattctaaactcaccaaggcattatcttgagggctgctctcataagacagaaggatgcccctggacacctgtgaagtgtrtgggtgtgtgtgtgtgtgaatgtgtttgtgttgaaagtgttttgggggaacagggcctagaatggggaagcctgggaatagtagaatccaactaccatggccgtttgttatttcactgttgagaaaccttctacctgtaataagatggttattaaaattttaatcagaacttttctgtgcacctgagggccaggtcaccgagtttgcagctcaagtatgtaattcccatataaaggactttaattaaaaataataatgatagtgttattttcaatttctgaaatcttgatcgtgttttcatttgtctgatctcattttgattttcattctcttaacaagcccatgaagcaagtaggcaagaattactaccttcaggaaccgcaatccattctatttgtgaaaattttcccttggt

SEQ ID NO: 541001 - DNA, 502 bp, Homo sapiens
aagtcatcctgtgtaaacagtgtcttccaagactctccacaattcatggaatttcccactcaaggactctgtgtcaatttttaatgaaccagttactgaacattgtacctaagaccatgacaacttatgctcagccattccatgctcttccatacccagtgcagacaaatttattggggtttaattcaaaatgtgcaaaaaagaaaaatttgcaaattgtttttaaaaaggtaccatctactctcactattaggagcaagttttactacagattgctcaaataataaattcctgggattgaggcccgtctacattaccttgtggtgcttctttttctctgtacacactcacagcgtaatcagagtaaactactgcaatgcataccatcttgcagatgtttcaytatgttcttctatgagataggcttcttaaccaaggacaagagaaattgtcaattaatacctgtctcatttaatctgcaggtgaatagagggctcagaca

SEQ ID NO: 541002 - DNA, 224 bp, Homo sapiens
aaaaggtaccatctactctcactattaggagcaagttttactacagattgctcaaataataaattcctgggattgaggcccgtctacattaccttgtggtgcttctttttctctgtacacactcacagcgtaatcagagtaaactactgcaatgcataccatcttgcagatgtttcattatgttcttctatgarataggcttcttaaccaaggacaagagaaat

SEQ ID NO: 541003 - DNA, 332 bp, Homo sapiens
gaaggtagtcatagcctcccttgaaaagaaacaggaaacttgccaaattgatggagagaacaaaccacccgacagtgcacaaaytgcatctggggctcctggttaagacatcctggagcagagaggagcaggggcaaaagggaaaaatccccaagcccacacaggtgcacaagtccatgaccaatgtccttaagctgaaccatcctcattttaatgctaaaaacacacccctgggtagagatttcagacgctaatgagacatgggatgtatgtgctagcgtgtacagcaatagtgcatgggcatccaggagacctcccatggcatgcttaac

SEQ ID NO: 541004 - DNA, 332 bp, Homo sapiens
gaaggtagtcatagcctcccttgaaaagaaacaggaaacttgccaaattgatggagagaacaaaccacccgacagtgcacaaactgcatctggggctcctggttaagacatcctggagcagagaggagcaggrgcaaaagggaaaaatccccaagcccacacaggtgcacaagtccatgaccaatgtccttaagctgaaccatcctcattttaatgctaaaaacacacccctgggtagagatttcagacgctaatgagacatgggatgtatgtgctagcgtgtacagcaatagtgcatgggcatccaggagacctcccatggcatgcttaac

SEQ ID NO: 541005 - DNA, 366 bp, Homo sapiens
ctgccttgtctttaagtaacgtgaaacgagcagccacatgaagcacccgtaacctgcccagcatgcgagtaagttctcagtaagaatgatcctcagctacgatgcagggaagcctcagaacggggactcgagggagagacacatagtcccagaggcacagcattcttaagtcttcctggaaatgtcgcgtgtagaaatgccaacatacatttccatactactggttccatataagatctaagtcattaaaaagtacatcagctcagattataagaaacacttggacaatgattaattttgcttgataatgttccctcctcctstttgcatagaaatgatgcagcatcctgggcttaagcccagcat

SEQ ID NO: 541006 - DNA, 578 bp, Homo sapiens
ataggtgtgtgttaccatgcccggctaatttttttatttttagtagagatgggattttaccatgttggtcagattggtctggaactcctgacttcaaatgatcctcccaccttggcctcccaaagtgctgggattacaagtgtgagccaccatacccagcctgttttatagtcttatatggccctgtcccaggttgattctctaaatcattggtcattctgccattggtcagacatagccaggagccagagagtagggaacctgttgctataacccatgcagataaaggacacagaacagagcagaggtaagtgaagaatgggtttggagaagcaaatggcagccctctgagttgctggcttgttgttggtattaatatgatctcggtggtccaagaccaccaacagcacggcaacactgacagttcagcagggaaatggagagtgccgatttccacagaggtaccagggtttcccagggctgcttcctaatctcctttcaagaaatggtagcacttcttatatcccagagagtgtcaagtgagtgcgacttttygtccctgtgtctatggccaaaag

SEQ ID NO: 541007 - DNA, 631 bp, Homo sapiens
ttgtggtgtggacccaagacacaattgcagtcccttgcttgcacgaatgcaatccgaattcccaaaaaaaggaaaccggcgaggaatcggccgcaccttcctgcgcttctgcttgccttgggattagaaaacaacttcggagattacatttcctatgggcaatcttttgttgtgattcagactcaagaaggctttgctttggaagaaatagattagcggcttctctgtggagttggaggctatagagatttttatagcctcttcaatatgaaagtttcctctagaactttgccatcatcagtgctattctgagggcagcagcaacctggaaatttagatacatgcaggctccggccagatgcgtttctttgtgcttgtctgttggcattcttctcttgctgctcctcttgatcaaaacgtacagataataaaggcaaggccaatgaagarggtagataataacagcaaatcccatacaaacaaatgcctctagaaattctcagttctgtcagcggggaggcagttttgctaatcccgtggaacggatgaaaagaaaggcacagagatctcatggattatgtagtggacaggatgtgagggcaggaactggggccaggacccagcaggccag

SEQ ID NO: 541008 - DNA, 539 bp, Homo sapiens
tggtggtgtgcgtctatagtcccagctacttcggaggctgaggtgggagaatcacttgaacccaggagatcaaggctgcagtgagctatgattgtgccactgcactctagcctgggtgacagagcaaggccctgtctcaaaaaaaaaagaaaaaaaaaagtttattgctaactccttggtactatgtataatttttttaattgaatgactagactaaacattgraagtatttaataagctatcaaatatgtattaatataagttttgaaaataaatactaaatctcctgatctcttttaggttaaaatatagtttatgatgagcaactaatattctttgtatttaaaaagataattgttttatggtagaaaaattgaaatacagaaaagtataaagtagaaaactatgaaatacccgtaagtctactacctgcatacatatttcttcaaatccttttgtgtgtgtgcatatggctattcatatacaatttctggtaacaaaaatgggatcttgctatacatatggttgtaacctgcttt

SEQ ID NO: 541009 - DNA, 516 bp, Homo sapiens
gctgccgtggttctcaggcctttggactagccagtctcaagtctccagcctgcagatggcagaytgtgggacttctcagcctccataattatgtaagccacatcctcatgataaatttctttatatatctatatacacatctaccgctatgtctatcctattggttctgtttccctggagaaccctgattgatgcagaagactactgaatattcttcaatacccatttccctttgatcattaccttctgttcacactggcttcctgtgttagcacaccacagtctgtctgccagaggcccttgtgccaaccatttcctctgcctggaccttaccagagaggtccagaccacccccttctgagctgagtttaaaaatcatatcctcagagcggccctccagggcccatcagcacctcccattattgtttaccacagcccccatgtgcttaattccagcagcaatcgcaatctaataaactaaaaaaatagtatctgtctctcccatgaaaatgtgca

SEQ ID NO: 541010 - DNA, 501 bp, Homo sapiens
catcgtggtttgtcctggagtcaatgggtccctgcctgttgcttggaaacccttaggaatacttaccaggaaaaggagaagaaggaaggtgatgaggaaagggaaatagacaagagaaaaaaggaagaaggataggaaaggggaagagaaaacgggaactagataaggataaaggaagagaaatgaagagagaagaaatgaagaaagacacgaaaaggaggagaaaaaaggagaacaaaaagggggaaagatgagtataggaaaaataaaaagaggagaaaacaggagggaaaaaggaaaataaagggggaaaaacccacatttctactactctgaccagaagctatttcccagtagaaaagggcagggaagccagaccaggtgaaggtgtgcgagtgagaactcagtttctggattcccagcctggacaaaaagggaccgaggagrgaggctgggaaggcatatctggggggcaggaagccgcacccagtgaacagagcc

SEQ ID NO: 541011 - DNA, 501 bp, Homo sapiens
catcgtggtttgtcctggagtcaatgggtccctgcctgttgcttggaaacccttaggaatacttaccaggaaaaggagaagaaggaaggtgatgaggaaagggaaatagacaagagaaaaaaggaagaaggataggaaaggggaagagaaaacgggaactagataaggataaaggaagagaaatgaagagagaagaaatgaagaaagacacgaaaaggaggagaaaaaaggagaacaaaaagggggaaagatgagtataggaaaaataaaaagaggagaaaacaggagggaaaaaggaaaataaagggggaaaaacccacatttctactactctgaccagaagctatttcccagtagaaaagggcagggaagccagaccaggtgaaggtgtgcgagtgagaactcagtttctggattcccagcctggacaaaaagggaccgaggagagaggctgggaaggcatatctggggggcaggaagcygcacccagtgaacagagcc

SEQ ID NO: 541012 - DNA, 442 bp, Homo sapiens
ggtcaccatggctttggagcacctggtagtgtggcrtgtccacagtgaagaccagagtttcattgtccttaagactgacctgggagacgtggctgcaggccattgaggaaggtgaggcaaaagcttcctgtctgctccccgtgtgctgaggagggagctctgccatgggctttactttcacacgttatattctacaagtcttgttttacaaaagcatcccttccttgaggcttcggctgctcatcgctgctcatcatcatagcgtgccataacatatagtaagatttgggtttgtttctgggagagatcttggcatagagaaaggagaaatgcttagagccaccatcaagacagttgggatgaaagctggggataggcagaggctggaggaaacatgtgcaccccttgtaaacacttattcatgttttagttattcacttaa

SEQ ID NO: 541013 - DNA, 386 bp, Homo sapiens
atgttgtcctctcctgcctctgcttagggttcactccgggggaaagtgccacttgagagtttcctttttatgtgtggttctgactgaccgctccctgctcacagatgctgcttctcagggtggggtccctgaggcctggagtgtggcctctgacgaccttcagggccaggtgcggaatgagagcctgtggccgcatggcccccggtgggagacgtcctgccgccctttgcttctctgtaccactctggctgcacagttcagagccttgggaaacgttaaccagtaggacctagaaggggaggtgagaaggggtcamcccccaggtgtgcctgtggtgagcctttgtgctgagcaggtgcagggagggaggcccaggtgcacacacc

SEQ ID NO: 541014 - DNA, 645 bp, Homo sapiens
tttctgcagaaaagagcatgtgtgggtctctcctctctgtgcgtggccactgcacggtgaggtcaggccccagggaacacggcgtcttcagctacctcctgtgtttcctgcaaaccagctcaggaatgtccttgccacctggcttggaagcagtaggctggctccaggaactgcccaagtgcagggttttctgcccttgcttggaatttatcacggtcccagattcctgttgaatggccgtaacccctgcccctttgtcacgagtcagttgccaagagaagtctgtttggtttgagagcagttcatgcagacatagaccacttcctctgagaattcatttgcttccccaggatggaatctggctgggcctctgaccttgctggtcacgtgggccggggcctccatcagtcataccctggactcctatctgtgtctaaacaccacgccccacccccaactgcacggcagccactcgcatagcactctgggagggctgtgggcatgagcagcgaggrctccatcagcagctcccccacataagccctgctaatgagggggcttgcgaagcagctttgatgtgctggtaaatccaggtgcaaaacagaactcaagttaaggcctccgcacagcactgcgttctaactg

SEQ ID NO: 541015 - DNA, 622 bp, Homo sapiens
gatgtggtcagatttactcctatttcatatattttgatactgtgaatttcagcttccagttattcattgctaatatataaaaatacacttggtttttgtatattaatcttgtatcctgagaccttaatgtaatttgttttcaaagcttttttgtggattccattggctattctgtcaatgttgtctgtgaataaagacagttgtacttttttcttcccactctgaatgccttttatttatttttgcttcctttactgcactggctagaacttctaagtacataatgaatagaagtgtaactgcccaatgagttcaccttgcccattgcctagacagagccgattcaccaagacgggaattgyaatagagaaagagtaattcaggcagagcctgctgggtgggagaccggagttttattattgctcaaatcagtctccctgagcatttgaggagcagagtttttaaggacagcttggtgggtggggggaagccagtgggccaggagtgctgattggtcaggggtgaaatcaaaaggagttgaagctttcttcttgagctgagtccgttcctgggtgggggccacaaggtcagatgagccagtttattgatctggatggtgcca

SEQ ID NO: 541016 - DNA, 622 bp, Homo sapiens
gatgtggtcagatttactcctatttcatatattttgatactgtgaatttcagcttccagttattcattgctaatatataaaaatacacttggtttttgtatattaatcttgtatcctgagaccttaatgtaatttgttttcaaagcttttttgtggattccattggctattctgtcaatgttgtctgtgaataaagacagttgtacttttttcttcccactctgaatgccttttatttatttttgcttcctttactgcactggctagaacttctaagtacataatgaatagaagtgtaactgcccaatgagttcaccttgcccattgcctagacagagccgattcaccaagacgggaattgtaatagagaaagagtaattcaggcagagcctgctgggtgggagaccggagttttattattgctcaaatcagtctccctgagcatttgaggagcagagtttttaaggacagcttggtgggtggggggaagccagtgggccaggagtgctgattggtcaggggtgaaatcaaarggagttgaagctttcttcttgagctgagtccgttcctgggtgggggccacaaggtcagatgagccagtttattgatctggatggtgcca

SEQ ID NO: 541017 - DNA, 409 bp, Homo sapiens
actgcccctcctccactgaagcacctttgtgacttttttgtgacttttctgtatcgattaataggatcatatgttgtttattctttagcctgttgatatagcagattacattgattgattttcaaataccaagctagcctcgtacacctaaactaagtcccacttggtcacggcataatattctctgttagaaagtggcctggacacgtctgtgggtctctttcgagttcctctgttctgttccgctggtctccacatctcccctccagcgctgccccagccatgtctgtctgatgtaggagctgtataacgctgtgctgtagctgtacagttctcaacatcaggaagggcaattcccctactcttcttttttggaatkgctttccatatacattttagaataatcttg

SEQ ID NO: 541018 - DNA, 637 bp, Homo sapiens
gtctcccccagggcacccgccagccacatggccgctatgtgtgcagactagacaggtggcagctcgggccggccagacagagggagaggaagccagagcctgcgcgcaggcagcctcataaatatttccagccacagccaacgtgtcttactgacaatttgctttttaaaaaattgcgctctaattttaagtgagcagcccctaattacagtgatttacgaggtacctggggactgtgtgatatttgaacatggcagagggctgagcagagatggcagagatggatgggcccggtgccactcattcagcaggtcctgctaatgcyggagtgttggaccgaggtggagcctcccaatgcggccgggtatgctgggggaaacggagtcagaggtgggctgcacggcaggtcgacttgttcacagggggctggtgttttgcaaacgctgggtctgccttcgtgtagggtttgagctgggagagtagcactggtcactcctgcctgtctccgtccacccccacccccacctggagggcagtgcggtatcttagggcgtcattcttccagagccgcctgaggccagcagagaggaagtgctgtaggagccgtgagtgggcggcccggcctaccattgggagc

SEQ ID NO: 541019 - DNA, 625 bp, Homo sapiens
tgcccatctctccagggccatagaaatacattccatagacctaagcagtatttgaatttttataacaatagcatatgtgtttcttatgtgatttactagaaacaatttaatttctcgagttgtaaaaaggtgtattttaaacctgtgtaaaggtacctggagatcattgtcattcagaataacaaaataaaacagcaatataaaaacacagatattatcatagtacaatgttaaatactataatattcaagatgatattaaaattacatatatctacatctatatgcatrtaaggatgtcaataaatgatattaatgtctaaaattaaattgtaatttttgcagacctctgtgaatatattagaaaccattgaattgtacactgtatgggggtgaaatttatggtatttaaattatatctcaaagttctgctaaaaaatgaatggcttgatattctagtgctaagggatggttttatttaaaacataaactaatagtttccagtagattccattaaaaatattacagccaggatttccagatcacacccattcccacctttttagaatttttgactattttccaaagtcttgaattcaatgaggtgcaggtggaagaaagcgttt

SEQ ID NO: 541020 - DNA, 625 bp, Homo sapiens
tgcccatctctccagggccatagaaatacattccatagacctaagcagtatttgaatttttataacaatagcatatgtgtttcttatgtgatttactagaaacaatttaatttctcgagttgtaaaaaggtgtattttaaacctgtgtaaaggtacctggagatcattgtcattcagaataacaaaataaaacagcaatataaaaacacagatattatcatagtacaatgttaaatactataatattcaagatgatattaaaattacatatatctacatctatatgcatataaggatgtcaataaatgatattaatgtctaaaattaaattgtaatttttgcagacctctgtgaatatattagaaaccattgaattgtacactgtatgggggtgaaatttatgrtatttaaattatatctcaaagttctgctaaaaaatgaatggcttgatattctagtgctaagggatggttttatttaaaacataaactaatagtttccagtagattccattaaaaatattacagccaggatttccagatcacacccattcccacctttttagaatttttgactattttccaaagtcttgaattcaatgaggtgcaggtggaagaaagcgttt

SEQ ID NO: 541021 - DNA, 442 bp, Homo sapiens
gacaacaaaatgatttagatcttagacaagtcatgctaggtgtctccactgtttcagttcttgcattcattcttgggctttttccttttaccaaataaaatagctccttgacatcacatgagtccatgctatgcttaatgagtattggttagtaaaaatgcctatgactastcatcttcatctatgcaagtaaatattaattcataaaacacttcaaatgtaagcaattaataattagtgaatgaaaagtacataatatatcaattagaaaaaaatcactattaaaaagacattatttgtgtgataaaagagattgccattttgtatttttctacaaggttaaagaaaactaagtcaacgtatacaagtgagttttaaaagcctttacgccaggcgtggtgattcatgcccataatcccagcactttggtgggccaaggtgg

SEQ ID NO: 541022 - DNA, 553 bp, Homo sapiens
tgctgcactcccacagggcccctgcctagccccgcagcggtctccagtgtcctcatcagccctgtgaccagcagcctcagggagccacaggagacaggagaccctccactgggtgcacacagacaggcctggagaggacaggatgggccacatggacggctggctggggctgcggagcccaggggtggtgccgcaggcactgggaggtggcattatgtgaccacggcagcctaagaccaccactgtgggcccaagctcgcagctcgcttcccactattctcagtgagaggacacaggctaccccttgaggccagcccacagctctcttaccaggcagcamcttaccgcccctcactgtgtcctgtcgctctgctcttgtggcctgctgtgcagcaggcaccatgtcacccgttcatagatgagcaagccaaggctcggggcaggagaccggtgcagcaggctctcaccacctcatgggagcaggctctgcacacggcatgctctcaggcccctttggctgagtgcccagccccaaccccaagctaccccgctg

SEQ ID NO: 541023 - DNA, 608 bp, Homo sapiens
cattaggcgaaaataaaagctgggctacagaatgacctcttccgtggggacgaggggcagaggacggcagcccacctccaggaggagcttaaagaggcggctcctggctgcagggacaggagatagaagtgggaaaggcttgggcgccatttttattgtttggtattttttgaatccacactgtgtgtgtattatcggttttacatcttaagaaaaataaccaggctgggtgcagtggctcaygtctgtaatcccaacactttcagaggctgaggcaagagatcgcttgaggccaggagtttgagaccagctgggcaacacagggagacccccccatctctgcaaaaaatttaaaaattagccgggcatggttgcataaatctgtagtcctagctacttgggaggctcagatgggaggattgcctgagcacagggattggaggccgcaatgagacatcattgtgccactgcactccagcctgggtgacagagcaaggccctttcccataaaaagaaagaaagaaaaaaaactcttggtgggtcagaggcagtgaggtcatcaggcggggcagcttcaggaccaggtggaaggggcccactgtgacctc

SEQ ID NO: 541024 - DNA, 415 bp, Homo sapiens
tcctcctcctcttcttcctcttggggctcctgggtgtcggcgttagccccttcctgtctccccaacaccccaccatatccagtcagcaggacctaacgattctgcccgcagcacacctggactctccactatcctcrccctacctggtcaccaacatgggtgggcatggcagccgccttctcactgcccttcctgcctccaggccacacacacagtgcagtcagaggggtcttcctaacacataagctgggccctgccactctccactgtcatgcttcctgctgccctctggataaagtcctgaatccccgccacggcctgaatggcccttcccaggccagcccatctccacttctctgggctccaggttcatcgctctaagacacgagggccatcaagttcattgctgtccaca

SEQ ID NO: 541025 - DNA, 598 bp, Homo sapiens
tgctgtgtgcagggccagggccacggaggcccagggggacgtgaagcagcacctctctgctgtggctctgccagtccggaggctgcaccctgcctttctccaccccwggtcccccccagaaactggacagagagctggaaggagacatcagccatccaggcaggagctgaccctgccagccattctggggcaactgtggctgtcacagaccctgacccagtggagggaatagacccaggcagcctgaccttgtccactgtttatttttgccaaaataatctcattcttattacataagtaatgtatgcctattgtagatattgtagaaaatatagatgaatccaatgaagaaaatacaaccactcattctttttttttttttagagatggggcttttccatgatgcccaggctggtctcgaactcctggcctcaagcaatccacccacctcagcctcccaaagtgttgggattacaggcgtgagccaccgcacctggcctaatacagtcactctttttttctttgagacggagtcttgctctgtcacccaggctggagtgcagtggcatgatctcggctcactgcaagctccgcctcc

SEQ ID NO: 541026 - DNA, 598 bp, Homo sapiens
tgctgtgtgcagggccagggccacggaggcccagggggacgtgaagcagcacctctctgctgtggctctgccagtccggaggctgcaccctgcctttctccaccccaggtccccsccagaaactggacagagagctggaaggagacatcagccatccaggcaggagctgaccctgccagccattctggggcaactgtggctgtcacagaccctgacccagtggagggaatagacccaggcagcctgaccttgtccactgtttatttttgccaaaataatctcattcttattacataagtaatgtatgcctattgtagatattgtagaaaatatagatgaatccaatgaagaaaatacaaccactcattctttttttttttttagagatggggcttttccatgatgcccaggctggtctcgaactcctggcctcaagcaatccacccacctcagcctcccaaagtgttgggattacaggcgtgagccaccgcacctggcctaatacagtcactctttttttctttgagacggagtcttgctctgtcacccaggctggagtgcagtggcatgatctcggctcactgcaagctccgcctcc

SEQ ID NO: 541027 - DNA, 598 bp, Homo sapiens
tgctgtgtgcagggccagggccacggaggcccagggggacgtgaagcagcacctctctgctgtggctctgccagtccggaggctgcaccctgcctttctccaccccaggtcccccccrgaaactggacagagagctggaaggagacatcagccatccaggcaggagctgaccctgccagccattctggggcaactgtggctgtcacagaccctgacccagtggagggaatagacccaggcagcctgaccttgtccactgtttatttttgccaaaataatctcattcttattacataagtaatgtatgcctattgtagatattgtagaaaatatagatgaatccaatgaagaaaatacaaccactcattctttttttttttttagagatggggcttttccatgatgcccaggctggtctcgaactcctggcctcaagcaatccacccacctcagcctcccaaagtgttgggattacaggcgtgagccaccgcacctggcctaatacagtcactctttttttctttgagacggagtcttgctctgtcacccaggctggagtgcagtggcatgatctcggctcactgcaagctccgcctcc

SEQ ID NO: 541028 - DNA, 393 bp, Homo sapiens
ggatcagggaggcgctgtgacccaccctatttcatggatgaggaaacaggataacaggagatgaaatgcttggccaaagccaccgtgctgggcagtgacagggctgagattcaaacatgggctatggagaccgtgactgggccacttcctgttcyggctactgagcaggaacaaagcctgggacgggagcggggggctggaggggcgcttctcccactagctcctcagaggtgacagcgcggaggaggggaggagaagggaagctgggacaatcacgctgatgtacggcttccagcgggattaactgcaccatctggaggccacgcgtccacctgggtgggttaggaaccccaacccttcggtgtaaacggcagggggagactcagtggatgg

SEQ ID NO: 541029 - DNA, 393 bp, Homo sapiens
ggatcagggaggcgctgtgacccaccctatttcatggatgaggaaacaggataacaggagatgaaatgcttggccaaagccaccgtgctgggcagtgacagggctgagattcaaacatgggctatggagaccgtgactgggccacttcctgttccggctactgmgcaggaacaaagcctgggacgggagcggggggctggaggggcgcttctcccactagctcctcagaggtgacagcgcggaggaggggaggagaagggaagctgggacaatcacgctgatgtacggcttccagcgggattaactgcaccatctggaggccacgcgtccacctgggtgggttaggaaccccaacccttcggtgtaaacggcagggggagactcagtggatgg

SEQ ID NO: 541030 - DNA, 393 bp, Homo sapiens
ggatcagggaggcgctgtgacccaccctatttcatggatgaggaaacaggataacaggagatgaaatgcttggccaaagccaccgtgctgggcagtgacagggctgagattcaaacatgggctatggagaccgtgactgggccacttcctgttccggctactgagcaggaacaaagcctgggacgggagcggggggctggaggggcgcttctcccactagctcctcagaggtgacagcgcggaggaggggaggagaagggaagctgggacaatcacgctgatgtacggcttccagcgggattaactgyaccatctggaggccacgcgtccacctgggtgggttaggaaccccaacccttcggtgtaaacggcagggggagactcagtggatgg

SEQ ID NO: 541031 - DNA, 393 bp, Homo sapiens
ggatcagggaggcgctgtgacccaccctatttcatggatgaggaaacaggataacaggagatgaaatgcttggccaaagccaccgtgctgggcagtgacagggctgagattcaaacatgggctatggagaccgtgactgggccacttcctgttccggctactgagcaggaacaaagcctgggacgggagcggggggctggaggggcgcttctcccactagctcctcagaggtgacagcgcggaggaggggaggagaagggaagctgggacaatcacgctgatgtacggcttccagcgggattaactgcaccatctggaggccacgcgtccacctgggtgkgttaggaaccccaacccttcggtgtaaacggcagggggagactcagtggatgg

SEQ ID NO: 541032 - DNA, 199 bp, Homo sapiens
tctctgagccccgggaaggtatcaagcctggtgcctgcgtgaaggctcagcgaggtgagacctgggtcctgttcaggtgggtctgctggcagygcccgaggtgctgggcaggtgcctcctttatcaccagggagagtgaaatagggcccgaggtacgtagttgctgtgacctgagcagagaaatgtgcaaactgtaaag

SEQ ID NO: 541033 - DNA, 559 bp, Homo sapiens
gctgtgtgaccttgggcagaggacgctgcctctctgggtctctgagccccgggaaggtatcaagcctggtgcctgcgtgaaggctcagcgaggtgagacctgggtcctgttcaggtgggtctgctggcagcgcccgaggtgctgggcaggtgcctcctttatcaccagggagagtgaaatagggcccgaggtacgtagttgctgtgacctgagcagagaaatgtgcaaactgtaaagtgctgaggacaacaggttgcttattttaagtgatattcacaaagatcaattcaggttcgtgccagatgggggaagagggagggaggtgcgttgagaagaaatctctgaagacccaggttggaggggcagagacagcctggggaaggagcagggctgtgctggccccctcccaggccgcatggaggtcccaccagagccaggctggacccctgggagtcccagaaagccatgagcatcagggtgggccctgcagaaggtttgccttggagacgtgggctccaggaaccccstcagccccagaatcccctcacaatgcccccac

SEQ ID NO: 541034 - DNA, 548 bp, Homo sapiens
ctggctcggacctgtccacctcacttggcctcattttaagggcctctgaaatctgccacaagtgtccccagtcaaggaggctgacttcctccctggaccaggacattgggtcattcctgactcaagaggagagtcctctgcttttrtatctacccatggagatgcagctcagtctcactttgttcatgaagccttttctgatcattcattccatccgtccgtccatccatctgtccatctgtccatctatgcatctgtccatctattcatctgtctttgcatccatctatcatctgtccattcgtccatccatctacctgtccgtccatccataaatccatcctgtctaccaggcactgtgtgctggggacatggtgtggtcccccaggctctcacccccatctctcccaggccatggtcaacaaggccctcctcatggtcatgtccaaggtccttctgctgtacctggtgtctccgctggatgcgacacagggctggcccctctttccagtgactcttttccccttggggtctgagactcccctttc

SEQ ID NO: 541035 - DNA, 635 bp, Homo sapiens
cagctggctcggacctgtccacctcacttggcctcattttaagggcctctgaaatctgccacaagtgtccccagtcaaggaggctgacttcctccctggaccaggacattgggtcattcctgactcaagaggagagtcctctgcttttatatctacccatggagatgcagctcagtctcactttgttcatgaagccttttctgatcattcattccatccgtccgtccatccatctgtccatctgtccatctatgcatctgtccatctattcatctgtctttgcatccatctatcatctgtccattcgtccatccatctacctgtccgtccatccataaatccatcctgtctaccaggcactgtgtgctggggacatggtgtggtcccccaggctctcacccccatctctcccakgccatggtcaacaaggccctcctcatggtcatgtccaaggtccttctgctgtacctggtgtctccgctggatgcgacacagggctggcccctctttccagtgactcttttccccttggggtctgagactcccctttcctcttcccctggcatctgtttctccatggcccatgcctggctgctgactccccagaccccacccagacctctttcttagccatt

SEQ ID NO: 541036 - DNA, 548 bp, Homo sapiens
ctggctcggacctgtccacctcacttggcctcattttaagggcctctgaaatctgccacaagtgtccccagtcaaggaggctgacttcctccctggaccaggacattgggtcattcctgactcaagaggagagtcctctgcttttatatctacccatggagatgcagctcagtctcactttgttcatgaagccttttctgatcattcattccatccgtccgtccatccatctgtccatctgtccatctatgcatctgtccatctattcatctgtctttgcatccatctatcatctgtccattcgtccatccatctacctgtccgtccatccataaatccatcctgtctaccaggcactgtgtgctggggacatggtgtggtcccccaggctctcacccccatctctcccaggycatggtcaacaaggccctcctcatggtcatgtccaaggtccttctgctgtacctggtgtctccgctggatgcgacacagggctggcccctctttccagtgactcttttccccttggggtctgagactcccctttc

SEQ ID NO: 541037 - DNA, 548 bp, Homo sapiens
ctggctcggacctgtccacctcacttggcctcattttaagggcctctgaaatctgccacaagtgtccccagtcaaggaggctgacttcctccctggaccaggacattgggtcattcctgactcaagaggagagtcctctgcttttatatctacccatggagatgcagctcagtctcactttgttcatgaagccttttctgatcattcattccatccgtccgtccatccatctgtccatctgtccatctatgcatctgtccatctattcatctgtctttgcatccatctatcatctgtccattcgtccatccatctacctgtccgtccatccataaatccatcctgtctaccaggcactgtgtgctggggacatggtgtggtcccccaggctctcacccccatctctcccaggccatggycaacaaggccctcctcatggtcatgtccaaggtccttctgctgtacctggtgtctccgctggatgcgacacagggctggcccctctttccagtgactcttttccccttggggtctgagactcccctttc

SEQ ID NO: 541038 - DNA, 571 bp, Homo sapiens
ctgtggaggcgcaggccactccatctggtgcccaacgtggatgcttttctctagggtgaagggactctcgagtgtggtcattgaggacaagtcaacgagagattcccgagtacgtctacagtgagccttgtggtaagcttgggcgctyggaagaagccagggttaatggggcaaactaaaagtaaagtctctcattccacctgatgagaaacacccagaggtgtggaggggcaggccaccccttcagggtagggtcccctccatgcagaccatagagcacaggtgtgccccaaagaggagcagagagaaggagggagagggcccacgagagacttggaaatgaatggcaggattttaggcgctggacttgggttcggggcacctggcctttccttgtgtatttctcctactgtctgcctaactatttaatacaataaaagaaaaccagcccctggttcttgtggtgtttccaccctcccgggtccccgctggctgcctggcttcctcccgcagctcctgctgtgtgtgtatgtgtgtgtgtgtgcacatctgtggggcgtatgtgtgttcg

SEQ ID NO: 541039 - DNA, 642 bp, Homo sapiens
gcgcggatttagaatgctttcctgctcttcgagaacttgaggttttaattttamtttttacttttttttttttgacacggagccttgctctgtcgcccaggttggagtgcagtggcgatctcggctcactgcaacctccacctcccggattcaagcaattctcctgcctcagcctcctgagtagctgggactacaggctcgtgccaccacacctggctaatttttgtatttttagtagagacggggtttcaccatgttggccaaactggtctccaactcctgagctcatgatcctcctacctcagcctcccaaagtgctgggattacaagcatgagccatcgcgcccggctgagcttgaggtttttatggtcttttctgggtgactttgcagtggtcatattattactcctaggtgggggaaggtagggactgtccctcatcactgctgtgcctgcagaggactcctgacaccgggattgtcggcagggtgcaaccaagagcaaaagcacccagaagtgggggtgtgggtcaccaagtaagagaggaggcccctccataaggaaggagcaggtcaaggggcaaggggagtggtggctggggcgtttggccctgcctggcatgctcaattctgtgtgtgcaca

SEQ ID NO: 541040 - DNA, 544 bp, Homo sapiens
gctgctcggtgctggtgaacacctcttgcaggctggtgaacctcaccgcccacctgaggcagaaagcagggttgcccccagatggtgaggagacagggaggagaaggaggggctgaggggtcccaggcaggggtgccagccctgcccagtctctctccatgtcctcccagcgaccattgctctcctggctgaggatggcaacctagtgagcctggaggaggacctgaaggaaggggcttcccgggcccagaccatgggcaactccctactgaaggagcgagccatatatgtcctcgttcggatcatcagtaaggtggcccaaggttctctcccctgcagctatggtagaatgtaagaggggggcatagcagaccatagaccacccaaggccctgtccrgcctcccacctcggctggggacctagccccaatccatccctacccaatgctctgctcccagcctggactagcaaacagttccagagtgagaggcagagtagggaccattaggccagtcaggtgtccttcatcgtctctccacatgt

SEQ ID NO: 541041 - DNA, 455 bp, Homo sapiens
ctgttgcccttttacactgtggagatgcttaggtggtggcaaatcccttcataaaacacctaaaaatggcccctatgctttttggcctttttttttttttttttttttttgagattgagtctcactcttgtcgcccaggctggagtgcagtggcgcaatctcggctcactacaacctctgcctcccaggttcaagtgattctcctgcctcagtctcccaagtagctgggtctacagatgtgcgccaccatgcccagctaatttttttatttttagtagagacggggtttcaccgtgctggccaggctggtctcgaactcctgaccttttgatcygcccacctcagcctcccaaagtgctaggattacaggcgtgagccatcgcacccagcctgctttttggcccttttagttgccttggccagtgatctctgggaggccaatataataatcaagg

SEQ ID NO: 541042 - DNA, 642 bp, Homo sapiens
attatgccgaacaaacatttaaaaaaatggaaaactgtttgagacataaacagttgtgcgatgtaattttagttgctggtgatggcagaattccagctcacagattggtgctctcctctggctcagactattttgctgccatgtttactaatgatgtcagagaagcaagayaagaagacataaaaatggaaggtgtagaaccaaattcatcgtggtccttgatccaatatgcttatacaacccgccttgaattaaaagaagataatactgagtgcctgctatctacagcttgccttcttcagctttcacaggctgtagaagcatgttgtaaatttttgtttgtttgtttgttttgagacagagtttcgctctgccgcccagtgtagatctcagctcactgcaacctccgcctcccaggttcaagcaattctcctacttcagcctcacgagtagctgggattataggcgcctgccaccacgaccaggtacttttttgtatttttagtagagacggggtttcaccatgttagccaggctggtcttgaactcctgacctcaggtgatccgcctgccctggcctcccaaagtgctgggattacagacgtgagccagggcaccaggccacatgtcataagtttttaa

SEQ ID NO: 541043 - DNA, 642 bp, Homo sapiens
attatgccgaacaaacatttaaaaaaatggaaaactgtttgagacataaacagttgtgcgatgtaattttagttgctggtgatggcagaattccagctcacagattggtgctctcctctggctcagactattttgctgccatgtttactaatgatgtcagagaagcaagacaagaagacataaaaatggaaggtgtagaaccaaattcatcgtggtccttgatccaatatgcttatacaaccygccttgaattaaaagaagataatactgagtgcctgctatctacagcttgccttcttcagctttcacaggctgtagaagcatgttgtaaatttttgtttgtttgtttgttttgagacagagtttcgctctgccgcccagtgtagatctcagctcactgcaacctccgcctcccaggttcaagcaattctcctacttcagcctcacgagtagctgggattataggcgcctgccaccacgaccaggtacttttttgtatttttagtagagacggggtttcaccatgttagccaggctggtcttgaactcctgacctcaggtgatccgcctgccctggcctcccaaagtgctgggattacagacgtgagccagggcaccaggccacatgtcataagtttttaa

SEQ ID NO: 541044 - DNA, 642 bp, Homo sapiens
attatgccgaacaaacatttaaaaaaatggaaaactgtttgagacataaacagttgtgcgatgtaattttagttgctggtgatggcagaattccagctcacagattggtgctctcctctggctcagactattttgctgccatgtttactaatgatgtcagagaagcaagacaagaagacataaaaatggaaggtgtagaaccaaattcatcgtggtccttgatccaatatgcttatacaacccgccttgaattaaaagaagataatactgagtgcctgctatctacagcttgccttcttcagctttcacaggctgtagaagcatgttgtaartttttgtttgtttgtttgttttgagacagagtttcgctctgccgcccagtgtagatctcagctcactgcaacctccgcctcccaggttcaagcaattctcctacttcagcctcacgagtagctgggattataggcgcctgccaccacgaccaggtacttttttgtatttttagtagagacggggtttcaccatgttagccaggctggtcttgaactcctgacctcaggtgatccgcctgccctggcctcccaaagtgctgggattacagacgtgagccagggcaccaggccacatgtcataagtttttaa

SEQ ID NO: 541045 - DNA, 497 bp, Homo sapiens
ttccattctatggcgtacgaagggatgaggagaagttggcactctgccctgggctgcagactcgggatctaaggcgctctgcccgccggaatccgttgtacctagggccaccacgtggggtgctggaggtgagccgaccacggaagagggggaggaggagttggagttgggaggagtccgaggtcttctaggcctagacctttctctcagccccaccttccccagccttcttgttgggcagagggtagccagaggacagaaagakcccacccagagccactcactgccatccactttgttaggtgacttcaggagagttttcaggcgggtgggtgggggaggtgcagagttcttggtcataccgccccgtccacccccgaaccccacgccttgggttctgctcccctcagacacccaccaagcctccgccacagcagttccctgaggaaattgggcgtggggtttccattgggaccgttcgtgttctgtggtgccac

SEQ ID NO: 541046 - DNA, 594 bp, Homo sapiens
ccctaactccttcccaaacatagctacatcccttccactgttatataaccctccaattttggccggtcagggagatggattcaagacttatctcccattctccttggctgcagcacctgaataaagcccttcctcccggcagtgattggctgtgcagcatgcaatgggacccagacaaaacccctggtgtttcagtaacacattcagactrtggaacagattaaccccggctccctagaatttgttttctgaagaacaaacaaacaaggcaataatgtcttatgaaaagacatcagtaaccttaagcctgtaaaccccatccatctgtagggcaccccatctcacagcaaagcatgggtgacagctgtgtgctgagaagagtcggaaaaggagccatgcttccaagaatgtctccctcataacatgatgagatgagtccttagtgaattgccaaccaaaacaaaaaacacagctgctaaaaaagaaggttcctcctttggaatccttgtactaccatatcaaaatattgagaaggagcatctcttgtattgacagtaaggatgctgatgactattagtgaataaaaagccagaa

SEQ ID NO: 541047 - DNA, 594 bp, Homo sapiens
ccctaactccttcccaaacatagctacatcccttccactgttatataaccctccaattttggccggtcagggagatggattcaagacttatctcccattctccttggctgcagcacctgaataaagcccttcctcccggcagtgattggctgtgcagcatgcaatgggacccagacaaaacccctggtgtttcagtaacacattcagactatggaacagattaaccccggctccctagaatttgttttctgaagaacaaacaaacaaggcaataatgtcttatgaaaakacatcagtaaccttaagcctgtaaaccccatccatctgtagggcaccccatctcacagcaaagcatgggtgacagctgtgtgctgagaagagtcggaaaaggagccatgcttccaagaatgtctccctcataacatgatgagatgagtccttagtgaattgccaaccaaaacaaaaaacacagctgctaaaaaagaaggttcctcctttggaatccttgtactaccatatcaaaatattgagaaggagcatctcttgtattgacagtaaggatgctgatgactattagtgaataaaaagccagaa

SEQ ID NO: 541048 - DNA, 377 bp, Homo sapiens
acaactgtggtggaggccccaggattggaatgggaagaaaggcgtgttctatttaagcccccttaaatccagcagaggctttgagctttgagtcctcaagtaaccacataaagtctgaggctttggggatgcctggtgtgtgcgcgggggcttcacrgggaccacactggcttctggccttggcagttccccacagagctttggagccacgagctgatccttacagtcttagggttggcttttaactagtggcccaggccggaggttccatcttgctggtataaagtaaggtccatgtggggatatgacctttggcaactcagggcagtgctttggggatggtcacagctcagagccgtgttctctgactcctgcac

SEQ ID NO: 541049 - DNA, 586 bp, Homo sapiens
ccccgtctctactaaaaatacaaaaattagctgggtgcggtggcacactcgggaggctgagacaggagaatcacttgaaccttggaggcagaggtttcagtgagctgagatcataccactgcactccagccgggccactgagcgagactgtctcaaaacaaacaaacgaacaaacaaaaagaagagaaactcatcagacgaagacacaggaaaaaaatgagygaaggaaatcagcagaggtttcattgaaggacaaagagaaatggtcaatacatggatgaaaacatgtttaacttcagtaataatcaaggaagcacacaccaacacaacatgcacatactgtttttatttatcaaaggcacacatatttttgaaatgagtactcctaattaatatgtacagagcacttacccagtgcccagcacaggggtggcaccctgtgtgtgagacagcatgaaacaggtagacacgcgccctgctgaaagtaagggaccgcctctctggaggatccatcgggcaataaggaggtttccacaccttaactgtgtctgccttgacctctggggcctgggagcagagccccctc

SEQ ID NO: 541050 - DNA, 586 bp, Homo sapiens
ccccgtctctactaaaaatacaaaaattagctgggtgcggtggcacactcgggaggctgagacaggagaatcacttgaaccttggaggcagaggtttcagtgagctgagatcataccactgcactccagccgggccactgagcgagactgtctcaaaacaaacaaacgaacaaacaaaaagaagagaaactcatcagacgaagacacaggaaaaaaatgagcgaaggaaatcagcagaggtttcattgaaggacaaagagaaatggtcaatacatggatgaaaacatgtttaacttcagtaataatcaaggaagcacacaccaacacaacatgcacatactgtttttatttatcaaaggcacacatatttttgaaatgagtactcctaattaatatgtacagagcacttacccagtgcccagcacaggggtggcaccctgtgtgtgagacagcatgaaacaggtagacacgcgccctgctgaaagtaagggaccrcctctctggaggatccatcgggcaataaggaggtttccacaccttaactgtgtctgccttgacctctggggcctgggagcagagccccctc

SEQ ID NO: 541051 - DNA, 413 bp, Homo sapiens
tgctgggcaggaaaaggacaagaggtcaggtggctgcagaggtgatggctgggggcctgtcagacgggggccaaagacattcctcccctcgtgatccctgacccaagcgcgtggacatgcaagggactccacggagcatccactgtgtgccagccccatgcagggttccaggggtccagggagcctattctgagctgcaccgcctcggacaagtcacttgaccattctgaccttgagttttctcttgtgctaaaaggctaacaggagtstctacctcacagggcggctgctggcatatcacagagatgaggttctcaaaatgcaaagcagaaggtccagccaagagtcggtgcccaaggcaacaaagacaggaggagactcgtaggaggagggggtggtgttggggagctgga

SEQ ID NO: 541052 - DNA, 559 bp, Homo sapiens
atctgctgcttgcttttttctgcctttgtgattttttttcctgattataaaagtgtgtgtgtgtgtgtgtgtgtgtgtgtgtgtgtgtgtgtgtgtgtgttttaaagagattcaaacaactcagaagtgtacagtgtgaatgtgaaggcccctagtgattccagtatgcccctccataatccctaagagtttgctatgtccctgtatgtccgaattttttcctattaacatataaacatatagtaacattttcttatgattttgcagcttgycttttcgctggacaaaatttaatggaaggtgtggtgagcttccctgcctgccctagtgccctgtagtttagcagggcgtttgtttatctgcacggacccttgataggtttggtttcctctccacttcttgctatgacaaggcacaggcagtgcatgtctttgtacttgaagcagggagcacatcatgagtatttccaaggactagagtccaaaggtggaattgccaggttgtttagcattctgatcaacaatggctacttgccccaaggtcgtactgactgatgaga

SEQ ID NO: 541053 - DNA, 557 bp, Homo sapiens
tgaaacttcctcccctgttatctttgggatcagcaactggccagggttgggaagaggagggaagaggaggctgcactccagggccacctgccctgccaggtctctgtactcttgtctgctggatagatattgaacacttcccaggatataaagcagtttcacctcttttagcagttctgattggtggaagttgccgggaaccatgtgttcacaaggatttggggagctcagcaggcataagtcctgtgattgattagtgatgtctgtcacaggcatagaattcaaagtagagacacatgtactggttatttgtcatcttctaattttctataggccatactcttttttgtttttgttttttgagatggagtctcactctgttgcccaggctggagtgcagtggcacaatcttggctcactgccaactccacctcctgggttcaagcaattgtcctgcctcagcctcctgagtagctgggattacaggtgcccatcaccacacccagctaatarttttgtatttttagtagagatggtgtttcacaatgttggcaagg

SEQ ID NO: 541054 - DNA, 598 bp, Homo sapiens
tggtattgaactgggaccagggcatggggacagggatcttgcatgggtgtggggctgctgttgtgtttggctgcatctacttgtgggcctggaacctggtttttttgtgggtgtcgaagcaggaagtcactgaacctagtttgtgcctagaaagctccctgatggctgagtggaggatacacttaggggtgagagtgggctcacggggctatcaggaggctgctgccatgccaggggagcagtggctgagatccagtggtaatagtggggtgctggtttgtggttgcagagctgataggttgaactagacatgggatgtgtgagggaatgagagtcatggggagggcttctcgggttgtttactgagtcacaggaagccttgccaggagaagctggaggaaagggaaacatttggtttgtttgagttggcaaggactgtgactgaggcttttgttgttgttgtttgagacagggtcttgctctgttgcctaggctggagtgcagtggtgcagtcacggctcrctgcagcttcaacctcctgggctcgggtagtcctcccacctcagcctccaaagtagctggaaccacagccgtacac

SEQ ID NO: 541055 - DNA, 422 bp, Homo sapiens
tgctgggcaggaaaaggacaagaggtcaggtggctgcagaagtgatggctgggggcctgtcagacgggggccaaagacattcctcccctcgtgatccctgacccaagcgcgtggacatgcaagggactccacggagcatccactgtgtgccagccccatgcagggttccaggggtccagggagcctattctgagctgcaccgcctcggacaagtcacttgaccattctgaccttgagttttctcttgtgctaaaaggctaacaggagtctctacctcacagggcggctgctggcatatcacagagatgagrttctcaaaatgcaaagcagaaggtccagccaagagtcggtgcccaaggcaacaaagacaggaggagactcgtaggaggagggggtggtgttggggagctggagatggaggg

SEQ ID NO: 541056 - DNA, 615 bp, Homo sapiens
gccctccacactgctctgtctatggagtagccattcttttattcctttactgtcttaatcaacttactatggacttgccctgaattctttcttgctggagatccaagaaccttctttggggtctggattgggacctctttctggtaatgcaagaggaatacgtaatttactcttcccctacctgctcctttgtgctttctttctctctctctctctctctctctctctctctmtatatatatatatatatatatatggctgtttgtaagaaagagcgcccaactgaaatcagccagaagcccctctcaggtttattctctagaataaacctgtctttaactgttgagccacttttcatgtttccttcctctttctttaactgttatagtcattatctgtagatactcgagaaactgttagaaataggtgaattgagctatatatatagagagagagagagaaagaaggagagagagagagggagagagagagagagacactgggtcttgctctgtcacccagggtggagtacagtggggcaatcatggctcacagtagcctggacctcctgggctcaatcgatccttgtgcttcagcctgctgagtagcagggac

SEQ ID NO: 541057 - DNA, 538 bp, Homo sapiens
gtgcccagctgggcattaatgaggatcattctgagggtgatgaaaaatctgagaaggaaactattatggctcaccagccgactgatgtggagtccactttattgcagttgcaggaacagaatactgccatccgtgaagaactcaaccagctgaaaaatgaaaacagaatgttaaaggacaggttgaatgcattgggcttttccctagagcagaggttagacaattctgaaaaactgtttggctatcagtccctgagcccagaaatcacccctgrtaaccagagcgatggaggaggaactctgacttcttcagtggaaggctctgcccctggctcagtggaggatctcttgagtcaggatgaaaatacactaatggaccatcagcacagtaactccatggacaatttagacagtgagtgcagtgaggtctaccagcccctcacatcgagcgatgatgcgctggatgcaccatcctcctcagagtcggaaggcatccccagcatagagcgctcccggaaggggagcagcgggaatgccag

SEQ ID NO: 541058 - DNA, 679 bp, Homo sapiens
tctccataccaattggtagcagtctttcttattttttgttgctgtttaatacctcattgtattcactaaagtgtacttcatatgctttcctgtgtatatataggcatttaaggcgtaccagtattttgcaataaaaaacaatgctgcagtgaataattagccatgtgcrtatgtatttttgtattattggaggtgtatcttcaggttaaattcctagaagtgaagttgctggagagaaggtaaatacatgtgtaactttgttagatattgcatgattcctttcataaggcttatgtcaaggtgcatcccatcagcaactaaggagagtgcctgtttccccatattctttccaaaagagcatgtttaccaatctgttaagtgacaagtgctgcttaatttgcatttctctcattatgagttaggttgatcatcattttctctgtgtgtgtgtgtgtttgtaaactgattgtgtgattcattcattttgttcatttttctgtctttttttttggtctttttcccctcaattttaaagcattctgtgttagggaccttaaccatttgtttgtgagatattgcaaatatactttcccagttttttatgttttaaaattctatttatgatggttttttggttgtacaaaacattttaactttttttaattaaaaggatttttta

SEQ ID NO: 541059 - DNA, 587 bp, Homo sapiens
ctggcaaggcagatgaaggcagagcctccagctcactgtgagggcccccataggaagcccccagagtgtgactttctgttttccttaggctgtgggtagaagygacacctctcagaagggtgacatttagacatttccccaggggcaaagggaagcagcataagggggccatttgcagcaatttgctgggccttcaggcctgagatgagagacaggccttttgggcctcagcatttggcagacactggggaggatggcatggactccgtgtcctgggcctgcctcaaggtgcctgaccctctgtggagcccacagtgcatctacacaagctcacagatgtgtttctttgttcctttaaagctcaccaggactttggctacttttatggctcgagctatgtggcagcccctgacagcagccggactcctgggctgtcccgtagccgggatggactgctagttgctaagctcgacctaaacctctgccagcaggtgaatgatgtctggaacttcaaggtaggtccccaggacccctgttgttgcctgctcctctgctttggccctcatcctgctctcaggaactgctgt

SEQ ID NO: 541060 - DNA, 474 bp, Homo sapiens
tcaatattagtttttcctcctgtatggtaatatctgttgtttttggaatcttcagaaaaaaaaaatctcaagaactcagtctaaaatgtttttgctatagagtgcataatgactatttctcacagtgtctcgacgaagtagtgaagaartgaaacgggacatttctgcacaggagggagcgtcgccagcctctctgatggctatgggaaccacgtctccacagctttccctgtcctcttctccaacggcatctgtgactcccaccacccgaagccgaataaggtagagaacagttaatattcatgcatttcgtgtgtacctttcctggccttttgacagtaaatgatcaagttgtaaaatgatggcatttgagcactgtgatttttctttttctgtgtgttgtttgcgaatctttcttatatccagaattgagtaaatggtatagaagacactgacaaattaaaaatgatagtt

SEQ ID NO: 541061 - DNA, 634 bp, Homo sapiens
gcttcagggaccacctgaagagccgtctcttccatgaagatggagggagactttgctgaaatcctcttttccccttcctgagcgcctttagatgcatgcctgtcccacgcaccagaagtttgttacctgcttctgatgacatctcttctgctgctaagttatgacttaacgcctgaataatgtgctggttttcaccagtgtatgttctattttcctaccaagactataaattygaatcccagagagaggagtggggatggtatctcctccatcctagggcgaagcatagcaacacttggtaaggcacactgactgggtcgagagacctgggttttagttctctgctgccattaactggtcatgtgactttgggtttccttccctgcaaaatgatgaagcagtggatacatatcgcttccagctctggtattctctgagtctatttgactgtgggctgacccacccagctctaggcctggctagggaaggagcaagggaggctatggacaagcccagggagagagagagggagagggagatggggagctaatagctctggaggaaggaaggacatgctgggctaatgggataattggataatcctcagagctaggggctgccaggctggggccag

SEQ ID NO: 541062 - DNA, 535 bp, Homo sapiens
tatcttttggatttttttaaaggtctaacagatgaaataygtaaagattatagcattgtgaaagaattggctaaacatacaagattgagtccaagaagaaggcatcatacattaaaagaattcatcaatactctacaagagtaagtgctgcttttctggctgagtgtgtgtacatgtgcatggtgtcccagtgaagctgatggcatctcagccctggcatgtcagattcttctacaagcaagtgacaatgggaagaattttgatgttgggggacaactctagtttttctgtcattgcaagattaggaggccgggggggaagaatgaaatcaaaaggctataagtacctatatgaacatgaaagcaaaaacaagatttctgagtttcagggaaggtactgccgcatctcaatgctgcggacaagtgatggtgaaccttggaatagaaggaaattgccttgcacaaatggctagctgcttttacttatttggtttgatcatgttggcaatattttaattttcagtaataaaaaagta

SEQ ID NO: 541063 - DNA, 535 bp, Homo sapiens
tatcttttggatttttttaaaggtctaacagatgaaatatgtaaagattatagcattrtgaaagaattggctaaacatacaagattgagtccaagaagaaggcatcatacattaaaagaattcatcaatactctacaagagtaagtgctgcttttctggctgagtgtgtgtacatgtgcatggtgtcccagtgaagctgatggcatctcagccctggcatgtcagattcttctacaagcaagtgacaatgggaagaattttgatgttgggggacaactctagtttttctgtcattgcaagattaggaggccgggggggaagaatgaaatcaaaaggctataagtacctatatgaacatgaaagcaaaaacaagatttctgagtttcagggaaggtactgccgcatctcaatgctgcggacaagtgatggtgaaccttggaatagaaggaaattgccttgcacaaatggctagctgcttttacttatttggtttgatcatgttggcaatattttaattttcagtaataaaaaagta

SEQ ID NO: 541064 - DNA, 326 bp, Homo sapiens
gtcccattctcaagctcttagttccttcactcactccgcgtgagtcrgtagctgctttctgaatctgctactcatgaacgttgtacagtcctgctttatccttttcatgagctcaccactctttatagtttaacaactctgaaaaaatccctgttcaaattactggtgtggtttgcctcctgagtctaccctggttgacacaatatctcagcatcaaaagatggcatggaaatgaaggtcatctccgaactgctactatgatagaccttcaatcaaatgaagtcaaatgaagccttcaggcattcatcttgcagaatgcaaacagt

SEQ ID NO: 541065 - DNA, 574 bp, Homo sapiens
aaagaaaagacttcaggacattctttcctttaccctaatccttgatcttcagtcttatttagaaaagcttaatgttaaagatctagtttattcaaaactaaagataaggagtatgagaatttctatttcggagtgtaaaggaggagatgtttccttggcttctctgagcctacaggccttccttgctcyttaaggaagtagagagagagaggaaagtaaagtatgcttttgttttttaaggttactttgctgggagtagtttgcatgccatttggttttcttgggtggaattaactgacttaagttttaagtagttgggactatttagaaacaatgcctatccaatgtttgccataaaggcagagggtattggctttagaagttaattcttctccaggagtgaaaatgagctgctaaaccagaagcagcagagctaaagaaagtaattttccacctggccagtgcatgatgtgaaaggtagactaaaagaatgagaggacccattttctgatgaaagactaagccatgttgaaacagccctgttgaggattttattttaaatctatacattcac

SEQ ID NO: 541066 - DNA, 574 bp, Homo sapiens
aaagaaaagacttcaggacattctttcctttaccctaatccttgatcttcagtcttatttagaaaagcttaatgttaaagatctagtttattcaaaactaaagataaggagtatgagaatttctatttcggagtgtaaaggaggagatgtttccttggcttctctgagcctacaggccttccttgctctttaaggaagtagagagagagaggaaagtaaagtatgcttttgttttttaaggttactttgctgggagtagtttgcatgccatttggttttcttgggtggaattaactgacttaagttttaagtagttgggactrtttagaaacaatgcctatccaatgtttgccataaaggcagagggtattggctttagaagttaattcttctccaggagtgaaaatgagctgctaaaccagaagcagcagagctaaagaaagtaattttccacctggccagtgcatgatgtgaaaggtagactaaaagaatgagaggacccattttctgatgaaagactaagccatgttgaaacagccctgttgaggattttattttaaatctatacattcac

SEQ ID NO: 541067 - DNA, 574 bp, Homo sapiens
aaagaaaagacttcaggacattctttcctttaccctaatccttgatcttcagtcttatttagaaaagcttaatgttaaagatctagtttattcaaaactaaagataaggagtatgagaatttctatttcggagtgtaaaggaggagatgtttccttggcttctctgagcctacaggccttccttgctctttaaggaagtagagagagagaggaaagtaaagtatgcttttgttttttaaggttactttgctgggagtagtttgcatgccatttggttttcttgggtggaattaactgacttaagttttaagtagttgggactatttagaaacaatgcctatccaatgtttgccataaaggcagagggtattggctttagaagttaattcttctccaggastgaaaatgagctgctaaaccagaagcagcagagctaaagaaagtaattttccacctggccagtgcatgatgtgaaaggtagactaaaagaatgagaggacccattttctgatgaaagactaagccatgttgaaacagccctgttgaggattttattttaaatctatacattcac

SEQ ID NO: 541068 - DNA, 497 bp, Homo sapiens
caattgggtttccaactyccattgctgatgatcaagttaaaatacgaatgtgctggattaaatgctttattcagcttatctgcatctaggttatctaaattacacacccacttaaaacattctgtcacctcttctcttggaataattaattattttaatgtaattcagatctcattttatcctagcccagcagtacctgggagagaatgactcaatcatagtaaaatcatattaaattatattccactgattcagaattggagataatctggcaattaaagtgagaagtgtgtcattcctctcctggaagaaatgaacagtaatgatgggatcacagagatcatacatataagggcccaatacaggttcaaaacatgcccatcggcaactgccttacatacctggctcccaaccatactgttacaatttctatctttcaaactcactgtaaattacaaatgtggtacccaaatacctgtatgcacataaatatgaaa

SEQ ID NO: 541069 - DNA, 497 bp, Homo sapiens
caattgggtttccaacttccattgctgatgatcaagttaaaataygaatgtgctggattaaatgctttattcagcttatctgcatctaggttatctaaattacacacccacttaaaacattctgtcacctcttctcttggaataattaattattttaatgtaattcagatctcattttatcctagcccagcagtacctgggagagaatgactcaatcatagtaaaatcatattaaattatattccactgattcagaattggagataatctggcaattaaagtgagaagtgtgtcattcctctcctggaagaaatgaacagtaatgatgggatcacagagatcatacatataagggcccaatacaggttcaaaacatgcccatcggcaactgccttacatacctggctcccaaccatactgttacaatttctatctttcaaactcactgtaaattacaaatgtggtacccaaatacctgtatgcacataaatatgaaa

SEQ ID NO: 541070 - DNA, 497 bp, Homo sapiens
caattgggtttccaacttccattgctgatgatcaagttaaaatacgaatgtgctggattaaatgctttattcagcttatctgcatctaggttatctaaattacacacccacttaaaacattctgtcacctcttctcttggaataattaattattttaatgtaattcagatctcattttatcctagcccagcagtacctgggagagaatgactcaatcatagtaaaatcatattaaattatattccactgattcagaattggagataatctggcaattaaagtgagaagtgtgtcattcctctcctggaagaaatgaacagtaatgatgggatcacagagatcatacatataagggcccaatacaggttcaaaacatgcccaycggcaactgccttacatacctggctcccaaccatactgttacaatttctatctttcaaactcactgtaaattacaaatgtggtacccaaatacctgtatgcacataaatatgaaa

SEQ ID NO: 541071 - DNA, 609 bp, Homo sapiens
ctgcttctttctttctgtgtctttctttggcctttccttggtatttgtccttccctagtgtctcttcttcctataaagacatcactcatagtggattaggaccccaccattaggttctggtttaaccttaattacttctttaaaggtgctatttccaaatgcagtcatattgagtgttagggcttcaacatataaattggttgggggcagagaggtgcacttcagctcttaacaatgacttttgaagctaggttataacagattgcacgacctccaattttaatgctggaaaatttaatttcatagccttgagttgtcatttaaaatattaaagtaccttgagactacatgctgtgaaaaaacaaaagttgtctgtggggggcaatgcagagagcagccattccatgttttaaatgagacttgaagtatacatacagatacatagataggttccatggatgtgaatatgttgcatcatcaagttattgactttttactttctaccccttgggactatagttgcagtgtctggatcagagaataatgtaatattgaatttgaaagtgaatgtaygaagaaatgaacatgtgaatgctggaatgtcccaag

SEQ ID NO: 541072 - DNA, 602 bp, Homo sapiens
agtatttcttatcacatctatawttatatgcttatttgtctgatgaatacataaggcattaactattcaactattatcagatttttcaagaactatgacaattagcatttaatgaatgattacatgtataatggcttaatgcatcatttgctttaatcctcacaatgacacacctaggatctgcagagctagaattggaactgaaacagtgtcagtctggaaatcacaattctgtatttctgaaaaactttcttttttgtgaagacatttgtttacatcactgggaagctattagtagggcattagaaggaaacagattttttttcagtataaaatatgtttcatgtcactcatgtataaagtgacggtagcatccttaaatccccaggttctgagtacacagttcctaagctgataattgtctgctttagttgaatatttctcgcgtttttaaaatctcatacatagagaatagatctgttcattcttcatgagagtaatagcttgtgtctagtttgctttgtgtcactatctttatcttttactctgtttatgacaccttctttgtgcctttttgccagagaagcttcttgttcttctgc

SEQ ID NO: 541073 - DNA, 602 bp, Homo sapiens
agtatttcttatcacatctataattatatgcttatttgtctgatgaatacataaggcattaactattcaactattatcagatttttcaagaactatgacaattagcatttaatgaatgattacatgtataatggcttaatgcatcatttgctttaatcctcacaatgacacacctaggatctgcagagctagaattggaactgaaacagtgtcagtctggaaatcacaattctgtatttctgaaaaactttcttttttgtgaagacatttgtttacatcactgggaagctattagtagggcattagaaggaaacagaktttttttcagtataaaatatgtttcatgtcactcatgtataaagtgacggtagcatccttaaatccccaggttctgagtacacagttcctaagctgataattgtctgctttagttgaatatttctcgcgtttttaaaatctcatacatagagaatagatctgttcattcttcatgagagtaatagcttgtgtctagtttgctttgtgtcactatctttatcttttactctgtttatgacaccttctttgtgcctttttgccagagaagcttcttgttcttctgc

SEQ ID NO: 541074 - DNA, 538 bp, Homo sapiens
ttctcatcctgttacttgctgtaattcttactttytaaaaatcttttagatgttctttttcattttaaatgttctttttccataattgccatcttatgttttttcatcctattcttgtattattaggtatccatctatctttttaattctatcgcagatgaattatttgaaacccttcccacttactctgtactacagttaaagagttgggcacagtctattctgtatcttgagaggagggtaagtaaggaagaacccagaaagtatttaacagctcatttccttgaattattgtttcgccccaaaacagtagatctctttttatttagaatggagtttccagagagtaatttctttcggatgagtagtgtcttacatggaagacttgagctcagctctctgttaagaaattttgtggcctgactgtttttagggcccaaatatcctctgtttcagcccttagaaaaatgatttaaaagcattgaggtttaaattggaattagattttacatttcataacatttcctttatgtggttg

SEQ ID NO: 541075 - DNA, 538 bp, Homo sapiens
ttctcatcctgttacttgctgtaattcttactttctaaaaatcttttagatgttctttttcattttaaatgttctttttccataattgccatcttatgttttttcatcctattcttgtattattaggtatccatctatctttttaattctatygcagatgaattatttgaaacccttcccacttactctgtactacagttaaagagttgggcacagtctattctgtatcttgagaggagggtaagtaaggaagaacccagaaagtatttaacagctcatttccttgaattattgtttcgccccaaaacagtagatctctttttatttagaatggagtttccagagagtaatttctttcggatgagtagtgtcttacatggaagacttgagctcagctctctgttaagaaattttgtggcctgactgtttttagggcccaaatatcctctgtttcagcccttagaaaaatgatttaaaagcattgaggtttaaattggaattagattttacatttcataacatttcctttatgtggttg

SEQ ID NO: 541076 - DNA, 538 bp, Homo sapiens
ttctcatcctgttacttgctgtaattcttactttctaaaaatcttttagatgttctttttcattttaaatgttctttttccataattgccatcttatgttttttcatcctattcttgtattattaggtatccatctatctttttaattctatcgcagatgaattatttgaaacccttcccacttactctgtactacagttaaagagttgggcacagtctattctgtatcttgagaggagggtaagtaaggaagaacccagaaagtatttaacagctmatttccttgaattattgtttcgccccaaaacagtagatctctttttatttagaatggagtttccagagagtaatttctttcggatgagtagtgtcttacatggaagacttgagctcagctctctgttaagaaattttgtggcctgactgtttttagggcccaaatatcctctgtttcagcccttagaaaaatgatttaaaagcattgaggtttaaattggaattagattttacatttcataacatttcctttatgtggttg

SEQ ID NO: 541077 - DNA, 581 bp, Homo sapiens
tgtgcccacctccttccttgcggtttcccatgggaggaatgaagctaatatgaacagttcgatattggagtawctattgggtgactttcaacacctggcagccttagaatgaccaaaacacaatcaagtgctaatcactcatcctctttcactttctgtttcaaagagcattaaggtcttttaaattgatgctttctatagaataaatgactatgaagagggctgctctgtttccctgtgtcttcttccagctctctctgtacctgccaatctcagcactttctctatccctgtttgtgactgggtggagttatccttcctcaggagataacttccatcatgtcactggttgaatggccacaaaattatggccagctttgcagtctgctttgctatatatacaaagattaaattgaattataaaataaatctaattactagtatttcctaaggctaaatatatttgacttgctactcttatgtagtctacgctcgcaccattcattgaataattaataacattgattttatcacaaattccatatgctgtatgtgaaaattaattacttttatgagaaagc

SEQ ID NO: 541078 - DNA, 581 bp, Homo sapiens
tgtgcccacctccttccttgcggtttcccatgggaggaatgaagctaatatgaacagttcgatattggagtatctattgggtgactttcaacacctggcagccttagaatgaccaaaacacaatcaagtgctaatcactcatcctctttcactttctgtttcaaagagcattaaggtcttttaaattgatgctttctatagaataaatgactatgaagagggctgctctgtttccctgtgtcttcttccagctctctctgtacctgccaatctcagcactttctctatccctgyttgtgactgggtggagttatccttcctcaggagataacttccatcatgtcactggttgaatggccacaaaattatggccagctttgcagtctgctttgctatatatacaaagattaaattgaattataaaataaatctaattactagtatttcctaaggctaaatatatttgacttgctactcttatgtagtctacgctcgcaccattcattgaataattaataacattgattttatcacaaattccatatgctgtatgtgaaaattaattacttttatgagaaagc

SEQ ID NO: 541079 - DNA, 581 bp, Homo sapiens
tgtgcccacctccttccttgcggtttcccatgggaggaatgaagctaatatgaacagttcgatattggagtatctattgggtgactttcaacacctggcagccttagaatgaccaaaacacaatcaagtgctaatcactcatcctctttcactttctgtttcaaagagcattaaggtcttttaaattgatgctttctatagaataaatgactatgaagagggctgctctgtttccctgtgtcttcttccagctctctctgtacctgccaatctcagcactttctctatccctgtttgtgactgggtggagttatccttcctcaggagataacttccatcatgtcactggttgaatggccacaaaattatggccagctttgcagtctgctttgctatatatacaaagattaaattgaattataaaataaatctaattactagtatttcctaaggctaaatatatttgacttgctactcttatgtagtctaygctcgcaccattcattgaataattaataacattgattttatcacaaattccatatgctgtatgtgaaaattaattacttttatgagaaagc

SEQ ID NO: 541080 - DNA, 593 bp, Homo sapiens
ctgaattaaatgaatgcctggaagacatgtgattttacatttcttcttgactgaacactcaattacaaggatcctcatgacagaagcactcagactgaggtagaagcacacaacctgccagaaacctggtaatggagcaagacacagagggctccctgcaaacacacatcttcacagtcacagaccattcaatatttagtgtgatttgtttttaaatttaaaaatgcatattaattatatattgtgtgtatgtgtgcatgtgtgtgtgtaagcatgtgtgtgcatgtatgcctaaatgcaagctggagataaacttattctgaggcatagrcatgctatgtaagtatttcatatttgttcagaaggtctatgctttcatacaggtatagatacgtacatatctatcagccatctatctatctttctctattctgagtgagaaagagatctaccccctttatttaagcatagtagacacacacacacatatatgtaaagaaacagagagagaaagagaaattcattccagaaaatggttcatctcaagaaaagtgactgagtactaaaataaaatattctttgaggataaagaa

SEQ ID NO: 541081 - DNA, 593 bp, Homo sapiens
ctgaattaaatgaatgcctggaagacatgtgattttacatttcttcttgactgaacactcaattacaaggatcctcatgacagaagcactcagactgaggtagaagcacacaacctgccagaaacctggtaatggagcaagacacagagggctccctgcaaacacacatcttcacagtcacagaccattcaatatttagtgtgatttgtttttaaatttaaaaatgcatattaattatatattgtgtgtatgtgtgcatgtgtgtgtgtaagcatgtgtgtgcatgtatgcctaaatgcaagctggagataaacttattctgaggcatagacatgctatgtaagtatttcatatttgttcagaaggyctatgctttcatacaggtatagatacgtacatatctatcagccatctatctatctttctctattctgagtgagaaagagatctaccccctttatttaagcatagtagacacacacacacatatatgtaaagaaacagagagagaaagagaaattcattccagaaaatggttcatctcaagaaaagtgactgagtactaaaataaaatattctttgaggataaagaa

SEQ ID NO: 541082 - DNA, 468 bp, Homo sapiens
attggcttttgtaaatgctctagatagttcctggcctagggcctttgtaatagattgctctcttgaaatatgcttttcctgatcttcattgagctgacatcttgcctttttatgtctgagtctttgtgtcctcatcagaaggttctttctgtaaccaacatctattgtgaaattattacatcattctgtctgactgatcagcagaacaatattcactttctgatatatgtattttaatttaatttgttgatttttaaattaatttctggctccagatgagaaaacaaatcactagaatatacaaaagtgaaataacaaacagtaaaaagaaaatatgagactgggaaattatgccatgaaaaaagagaaaacttggagttatactacaytgaagacccaaaagattagtgccgaagccaatactttagatatttgtatccagatataaattaacttggatgtttgaaa

SEQ ID NO: 541083 - DNA, 624 bp, Homo sapiens
tattgataatcttaatacgagattaagagcaaagcctggactgtgagtctattcagtccctcaactttgttcttgctttgctagtcactcaaatatctcaactgctagactgacaaatatagatggaaaatagaggtttcagaattgaaatacaggcaacattctggctcaatagatgactttgtgcaagtcctggagtttccctaagccctcatcttaccaactgtgaaacacaaacaataggagcttcctctatacagtagatgaagttgctaagaggattgactgcaatcatccatgtaaatctcaacgtggtkcaggcaggagctcaatgtatatcagctctcagctttgcttgctgtacagtcttcaggatgggagtggggggaaaggcatgttagagcatctcagaagcttgactttcctccccagttatggatttgacagtatgagaagtcatattgactcagagagaccacctgactattgtttactaatatcctaaacaaaggtatgaatatctttcagaaaaacaatctggttgcaatggcatctggattaatgacacaggtaaatgagaagtgattggttggttgctttatcaaaaaattcattttaggagtg

SEQ ID NO: 541084 - DNA, 286 bp, Homo sapiens
gacttgcctttcaaaacaccgtgaacttcamatttgaggaaaactatacctcgcagaatgtcctcaccaagagctacctctcaaaccgaaccaactccagggtgcagagcattggaggggttcctttttacccaggcatcaccctccaggcctggcagcagggtatcaccaaccacctggtggccatcgaccgctctggcctgccgctgcatttcttcatcaaccccaacatgctacctgacttgccaggccccctggtgaagaaggtgtcaaagacagtggaaac

SEQ ID NO: 541085 - DNA, 639 bp, Homo sapiens
aaacatcttttcttcataaattacccagttttgggtagttatttaaggcggtgtgaaaagggactaatacactgtcaatcttctttgttgaaaatacttgctttctttttccatttgatgcctgtcctcttgccaatcataacatgatggtctctgaaagctgcttaccattttctaaaaaccaaaaccmaaaaaaaaaagatagtcaaaactgaataatttatttatattcaaatgaagtatgcctttaaaaaaaatcatagcgtatttatctttgtagaaagaacagtaagatttgaactctcttttatgcagtcaacttgaataaagagaaacccaaaatctatttcctacttgacctcctcaccaaattactatataacaaattgtacagttaatatggatcagttatcatttaagattcaaatgctctcttgcctgataataatctagtaccatgggagtgcttctaagtgagggaagatatatccctatgcttgcaattacaaagacaagtggcacttgaattttgtgagcagaagattggccctggcaaaccaacagcatgttaggtttagctcatttcccctgaatttcatttgagactgctttgcaataaaagatgtcctgatgaaatca

SEQ ID NO: 541086 - DNA, 587 bp, Homo sapiens
ctggcgtgtaatcactgcttttatgcaatgtaaatttttcctcaatgtttgacatcatcttgaagttcattttctggttattagacttgtgaagcctagtggaatacaacttaatactagattttcatacttagttttcttccttcccttctttccagttccagctacgctggggtttgagttttggagtakattcttaaatgtgatctttctgtggttttaaaatctattctcttcccctacttttcctgtgtttgctgggatagagtaatggtattaagacatgaaaagagaaaatatctctttgctgaaattgttgtaggggtcttttggccaacactgagcatagatgccttctccacggtgggtccaaatgccggtcttcctcacttaatgactttttgagtgggtctatcatgaacatcagatttgatccttggatttctcacttggtgctggccgtcttaaggggaatcttagcagatgggattgaactatattgccgtctatataggcatccactgagctctcaaaaaaaatggtttcaatagcagattatagaagtaaaggctattatgccttatcta

SEQ ID NO: 541087 - DNA, 676 bp, Homo sapiens
agcaaaggtttagagatgactggcgaagtttgaagaacagaggttccttttaaaagctgatttcaagtcattccttgcagggtgccttaattttgtctgaccttttccacccttcaagaagtataaggatatagtgagaatttgtttgaaatcatcctgaacagctgaaaatggcattgctaagttgcaaatgaacttaggtagtcaagataaagatcaaatagatcattaagacataaataagagcccagagaaatccaagcttataaggtcattgatataacgaaagagtcagagcaattcaaggatgaaagaaatttcatttcagttaatggtactgtatcaacaggatgtccctatggagagggaagaatcttgacctttcttacactacatgcaaaaattaagttcagatggattataaacccaaatatattcaaaaccataaaacttctagaagaaaataasacttggcaatagcaaggaattttacgacagaacagaaagcaataactagaaggaagagtctataaattaaactccaaaattaaagacgtctgctcatcaaaaaacacattaagaaaattaataagcaatgtggggactggggcgaaatacatctgacaaagtcctggtctttaagatatgaagaccacttacaactcaagacagatga

SEQ ID NO: 541088 - DNA, 597 bp, Homo sapiens
ctgatgatctttgaccccttttatgcagttcagaggccttcactccctgaatttcccgaagaagcacccttccaccctctactttcctcctcccttcccactgctctgcatcttttagctacaccttcactctgttacctcctccaactggagtcccatgccctccggcatcctgggaaaaggagaaagatgaccccaagagagggatctcggaatgaataagaactattcatttgagcttctcatgtcacataactcgtatcagttctataaaacttgggtttcttttctctatcattaaccctgacttgacaggcagcctagggtcatgattaagaacatgaatttggggatcagacagacctgggttagtggtagctctgttatttataaactgtgtgctcttgaggaagctaacccaccctatcttcctcggtttccctacccattcccacttaagtaacagtgatacccagctcacagggcagttatgagaaggaaacgagatcttgcatgaaaaaggtttaatgattctttstatgcatagtgagtgtgattgccgtaataggattgtgggtaatataaaaacagcgtaaa

SEQ ID NO: 541089 - DNA, 637 bp, Homo sapiens
gctgacttaatctcaacaaaaccccgcttacacctgggccttagacgatgacaacaagctactccacaaacatactaatatgtttgtagcatctgaaaaataatttatattcacagttaattttaaaagagctctatgatcgagatgctgttatctttaaaatagtctgcaaattacatcctgcattagtccgttttcacactgctaataaagacatagccaagactgggcaatttacaaaggaaagactcacagttctgtgtggctggggaagcctcacaatcatggcggaagggcaaagaggagcaagtcacatcttacgtggatggcagcaggcaaaaagagagcttgtgcaaagaaactcccatttttaaaaccatcagatcttgtgagatccattcactatcatgagaacagtatgggaaagacccatccccataattcaatcatcttccaccyagcccctcctacaacatgtgggaattatgggagttacaagatgagatttgggtggggacacagagctaaatcatatcatatccttactttgatggataagaggtgaaggaattggaaaataggggaagaaacacatttcatcccccacaccactccatttcccacaaacgtttaaact

SEQ ID NO: 541090 - DNA, 566 bp, Homo sapiens
ccacccaccgcagctaatttttatttttttgtagagacagggtctcactatgttgctcaggctggtctcaaactcctaggctcaagcaatcctcctgcctcagtctcccaaagtgctgggatcatgggaataagccaccatgcccaacctaggcaaactttcttaagcaaattgaagataaatttgaaatattggagtaagtggtgataaagtatttcctgctgacaacttaaagcaaataatgttgctgtcaaacctttaccactgaggtcagttggcaattcagagcaactctggcatcaaagaaattctgtaagtggrttcaatgtgcttagagcaagattagaagacatagaacatttgagctaaaagctaagatgggaaattgagcctttgtattctgttgagtgagcacacagagaattttctagatatacttgatttgattttagtttttgagacatggtctcactgtgttttccaggctagtctcaaactcctgggctccagtgatcctcccgcctcagcctcccaagcagctaggattacaggtgtgagccgccaca

SEQ ID NO: 541091 - DNA, 666 bp, Homo sapiens
ggataggacaagaaatgggctgtagagacagaccaagtgggagtctggggtttaaaccaagcccaaggcctcagcttcactgctgcttcttccaggaattcttccctgtcttgtgtgactgagttgggagcccatcctccaatgtatcccagagcatgtgggccaggctcccatctcagcgcctaccacaccggactgtcrtcgcttaaactcgctttgtctcttcacggtgggctcagcagtaactttggcctacttacctttctgtctccagggcctggcatccaacctgacacatagtaggcctcagcagctctactcaaatgaatgaatgaacaaataggctcaaagggtaactgggcaccaatattcctgcctctaatccacacatttccattctcacaacagttaagtcctactgtgaaaaccaacctggtcttccttcccactccaaatgtgaatggatcagggggtgtcttcttgggtctgtggggcttgtggctgggatggcagccgggtggccaatggctaccaacaactagactaccaatagctagtcagggcctgaaggagaacttgtggcagagccgtgcctaccttcccgcttctcagccaccttcagcccagaccctgacagtcctgaagagtgtggctggagcagaagca

SEQ ID NO: 541092 - DNA, 666 bp, Homo sapiens
ggataggacaagaaatgggctgtagagacagaccaagtgggagtctggggtttaaaccaagcccaaggcctcagcttcactgctgcttcttccaggaattcttccctgtcttgtgtgactgagttgggagcccatcctccaatgtatcccagagcatgtgggccaggctcccatctcagcgcctaccacaccggactgtcatcgcttaaactcgctttgtctcttcacggtgggctcagcagtaactttggcctacttacctttctgtctccagggcctggcatccaacctgacacatagtaggcctcagcagctctactcaaatgaatgaatgaacaaataggctcaaagggtaactgggcaccaatattcctgcctctaatccacacatttccattctcacaacagttaagtcctactgtgaaaaccaacctggtcttccttcccactccaaatgtgaatggatcagggggtgtcttcttgggtctgtggggcttgtggctgggatggcagccgggtggccaatggctaccaacarctagactaccaatagctagtcagggcctgaaggagaacttgtggcagagccgtgcctaccttcccgcttctcagccaccttcagcccagaccctgacagtcctgaagagtgtggctggagcagaagca

SEQ ID NO: 541093 - DNA, 531 bp, Homo sapiens
agaggacttgacttcacatttttgtgttagattctgccttggggtaagacccaggctaagacagacacttctagttgtgtgactttaggaaaatgcctaatttctctaaacctaaatgttctcatctccaaagtggtgatgcacaggagytatcactgtggtaagcagaataatggccccctaaagatgttcacattctaatccctggaacttgtaaatatgttaggtaccatggcgaagggaaattaaaattgcagatgaaattaaggatgttaatctgatctgaaaatagaaagattaatctgaataatccaggtgggcccaatgtaaccaaagagtccttaagagtggaagcaggaggcaggcagagatgcgatgttgctggcttggaagatggaggaggacaccgtgaaccagggaacagggccgcctctagaagctggaaagggcacaaaaatggattctcccctagagagccttcagccctgctgacaccctaattttagcccagtgagacctgtgtcaggcttc

SEQ ID NO: 541094 - DNA, 509 bp, Homo sapiens
ccacggcctccccagggccagactggctaawggggaagggagctgggtgccaagaggagagagaaagagcacaggaaaaggtgcctgctcagggagggtaggctgagacaacaggctttgttacttccacgtttcatgttgcttcaccatagtcctgacgtgcttccacagggggccattgccttcaaggcgatttctgcctttgagcccagtgtcgttctgctgaagcctgcagtggattaggaagcaaccaagaaccccattagggatttggagtttgggaacacttgctgatgatggttaccctaggctgaccagacaggacccaacaatatattcaactttaatttttttaatgtgaaattagtttttatcttataaaaagtttgcaaatgtggaagagttcaaaaatgaaagtagatgtcaccccaaatcttaaatcaaccagatatataaactattgattaactctttgggtatatttatttcatacatttcatgtatttgca

SEQ ID NO: 541095 - DNA, 563 bp, Homo sapiens
gcattccttttgtgaacaattaattttgatttgtcttaagccaataccttttctaaaagttgaattgtaactaaactttaataatgcaaacaaataatagttaagcaatataaatattgccagaaatatatcagaaatcgttgttggtgttttttgatttcctgatggagaaagaaaaatttaggtgttttcttgttatcccaatcagtaggaagtacttgagaatgatgagtctaagaatttagtcacctgtgaagtagaagacttttccaaaaatattttattgttattttcccatactttaaaaacttatttttatgagatgattaaaaacagttaatttggcttatgtgtgctagaatattttctgtgaagtaaaagacatttccaggtattgtttctacagtttaagaagacgttcactttgaatgaaatgattgtaaagagttatatggaatgtgtatgctagactaatgttctcccktatgtttgatgaagacatttgctaagctaattcattaaacaaaaaatcttatgaaacaaacttagtgactttttttttt

SEQ ID NO: 541096 - DNA, 485 bp, Homo sapiens
ctgtttacctagtagctgatggactaggacttggatttagaatcacataatccacttagaccattgggatcattgtttctgtgagttctaaatgaaatcctctctgtttttcatagcttacccttcatttgattcctttgtacccatttttgctttcctcctctcgtgtgccagatgatgtgctctttggggaccattaattccactctcaagcttaggtctattttgttcagatactttcaagcactttaatacagtcctaaagaaatccaagagctttacttctggaacagtgcatactcctcttgagtgatcactgaaagctgacaaatagataatcaasaagtcagagatgtatttgcaagcccttgtttttctctcctctgtactttggattgacagaatggcataagcactttaacaatattgagttaactattatttgttaaagattttttcctctaagataacttgaaatttatttt

SEQ ID NO: 541097 - DNA, 485 bp, Homo sapiens
ctgtttacctagtagctgatggactaggacttggatttagaatcacataatccacttagaccattgggatcattgtttctgtgagttctaaatgaaatcctctctgtttttcatagcttacccttcatttgattcctttgtacccatttttgctttcctcctctcgtgtgccagatgatgtgctctttggggaccattaattccactctcaagcttaggtctattttgttcagatactttcaagcactttaatacagtcctaaagaaatccaagagctttacttctggaacagtgcatactcctcttgagtgatcactgaaagctgacaaatagataatcaacaagtcagagatgtatttgcaagcccttgtttttctctcctstgtactttggattgacagaatggcataagcactttaacaatattgagttaactattatttgttaaagattttttcctctaagataacttgaaatttatttt

SEQ ID NO: 541098 - DNA, 543 bp, Homo sapiens
gacactgaggcttggaagctttgcaaggcaagacagaagccgaatccaggccatctaatctctaggtcagtgtcctgtgctcctgagcctcagaaggcaagaaagaagggatacagacgtcagcgtccctgttgggtggggctgtttccrtcacgacttgtgtcatggagcatcatctcaaagctctgcagttaggaggcagagggacctgctaccacctgtcccctcctctccagtcctgccctgcaggcagcccgggcacctgctgtcttcctggcctcccagatcctcaagatggagctccaggaaccatcccctcctccgcccgggcaggatgccacctccacaaggcaaatcacatccatttgatcttgaacaaaaggctgccgtggtgtctgaaatgacaactcccaggcgggtgatgtcatgctgttttgtttgtctccatggactgtggggatccaatttcagttgtgaagaaaacggtctggggaaaaaagttacttcattcggaaaattccgagaagccataaatacagtttg

SEQ ID NO: 541099 - DNA, 376 bp, Homo sapiens
acacctcagaagagatcttctgatcctaggcttgacttgatttctagaaataatcttctaaatrcaatgtacagaatgcaatcacaggtaacaacaaggcactggagaagacaaggcaacatgaatgagaacctgcagaaatgacagacaacaaacacacgcccacaggaactttagtcattggaattatcagatacaaaccataaaacaactcacttccagtactcaagaagataaaacccaagcttgaaaacttcggcagggaaatagaaattatacaaaatagcatttttgaaataaaccaagcagaaattatacaattaaaaaaacataaaatacaaaattaagaaattaatggttgaatttaatagcacag

SEQ ID NO: 541100 - DNA, 376 bp, Homo sapiens
acacctcagaagagatcttctgatcctaggcttgacttgatttctagaaataatcttctaaatacaaygtacagaatgcaatcacaggtaacaacaaggcactggagaagacaaggcaacatgaatgagaacctgcagaaatgacagacaacaaacacacgcccacaggaactttagtcattggaattatcagatacaaaccataaaacaactcacttccagtactcaagaagataaaacccaagcttgaaaacttcggcagggaaatagaaattatacaaaatagcatttttgaaataaaccaagcagaaattatacaattaaaaaaacataaaatacaaaattaagaaattaatggttgaatttaatagcacag

SEQ ID NO: 541101 - DNA, 376 bp, Homo sapiens
acacctcagaagagatcttctgatcctaggcttgacttgatttctagaaataatcttctaaatacaatgtacagaatgcaatcacaggtaacaacaaggcactggagaagacaaggcaacatgaatgagaacctgcagaaatgacagacaacaracacacgcccacaggaactttagtcattggaattatcagatacaaaccataaaacaactcacttccagtactcaagaagataaaacccaagcttgaaaacttcggcagggaaatagaaattatacaaaatagcatttttgaaataaaccaagcagaaattatacaattaaaaaaacataaaatacaaaattaagaaattaatggttgaatttaatagcacag

SEQ ID NO: 541102 - DNA, 376 bp, Homo sapiens
acacctcagaagagatcttctgatcctaggcttgacttgatttctagaaataatcttctaaatacaatgtacagaatgcaatcacaggtaacaacaaggcactggagaagacaaggcaacatgaatgagaacctgcagaaatgacagacaacaaacacacgcccacaggaactttagtcattggaattatcagatacaaaccataaaacaactcacttccagtactcaagaagataaaacccaagcttgaaaacttcrgcagggaaatagaaattatacaaaatagcatttttgaaataaaccaagcagaaattatacaattaaaaaaacataaaatacaaaattaagaaattaatggttgaatttaatagcacag

SEQ ID NO: 541103 - DNA, 486 bp, Homo sapiens
tatgatgataaacgttcaccgaggtttaatatactattctctctctgcttacgttaaaaaaactctataataagaattttttaaaagtgggtagagaggggtcaggcgcggtggctcactcctgtaatctcagcactttgggaggccaaggagggcagatcacgaggtgaggagttcaagaccagcctggccaacatggtgaaaccctgtctctggtaaaagatacaaaaaattagcagggcatggtggcacgcacctgtaatcccagctattcaggaggctgaggcaggagaatggcgtgaacccgggaggcggaggttgcagtgagccaagatcatgccattgcactccagcctgggtgacagagtgagactccgtctccaaaaaaaaaaaaaaargtgggtagaggggttaacaaaggtctcagtaggtacatgaacaacttgctgttaagaaaaaaattatagttgaggtaaacaatacaca

SEQ ID NO: 541104 - DNA, 441 bp, Homo sapiens
ctggttagggactgctacgtataagaaaaactgacagtattcctcacctttgtgggagagagtgaggctatgctaagacaatcattttgcagggtgcattctgcaaggattgagcactacacacagctagggtgccaacagtaagtagttttaaatcatttgacaacaaataattactgagcacgtcctattctcaaggtgtaatgctaggcagagaacacacagacagtatttcatttacaaatggattgtgttacaaaagttttcagcaagacagatggttgtaacatgaaaccwtttcacaagcaagcaagcaaataatgacaaggaagattctcaggctagcaaataaaggcctctttaagcctaatgaagctaagatacatgctaatttacaaggaatatagcagaaaaatattttacaagactggtaaggaaaga

SEQ ID NO: 541105 - DNA, 432 bp, Homo sapiens
taaaacctctgatatgacacagacagggttcagtttcaaagccataaacggaaatgagcagagttggctttcccagacagggtacattttctcatcacttctcttgtcttgtggactcttagttgccyaaaaaagccattacttccaatcattatttctagccctatcttatccctgaaacttcgagcttataaaacctatgatctatttaaacttctacttggatatttaaaagatatctcaaatttaatgttgccaacagggagctcaacatttctccccaaatatgtccccttttccctcctggtttcctgtatctcagcaaacagtttcgccatccacgcaatggcttaagccaaaaacccaggtgctattcttgattctttattcgttcagcccgtacctataacctagcaaaacgttttattggtt

SEQ ID NO: 541106 - DNA, 432 bp, Homo sapiens
taaaacctctgatatgacacagacagggttcagtttcaaagccataaacggaaatgagcagagttggctttcccagacagggtacattttctcatcacttctcttgtcttgtggactcttagttgcccaaaaaagccattacttccaatcattatttctagccctatcttayccctgaaacttcgagcttataaaacctatgatctatttaaacttctacttggatatttaaaagatatctcaaatttaatgttgccaacagggagctcaacatttctccccaaatatgtccccttttccctcctggtttcctgtatctcagcaaacagtttcgccatccacgcaatggcttaagccaaaaacccaggtgctattcttgattctttattcgttcagcccgtacctataacctagcaaaacgttttattggtt

SEQ ID NO: 541107 - DNA, 432 bp, Homo sapiens
taaaacctctgatatgacacagacagggttcagtttcaaagccataaacggaaatgagcagagttggctttcccagacagggtacattttctcatcacttctcttgtcttgtggactcttagttgcccaaaaaagccattacttccaatcattatttctagccctatcttatccctgaaacttcgagcttataaaacctatgatctatttaaacttctacttggatatttaaaagatatctcaaatttaatgttgccaacagggagctcaacatttctccccaaatatgtccccttttccctcctggtttcctgtatctcagcaaacagtttcgccatccacgcaatggcttaagccaaaaacccaggtgctattcttgattctttwttcgttcagcccgtacctataacctagcaaaacgttttattggtt

SEQ ID NO: 541108 - DNA, 255 bp, Homo sapiens
ataaataagtggtaaggtttctagagaaagaaagatgcaactataaaatcctaagggctactctatatactttccatctgrgagaagagctttctgaaaaatctaaaaccaccaccacaagatgaacaagagaggtgccctatctacagaatactaaacagaaataagagaaacaatgtcataaaaatcaatcagcagaagatcatgttattgcctaaaccaggatgtcatctcagactcccatgacttcaagca

SEQ ID NO: 541109 - DNA, 255 bp, Homo sapiens
ataaataagtggtaaggtttctagagaaagaaagatgcaactataaaatcctaagggctactctatatactttccatctgagagaagagctttctraaaaatctaaaaccaccaccacaagatgaacaagagaggtgccctatctacagaatactaaacagaaataagagaaacaatgtcataaaaatcaatcagcagaagatcatgttattgcctaaaccaggatgtcatctcagactcccatgacttcaagca

SEQ ID NO: 541110 - DNA, 570 bp, Homo sapiens
attggagcagctctgctgaattctagggaggtctggtgtaaagttaccgtgggtgcactataggtaactaatgtgttagaaastaagtttcaaataggatatgttaaatggattaaataaaatttacccacaggtttttaatttcaagcacgaaattctctgggtttcttgagcccagtggaccctgaaagtcaacagctcagtcatgggtcagacaggggggaaaaaaaagacaaggcctgtatttactatgcacaaacacaggacaaaacaaatttataattatcacgtggatgctgtaggagaatctgaaattttagttgcaagaaagaaacagaaaagtagaaattcattgaatagtactcattactaattaaaggtgtataaaatgttactaatattctctattcaacattatttccttggtccttttactaaatgaacataatatttagaagggttttcactgattgctacaattcccaactttgatttaaattttgctttaaagagcttaattcttcaaacttgacttcccctatcacacagatgttgtaggatataatcttt

SEQ ID NO: 541111 - DNA, 570 bp, Homo sapiens
attggagcagctctgctgaattctagggaggtctggtgtaaagttaccgtgggtgcactataggtaactaatgtgttagaaactaagtttsaaataggatatgttaaatggattaaataaaatttacccacaggtttttaatttcaagcacgaaattctctgggtttcttgagcccagtggaccctgaaagtcaacagctcagtcatgggtcagacaggggggaaaaaaaagacaaggcctgtatttactatgcacaaacacaggacaaaacaaatttataattatcacgtggatgctgtaggagaatctgaaattttagttgcaagaaagaaacagaaaagtagaaattcattgaatagtactcattactaattaaaggtgtataaaatgttactaatattctctattcaacattatttccttggtccttttactaaatgaacataatatttagaagggttttcactgattgctacaattcccaactttgatttaaattttgctttaaagagcttaattcttcaaacttgacttcccctatcacacagatgttgtaggatataatcttt

SEQ ID NO: 541112 - DNA, 570 bp, Homo sapiens
attggagcagctctgctgaattctagggaggtctggtgtaaagttaccgtgggtgcactataggtaactaatgtgttagaaactaagtttcaaataggataygttaaatggattaaataaaatttacccacaggtttttaatttcaagcacgaaattctctgggtttcttgagcccagtggaccctgaaagtcaacagctcagtcatgggtcagacaggggggaaaaaaaagacaaggcctgtatttactatgcacaaacacaggacaaaacaaatttataattatcacgtggatgctgtaggagaatctgaaattttagttgcaagaaagaaacagaaaagtagaaattcattgaatagtactcattactaattaaaggtgtataaaatgttactaatattctctattcaacattatttccttggtccttttactaaatgaacataatatttagaagggttttcactgattgctacaattcccaactttgatttaaattttgctttaaagagcttaattcttcaaacttgacttcccctatcacacagatgttgtaggatataatcttt

SEQ ID NO: 541113 - DNA, 570 bp, Homo sapiens
attggagcagctctgctgaattctagggaggtctggtgtaaagttaccgtgggtgcactataggtaactaatgtgttagaaactaagtttcaaataggatatrttaaatggattaaataaaatttacccacaggtttttaatttcaagcacgaaattctctgggtttcttgagcccagtggaccctgaaagtcaacagctcagtcatgggtcagacaggggggaaaaaaaagacaaggcctgtatttactatgcacaaacacaggacaaaacaaatttataattatcacgtggatgctgtaggagaatctgaaattttagttgcaagaaagaaacagaaaagtagaaattcattgaatagtactcattactaattaaaggtgtataaaatgttactaatattctctattcaacattatttccttggtccttttactaaatgaacataatatttagaagggttttcactgattgctacaattcccaactttgatttaaattttgctttaaagagcttaattcttcaaacttgacttcccctatcacacagatgttgtaggatataatcttt

SEQ ID NO: 541114 - DNA, 619 bp, Homo sapiens
ctattgaggcactagagcactatgaatgtgcaagttggaaacctccacgttagggtatatctggtgtttaagtaattaatttcaagcattttggatgcttgaccatctgtctcactctgggcattctaaggacaacttataatctggactccataattygatatctatatctttgctggaatttcttcctgacgtcaccgagtcaacccattcactctctacctacatgaaaaataaatatgcaagtaacatcatctccatggacgacaccatcacaatcactcatttcccaggttagaggccagggagtcatgcctgaacctgcacactcgttaatggtcctcatttaatactttgccaggtctaccactcaccactctcattcatcacagcctttgtctcagacccccatttcaccctcagattgctagacctgagggtgaaacagttgctggacctgagggttataacaggtttgttgttgttgttgttgttgttgttttagaaatggaggagggtctcactctgttgtccaggctgagctagaattcctggactcaagtgagtctcccgcctcagcctcccgagtagccaagactacaggcacacaacaccacag

SEQ ID NO: 541115 - DNA, 619 bp, Homo sapiens
ctattgaggcactagagcactatgaatgtgcaagttggaaacctccacgttagggtatatctggtgtttaagtaattaatttcaagcattttggatgcttgaccatctgtctcactctgggcattctaaggacaacttataatctggactccataattcgatatctatatctttgctggaatttcttcctgacgtcaccgagtcaacccattcactctctacctacatgaaaaataaatatgcaagtaacatcatctccatggacgacaccatcacaatcactcatttcccaggttagaggccagggagtcatgcctgaacctgcacactcgttaatggtcctcatttaatactttgccaggtctaccactcaccactctcattcatcacagcctttgtctcagacccccatttcaccctcagattgctagayctgagggtgaaacagttgctggacctgagggttataacaggtttgttgttgttgttgttgttgttgttttagaaatggaggagggtctcactctgttgtccaggctgagctagaattcctggactcaagtgagtctcccgcctcagcctcccgagtagccaagactacaggcacacaacaccacag

SEQ ID NO: 541116 - DNA, 674 bp, Homo sapiens
tctatgggggattggttccaggaacctcatggacggcaaaatccatggatgctccagtttcttatataaaatgatgtcatatttgcatttaatctatgcacattctccaatatactttaaataatctctagattacttacaatagctaatacaatgtaaacgctaggtagtctttacactgtatttttttattgttgtattgttatttttttctgaatattttcaatgtgtggttggttgaatctgcaaggacacagcctgtggatacagagggccgactctgctctgctaaaagaacctatttcccagtctccctctagcaaggggtggctaagacacctagttctgtctaacaagatgtaaatggaagagttatgcaaataattttaaaagaaagaagatgtgcccttcttgtacacatctttgtaytgtctactcaaaatgaaggctggaatgccaacatgatggctggagctctagcaaccattatgaaccatgaagtaaactgcagaatgaaagtcgtctgttcaatgtcaaagaagacaggaatctgagtctctgatgacactgagaagccactgtatcaacctctggttcacctacaatcaggcttctgtgacattaggagaaaagatatttctaatttgattaacccaccatctggggatgttata

SEQ ID NO: 541117 - DNA, 619 bp, Homo sapiens
ctattgaggcactagagcactatgaatgtgcaagttggaaacctccacgttagggtatatctggtgtttaagtaattaatttcaagcattttggatgcttgaccatctgtctcactctgggcattctaaggacaacttataatctggactccataattcgatatctatatctttgctggaatttcttcctgacgtcaccgagtcaacccattcactctctacctacatgaaaaataaatatgcaagtaacatcatctccatggacgacaccatcacaatcactcatttcccaggttagaggccagggagtcatgcctgaacctgcacactcgttaatggtcctcatttaatactttgccaggtctaccactcaccactctcattcatcacagcctttgtctcagacccccatttcaccctcagattgctagacctgagggtgaaacagttgctggacctgagggttataacaggtttgttgttgttgttgttgttgttgttttagaaatggaggagggtctcactctgttgtccaggctgagctagaattcctgsactcaagtgagtctcccgcctcagcctcccgagtagccaagactacaggcacacaacaccacag

SEQ ID NO: 541118 - DNA, 586 bp, Homo sapiens
gctatcgcaacagtgttttaactggtttctctgtcttgcagcttttcaatccatcccctgtaatgctgccagacaactttttctgaaacacaaatcttcactgtggcactcccctacctaaagctcttcagtgcctccccatgccctttagggaaatagggaaaatgacatttaggatgccattcaatgctatctgtgatcttaaccctgcctaataatctcctttccctgcaacccttctcttgaccttcagccatcccaaactacttgtggttctcaatgtgccatgtctccgtgcttctcctttggacctctgcttgttctgtttctgcttaaatgtttttcctacttcagccatcatttaagatccagttaaatggcgcctcctctgtgragcctctcctgatgggaccaagtagtcctcagaatgcacccattgagctccattccattcttccatcatagctctgattacacttctcagcactttttttgttgagatatttgtctttttctgttagcccattcttgaaggcaggaactgatatggtttgactgtgtccccacccaaatctcaccttgaatg

SEQ ID NO: 541119 - DNA, 546 bp, Homo sapiens
ccagagatgaacccagagcctttctcctaaccctgcaccatgatggcaaaatccacagtgtggctcagtgttcaagtcacagcggttacatgtaacaaacagtattccataaatgaaaaatccaagagaatacggatgatctgtgaaatgcagattctgactgcaaagtcctaasagaagccaaaacaacaagtcctcaggaagaaattctgaacttaattctcttcaggggcttatgcacttcattcaacatttattcagggattactacgaactggacactgaggccaagaggctcagcccttaatatttacattctggagggaacagaagatggatgagagtcccaccacgcagcgccatgactaaggtggggaaaatgtaatgggtataaatggaggagtgagttgattttgcttggcaaaatcatacaaaagacgtaacaaggtcaaagtcaaagctgatctctgaaggacacagagttcatcaggaagagaatgagatcatttccagggatgtccaaagaagaaatgcaaaggcccgcag

SEQ ID NO: 541120 - DNA, 681 bp, Homo sapiens
acagggttatggaggaaaatgtcaggaaacagtgcttataggggcctggccgtgacctggaggggttgggggaagttcctggaagggtcccttgaaggagagatccaagttgtgaattgtgtgtgcgtgaatgcaggcaagtgatgagatgggggcagtggggagaaagggagaagagggagagcaaactccaggcagataacaaacttgcacaggcctgggagggagacggggcactgtccgagacaaggggaggagcaggcttaggatgtggagtcccacggggctgggtttgaccccagagtgcaacccctgctgtgggccttgktcatttaaactctccgagccttggtcttctctgcgaaacatggataataacatctgcctcgcagagctactgtgagggttaaatgaaataaaagccatgtggcacgcttagcccagggcctgcacacagcaagcacccgtcctcgatcagtgggggaagcagttgtcatggttctagtgccctcagtgaagtggagtacagcttttctatttatttctctgcaaaataacattctgaatttcagaacgtagagagtatgagagatgatagggaagtcttggctatcttttaagatgtgcacactgaggctcagagaggctgagacactcccccagggtcccacagacgtgaca

SEQ ID NO: 541121 - DNA, 681 bp, Homo sapiens
acagggttatggaggaaaatgtcaggaaacagtgcttataggggcctggccgtgacctggaggggttgggggaagttcctggaagggtcccttgaaggagagatccaagttgtgaattgtgtgtgcgtgaatgcaggcaagtgatgagatgggggcagtggggagaaagggagaagagggagagcaaactccaggcagataacaaacttgcacaggcctgggagggagacggggcactgtccgagacaaggggaggagcaggcttaggatgtggagtcccacggggctgggtttgaccccagagtgcaacccctgctgtgggccttgttcatttaaactctccgagccttggtcttctctgcgaaacatggataataayatctgcctcgcagagctactgtgagggttaaatgaaataaaagccatgtggcacgcttagcccagggcctgcacacagcaagcacccgtcctcgatcagtgggggaagcagttgtcatggttctagtgccctcagtgaagtggagtacagcttttctatttatttctctgcaaaataacattctgaatttcagaacgtagagagtatgagagatgatagggaagtcttggctatcttttaagatgtgcacactgaggctcagagaggctgagacactcccccagggtcccacagacgtgaca

SEQ ID NO: 541122 - DNA, 681 bp, Homo sapiens
acagggttatggaggaaaatgtcaggaaacagtgcttataggggcctggccgtgacctggaggggttgggggaagttcctggaagggtcccttgaaggagagatccaagttgtgaattgtgtgtgcgtgaatgcaggcaagtgatgagatgggggcagtggggagaaagggagaagagggagagcaaactccaggcagataacaaacttgcacaggcctgggagggagacggggcactgtccgagacaaggggaggagcaggcttaggatgtggagtcccacggggctgggtttgaccccagagtgcaacccctgctgtgggccttgttcatttaaactctccgagccttggtcttctctgcgaaacatggataataacatctgcctcgcagagctactgtgagggttaaatgaaataaaagccatgtggcacgcttagcccagggcctgcacacagcaagcacccgtcctcgatcagtgggggaagcagttgtcatggttctagtgccctcagtgaagtggagtacagcttttctatttatttctctgcaaaataacattctgaatttcagaacgtagagagtawgagagatgatagggaagtcttggctatcttttaagatgtgcacactgaggctcagagaggctgagacactcccccagggtcccacagacgtgaca

SEQ ID NO: 541123 - DNA, 641 bp, Homo sapiens
gacagctgctggctgatgttccttctgccaccattgccctttctgcctgtccccatccttacagcagttgtgttgcagctcagctcccagaataaacttggaactgtcattcagaggccaccctcatccccactgagtggtctccctcctcccagtgatgtggcctctgattcttccttcagagggaaggaagaaggttaaggctgaagctccatggccatctagggaaaatgcacaaggcaaaaaaccctgccaactctgggtaccagcgacactcagacaccaacagagccatcaaccagaagaacaaagttgaarctagaaaatgaaatcagctctcatccaaactcccacccctcctccccctcctcccaatcctggggggacttcattaaagctggttgcttcacaaaggccaagtctacacgggtgcatgtggcttctgcctgcatttcctttctgcagccagtggatgttcagttagtgtatgaaaaaaaaagaaaaagaaaaagaaaataatgaacaggtattgccgagtctcttctttttaccaaatataaaagtaaaacaccaattaaataaatagaatgtgtctccaaagatttccaaatttagttctttggaaggaatattttatagcc

SEQ ID NO: 541124 - DNA, 641 bp, Homo sapiens
gacagctgctggctgatgttccttctgccaccattgccctttctgcctgtccccatccttacagcagttgtgttgcagctcagctcccagaataaacttggaactgtcattcagaggccaccctcatccccactgagtggtctccctcctcccagtgatgtggcctctgattcttccttcagagggaaggaagaaggttaaggctgaagctccatggccatctagggaaaatgcacaaggcaaaaaaccctgccaactctgggtaccagcgacactcagacaccaacagagccatcaaccagaagaacaaagttgaaactagaaaatgaaatcagctctcatccaaactcccacccctcctccccctcctcccaatccyggggggacttcattaaagctggttgcttcacaaaggccaagtctacacgggtgcatgtggcttctgcctgcatttcctttctgcagccagtggatgttcagttagtgtatgaaaaaaaaagaaaaagaaaaagaaaataatgaacaggtattgccgagtctcttctttttaccaaatataaaagtaaaacaccaattaaataaatagaatgtgtctccaaagatttccaaatttagttctttggaaggaatattttatagcc

SEQ ID NO: 541125 - DNA, 655 bp, Homo sapiens
gtttttctgtatattcatatattcttgtatacatatatgagtatccttcattatcgaaagctattcagtcactgaattgagagagcaaaaaggaatataggtttttgtgattgctacaacttagccactgacagtatttctatttaaagtgatcattaaaaggctgaaggagtcataccataggaataattacaaaatctgtttgtgaatttctttgtctcttccattttaaacaattccatcagttgactctccaaagggaagcaaaattagcactgattgcagccaattcagaaggatatgtcttttgcaaatggcactttttgttcaaagaaggtaattaggagagagccctgtaataagaggctttggaaggactctaatgtaaggggatttcttcttttctgagaggtaattgcaggaggagsggttcttcaccttatatttagacattgaggtagagtggaccaggtcacctgcagagcagcacgggtcgggggagtttatttggtaacataaggaaatattctctctttttctttaactgtaatatgaggggataattaatatgtagcttctttgcattattgtgaaaatcatgaaaggtgttagatatgtagcagaatgtatgcattacctaaatactacacaacac

SEQ ID NO: 541126 - DNA, 631 bp, Homo sapiens
tgacgtttctatttgttgcatccttttccatcaggagagtttgtggcactttcagagtaagggatgcttccttgtcttacatggcagcaacattattcagggaaactggatcttcctgagtgtttggcttcttgtactcacctctgaggttgagataggcaggctctgtgagcctctgccaggaagatctgatttctgccgagactactggcgggcctgactgttcttgaaagatgaaggctatgcctgtatccgatactgggttactgcctgacatccaatgccctttccctcatcgttagaggaagaagtgaaagayccaagccacgagcttagaagcactagtgcacagagggcaatggtttagaatctgcagattgctccatagcctcctatactgcccagcccagagaaccagggacagtaaagggatttttcccatgcaacactgggtcattctcaagttttggataagattctccaactcagcatttccacccttccttttcttctcagtctcagctaccatttaaaagaactgaacctggtaatgctactcatttgtttttttaaacgaatgtttattaatgtgctaggcagtgaccaggcactgggtacaacaataaactag

SEQ ID NO: 541127 - DNA, 600 bp, Homo sapiens
ctgaagccagacaaacctgtaacaaaagagtgaagtcygcagtaataaagcacaattgctctatccccagcccccacccaccaccaccattttggcaataaagtgcctctgggattataggacatgaatgtaaacattctgtgtaaatcagatgtggcttgctctaagaataaaccatttatataacccactcaagaaattatgacatacacatggaacaaagtatcaaacaatatagaaaggcaaaaagataaaaaaggaaggcctgtagatgaagccaacttaaatatttcaaaggaatcagtgtttgtggttaaattccaaggttgtgtcaataatacagagtgactaagagaaaatattctagtctagaattcatggtcaaaatttgacatattaaacataaaatagccaaatataattatatgcaaatcagatgaatgcttctgttagtatctgttatagccaagcaataatagacttcaaaggtttaacaaaaattaatagatggaaaattgaaaatggcagtgttctatccattatcctcagtttttaaaaatctcagccatgcacagtggctcatgcctataatcccagcac

SEQ ID NO: 541128 - DNA, 609 bp, Homo sapiens
atcctggctctaaactgatgctaataatcctcgaagtcaccaatgctaacatgctaacatggcccaccagccagaatgggggcttatcaagggcaagtgatggatgagtcttcacttagtctcacagtgagaccagtagggtcatggggacatattatggttctttctccagttccagaatgtacagtggaaacagacatataaaatctggtttgagtatttgcaatatggtctgagtattgcaactaattccatttaattcaacacttgctgagtacttactatttacaatgttctgtgatgagtcttacggcatcagaaatgtaagtttgtagatattgccctctaggtattcacagtttagtaactaaataaaaaatcttaattcttaaagggcacagagagacttaacaagaaagctattaygtcataaatgcagaaatacctgccttcctgaatcatatataaaatctaaaagactggctccatttgaaatgagggcaggagttgaaattcttctaagaaatatcttaataagagaagctgacaacatggagtgtaataacaaaattccagcatgtcctgatggatttgacataagtaatttta

SEQ ID NO: 541129 - DNA, 398 bp, Homo sapiens
actgtaccataaaaatgagaaaagttaaaattaatgaaatatattttaaattatactatatgctatttctacttaaaaattgttttgtattgtttycatttttcaggaagctactaaagtgctgttccgaagaacaggctgaaaacaaaaatataagaattattagctactttgttgggcaataggcaaaagtctatagcattttcatgaaaatatactaaaaatatttttatgatatataaaatgtactaattagctttaaacactaaaatcagatttcttcaaaatataaatttgttttgattctttatatttatatgtttttatttcatttcaataaacttccagaaatttgtcatttggaagtagatatgacacctctaagttattgtaccaac

SEQ ID NO: 541130 - DNA, 494 bp, Homo sapiens
atatatgtattatttttcttgatttctaaccaggccccttctgaagaaaactggttaactctaaattgttactaaattttgaatcttcctgtatttagcaataaaagttactgctaattgtaataacaattatgaggaaaaatttatttaaatgcktcatagaaagttaattttcatttaatagaaaagaaataaaaaatctgcttcagactgtttgatttctctattaggcaattgaccctaactagtatatggtgattttgagtattaaaaaagaagttataattttccagaatattaatgtttattattttgaaagcaagtaaaattctccagtaggaagattaataaaacaattcattaaaattctcatcagaaaatcctatgctttcaaatgtatctgctcaaagatgtcactctatgtgcggcaaagctttgttttacttgatcaagaaatgaatgtgactttatgatcttgtattcaactgtgaaca

SEQ ID NO: 541131 - DNA, 553 bp, Homo sapiens
caattaaaaattactgggaggaggctacgtcttgaattaaactcagcattccacatctttgaggtggcggaatgactgaggggagggggtctgtctagccacatccaaatcttcctgagacagagggagatccctcatttgttgcagtgtattttccttggtcgcatctgacacaggggttctgtgggttgaacagaaagggactttgctggaggggaggcactctgcatagaaggaaagtagggacayctggcagaagcaggcgctccgagaataaacagtcaaagcagctcgcaatagtcccaaaaagctacccctcaccgaacctggcgtgcctgtcgccgcttgccccgctcccagggctcattggctcccagtctcgacgtcagacccgtagcctctcacctattgggccagccaggacctgaggcggagtgcagaagcgagggcctggagacagccgagagccgccttcaaggagggctgggggcggggctagaggaggggctgggggcgggtttcccgatgaaggggcggccatggcagctgcgca

SEQ ID NO: 541132 - DNA, 548 bp, Homo sapiens
ctgctcaagagaagagaaaggaaggccagaaaagaaaggaaattggatgacagaatatcatctaactttctctaagatatttcatgaagtttgtataagcctgacgtcaataccacacaaagacaaacaaaaaggaaaaktatatcttgaactgtgtgtacatagacagaaaagttctaagaacatattggcaaaccaaagataacaatgcataaaaaatcatgaccacattggatttattccagcagtgaaatgatggttcaatattaaaaagacattaatatacattaccacattaacatactttttaaaagacatcattatttcaacttgtggagaaaaggactttaagttcagtgcccattaatgatatttatgataaaacctttagcaaaataagaaaaatgacttaacctggtatatcagtgttgttctaatcaggaaaggaaaaccatacagcaatatgaatagggaaagtttaataaaaagatttttttaagtaaaacatgatattagagtgggtgaggaattagctacagcaagtataa

SEQ ID NO: 541133 - DNA, 477 bp, Homo sapiens
ctgctgcatgaaactgtgaactttaatygctgttagcttagaggcagcaaaatacaactgaaaggggtataaattatagactgtactcattatctttgtaacccatgtttcattaagttccttgttattagtgcatgtattaagcacctgagtatcctatttgtgactattttgaaaaatatttataagtggacagcagaaaatgtataatagtgaagagtttggacattgtgagacttactgtgaatgagcttgggcctttgaggaatcatggatatttttgaatacatttctaaagaaaataaagtcactcattcctggaaaaaaaaatcaaacacttataaagagagcctgatgcaaaattatttcatctactctttgatagttctctaggtagccctaaatattatgtatttgaaaaaaataaggaataattaattattactgcctaatgtaaagcatttccaatattatatc

SEQ ID NO: 541134 - DNA, 605 bp, Homo sapiens
aacataggcacagcagagaaggaaataaataaaaatacacataaagccttccaaatagacactgaattaagattctaaaaggaaaccacaaattatgcctgtctctatagatggtctctgcatttacatgtcaaataaagtttaatgccacactgtggaaacatttagggacctaatattagtcttgtcagccatttctccctcagaaatgacatataaagacaatagaagccttggactttatagtgtcacttctttccagtgcccaaagcatttcacgtaagtgacaaatgcaatcatttgttaatgctggataatactgcttttatctccatagtataattacagctgcctcttaacatatcttaaactgataaacagaaacatgttttctacttccttctctgctctcactgttaacaatgacagaacatccaaatggggaaaatgttcagaagcagagatccaacttatagaagaattaatgtcatcatcaaytcatggcccaggggtccttgcacagacatggcattctaatagaaaatgggcaatgggacactgttgaaggtaactagacctcaagcgacagaatccatcaggccagt

SEQ ID NO: 541135 - DNA, 549 bp, Homo sapiens
attgattcaaaccttccttaatttccacctagatgattggaaaagacactctttcatcctgcctctctatgctgttgttcacctcgtaaccataaaagcttattccttctaaagccagacttctgaacatggtttttccctgctcaaaacacttcagtgtttcctcactactccctgaacttaaaataaacaggtcaggttaatctcagcctgcattgccagacagcttcattccacctactcagtattccaatcagaacaaagaagccccatggtcgactacttgcaaaaatgatgcctattcttcccctttctgtattcataccttttgcaatgcgactttgcagcttgttccataaagagataaactctatttccttactccctgaatggctaactctgaccttctgtagccaataaaacacaacagaagtgataactatgtgccagttctgagtctggtcagaaacattctacctttggcatgaaaaaaagtccagcatagcctaatggaggattagagaccaygtggagcaaagcctagtctac

SEQ ID NO: 541136 - DNA, 267 bp, Homo sapiens
ctgatatactttctgtcttattctgtyacaaaacatgatttcatattagcaaggaaaaaattgttcaaatctaatattttcctttcccaacactacgttactaccattattaaaacatattacgtgtttctgcacatgttgtactatcttacttgaactccagatccactctgtgagatagcagggagagaaactcatctctatgttgtacatgaggaaaatgaatgacagctagcatttgccatttcatcccaaacatctagcaca

SEQ ID NO: 541137 - DNA, 667 bp, Homo sapiens
tggtttgggataaatcttttgtcttcctccctatccccaacccctctattactattatcaccaaatcacagcccattgaccccatccatgccacctatgttgatatcttttcaatatgataccagccccaatattatcaaaactaacctattatgattctgcctctatcatattctatcatattctttctttctttctttttttttttttagayggagtcttgctctgtcacccaggctggagtgcagtgacacgatcttggctcactgcaagctccacttccagggttcttgccattctcctgcctcagcctcccaagttgctgggactgcaggcacctgccaccacgcccggctaattttttgtatttttactagagacagggtttcactgtgttagccaggatggtctgaatctcctgacctcatgatccgaccgcctcggcctcccaaagtgctgggattacaggtgtgagccaccgtgcccggcttcatgttcttttccttaatctttgaactatccttttggcatcatatttaacatcatcaaatattaaaaagtctcctatatgtaattttatgactcctccctcagccctcacccccaaaactagttgctacaaatctaatatttttttttaaatggtacacacaaggtaggtcttgag

SEQ ID NO: 541138 - DNA, 498 bp, Homo sapiens
ctgaggatgacttggggccatccagtgtaaaacccaagaagcaggtgctstgtgcatggccagaggtgtttgtgttcagcattccctttgtgtgtgttctcaggttcctggcccccgcttgccatctgtgacaatcatctctttatccctctcttctttagctctctgaaaaatgaactgtagtttcaaaaaaaaaaaaacccacaaatatataattacaaatcaagttaagtgctaagtaagaaaaatacagaatgaaatgagaaagtatattaggggcctaatttaagtatggggggttggatttgagaattggtgaaatagaataagtagaagctaaacatgtacaaactaggaaaaagggggtttctaggcagagagaggtacaaaagttctattttagcatcacttgtgttaataactctaaaaagcagtcatcagtacccagaaaccagctgggtttcagaatcaaatgatctatgaatgctgtgatgctta

SEQ ID NO: 541139 - DNA, 576 bp, Homo sapiens
gaatctgcctaagcctgctgaactcctggggggaggggcaaccagcacagttgtgactgcctgctgtctaagtcctttgagctccttgtgggagaggcagcagtcagcactgggactcgcaactgcctaacaagctaagctccctgggcaggggaagggcagcacccatttctctagttccaggctgtgcttttcccctgctggagccagggaggctttgtctcaagacttgtccccacagcccaacacacctgctgtggcagtctgccaccagagtgtttcttcaggcctatccttcctcattgggtgaggcttccctgcaggaagagttattggagaacacagtamaatcaaagtagaactcagtatcaagaaactcactgaaaaccacacgatttcatggaaactggaaaacctgctcctgaatgacccctgggtacataatgaaattaaggcagaaatcaagaagttctttgaaaccaatgagaacaaagagacaacgtagcagaatctctgggacatagcgaaagcagtgttaaaaggaaaacttatagcactaaatgcccacatcagaaa

SEQ ID NO: 541140 - DNA, 463 bp, Homo sapiens
gtgttagttttgatatgtagcttagtccttagctatctttaagatcatttttcttcacatatgcagctataacctttgagaattttgagtgtttctaatctaatattccttgaattagagagctgagagctgaatgagaagtattcaaggagaaagatgcttaccataatatgattcttagttcaaaaattcattcatccatagctttaaaaagacccaatacactgaccttcaggtcaggggaacaagtcacattttattgagaaggacgatttgagcctataaaaatgtcctgtagtttatcatttctctttaaagaaataatagctttaaagtgtagtaactgtggacccaaaggaaacatttttttggatcattttaccataacattttttaaaaggcccagagagtaatggaaagtagataaccccccctycccatatctgtctattgaataaatagg

SEQ ID NO: 541141 - DNA, 636 bp, Homo sapiens
ttttggggaagtcaaagttgtattcagatttttgactgtgaagggggggcaggtttagtgctgcatcccctgcattgttcaagggtcaactgtattgtaaaagagtttcccctttaaattttttcctgaaaaaaaaaawatatatatatatatatataaacaatggtagagcatttattacctttctactgcctagagtatctctgacatatgagtaaatggctatatgaaagctatacattccttatttcatttgatagtcaccaaaattgattttagatgtgtttgttaataaataaaagaaacatgagttcctttattatcctaaagttgagattgaacaaatgtgttttcctccattctctcttaaaatacgcattttaatgtttttatgtgatatgaagacaaagagaatgggagagaagaccataactgaaagaacaaacaaattcataagtgtctatttagctatttagaaaatagaaataggtctgttacctgctaattcacatagcagagcagagaaaagcagaagttaatttcctgagtgagagacgccaacaagatgaaagcaggttgttactttggaacttaaagactcaaagactagaggaagaattcaccagggaatgctga

SEQ ID NO: 541142 - DNA, 636 bp, Homo sapiens
ttttggggaagtcaaagttgtattcagatttttgactgtgaagggggggcaggtttagtgctgcatcccctgcattgttcaagggtcaactgtattgtaaaagagtttcccctttaaattttttcctgaaaaaaaaaaaatatatatatatatatataaacratggtagagcatttattacctttctactgcctagagtatctctgacatatgagtaaatggctatatgaaagctatacattccttatttcatttgatagtcaccaaaattgattttagatgtgtttgttaataaataaaagaaacatgagttcctttattatcctaaagttgagattgaacaaatgtgttttcctccattctctcttaaaatacgcattttaatgtttttatgtgatatgaagacaaagagaatgggagagaagaccataactgaaagaacaaacaaattcataagtgtctatttagctatttagaaaatagaaataggtctgttacctgctaattcacatagcagagcagagaaaagcagaagttaatttcctgagtgagagacgccaacaagatgaaagcaggttgttactttggaacttaaagactcaaagactagaggaagaattcaccagggaatgctga

SEQ ID NO: 541143 - DNA, 629 bp, Homo sapiens
tgcaggtgactggttagtttatatgtcacctcctccaggcaatatttcttaattattctccctcccaagccagaatttctgtctgttctttattatctataacatgtagagagtagcaagatgttaacagaaattgtcttttaatcgtttgcttgtctctgacacctttagggaaataacttctgtttatttatatgcatgactctagatagaatatatctaaatgttgaagtcatcagatttgaaaacagaatgtgtgtgttcaaatcttaactatgacacttaatacctgtgtattaaaacaggtcacataattttaatgtctttttacctgagtaacatggggagagacacttcacaggawtattgtgaatagtaaattacttagtacctacaaaacactttagaatagtatcttgaacaatctacgctccctgtgatttttgataaaggaaaaacttccgccgaattaaatttaaaggagtttgagcaatgtacgattcgcgaatcggtcagcccacagaatcacagcagattcacggagactccagcacagccacgtggtggaagaagatttatagacaaaataagggaaatgaggtacagaaattggcattgaggtacagaaa

SEQ ID NO: 541144 - DNA, 629 bp, Homo sapiens
tgcaggtgactggttagtttatatgtcacctcctccaggcaatatttcttaattattctccctcccaagccagaatttctgtctgttctttattatctataacatgtagagagtagcaagatgttaacagaaattgtcttttaatcgtttgcttgtctctgacacctttagggaaataacttctgtttatttatatgcatgactctagatagaatatatctaaatgttgaagtcatcagatttgaaaacagaatgtgtgtgttcaaatcttaactatgacacttaatacctgtgtattaaaacaggtcacataattttaatgtctttttacctgagtaacatggggagagacacttcacaggaatattgtgaatagtaaattacttagtacctacaaaacactttagaatagtatcttgaacaatctacgctccctgtgatttttgataaaggaaaaacttccgccgaattaaatttaaakgagtttgagcaatgtacgattcgcgaatcggtcagcccacagaatcacagcagattcacggagactccagcacagccacgtggtggaagaagatttatagacaaaataagggaaatgaggtacagaaattggcattgaggtacagaaa

SEQ ID NO: 541145 - DNA, 585 bp, Homo sapiens
aaaatagatacaaaatactccttctcccaaatacaacaatacatagatagatagatagatagatagatagatagatagatagatagayagacagatacatagatgcatagatagacagatagacagatgaatggatagatccatagataaatagagtaacgcataaaaacataagtaggtacaaagatgcatatatccatagtcaagcacatttgggaaacactaaaaattgtatctctttgtgatccacaatgatattagcattaaaagcctctgagaattatgtattatacatgagaaatatgtataaatttaactcttttaaaaaaatttatttctgtatgaaatgttttttcacacagttcaactaacatttcataaaagcctctttagatgctgtaaaaagcatttcaaatataataataagttacatcgtgatatttaggcagtatctaagctaactttatgtgttaattcagttacacttcacagcaacaccatgggacaggcaatattttaatgcctttcttgcaaataaagagctgaggtcccaaaagattaggtaactagtccgagatcaagcag

SEQ ID NO: 541146 - DNA, 585 bp, Homo sapiens
aaaatagatacaaaatactccttctcccaaatacaacaatacatagatagatagatagatagatagatagatagatagatagatagatagacagatacatagatgcatagatagacagatagacagatgaatggatagatccatagataaatagagtaacgcataaaaacataagtaggtacaaagatgcatatatccatagtcaagcacatttgggaaacactaaaaattgtatctctttgtgatccacaatgatattagcattaaaagcctctgagaattatgtattatacatgagaaatatgtataaatttaactcttttaaaaaaatttatttctgtatgaaatgttttttcacacagttcaactaacatttcataaaagcctctttagatgctgtaaaaagcatttcraatataataataagttacatcgtgatatttaggcagtatctaagctaactttatgtgttaattcagttacacttcacagcaacaccatgggacaggcaatattttaatgcctttcttgcaaataaagagctgaggtcccaaaagattaggtaactagtccgagatcaagcag

SEQ ID NO: 541147 - DNA, 535 bp, Homo sapiens
gtgcaaagatcttacctccctttctgaatttcaggagttgtaacactttcaacatctatttggggatatcaaatattaggttatttactttagaaacattaaagtttggaaactcaatattggctgcttatactgcagtaaccaagaagagatgcaatgagctataaaaagtaatggctcagattgcctaattaaaattgttagtatcttttataattttaaaagaaccttcaaattcattgtcacataagagcagaaaagcatacgagacagttggagaatgattttcaccttggctagtctcaataagggctatatcattacctgccttgaatatgaaagattattaaaccaaaagaaacaactgtgactcaagactgcagattcagaaggtcccttgaattgaaagggcctctcagtactataaacatggcaacagagtaagatgtcacctgatccaccactggaagtaagtatcacyagatacactatgtaatacagtaggaggtctgtgacttgattaagggcacggagt

SEQ ID NO: 541148 - DNA, 627 bp, Homo sapiens
gctcccggcagccatgttgtcccctgtgggccagggcccaggagcccctcagcctggtcccagcagcccaggagccctggagctgagcaggaggcacaatccatggggcacaggcgctcatgcacgtgcagggtccggctccaccacgccagctcggcctgcagggactggatctccttccgcagggcgaggttgtctttttccagagactcgtgctgctgcagagaagcagatgggcggggaggggaacctcagccagtgtcaggggccccgcatgagccttagccccttccagggtcctcaacttcaggagaaagatgccaccaccattggaatagccaagtggggtctcttggccactctctggccagcccttcataaccacctaccaagtctcccctgtcccaccctctgaagggggctcagatccgcctgctstcatcccaccactagtgccctgagccggtgccatttctcacctgggatatgcacgggcctccaacccgtgtgtcccccaaaccacctattctcttgcccacaggagccattcagcaaccatgtcattaattgcaggttaaagccctttagaggcacccaccaaattccctgtggtagaattccaggcct

SEQ ID NO: 541149 - DNA, 627 bp, Homo sapiens
gctcccggcagccatgttgtcccctgtgggccagggcccaggagcccctcagcctggtcccagcagcccaggagccctggagctgagcaggaggcacaatccatggggcacaggcgctcatgcacgtgcagggtccggctccaccacgccagctcggcctgcagggactggatctccttccgcagggcgaggttgtctttttccagagactcgtgctgctgcagagaagcagatgggcggggaggggaacctcagccagtgtcaggggccccgcatgagccttagccccttccagggtcctcaacttcaggagaaagatgccaccaccattggaatagccaagtggggtctcttggccactctctggccagcccttcataaccacctaccaagtctcccctgtcccaccctctgaagggggctcagatccgcctgctgtcatcccaccactagtgccctgagccggtgccatttctcacctgggatatgcacgggcctccaacccgtgtgtcccccaaaccacctattctcttgcccacaggagccattcagcaaccatgtcattaattgcaggttaaagccctttagaggcacccaycaaattccctgtggtagaattccaggcct

SEQ ID NO: 541150 - DNA, 566 bp, Homo sapiens
ggcccaaatcaaaaaaggcatcttggctgggcacggtggctcatgcctgtaatcccagcactttgggaagctgaggcaggtggattacctgaggtcaggagtttgagaccaccctgaccaacatggcgaaaccccatctctactaaaaatacaaaaactagctgggtgtggtgcagggcatggtgctgggcacctgtaatcctagctactcgggaggctgaggcagaagaattgcttgaactcgggagacagrggttacagtgagctgagattgcgccactgcactccagccagggcaacagagcgagactctgtctcaaaaaaaaaagggcatctcataggtactgcttcctgacgggtggtgggaagggaagactgagccctgtagtggaaggcagatggcagtgctgggggaggcacccaggtctctgtctgcagcaccagcctcggttcattgctagtcccttgtttagaaaaaggcctcccaagaggcacaggcaggccccggcctccagcacagcaagaaggaccctgagaagtcattgtcaagttccttcattttattt

SEQ ID NO: 541151 - DNA, 566 bp, Homo sapiens
ggcccaaatcaaaaaaggcatcttggctgggcacggtggctcatgcctgtaatcccagcactttgggaagctgaggcaggtggattacctgaggtcaggagtttgagaccaccctgaccaacatggcgaaaccccatctctactaaaaatacaaaaactagctgggtgtggtgcagggcatggtgctgggcacctgtaatcctagctactcgggaggctgaggcagaagaattgcttgaactcgggagacaggggttacagtgagctgagattgcgccactgcactccagccagggcaacagagcgagactctgtctcaaaaaaaaaagggcatctcataggtactgcttcctgacgggtggtgggaagggaagactgagccctgtagtggaaggcagatggcagtgctgggggaggcacccaggtctctgtctgcagyaccagcctcggttcattgctagtcccttgtttagaaaaaggcctcccaagaggcacaggcaggccccggcctccagcacagcaagaaggaccctgagaagtcattgtcaagttccttcattttattt

SEQ ID NO: 541152 - DNA, 169 bp, Homo sapiens
tggcacaggggaacacactccagggggaaggtggaagttggccaagccagagacccctagaaagacacctccctgcaggaggagggaagagctgtctaggaagccaagactctgcaagggtgagatrgccactgtcctcctagtcacggaggcaggaccatccaccagc

SEQ ID NO: 541153 - DNA, 301 bp, Homo sapiens
cacaagtcaacatggagatctctctctctctctcacacacacacacacacacacacacacacacacacactctggcacaagcccagcattcatggcgcagccatctcttgtacttgctagcaaaacamcacctgtggaaagtcagctcaaacttccaacctcatccctcacaaagggggaatggagggtttggttttggctttcactggagtctgcaacaagaactggcatcatgctgcccatttcccgcctctccccacccagacccctgcctcagggacgcctgtcctcagcccagccc

SEQ ID NO: 541154 - DNA, 301 bp, Homo sapiens
cacaagtcaacatggagatctctctctctctctcacacacacacacacacacacacacacacacacacactctggcacaagcccagcattcatggcgcagccatctcttgtacttgctagcaaaacaccacctgtggaaagtcagctcaaacttccaacctcatccctcacaaagggggaatggagggtttggttttggctttcactggagtctgcaacaagaactggcatcatgctgcccatttcccgcctctccccrcccagacccctgcctcagggacgcctgtcctcagcccagccc

SEQ ID NO: 541155 - DNA, 591 bp, Homo sapiens
gttaagagtccagcctgggtttggctcccagctccagcactagtcaacttaacttctttgcattgttgggcagaagagggggcgtctcctttccttccttcttcctctcttagaccagcttcccttcccttctggggctgccacagcacccggtcagcagaatccttgcctaattcctcttycttctccaaaccacagggtccccctcatcagaaagaagtccttgaggcgcaccctgtccgagcgtggcctgctgaaggacttcctgaagaagcacaacctcaacccagccagaaagtacttcccccagtgggaggctcccaccctggtagatgaacagcccctggagaactacctggatgtgagtgtgcgggcaagtggtggggccagctctgaggacttggcccgcaggaaagagggtgtcccaggggtcttggaggacgggcctgggctctgtggctccaggcagtgacccagagtctgccccctagatgtcagtggcccagggcaggcaggaaagctcacagtcagagttcattcattcattcgttcactcgttcatgcaatgttaatttctctgagcgcctcatt

SEQ ID NO: 541156 - DNA, 551 bp, Homo sapiens
tgctggttaaagtcaagtaggtttacttaagcccaaaagcttgaagctgcagtgaggttgtgatcatgtcactgtactctaagactaggcaagagaaaaaaaaaaaagatggatgttctactcaggttactcatttaacacactgcctatcaggcaaactgtcagatgtcccttcaagttccaggtacttcagggagcatgagaggaaagccagtttcccatggaaatttacacactgatgctaagagacacatacacacaaaaaaagtaaacaggactatgtaatcaatcattttattattttcatcaacaaccaacacagcaacacaaattgacagccagtcctcatgggaaccttttttgacgtgaagagcaaggccctgaatgagctacctacatggaacatagtatttgcaatatgcaaatggagacctaaaggctcatgacrggaacagaaggtggctgtatacagaggaacagacacgaaggggagttatgggaagttcaatcaacaattggcaacaagctaggtcagtagtttacgaaagtgg

SEQ ID NO: 541157 - DNA, 624 bp, Homo sapiens
ctgctggttaaagtcaagtaggtttacttaagcccaaaagcttgaagctgcagtgaggttgtgatcatgtcactgtactctaagactaggcaagagaaaaaaaaaaaagatggatgttctactcaggttactcatttaacacactgcctatcaggcaaactgtcagatgtcccttcaagttccaggtacttcagggagcatgagaggaaagccagtttcccatggaaatttacacactgatgctaagagacacatacacacaaaaaaagtaaacaggactatgtaatcaatcattttattattttcatcaacaaccaacacagcaacacaaattgacagccagtcctcatgggaaccttttttgacgtgaagagcaaggccctgaatgagctacctacatggaacatagtatttgcaatatgcaaatggagacctaaaggctcatgacgggaacagaaggtggctgtatacagaggaacagacacgaagkggagttatgggaagttcaatcaacaattggcaacaagctaggtcagtagtttacgaaagtggtcatctatacagtgcctgagtttgggttctgggcctggatcatgtaagaaaggcagcaaagtctgggtgcca

SEQ ID NO: 541158 - DNA, 624 bp, Homo sapiens
aaaaaaaaatactaaccctccaagcgtggctcagatatttctgcttggacctaagaggtggctatttttggaaaggtccttttgtggctgtgaaggaaacaaatattccctcttccttcagatcctaaagtactcagtacctttgtggagtttgctgtgggagcacccaatagcctgccctcagccatttcccttcctgcagaattcaggaggcttctgcagcaaggatagttcaacccccttcaactctgcaggcttctctggtggaggcagggacctccagagtgactgacagtagttccaaggcaggcggagtgggagaactggcctctctgtaaccttacctgccaggggccctccacttcccaggtgtggaaactgaggcttagagaagggygaggactggctgaaaaatcccatagcagatgagcaacagaactggaacccaacccagctctgctccactctgacggccacaacagcccagcaggtggtctgagtggtgctggggacaccagatgtgactcaggtgagatatgaacacatgggctttatatccacagccaggtatttattttaatgtgtatcaataagtagctgtgacatcgaggctacgatttcaca

SEQ ID NO: 541159 - DNA, 470 bp, Homo sapiens
tttccctttccttgctctctgcatagctgctgctcaaccatcctccttatctatgtctccccgaaagttcaggctgtaggccgagttaaggccttgggaataggtgctagtcagagatgagggtgggcatgatggtgagctggggagtctgggagcagtgcagggcacaggggagcttgaatggccatctccttgagcacctgtgggccactggagagctgctcattctcaggggtatgttttacctatttttttaacttttgcttaaaacaataatacccttggaaatatataaaggaataaataaaagtaaaaaaatcatacagctctrgagataaacagtggctaacatttttttccaggtgcatgtcttttctctttaagcaagcaggattatgctgtaacactttatgcaattggtaacctgtttatttttttgtgagcatttccctcatgtcattcaatgttct

SEQ ID NO: 541160 - DNA, 529 bp, Homo sapiens
gcaagctagagacccaggagagttgatggtgttaagttgcagtcaaagggcaaagggcttgttccagcttgaggcagtcaggcaggcgaagtgacctcttattcagcttttctgttttattcaggtcttcaactgattggatgaagcccacccacattaagaagggcagccttcttttctagtccactgattcagatgttaatctcacccagaaacactctcagagatacattagaataatatttgaccaaatgtctgtggtccaggcaagttggcatcgaaaattacccatcatgttcactgtggtgactcttgtcaaagatgtgggcagggctaagaggaagtgacaagggatagtgcagcactgtgggactagcaatatgaaggagacactgctactcctaggctaggacctggtggatagcaactaccagcacctggactcagtggctacaggaggtgaatgtgaaactggggtagtggcctcttacagaragatgcagacaacccactgcccagtagggtgaga

SEQ ID NO: 541161 - DNA, 537 bp, Homo sapiens
tattagtgaaaaataagtcataggtaatgttcttctcacttatctctaatttcagtgatgattaatcagcagcccacacttagatgatactaatcaagttattgttataatggcaccagtttgtgtagttactgtgcataattgtctgacataggctttgcactggggagtcagcaggcakaagagtagaatctggaatctctttggtccactgacttctctccacatgcaattccttcatcaaactgtggcttaaaagagctttctacctctattatacgtcttcccaggttgagctgggaccagcaactgaggaaaccagttttaaaaactaataaacaaacaaaaaaccactagcacttgctttatgattgacagatgatagagtgaataactcagcaataagggccttagtcatggaccccagttttccagctaagaaattgtcatttcatataatagttcaaagctgcttggcttcctggtaggagatgtggataagctgaatgttgcagcattattcagcatgatgattat

SEQ ID NO: 541162 - DNA, 439 bp, Homo sapiens
taaccccaagggtcttccagcttctgcctttttcttttttccaaaaccaatgtctcttgtatcatgtttccccagctgcttggcactctcttacaaaagcagtactgcagtagtaagcctccttaaaacttagcctatttaaacaacagaaaatatacacatattttagtccatgaatttgaatttaggaagagcgcaaagaagataatctgtctgttccatgaaacgtgagctgggcagcagaggaccatttacaaaaccgttcacccacacattggcarattggtattgattgacagctgggagttaagctggtgagttttgtacaaattctcttcatcaggttggtgaaattgcattctttacctaaattgctgcgatgtttgtttgtttgcttgcttggttttctgaatgactgctgattttagccccatgagca

SEQ ID NO: 541163 - DNA, 623 bp, Homo sapiens
tacattctgacttcaagttcaatggtctacttgccattttttgtcttctcttcaaaagtcagtttatctattttttttaaaacccccaaacaaataaaacaccagctaaaacagaggcaggcagctacgctcagacaggcaggctgcaccgtaacttttctgacaacaacagcatggatcaaggtacccaacaagaaagcgtggaaatctagcaggcagctttccactgaagggtgtaattagagagctgacaggctgtacatgcaatgccattaatgggtccacctgcgagagggacctggcgagcacaggtaatttggayggagtggagtactcaaaggagatccatgctgcaggtgcccaacctgaccccccaggccagaagcctccccagggaacaggaggaagggcccggcctgggccctgcaggtgacacaaagctatttgccgtggcgctcactgcacattatgctaaaagtgtgacagattttagaagcagcctgggtgggaaccatggaaacaggttagggaagaggagacgctgattgctgctgctcctgttagtgaaagaagagtgagctggggagatatgccctccctcctctgccaccctcggccactgg

SEQ ID NO: 541164 - DNA, 557 bp, Homo sapiens
gccagcatggctggaataaaagcaggcagaagaatgtggggagactaggcttgctgagtcttctggcctccatctttctcccatgctggatgcttcctgccctcaaacatcagactccaggtgcttcagttttgggactaggactggctttcttgctctttagcttgcaggcagcctattgtggggcctcatcttgtgatcaagtgagtcaatgctcctgaataaactccccttttatatatacatttaacctattagttctgtccctcttgagaaccctgactaatacacttcttcaacttcatttctttataccctctaagattttcctatgtctaccaaatttatgctcagtgcaaaaatataattcattcctctgttcttattccttgtattcatcttctattgccactgtaacaaattaccacaaatgtcgtggcttaaaacaataccaatttattatctgacaattctggaggccagaagtctgacacaggcctccaggggctaaaatcaaagggtcggctrgcctgtgttccttccaggaggttccagga

SEQ ID NO: 541165 - DNA, 548 bp, Homo sapiens
gggctctatttttgtcttgcttagatacaggcgaagaaggaggagtgggacttgaaacattaaaatttgtctttrtaagctatatgcctgacattctatgagagctgtagcctaggccagtaagaaagtttagtttcactgaatgctttgtccaggatcccagcactgcgcatttttgagaagtgagatgtaccttggccactatgaaagctatcttgaaatccaaagggtataaatgccttgataagaacttgtattgtggctttactatgtacagagacatagagaactgtggtttatattgtttaccccatatgttctttaccacaaatagagaaaccttggataaagaattgttgctttggccatatgctggatcagatgaccagaatagtggcaatagctcaataatctgtaaaaatgtgcagatggggctgttgttggccagggcatccagtgctaggaatgaatgcccaaagccaggccatttgtgctgactttttgtgtgtctttgatctgtgatatcatgattgaaaggtagatggcaa

SEQ ID NO: 541166 - DNA, 450 bp, Homo sapiens
ggctctatttttgtcttgcttagatacaggcgaagaaggaggagtgggacttgaaacattaaaatttgtctttgtaagctatatgcctgacattctatgagagctgtagcctaggccagtaagaaagtttagtttcactgaatgctttgtccaggatcccagcactgcgcatttttgagaagtgagatgtaccttggccactatgaaagctatcttgaaatccaaagggtataaatgccttgataagaacttgtattgtggctttactatgtacagagacatagagaactgtggtttatattgtttaccccatatgttctttaccacaaatagagaaaccttggataaagaattgttgctttggccatwtgctggatcagatgaccagaatagtggcaatagctcaataatctgtaaaaatgtgcagatggggctgttgttggccagggc

SEQ ID NO: 541167 - DNA, 548 bp, Homo sapiens
gggctctatttttgtcttgcttagatacaggcgaagaaggaggagtgggacttgaaacattaaaatttgtctttgtaagctatatgcctgacattctatgagagctgtagcctaggccagtaagaaagtttagtttcactgaatgctttgtccaggatcccagcactgcgcatttttgagaagtgagatgtaccttggccactatgaaagctatcttgaaatccaaagggtataaatgccttgataagaacttgtattgtggctttactatgtacagagacatagagaactgtggtttatattgtttaccccatatgttctttaccacaaatagagaaaccttggataaagaattgttgctttggccatakgctggatcagatgaccagaatagtggcaatagctcaataatctgtaaaaatgtgcagatggggctgttgttggccagggcatccagtgctaggaatgaatgcccaaagccaggccatttgtgctgactttttgtgtgtctttgatctgtgatatcatgattgaaaggtagatggcaa

SEQ ID NO: 541168 - DNA, 601 bp, Homo sapiens
actcagtcttctaatgcaggccccaactgcccagaaggagattctgctcaagaccttctcccacaagatttgccacgtggcttatttcctcatgcatgctcatgtattcatgttttgtggggaaatgaaacttccttgaattttaaatgttcttgtatatatgtggggagagagagagagagaggagagaaagcctcttatgacttgtcacataccgtgaggattagctgtgtagcaatttttctagtgattttatctaatccaaatggataataaaaacagtgtaatgtctctgagggggtcaagagtttgcagcctggactaggttctaggttaagccacaggtgtctgggaatctagggagctatctacttaagtacttggagacacttctagattgtaaaatccaagacctatactgatacttggttcctggagatattttatttacataactaaggattagactaaagaagaaatctttcatgaagggagtgagacggctacctcttccattttatacacagagaaaattatttttgctcatctttcacctatggagtstaccactacttgaaaaccagcttccaacctctctgag

SEQ ID NO: 541169 - DNA, 532 bp, Homo sapiens
tgaaaatttgctgctttctaatagagattcaatctgtcttcctactgacctcaaagaggaattttaaaaagcatacatatctctgtttctccarccagttaccacttaaaataagagtaaatataatttgtaacaattgctatatgcataattttcttattttaaaattctgggtttacatttatcaacaaatgctattacagtgtcctggcaacctaactccacctatgtttacaattagaaatatttttaaaacactaatgttccagtaataatttcacagtcattatctaatatttagtataatttcatgaggtaaatatcatgttgattagtgatatcacatgtatctttggagacctgaacacagagatattctgctgagtgctgcccttcctgtctggtcttattttcgtaagtccttcttcacttaaactgccacattgagtgataaccagaggttagactctggtaagagtcagggctttgtcttgaatgccttagttatgattcacgcgaccgaagtgtacac

SEQ ID NO: 541170 - DNA, 609 bp, Homo sapiens
ccaggcttaagaaacgccatctgtagtaagtgggctgcaaggaaatcakctcaacctttccaacagatggaaactatctttcttaaactagacaacagacaaatcagtcctctgctctggaatgagacaatatctctcttttccaaggcatttggttatacaagtaatctcaaaaagatagtccagaacaaaagttgtcaacaactctgctcaaaagagatagagaaatgagagagaactatgaacaatagttttctgattgtctcattgtatgttagttctataaaatggtctgaggatgatgctttttgttccttatccctttctttttctttcagagtttgctttattctattctccaagtgccttttatttctactgttaagcagatcaactaatcttgctttcagtggcttgtattaaacaatattctgaaaaacttatattctactccaaggaataaattaatatttttaattaaaatgattcttcggtcttacagtggaattaaattcctagttaacaggaaattatttttccatactacttcaataattatttgccaaacctagagatcacacattttgtatttatttgtttcatttcaag

SEQ ID NO: 541171 - DNA, 615 bp, Homo sapiens
gctgaagacactttgtttcatgtgctttcagaaatttatgtaagttaatctttacacacgcacacacacacatacagaatttggtatctgtatgaaactacagagcctcagaaaagatgattgtacaaaaccatatgataaaaatacactgctgaactataagagcatttccgctggattgtaaaacacatttatcttgttatatcattaaaatggaaatttcagattaggttatagtatatcctaatcattacgaaggatggggctttcaaaataaaatatacttgaagaagtataaaaattattttattatgacactttcttaacgtatttcaatattcaggcattattctaagatttaaagaatactaaagcttacaagtttgtatttttcaccttatcttttataattagttaaccttaatgtacatgtaatttatttacattatgttgactaacagtctagctcactgtcagaaagaagtcaaattgttgtgtattaggagttaatttttacaaatagtatttttatttgtacccaaaatgtcttgtatttaagtgttttttaaaagttttttgctayagatataaaatgatatgaaaatactacatatt

SEQ ID NO: 541172 - DNA, 607 bp, Homo sapiens
cactttttctgaggcgtctcagctaattcagttaacatccttttttttttatctttttctcccttttctttctcaaaagggttccttctgttttccactgacattgtgtattagtaatttacttagactaagtgagaacattaaaaccttaggttgcatctgcaaaacaaagtttaatttgagatgaatttatttatcctacacacacccacacacagacttatctaaatggcacgaagtaaacacacacacacacacacacacacggtttctattgggagccaccacttaagggatcacattacwctagaatcagagaagacgtggtagaaaaatttggggtaggttaacaataacaaaatacattggtgtttcagacaaagtacaggtgatagaagatgaaggtaggaaaaagaataagattgggcagggtgcagtggctcactcctgtaatcccagcacatggggagaacaaggcaggaggattgcttgaggccagacgttcaagaccacccctaaaaacctagtgaatctctaccaaaacaaaaaagaaattaacaaattagctgggtatggtgctgtatacctgtatctgcagctatgcagc

SEQ ID NO: 541173 - DNA, 607 bp, Homo sapiens
cactttttctgaggcgtctcagctaattcagttaacatccttttttttttatctttttctcccttttctttctcaaaagggttccttctgttttccactgacattgtgtattagtaatttacttagactaagtgagaacattaaaaccttaggttgcatctgcaaaacaaagtttaatttgagatgaatttatttatcctacacacacccacacacagacttatctaaatggcacgaagtaaacacacacacacacacacacacacggtttctattgggagccaccacttaagggatcacattacactagaatcagagaagacgtggtagaaaaatttggggtaggttaacaataacaaaatacattggtgtttcagacaaagtacaggtgatagaagatgaaggtaggaaaaagaataagattgggcagggtgcagtggctcactcctgtaatcccagcacatggggagaacaaggcaggaggattgcttgaggccagacgttcaagaccacccctaaaaacctagtgaatctctaccaaaacaaaaaagaaattaacaaattagctgggtatggtgctgtatrcctgtatctgcagctatgcagc

SEQ ID NO: 541174 - DNA, 600 bp, Homo sapiens
aggatagtagtgacagaattttatcagttatcctgaacttggaggaaggtagacactaggcgtctcctaatatagcagaatgaaagtggccagggaaacttctggatcttgggatggtttgagcaaagattttacccctatttgtgaggagtgacctgaagtgtttgctcaatgaggtgtgaccattagctccaatacagaatggaagtccactctcttcatctgattttggagtgaaaagtttttttctactcaaagaccccaacttaactgatcaggtatatctggttttagagctaaaatcacctcarcatgctagttcactgttcttttttatattttgagtaattctgaaattgttgtctttatatcctataaatgaatatgcaaatgtctaatttttacatttaactgaacatatttataaatcatattaacaatgctccacaattcattcattttaatattataattgacaatcatatttaacattaaatataatgttaaatttctccatactttggtaattatcttggcagaaggaaaaaaacttaggcaaaaatacattcttacaactttggatatatcaccatattcaaa

SEQ ID NO: 541175 - DNA, 368 bp, Homo sapiens
taaattgttaaaagaagacttgctaatttatcttttccccattaggttcagtgcattttggtagatgaagtttagaaagaggaagggagctcagacttaatagttggagccaactaatatactgccattctagtctttatgtkaagatactagggacagagtgttcaatctgtgtgttattattagtagtattggcaatgagaatatgtaaagcaataattctcagctgtgggaaggcaggcacagcagccttcagagctacctcatatatggttctcacattcccctaaattaccttaacccataaatcacttttattcatcactgtttcctgtgattcactgggaaaagcctcgaagagcatcctg

SEQ ID NO: 541176 - DNA, 493 bp, Homo sapiens
tgttaacaaccacatactgcatttataagagtgtctggcccactgggaggccgaggcaggtggatcacgaggtcagaagatcgagaccatcatggatagcacagtgaaaccctgtctctactaaaaaaaaatacaaaaaattaaccgggcgtggtggccggtgccgtagtcccagctactcgggagcctgaggcaggagaatggcgtgaacccgggaggcagagcttgcagtgagccgagattgckccactgcacttcagcctgggcaacagagcaagagattctgtctcaaaaaaaaaaaaaagagggtctggtgcagaatatactaaacttgttagctattatcattaatagtaaattttccaacaccattttataacctgtttccctacaactagcaatttggcatacaggagttcaggcctcaccatattaggtcaatattccaatttaatggtatcttatcctctgattacacactttagcctatgca

SEQ ID NO: 541177 - DNA, 568 bp, Homo sapiens
atttaacctggtttatttgatttataaataagtaaaatcagtttaaagccattagaaatgacattcctaaatgcgattcattaagcatccacaaattatctaaagcaatggttagtataacaaaaaaagcctgtattttaaattatagtgttttttaggttattattataaaaaataattgtatagaccaaaaacatacagccaggttcaaaatattacactgaaaaccctttagtaatatttttcaaaaatattatactaggagtttatatattttcctaacacctaaggaaatgagtattaaataaaacatgaaaattcatcaatattatttctcacttcgtgggttatctgaatgatataaaccatgargcaataagtaatattggttttgaatttttacctttcttgctaatgttctatatgaataccaaaattttctttaattgtaagattataataatgttcaatagctaatccaaactcatgtgtgtagttttagtttcctcttagatttaggattatatttaatgtgattctgtttgtctggcagtgtttccattatttt

SEQ ID NO: 541178 - DNA, 649 bp, Homo sapiens
ctgccacctccttgatctcgtacttctcaggctctagaactctgagaaatagattttgtgatgtatargccacccagtttatgctgttttgttatagaagcctgaatggactgagacacatattgattcaccctggagcaacaggatccctctatagaaagccccaactcctatgaggtagacctgtccagacagctactctttctggacactgtaacaaatcacaacccttcaatcataggcttggtgaagtctccctcctgttgcaggcctgaagccctgtactactccctgctggctcacctaaactctgactacatctacaacaataatcccattatttagttatctttaatttgccaagtttcaatgggctctctatttcctgccgggactctatctgatgaaaacataatagtaaggatttggtttaattataacatgcatattacatgcaaaatgcctcatgtcattactcacaattagaaaacttaatgcattctcaatgacactatgggaaacagtgctacatttgccatcctctctcttgatctctttaccagtgaccaacagtggacagaccaggagattgtatttgtagccttcaaatagcacaaacttgaatattttctagtaaatttcctgattc

SEQ ID NO: 541179 - DNA, 601 bp, Homo sapiens
agcctgaaacacccactttggtcttggcagcagagaggatggaaggtgaacacctgccctccgccttagaggagtgtaaaatcccayatgaaaccctgattgtcagtttggaaatgtctcttaccaaggccccattctttcttgctatggccctggcaaatgaagaggaatttcatgttactatttttctgatactttccttcacctctcctttcactcccattgtgaggagatgtgtcttggggatgcagttttcatattgagacctgaagcttccaaagggcctatcactggtgcctctctattctcttcttctctccctttccctacaaatagccagttaaaaatctgcagatggtgtaaggaaataatcacgaatgaggggagatcctaaggcatctttcataaagcagaaaggcgggctcagcttctgatcccaaaagtctacggtaggcccaggggatgccatctggtgggcattcgatggacagttccactccacaccctacctcccaggaagggagatgcacgtttgctacagatcccatactgcagtgcctggtgttcaaggtcttccatcctacccacctgtccttgcttc

SEQ ID NO: 541180 - DNA, 601 bp, Homo sapiens
agcctgaaacacccactttggtcttggcagcagagaggatggaaggtgaacacctgccctccgccttagaggagtgtaaaatcccatatgaaaccctgattgtcagtttggaaatgtctcttaccaaggccccattctttcttgctatggccctggcaaatgaagaggaatttcatgttactatttttctgatactttccttcacctctcctttcactcccattgtgaggagatgtgtcttggggatgcagttttcatattgagacctgaagcttccaaagggcctatcrctggtgcctctctattctcttcttctctccctttccctacaaatagccagttaaaaatctgcagatggtgtaaggaaataatcacgaatgaggggagatcctaaggcatctttcataaagcagaaaggcgggctcagcttctgatcccaaaagtctacggtaggcccaggggatgccatctggtgggcattcgatggacagttccactccacaccctacctcccaggaagggagatgcacgtttgctacagatcccatactgcagtgcctggtgttcaaggtcttccatcctacccacctgtccttgcttc

SEQ ID NO: 541181 - DNA, 557 bp, Homo sapiens
tgtttagaccttgagtctgtttacttggaggctgggcattatacttagtttctaaacatctgctctcctgacacctagaatgcagaagsgctcaagctggaagtcctgacttgttttgactccatgtgacagtttgtttctactaaaactcatgtcatgtgtgtatcactgttaatgattttgaactattcagccctaaggtggggccccaggagcaattttctgggtcctcccttttgagtgtaaaatgatctacagaaaaatgtgtctgtggtcctcctagcatcccagaggctactgggggctctgctatggctggaccatgtgccagttctgggttctatatcagggattcctgtccatgagcaggcggcatcctcagcagctcattcctacatcactatcacctctgagtctttcttttatccacaacccaaatgccttacctcatacttctactgacactgtgtagacaccagctttttaacaccctgagtccctccatctttttccttagcattttcttcttcctccttttttaaaaataatatttcttt

SEQ ID NO: 541182 - DNA, 538 bp, Homo sapiens
ttccttatatagtatactatatatactgtactaaatwttccttgttttatttaaaaatatatcctagacacatttccatgacagtgcctagagtttcccattttaccacatactactttcctgtagaagtgaacaatagtttatatgatcaatcctctattgatggaaatctagctggtttctaggtgtttgccagtataaacaatgagtaaccttgtatgtattccattttgcattggaaagctcactgccttagaggaactgataaaatttgctttattcccttcctttgtggtagtaaacttttactcctactagtacttcatgaggtgttttctcaaaaatccatcagaaaagtattttataaacttttggatttttgcccatctgattggtttgaaatggtatctctgtgttggtcttaattgtggcacttcctttttatttatttatttattcatctatttatttatattttttgagacagactccttggctcaccgcaacctctgcctcccacgctcaagtgatccttccg

SEQ ID NO: 541183 - DNA, 618 bp, Homo sapiens
cacgccttttaaattaagaaatgaacattctccagctccacaatgtcataaatcaaccaaaagatcaagtttatggacagttctatagtaacaccctcaaaaccaaagcattgctctttatggtaaaaaaatggaaatcattaaaaagaattctacaacaggcttggatgccagcctatgccactttgaggttctgaggattcagactctgtaaccaacagagaaagaagatcgtttttgaagatagcaaagagagcaaaaaagtgccagtgttagcrtaaaaactgttcatgtctcttttatgctacttctttctaaaaagctgtgcatctttatatgaggcacttaccctctctgaacttcagtttctttctctgttcaattagatatgatacctattctgcttatcttaaagggccgttgtgaggctcaaaagagacaatgaaagtacaagtatggttttaatgcagaaatctgttattaggttagtaatagtgttaatgccattaaaagtaatggcaaaaacagcaattactttggtaccaagttaatattattatgataattgtgattttataatgagtacaagattttctatgttctccataggagctattc

SEQ ID NO: 541184 - DNA, 449 bp, Homo sapiens
ggtcaggtgggtggagttgcccagggaactccttttcatgggctctgggaaggggccaaggtcagactcagctctggagtctcctgagagctgggcacagagcagggatggggagtcaggtggccagggcctccagcgggactgaaatggggtcagtgggtttggtgcttcttgtgagggttgagacctttgcctttgcagtgtgrtgtcggggtgtgcggggaagggtggatcacagaggatgaggagggagtaaaggtgaaggtgctcagatatcaaggaatttggtcagtcaggttgtcattcttttgcttgtgtttgtcattattcaaattattcccctgctgactgaagggctactgtggggtgcatgtttagtcggttatatgctgtgtgcatgttgtatatgtgggggttgtagacaagatgtgtgtgtggagtgtgatgca

SEQ ID NO: 541185 - DNA, 527 bp, Homo sapiens
aagaaggcgtgtcttgtttatgagggctggggtgagaattcagtccagggaggaagtagaaatctgtggaacctcagaaactccttagtgttaattagtcttttggtattgatgtagcacagagactgccaactttgtggctgtggcagaacttgcctggatagtgaaacctatcaagagggcagctttaatgtctcagggagcccagtctgacacaactgtagtggtagcaaaytttaccaccatctcagctgagggaaatataacaagaaatttctgtgtcttgctcaaatgcagatgccaaggactctgttcttccatacctctgtaccctgtggagaggggtccactgcagccctgagcacattccccaaagccctgtcacttcacggggcaacaggagaacagcactctgataactgcctatagatcattgattaaacagggttttggcggctcacacttaggactactgctctacaaggctgggcttggaaaggggtgtgggcaaggctcatcagggcttg

SEQ ID NO: 541186 - DNA, 603 bp, Homo sapiens
aactgtagcctaagtcttctctccagttgttagggctcttaatattaacctccactcaataatgctagttattctttttgtttgtttgtttgtttttgagatggagtctcactcttgtcacccaggctggagtgcagtggcgtgatcttggctcactgcaacctctgcctcctaggttcaagaaattctcctgcctcagcctcccaagtagctgggattacaagcgcctgccaccacggccagctaatttttatatttttagtagagatgggatttcaccatgttggccaggcctgtctcgaactcctaacctcaggtgatccacccgcctyggcctcccaaagtgctgggattacaggcgtaagccactgtgcctggcctagttattcttactaattagtaacaaaaattactcagtgaacctcacaaaggaaattggtgaagaataagacaggaatcccttagctccctggtttatgcaccattaattatgccttttttactattattatttagaatttctgacactattaagctaatagcaaactgctttaaattggtccatttactgatctttacactgtttagttagcttcatcaggg

SEQ ID NO: 541187 - DNA, 612 bp, Homo sapiens
agcctgacctaacaggaaaccccactccaaagcaatttttccttacttgaggtagggaatggaggtggtcagatttttttacagaattacttctattctaaatgattaacctggtctctgcaagagactgtccattcttgacttgaagaaataatagagtcagggatttgtcacataaaagtttgaatcattccttctttatrcttcttgctgcttctagaaagacaacttagttctgttagatgttcgtgttcttgtccactaagcaggaaaaaggaaaaatatctctagagaatgaacacttagaaaataatttaaagtatacttctatgggatagaggagcccattgccattttttttttgtttttatttaaaaacaaagtactttccaacctactgatttctctcttgccatcttcctttctacagacatttgttgagcaccaactctgtgtgtaaaggcctgtgtttggcattgagggttctgggctttcaatcaagccctcaaacctctcaatacacacaaacatacacactaatcattatacatgatagcaagttgtaagttccataagagagggataaatatgatcttatagggctttaaagaa

SEQ ID NO: 541188 - DNA, 612 bp, Homo sapiens
agcctgacctaacaggaaaccccactccaaagcaatttttccttacttgaggtagggaatggaggtggtcagatttttttacagaattacttctattctaaatgattaacctggtctctgcaagagactgtccattcttgacttgaagaaataatagagtcagggatttgtcacataaaagtttgaatcattccttctttatacttcttgctgcttctagaaagacaacttagttctgttagatgttcgtgttcttgtccactaagcaggaaaaaggaaaaatatctctagagaatgaacacttagaaaataatttaaagtatacttctatgggatagaggagcccattgccattttttttttgtttttatttaaaaacaaagtactttccaacctactgatttctctcttgccatcttcckttctacagacatttgttgagcaccaactctgtgtgtaaaggcctgtgtttggcattgagggttctgggctttcaatcaagccctcaaacctctcaatacacacaaacatacacactaatcattatacatgatagcaagttgtaagttccataagagagggataaatatgatcttatagggctttaaagaa

SEQ ID NO: 541189 - DNA, 584 bp, Homo sapiens
agggggtagccagtcaccagtcacctgatcagcacataaggacactctcagtactccagagagtccaggagyttgagaagctctgtgccaggggccagggcacagaccaaatgtacatctcttcttatgctacaatatcacacttggcaccgctcaggaatggctttagagttcacaggtaagcaattctccagaaaaaccttagggtatgcacaagctttccctgatttcataacaattgtagttagcatttttcaggctcatattagcaaggaaagccacaagcagcttttacatgtaattaaacaatctgccaaactttttccgtgacatttattaaattggaaatgtcccagatgtgtgtgagtaagcattctgagaccgctttccaagacttgtcaaggttctgcagacaggactcggtatattctgctagaccaagtgctaccgaagagcagcactcgaacacgcggtagggctgcccgacactgcgtcagaccggggtctagaaccacagtgcaatgctgaaagaatgcaaggtacgccaactgagaacgctggccagtgttttaacagacatggga

SEQ ID NO: 541190 - DNA, 447 bp, Homo sapiens
cctcaggtagatgtttatcatctgcttctataccctggggttcaggggtctacagaagccctttagcattatttaccttgcagggttcctactttctattttttaaaaatatctttattgatacttaattcacataccatacaagtcacctatttaaagttgcaatttaaatatactattaaatatacaatttaaatgtactgaagtatattacgattttatttatttatttatttrtttgtttgtttgtttattgagatggagtctcgctctgtcacccaggctggagtgcagtggccagatctcggctcactgcaacctctgtctcctgggttcacgcaattctcctacctcagccttccaggtagctgggattacaggcacctgccaccatggccacctaatttttgcatttttagtacagacggggtttcaccacgttggcca

SEQ ID NO: 541191 - DNA, 616 bp, Homo sapiens
cacatatttaaagttgccttacctcaagtctgaccactcccttgagactcttaaccctgacttccctttttccttatatctttakattgctttgttttactgtttcttatagctattattgtatacactcatgttttttctttccattttttcaggtaacaattatggagctacaggtaaggctagttcttctttttttttttttcttttttttctttgagacagattctcactctgttgcccaggctgttgcccaggctggagtgcagtgatgcaatcttggctcactgcaacctctgcctcctgagttcaggtattctcatgccttagtctcccaaatagctgggactacaggtatgtgccaccacgcccggccaattttttttttaatttttgtatttttagtagagatggggttttgccatgttggccaggctggtctcaaactcctgagctcaggcagttcccctgcctcggctttccaaagtgctaggattacaggccccagcaagactagttattctttgaatttgtctgaaagtcatgcattttaggggtattcagtgttataagttaaaacttaaaaagactaacaaaaatttccaagcagtgcaga

SEQ ID NO: 541192 - DNA, 563 bp, Homo sapiens
  misc_feature (1)...(563): n = A,T,C or G
tgaaataaagtgtttatttcctttctctttttcctcttttgggaggaagagcaatccttataccttgaaatgtgtcagattctaatatttggagtgggmcaaggccctccttcccctttcttatgattagttgaaatctgagtttgagcagtcttgctgttttcagagaatgctctccctcccctgtccttccctcacagccgaactcatttggagagattgatggagttactaatgctttggagacagtccctaggaatttttttaaaatgtagtggtcagattgacatgtgtgtatatataatgataatcaaggctaaacaacagtcttctctttctgtaatttatattcagagacactttgcattgttttcctacatgaatccttcctttgacactttgatctctgacctccccagaatgcttttagtttagtatgaaatgcaatatttggatcttctaggaattttccaagatcaccccttaaatagtttatggcacttaaaaaatgagacaatacaccagacattaagtacagcaaagccttcctataagtntcagtg

SEQ ID NO: 541193 - DNA, 563 bp, Homo sapiens
  misc_feature (1)...(563): n = A,T,C or G
tgaaataaagtgtttatttcctttctctttttcctcttttgggaggaagagcaatccttataccttgaaatgtgtcagattctaatatttggagtgggccaaggccctccttcccctttcttatgattagttgaaatctgagtttgagcagtcttgctgttttcagagaatgctctccytcccctgtccttccctcacagccgaactcatttggagagattgatggagttactaatgctttggagacagtccctaggaatttttttaaaatgtagtggtcagattgacatgtgtgtatatataatgataatcaaggctaaacaacagtcttctctttctgtaatttatattcagagacactttgcattgttttcctacatgaatccttcctttgacactttgatctctgacctccccagaatgcttttagtttagtatgaaatgcaatatttggatcttctaggaattttccaagatcaccccttaaatagtttatggcacttaaaaaatgagacaatacaccagacattaagtacagcaaagccttcctataagtntcagtg

SEQ ID NO: 541194 - DNA, 563 bp, Homo sapiens
  misc_feature (1)...(563): n = A,T,C or G
tgaaataaagtgtttatttcctttctctttttcctcttttgggaggaagagcaatccttataccttgaaatgtgtcagattctaatatttggagtgggccaaggccctccttcccctttcttatgattagttgaaatctgagtttgagcagtcttgctgttttcagagaatgctctccctcycctgtccttccctcacagccgaactcatttggagagattgatggagttactaatgctttggagacagtccctaggaatttttttaaaatgtagtggtcagattgacatgtgtgtatatataatgataatcaaggctaaacaacagtcttctctttctgtaatttatattcagagacactttgcattgttttcctacatgaatccttcctttgacactttgatctctgacctccccagaatgcttttagtttagtatgaaatgcaatatttggatcttctaggaattttccaagatcaccccttaaatagtttatggcacttaaaaaatgagacaatacaccagacattaagtacagcaaagccttcctataagtntcagtg

SEQ ID NO: 541195 - DNA, 563 bp, Homo sapiens
  misc_feature (1)...(563): n = A,T,C or G
tgaaataaagtgtttatttcctttctctttttcctcttttgggaggaagagcaatccttataccttgaaatgtgtcagattctaatatttggagtgggccaaggccctccttcccctttcttatgattagttgaaatctgagtttgagcagtcttgctgttttcagagaatgctctccctcccctgtycttccctcacagccgaactcatttggagagattgatggagttactaatgctttggagacagtccctaggaatttttttaaaatgtagtggtcagattgacatgtgtgtatatataatgataatcaaggctaaacaacagtcttctctttctgtaatttatattcagagacactttgcattgttttcctacatgaatccttcctttgacactttgatctctgacctccccagaatgcttttagtttagtatgaaatgcaatatttggatcttctaggaattttccaagatcaccccttaaatagtttatggcacttaaaaaatgagacaatacaccagacattaagtacagcaaagccttcctataagtntcagtg

SEQ ID NO: 541196 - DNA, 456 bp, Homo sapiens
ttattccatgtccatttaggagagaaaaaccttttcttgcatataagattctggttattagggacatatccaagtaattattttctttttgttttgttgttttttagtattagcattattattatataacatagatgtgttttgaaaaaaaaattaaagtggaaaacaaaaattctcyggtccccaggacccctacttagaggtaatcatagttgatatgtacctggacacacacacacacacacacacacacacacacacacacactcactctcacactctctctctctctctcaaaaatgttatcatacaatgaactcatactgtatgcactgtttaaagaccaggtagctccttgcagcttgttctttgtgtggcagcagttaacggtacatttttattactcagacaggagcaggaagatcttgaactgaagcacaattccacattaaaaca

SEQ ID NO: 541197 - DNA, 456 bp, Homo sapiens
ttattccatgtccatttaggagagaaaaaccttttcttgcatataagattctggttattagggacatatccaagtaattattttctttttgttttgttgttttttagtattagcattattattatataacatagatgtgttttgaaaaaaaaattaaagtggaaaacaaaaattctccggtccccaggaccmctacttagaggtaatcatagttgatatgtacctggacacacacacacacacacacacacacacacacacacacactcactctcacactctctctctctctctcaaaaatgttatcatacaatgaactcatactgtatgcactgtttaaagaccaggtagctccttgcagcttgttctttgtgtggcagcagttaacggtacatttttattactcagacaggagcaggaagatcttgaactgaagcacaattccacattaaaaca

SEQ ID NO: 541198 - DNA, 456 bp, Homo sapiens
ttattccatgtccatttaggagagaaaaaccttttcttgcatataagattctggttattagggacatatccaagtaattattttctttttgttttgttgttttttagtattagcattattattatataacatagatgtgttttgaaaaaaaaattaaagtggaaaacaaaaattctccggtccccaggacccctacttagaggtaatcatagttgatatgtacctggacacacacacacacacacacacacacacacacacacacactcactctcacactctctctctctctctcaaaaatgttwtcatacaatgaactcatactgtatgcactgtttaaagaccaggtagctccttgcagcttgttctttgtgtggcagcagttaacggtacatttttattactcagacaggagcaggaagatcttgaactgaagcacaattccacattaaaaca

SEQ ID NO: 541199 - DNA, 503 bp, Homo sapiens
gaatggtagcttgctgaattggcagttgagttacagaatgctcaacccaagagtccctggaaaccagagcactggggcaagtacaggtggtccacactcatcagattctgggatgtgcggctgtgtagagaagctttagtgcgatgggtgtatcactcgtatgargtaggagtgagcctgtgcctgattttgtgcagcagcgctggccagctctgaggcgtgcagcactgagtgcggtgcaggaatatgcaaggaatctgcaatcccaagtctgtttcaaatcttttcttgaaacccaagatcaccacagattcagaaccctgtggaagatcaggaaaaactgtgggctaacccagcctcctaggcagggttggggcaaagctgtggaaccacctttcacagtgcttcagaccactgtaagtgtaggggaaaactagcagattgtgacccatgccttgtagattagagttgtagactgaaccacagagaagggtttgggattt

SEQ ID NO: 541200 - DNA, 291 bp, Homo sapiens
aatgctcagagccaccaacagtagaggcacyccaaaactttccaagaagtcatctcagattccctgctgcttcatagcttttaggagctccagggttgagggaggccccaaaagcaatcaaggactgcaggaggggtgtgctttccatccactttctatattctaaaaattaccgctggattaagcccagtcaagagagaaccaagtatctgtatggatcaagtatcgctggccacacacacagtatcttttacagaatcgcatgtgctgtgatgccatctccctgtgcag

SEQ ID NO: 541201 - DNA, 291 bp, Homo sapiens
aatgctcagagccaccaacagtagaggcaccccaaaactttccaagaagtcatctcagattccctgctgcttcatagcttttaggagctccagggttgagggaggccmcaaaagcaatcaaggactgcaggaggggtgtgctttccatccactttctatattctaaaaattaccgctggattaagcccagtcaagagagaaccaagtatctgtatggatcaagtatcgctggccacacacacagtatcttttacagaatcgcatgtgctgtgatgccatctccctgtgcag

SEQ ID NO: 541202 - DNA, 291 bp, Homo sapiens
aatgctcagagccaccaacagtagaggcaccccaaaactttccaagaagtcatctcagattccctgctgcttcatagcttttaggagctccagggttgagggaggccccaaaagcaatcaaggactgcaggaggggtgtgctttccatccactttctatattctaaaaattaccgctggattaagcccagtcaagagagaaccaagtatctgtatggwtcaagtatcgctggccacacacacagtatcttttacagaatcgcatgtgctgtgatgccatctccctgtgcag

SEQ ID NO: 541203 - DNA, 553 bp, Homo sapiens
gccagagcacagggtattatggccagcaactgggtttcctcaggggcaggcccagtgcaccgtgttgcctgccgggcaaggaaccagcaaagcctcactacagagtgacaattcctggggtgccctgtgggagcagtgagagggagctcctggggccggggggtgctgcatggttaaaaaggagcataaggaagaatagataaccactgcatcacaccagggtcaccattcacactgggttccatgtaaacgacacctccacagaatataatgtgagtggtgtccctggagatgtacagctctatggccctggagtcaaggtaaagcctcattttaatwttttgccctggagccgtttggcacaaaggactttggctcttcttgcctttgtcaaacagccatgaatttgtttggacagcagttgttgaatgcctgctaaatgctagggactgttccagccacaaggagaaacaaagatctagtccctgctcccagggagctcatggcctattggggccaaaggcatgtcagtaagcaattaaagcacaaggtg

SEQ ID NO: 541204 - DNA, 553 bp, Homo sapiens
gccagagcacagggtattatggccagcaactgggtttcctcaggggcaggcccagtgcaccgtgttgcctgccgggcaaggaaccagcaaagcctcactacagagtgacaattcctggggtgccctgtgggagcagtgagagggagctcctggggccggggggtgctgcatggttaaaaaggagcataaggaagaatagataaccactgcatcacaccagggtcaccattcacactgggttccatgtaaacgacacctccacagaatataatgtgagtggtgtccctggagatgtacagctctatggccctggagtcaaggtaaagcctcattttaattttttgccctggagccgtttggcacaaaggactttggctcttcttgcctttgtcaaacagccatgaatttgtttggacagcagttgttgaatgcctgctaaatgctagggactgttccagccacaaggagamacaaagatctagtccctgctcccagggagctcatggcctattggggccaaaggcatgtcagtaagcaattaaagcacaaggtg

SEQ ID NO: 541205 - DNA, 544 bp, Homo sapiens
tgaggccacacaaagttggcactccctcctccaccaaccctcagctaaaaggttcagtggaagggactgatgctgtctccagatgcagactggggccatggattgagccacagagggaggagggaggagggtctcaaattaaaaagacaagaaacaaacaatctccccaaataagcagaaagtctgagcgtggaactgagctggttggagctggggagggggtgcgggaggtactttcagcactccctcgtgagatcatggaacagggcaggaaatctgaacctgctgccaaagaaaactcgctttgccttttgtaaaaagcctgtcgagctttcttcacaagggagctgctggtggggactcacaaatgggcatgctgcctgccagcaagggtctcctggccagccctaaaggcccgggctgctctgcttacagccacacggctgtttctaagctgaggatgaccctccaggtggctgagattccctccaatcttttwatttctggttgggaaaccctacacagaccagtgtctgtctcacgg

SEQ ID NO: 541206 - DNA, 621 bp, Homo sapiens
atggagcctcccaaggcactagtcacacagatcaagccacacagccaaatggaaatacaaataatagattgaggtcacattgactgtttcacgttgtacttagacatgctgattaaaacctgagttgcaagtgtrccatggaacataatctctccctctagtgttttggaacaatcacacacaaatgtttatatccacatacaggccccatatacaatgggggaaacagaacagaagaaggttggatggttcaccaagttgagtgggtccttcaaaggatgtcaccatcttggatgtgatgttttctgttttcagtggcatagaactagataaaaggtggcagtgcagaggatggaagtggtattgctcagtgggaaagggaaggcattttaggtttgagacatattacaatattgccttttagcgtagaaaagccctccttcctgatgctcttgctagtgctgggtggaaagattccctttcaactcaacatgtgtgaagcacatgaactgaagcactcttcctgcttagcatggcaggggctgggcaggccagggtggaccaggtcttgctctgatcaaccacatggtctcaggcaagttgcttcacctttactgctga

SEQ ID NO: 541207 - DNA, 621 bp, Homo sapiens
atggagcctcccaaggcactagtcacacagatcaagccacacagccaaatggaaatacaaataatagattgaggtcacattgactgtttcacgttgtacttagacatgctgattaaaacctgagttgcaagtgtgccatggaacataatctctccctctagtgttttggaacaatcacacacaaatgtttatatccacatacaggccccatatacaatgggggaaacagaacagaagaaggttggatggttcaccaagttgagtgggtccttcaaaggatgtcaccatcttggatgtgatgttttctgttttcagtggcatagaactagataaaaggtggcagtgcagaggatggaagtggtattgctcagtgggaaagggaaggcattttaggtttgrgacatattacaatattgccttttagcgtagaaaagccctccttcctgatgctcttgctagtgctgggtggaaagattccctttcaactcaacatgtgtgaagcacatgaactgaagcactcttcctgcttagcatggcaggggctgggcaggccagggtggaccaggtcttgctctgatcaaccacatggtctcaggcaagttgcttcacctttactgctga

SEQ ID NO: 541208 - DNA, 505 bp, Homo sapiens
gctatgttaagtaggggcttggctcagcctggcctaactgatgttagattttgagttactttaggttttgggtgggactagaaaagcagggagagctaggagaccacgcatgtgcaagcacacatagatatatattgcccatcgttcctaaccctcctaagggcaggaggccagaggtatgtgggttaggaatgctatgggctgcagctaagagaaaacctggctgaggctttcaactatatgacctcaaattagctccctggaggtaggtggccccagggctggcttagtaacctaacaatggcaccagtggcaccaggggtgaaggctctttatctgtccttgccttgcagaaggccaaggcaccttgagcaacatgtcaaagggcatcccaactggttgtattatttaccttgaagtgaagtgtcgggatttgaactgtcagccctcagggagaagtgttccagctmccaggtttttttttttttttttttttgagacggat

SEQ ID NO: 541209 - DNA, 634 bp, Homo sapiens
aaaccataaacataattaacatggagatatagaacatatggaatatagagtatggaaacacgaaagctgataagtgctatggaaaaaggtggataagggaaaggggtttggttgacccaaggtgggctgtaattttaaatagggtggttagggtaggcctcatgaaagaggtttttaatcaagaacttgaaggaggtaaggggagagaaccatgtggagggatctgggagaagagcattccaggcagcggaaacagccggtgcaaaggccctgaggcaggagtgcctrttgttccagggacagtcaggaggccagtgtgtctagagcagaatgagggtgtaggtattaagagacgaggtcagagacatgacagaggcctgaccgtgtagggcctagtagaccattgaaaggacttggcttttactcattgcaaagtacggaggggacaaatgacatgaccttctgcatctcctcccacgccttgggcccacaggctgcctctgcactgttagtcctccctgacttcctgccccaggctcactgcccccatccatgttgcacacccctctctacctgcagccgccatcccctaacaggtagaggtgtgccctgggtccactccctcaagtcccag

SEQ ID NO: 541210 - DNA, 634 bp, Homo sapiens
aaaccataaacataattaacatggagatatagaacatatggaatatagagtatggaaacacgaaagctgataagtgctatggaaaaaggtggataagggaaaggggtttggttgacccaaggtgggctgtaattttaaatagggtggttagggtaggcctcatgaaagaggtttttaatcaagaacttgaaggaggtaaggggagagaaccatgtggagggatctgggagaagagcattccaggcagcggaaacagccggtgcaaaggccctgaggcaggagtgcctgttgttccagggacagtcaggaggccagtgtgtctagagcagaatgagggtgtaggtattaagagacgaggtcagagacatgacagaggcctgaccgtgtagggcctagtagaccattgaaaggacttggcttttactcattgcaaagtacggaggggacaaatgacatgaccttctgcatctcctcccacgccttgggcccrcaggctgcctctgcactgttagtcctccctgacttcctgccccaggctcactgcccccatccatgttgcacacccctctctacctgcagccgccatcccctaacaggtagaggtgtgccctgggtccactccctcaagtcccag

SEQ ID NO: 541211 - DNA, 664 bp, Homo sapiens
gattgttacgagtgctatgaggggaatagccagggtgacatgtttgagaaggggtcagtactgctaagtgttggtcagggaagcattgcaggcagagggaacagcaaatgcccatggtttggaggcaggaatggtgttccaagagtagtagggagcctcgggactagagtttggaggatgagcggggagagtgggaggagatagtrggaaagtctgtggagccagttcctgagggcctggtgggccatgctcagtgggggtttcatttgacgagccatgggaaggcttccagcaatgggggatgtggttttacttgtaccttaagaagatcacactgggtcttgtttggagaatggacaggaaaggagcaggagagcaagcagagagtctgaggggcaagaaatgccctgtcctcccagcagactggagcaaattctaattctgcctctgctacttcattcctatgcaactttgggcaggtttcctaatctctctgcctctcaactgttcacccctcataaaatgaggacaagtattttctcatgtggtttctaggacaaataagtattcgtaaagtcctctataaacttgggccatatgcttatctgagctataatatgattcatattgaaaggagggggactcctgcaatgttgggaaaacg

SEQ ID NO: 541212 - DNA, 664 bp, Homo sapiens
gattgttacgagtgctatgaggggaatagccagggtgacatgtttgagaaggggtcagtactgctaagtgttggtcagggaagcattgcaggcagagggaacagcaaatgcccatggtttggaggcaggaatggtgttccaagagtagtagggagcctcgggactagagtttggaggatgagcggggagagtgggaggagatagtgggaaagtctgtggagccagttcctgagggcctggtgggccatgctcagtgggggtttcatttgacgagccatgggaaggcttccagcaatgggggatgtggttttacttgtaccttaagaagatcacactgggtcttgtttggagaatggacaggaaaggagcaggagagcaagcagagagtctgaggkgcaagaaatgccctgtcctcccagcagactggagcaaattctaattctgcctctgctacttcattcctatgcaactttgggcaggtttcctaatctctctgcctctcaactgttcacccctcataaaatgaggacaagtattttctcatgtggtttctaggacaaataagtattcgtaaagtcctctataaacttgggccatatgcttatctgagctataatatgattcatattgaaaggagggggactcctgcaatgttgggaaaacg

SEQ ID NO: 541213 - DNA, 584 bp, Homo sapiens
gaaggcaatgaggtgccatctgcccttggagaatgtagagattcaactctaaagtggaacagagaaagcccactgctggacagctagtgttggccagcgttcattcattctcctytctctgcacagtggcaacacggagcgctctgaatccctgcatgacaacaccctcgtgctgatggtgccactgatgcacgaggtggacacgtccatcaccgggtgagtagcctggtcctgggttgccacaacacaggagtgccctccagtggaacactgtgcttctcatatttgcatgtgtagccagccaggagccaaggctgtgccacctccacttcctcccagccttgaaaagcaggatgaagctttagctgcagtaactcatacactcctccctccttgttttctcctctgtcccacctacccacccacctggtagataatctgagaagtttgatgacaagtttaagccccataatttctttgaacattccatatacctttatgtgcatatattctcatccgcccctagtccctccagaatgctgtatggtaacaagcagcatggctcctgggattaaaatctcagc

SEQ ID NO: 541214 - DNA, 547 bp, Homo sapiens
taaatagtagagctgggtttgtaaccaggtctgactccaatagttcacgtggttcccattgtgctgaattgcacactgctcctgaaagtgctgcccactccctaawcaccagaggcaggctcagtcaataggacagacaggaggggaggagacccccaagaatcacccaccagaggaggagcatcaacaccagggcagagaggcagcaaccgcaatcaaaagaactaataccagagggtgcagtaacaaggccaacagaaggcttctgaataagcaagactgatgttttcagagcaatgcaaaaagacagtgtttccatgaaacagaataaactagagatttgtaaattcaagatattgatcattcaaatgaaacttcaatataagccatagagtagaataaatattaaagaataaagtaggggattcgaaacttggattttctgagaatgtattgcagaagaacaaaaaagccagttaaacttattcctttttttaaatagcaatgtggaatgaaaatatcagatgagcataatataagagttaga

SEQ ID NO: 541215 - DNA, 547 bp, Homo sapiens
taaatagtagagctgggtttgtaaccaggtctgactccaatagttcacgtggttcccattgtgctgaattgcacactgctcctgaaagtgctgcccactccctaaacaccagaggcaggctcagtcaataggacagacaggaggggaggagacccccaagaatcacccaccagaggaggagcatcaacaccagggcagagaggcagcaaccgcartcaaaagaactaataccagagggtgcagtaacaaggccaacagaaggcttctgaataagcaagactgatgttttcagagcaatgcaaaaagacagtgtttccatgaaacagaataaactagagatttgtaaattcaagatattgatcattcaaatgaaacttcaatataagccatagagtagaataaatattaaagaataaagtaggggattcgaaacttggattttctgagaatgtattgcagaagaacaaaaaagccagttaaacttattcctttttttaaatagcaatgtggaatgaaaatatcagatgagcataatataagagttaga

SEQ ID NO: 541216 - DNA, 547 bp, Homo sapiens
taaatagtagagctgggtttgtaaccaggtctgactccaatagttcacgtggttcccattgtgctgaattgcacactgctcctgaaagtgctgcccactccctaaacaccagaggcaggctcagtcaataggacagacaggaggggaggagacccccaagaatcacccaccagaggaggagcatcaacaccagggcagagaggcagcaaccgcaatcaaaagaactaataccagagggtgcagtaacaaggccaacagaaggcttctgaataagcaagactgatgtyttcagagcaatgcaaaaagacagtgtttccatgaaacagaataaactagagatttgtaaattcaagatattgatcattcaaatgaaacttcaatataagccatagagtagaataaatattaaagaataaagtaggggattcgaaacttggattttctgagaatgtattgcagaagaacaaaaaagccagttaaacttattcctttttttaaatagcaatgtggaatgaaaatatcagatgagcataatataagagttaga

SEQ ID NO: 541217 - DNA, 547 bp, Homo sapiens
taaatagtagagctgggtttgtaaccaggtctgactccaatagttcacgtggttcccattgtgctgaattgcacactgctcctgaaagtgctgcccactccctaaacaccagaggcaggctcagtcaataggacagacaggaggggaggagacccccaagaatcacccaccagaggaggagcatcaacaccagggcagagaggcagcaaccgcaatcaaaagaactaataccagagggtgcagtaacaaggccaacagaaggcttctgaataagcaagactgatgttttcagagcaatgcaaaaagacagtgtttccatgaaacagaataaactagagatttgtaaattcaagatattgatcattcaaatgaaacttcaatataagccatagagtagaataaatattaaagaataaagtaggggattcgaaacttggattttctgagaatgtattgcagaagaacaaaaaagccagttaaacttattcctttttttaaatagcaatstggaatgaaaatatcagatgagcataatataagagttaga

SEQ ID NO: 541218 - DNA, 561 bp, Homo sapiens
tacataaaaccccaactttataaaactgttaaattggtaaaagattatttgttgcttaaaattatttcttgcttaaagtgagttaactggagtaactcttttgaatgacaagcttcccaaaagcatttaaaatgtgtcttatggttgttttaagaaaagaatgataattggtgcataactcccaagtcacatatacagaccagggtccctgtgtgccccaggaaggtctttgtggkttctttggcagagatgagcaaagggtacccttggaactgttttctgtggagtcctctaccttcctgtttctttgagggtttaaccaaaggtggcatttaagtgtaagctccttgcatgacaggcaagctgggtagatgtaggtggggacaccacaggacaccttgcctgtggagcccctcctgccccacaggtagaatgttgaatgcactagttctctgctatctgtttccacgacagaagccaggctgcccttctgctccacaatcaacctgtaccactggcttgaggttctggcttctccccagaccacagtttttccagtcc

SEQ ID NO: 541219 - DNA, 564 bp, Homo sapiens
tctcccacacctggaccctcatgggctcctacaggtacagagaccaccgatgtctgcgggctgaccacaggccaaaggtcttccggaagtgtcctttaatactttggagaggctcgcgttcccccggtgagcacgggacctgactgcatcagctccaggatccaggagatgtggggaagtgagaaagatcctgtttggcctcgctgctggaagccacagaagagctggacatgcccgcaagcctgaagtgcgcgcgcaacctagcaggcggaggcaagcagctcttcgcctcaggccgcccactgaaccctgcccaccgacgtcgcgccctgtaggcctcccaggccctcctgattcgtggagagcgcgcgcggccctgccccacccccgagcccgccctcctgcggcactaccscgcccccccggcttacggggctgcagagtgtggcctgcaagttggaagcgcaagcgcgggcgtccaaaggccccgacgctcccaggctgaggaggcactttgtcgtctctcccacgctctggccgtcgtcctaggcctgacagtggcca

SEQ ID NO: 541220 - DNA, 524 bp, Homo sapiens
gtatgtgtctgcagactggatttcttttatgtaaaataaagaattcaaactctctcaggcatttttctgtgcctwtcagatggtctaaaaaattctgcaagagagtgctccaggtaaatccccgtatttctctgggacccaagtgggcagctgcttggtgatctggacttcctgccataggggctgttagttcttggagccctggctgggtgtgtgcctcagggagcgtttggttggaggcatcaaggaggtttgcttcctgtgctccttaccagctgtggattgagtgctttgtgtgatgctttgccagagagaatccacagctctttgaggagaggtgtggcacaaagcagggaaatatttgtcagagcctcagacctcctgctgccccccacctgactccaggagcaggagcaggagctctgccaactttcccttttcctctaggtgctaggatttttaaaacaaagaatcaatctatccaaaatccaaaccatgtacaaatactccaggatagtgcttgt

SEQ ID NO: 541221 - DNA, 544 bp, Homo sapiens
tccacagctctttgaggagaggtgtggcacaaagcagggaaatatttgtcagagcctcagacctcctgctgccccccacctgactccaggagcaggagcaggagctctgccaactttcccttttcctctargtgctaggatttttaaaacaaagaatcaatctatccaaaatccaaaccatgtacaaatactccaggatagtgcttgttctattcaacttgtttacattacttttcatgacaatcttttattatctttagcagcctattttgtttgccagtgtcagattggttgtttgttaaccgattagaggaattctttacctgcagccctggggtggggtggttggctagtaggtccttcttgctgaagcattgaaatcctactcaatttagttcttcactttaaaaaatggaaataattttggttacctataatgtcgcaataaactctagagtcaaatgttggaataatttcttcagatttataaaccagtaaaccggttcagcaatgtttctagcttaagcatgttgatatcttcaga

SEQ ID NO: 541222 - DNA, 658 bp, Homo sapiens
tccaagaacctagattcaaagtgattatttgttggtatccataatggagagatgcttcccagggagtgtcaagtcgatttgtgcctgagaagatgtttgttttgaagtagtgcttggtgcagggtgggaatacttcatctgctaggttcaggaatgcagatggggactgacctgtgggtgggtcagttaataagcaagggcccctgctgggctgaggtcaaagggatcctgtccagccagagggattggactccatcaactagctggctcckgggattctcacatttgattcacagttctttagagtaacttccaggagcccctcatcttcctctgctgagcaagcctcagggctggaatctggggtctggggggcaactgcacactcagatttttgcattatattacaactatcagtacatgctgcagttggccatagtgtgctctgtttctgtttccagcctcccagtgcaacgtcagcttaaagaagcagaggagccgcagcatccttagctccttcttctgctgcttccgtgattacaatgtggaggcccctccacccagcagccccagtgtgcttccgccactggtggaggagaatggtgggcttcagaaggtcagtactggtgaggaactgtgccctccataaaactgcagc

SEQ ID NO: 541223 - DNA, 658 bp, Homo sapiens
tccaagaacctagattcaaagtgattatttgttggtatccataatggagagatgcttcccagggagtgtcaagtcgatttgtgcctgagaagatgtttgttttgaagtagtgcttggtgcagggtgggaatacttcatctgctaggttcaggaatgcagatggggactgacctgtgggtgggtcagttaataagcaagggcccctgctgggctgaggtcaaagggatcctgtccagccagagggattggactccatcaactagctggctccggggattctcacatttgattcacagttctttagagtaacttccaggagcccctcatcttcytctgctgagcaagcctcagggctggaatctggggtctggggggcaactgcacactcagatttttgcattatattacaactatcagtacatgctgcagttggccatagtgtgctctgtttctgtttccagcctcccagtgcaacgtcagcttaaagaagcagaggagccgcagcatccttagctccttcttctgctgcttccgtgattacaatgtggaggcccctccacccagcagccccagtgtgcttccgccactggtggaggagaatggtgggcttcagaaggtcagtactggtgaggaactgtgccctccataaaactgcagc

SEQ ID NO: 541224 - DNA, 658 bp, Homo sapiens
tccaagaacctagattcaaagtgattatttgttggtatccataatggagagatgcttcccagggagtgtcaagtcgatttgtgcctgagaagatgtttgttttgaagtagtgcttggtgcagggtgggaatacttcatctgctaggttcaggaatgcagatggggactgacctgtgggtgggtcagttaataagcaagggcccctgctgggctgaggtcaaagggatcctgtccagccagagggattggactccatcaactagctggctccggggattctcacatttgattcacagttctttagagtaacttccaggagcccctcatcttccyctgctgagcaagcctcagggctggaatctggggtctggggggcaactgcacactcagatttttgcattatattacaactatcagtacatgctgcagttggccatagtgtgctctgtttctgtttccagcctcccagtgcaacgtcagcttaaagaagcagaggagccgcagcatccttagctccttcttctgctgcttccgtgattacaatgtggaggcccctccacccagcagccccagtgtgcttccgccactggtggaggagaatggtgggcttcagaaggtcagtactggtgaggaactgtgccctccataaaactgcagc

SEQ ID NO: 541225 - DNA, 647 bp, Homo sapiens
  misc_feature (1)...(647): n = A,T,C or G
ttcagatcgtggcaccgtatttgataaaactttagttgcaaactacttattcctattgttcttaataaaagcccattatacgcttgaccaggcatttaaatgtttgaaagtagtataatgcaatactgawtggtttgtctttttacataaatgtaatactgatttattttcccctttagccaccagctaagtaccttcttccagaggtgacggtgcttgactatggaaagaaatgtgttggtcattgatttagatgaaacattggtgcacagttcgtttaaggtaaatcaacataaaaaaaaaatccatgatctttgtgatttgataacaattgtattggaaaagggaaaacaaaaaggatgacagcttatggtggttagtgtgtgacttcactcttcatgtagaantcccaggagctgcttattaacccaggtgaacattaactaaagtagttgaatattaacataattngtttggaaagaaaacactaagctaccaacatcactgggacctcattcttaggaggtttgcattttccaatgctgtaaccgctgcagaaatacttttcaggtggcacaaggcactcagtgccccaggatactgtttatatttgtcaagatgaccagagtgctatgtgttttattggg

SEQ ID NO: 541226 - DNA, 647 bp, Homo sapiens
  misc_feature (1)...(647): n = A,T,C or G
ttcagatcgtggcaccgtatttgataaaactttagttgcaaactacttattcctattgttcttaataaaagcccattatacgcttgaccaggcatttaaatgtttgaaagtagtataatgcaatactgaatggtttgtctttttacataaatgtaatactgatttattttcccctttagccaccagctaagtaccttcttccagaggtgacggtgcttgactatggaaagaaatgtgttggtcattgatttagatgaaacattggtgcacagttcgtttaaggtaaatcaacataaaaaaaaaatccatgatctttgtgatttgataacaattgtattggaaaagggaaaacaaaaaggatgamagcttatggtggttagtgtgtgacttcactcttcatgtagaantcccaggagctgcttattaacccaggtgaacattaactaaagtagttgaatattaacataattngtttggaaagaaaacactaagctaccaacatcactgggacctcattcttaggaggtttgcattttccaatgctgtaaccgctgcagaaatacttttcaggtggcacaaggcactcagtgccccaggatactgtttatatttgtcaagatgaccagagtgctatgtgttttattggg

SEQ ID NO: 541227 - DNA, 517 bp, Homo sapiens
ggtggggcgagagctttctccatgagcagagagggaccctgtacccagagcagagcggagtgctcggggagaaaccacggggctcagaggagggcccagggctcccactcctgagaagtggcttcccaggccctggggtggggcacttgtgccatgggctggggtgcccctctgggtggctcacagccttgctgtccgtgctggccaggctccctgaggaggtccccagcttscagccacgactgtttgagtgctccagccacatgggctgcctggtcctcgcagaagtggggttcttcagccaggaggacctggacaagtatgacatcatgttactggacacctggcaggaggtaaggtggccatccctgcctggtggggctgtgaacgggggtgtgtttctgtttgtgtaactgggtgtgtgtgtatctagccatctgcctctgtacacagggctgtgggtgagtctgaccctgtcactgagcaattgcattgcggtgcatatgagaccatggat

SEQ ID NO: 541228 - DNA, 558 bp, Homo sapiens
  misc_feature (1)...(558): n = A,T,C or G
gctgaagccacctatagccacagctccctgcaggcctgacttactacacatccatgtttcagtggcctcttcagaggaaaatgttaaggggtcttttctatttgctggttttcaaacctttcaaaatttttaaaacatttcttttcttactacaaaagggcccactgtagacaatttagaaaatgcagaaaagtaaacaatcaaacaaatctcccgtagtctatcacctagggataaatactatcaacattccaaagtatatccttctggttttccttttctttcattatttttttttgacaagatctcactctgtcgcccagattagagtgcagtggcmaaatcacagctcattgcagcctagacctctcaggctcaagtgatcctcccactacaggtgtgcaccgcacaaccacgcctggcttttttcngttttttttgggtagagacagggtctccctatgttgcccaggctagtctcaaactcctaggcccaagcaatcctcctgctttgacctcccaaagtgctgggattacagatatgagccatctggactg

SEQ ID NO: 541229 - DNA, 558 bp, Homo sapiens
  misc_feature (1)...(558): n = A,T,C or G
gctgaagccacctatagccacagctccctgcaggcctgacttactacacatccatgtttcagtggcctcttcagaggaaaatgttaaggggtcttttctatttgctggttttcaaacctttcaaaatttttaaaacatttcttttcttactacaaaagggcccactgtagacaatttagaaaatgcagaaaagtaaacaatcaaacaaatctcccgtagtctatcacctagggataaatactatcaacattccaaagtatatccttctggttttccttttctttcattatttttttttgacaagatctcactctgtcgcccagattagagtgcagtggccmaatcacagctcattgcagcctagacctctcaggctcaagtgatcctcccactacaggtgtgcaccgcacaaccacgcctggcttttttcngttttttttgggtagagacagggtctccctatgttgcccaggctagtctcaaactcctaggcccaagcaatcctcctgctttgacctcccaaagtgctgggattacagatatgagccatctggactg

SEQ ID NO: 541230 - DNA, 558 bp, Homo sapiens
  misc_feature (1)...(558): n = A,T,C or G
gctgaagccacctatagccacagctccctgcaggcctgacttactacacatccatgtttcagtggcctcttcagaggaaaatgttaaggggtcttttctatttgctggttttcaaacctttcaaaatttttaaaacatttcttttcttactacaaaagggcccactgtagacaatttagaaaatgcagaaaagtaaacaatcaaacaaatctcccgtagtctatcacctagggataaatactatcaacattccaaagtatatccttctggttttccttttctttcattatttttttttgacaagatctcactctgtcgcccagattagagtgcagtggccaaatcacagctcattgcagcctagacctctcaggctcaagtgatcctcccactacaggtgtgcaccgcacmaccacgcctggcttttttcngttttttttgggtagagacagggtctccctatgttgcccaggctagtctcaaactcctaggcccaagcaatcctcctgctttgacctcccaaagtgctgggattacagatatgagccatctggactg

SEQ ID NO: 541231 - DNA, 638 bp, Homo sapiens
  misc_feature (1)...(638): n = A,T,C or G
ccaggttttctggtggtggaaatgctgctgccttcttctgactctattacattgctcagtgatgtctctgactaagacagtggtaggtactggaaatcaatggataaagcaggctgggattgttcaagggtcagccatgtctcttcccggcccaggaccaataatggcttcccgccttcggacagccccatgctttcccctggttattctaggcttgctgtacacatgcatgtgcctttttcagattctttctgggactggcagctccaactgggtgttttcattcatggacgcatgacctctggaagcgggtgtggaaaggaagcctgtcccactgggccaaatgtgaggccctcttcccaggggaaatgttgtctggatgggtctgacctgctggacaatgggcctnctccctggccagtttctgggctggagctgaggtgttttgtgaggcragctcatgctctttgcatgtgtncctctgccgactatttcagtnccactctgacaaccaaggaggctaaaattagttctggagaaggaaaaggaaggctggttggaaacccaagcccttggctggagaatggaggaggctgcttcccaggtttgtgcctgagcatttcggaggatgggatgag

SEQ ID NO: 541232 - DNA, 271 bp, Homo sapiens
gcttgaacccagggaggcagaggttgcagtgagccgagattgtgccactgcactctcaaaaaaaaaaaaaaaaaaaaaaaaagaatragaagatttagaacagaaggtacttctggatctcaggacattatggtctattatagtagggggttcatgagaatgggaccctaaggaaccagaaaggggagagaaggtggcgtatactttgctagggctgccataacaaatgactacaaactgggtggcttaacacaggaggaactgattctct

SEQ ID NO: 541233 - DNA, 489 bp, Homo sapiens
tgtaatcccagctacctaggaggctgaggcaggagaattgcatgagcccaggaggtggaggttgcagtgagccaagatcacsccactgcactctagcctgagcaacagagtgagactctgcactccagcctgggcaacagaatgagaatccatgactctgcactccagcctgggcaacagagtgagactccatctcaaaaaaaagaaaagaagccacatctacccttagacctctccatatggatccacttctgcagttgcacgcatgtggctcctcagatttccctgcaagcgcagacgtgcccacccaggtgggtgctttcaggagcttgatgagtgattgtctccgattctgcagcttccatctctgggtcttcacttccccagcccctcccctgattgtgtaaggtcgaatccccataatacctacatcactcgcagcgcttctgtttccttagtgaactcttgcttcatagatacatgggctaa

SEQ ID NO: 541234 - DNA, 489 bp, Homo sapiens
tgtaatcccagctacctaggaggctgaggcaggagaattgcatgagcccaggaggtggaggttgcagtgagccaagatcaccccactgcactctagcctgagcaacagagtgagactctgcactccagcctgggcaacagaatgagaatccatgactctgcactccagcctgggcaacagagtgagactccatctcaaaaaaaagaaaagaagccacatctacccttagacctctccatatggatccacttctgcagttgcacgcatgtggctcctcagatttccctgcaagcgcagacgtgcccacccaggtgggtgctttcagragcttgatgagtgattgtctccgattctgcagcttccatctctgggtcttcacttccccagcccctcccctgattgtgtaaggtcgaatccccataatacctacatcactcgcagcgcttctgtttccttagtgaactcttgcttcatagatacatgggctaa

SEQ ID NO: 541235 - DNA, 415 bp, Homo sapiens
tggttatttgagagagggaaaggtgggacttaattctgaaatttgrtcttttttggctgcctggtctgttaacctccttctaaagcttgggaaattcttcattttctgagtgttggtgggtgctagagcccacctcccaccatggaggctgaaaagaccagaccttcattccagctatgccttagcgagggcatgggcagggcatgggtcacatgagcgggctcagtcaatcagacgcagacttcctgatctcagcctggggccagttggagaatcctttcccagagcagcagctttggtggcgaggtcccatctctctaggatctgcggggcagcaagggcatccatcagaggaaggtgagggtggagccggtcacaacatcctctagtgtttggcagtgggatcctcctcgcc

SEQ ID NO: 541236 - DNA, 589 bp, Homo sapiens
tatgtgctgcatcccatccatcatccacttttttttttttttgagatggagtttcactcttgtcgtccaggctggagtgcaatggctcaatctcggctcactgcaacctccgcctccctggttcaagctgttctcctgcctcagtctcctgagtagctgggattacaggcacaggccatcaaacccagctaatttttgtatttttagtagagacggggtttcaccacattggccagactggtctcaaactcatgacctcaggtgacctgcccgcctcagccacccaaagtgttgggattacaggcgtgagccactgtgcccggccccatccacttttgttctcacatccagcgtcagccagagaaccagcctgacgcatccaggacastagagccaaggggatgccagagaatgaagctggggccctgatgataactgtgtccctctggactgaactccgactggagtcagatgtaccctggccctcccagttaggtgccaatactttctctctgttgctcaagctggtttggactaggtcttttttaaattacctgcagcataaaaggttctcactggcacacaataa

SEQ ID NO: 541237 - DNA, 640 bp, Homo sapiens
catgtggtccttgctgctttgttttggttattcctgcatttatttgtccttttattcatttatgtataaacatttagtaagcacctactaatggatagggctcattgtagacttggaagctctctgagggtgggagtatgcctcgtccatctgtctttactttttgtagcaagggaggtaaagctccatttccatccctccttagtgagtcagtagtcagtggtgaggctaaggcttacctctccctttctcactcagcacagggggctggagatgagcaagggaacgggaggaggtcagcccagtatgggaatcagttcttctcagggaacccagacatccatccctcaagattccagtccttgtcctagtccggcccttgacctcagagacgggatcagctcttcctccagcacctaccttgagrgtatagaagaatgcaaaccacattggaaacctggagatctgtgttctcatttcagctctgctgactggcttcctgcaagctaccttccctccctgggcctcagtttctctctctgctgagccagaagatgtctaaagacccctttggttccaccctgagagcctgtctccctaacctcaacttcttccccagttcagagaacccaggcatcca

SEQ ID NO: 541238 - DNA, 669 bp, Homo sapiens
tgctgggccctcaattttcttctgacttcattstttttaatgctattgtaagttggatttttaaataacatttgtattaatgcattgatactctatagaagcacactcaatttttgtattttgatcttgtagcctaccaatgtgctaaactaatttagtattagtggtttagtagttgctaagcttgtttttagtgaattctttcgtatttctatataagattttatcatctgcaattgagatagttttacctcttgctttttaatctagatgacttttatttcatcttattgctcattgtagcttttgaaaaattacattgtattcacagtgccctaccatttgatatttttatttctattatatcatgaacatcctttgaatttcacagaaaaaatggtttaactcatcattttaatgctgttccatagtatgttatatgcacctactcccctggggtaaatatttaggtggtttcatttatttgtcacccactctacagatgtctatatgcacatattctcccagccatcccagagttttctgatttcccataacgtcagtgattaaactcctgatctgtctgactagctagacatgctgactgactgacagttccattgctactttgcataatttaagatcaacagctacatttggatctcagat

SEQ ID NO: 541239 - DNA, 669 bp, Homo sapiens
tgctgggccctcaattttcttctgacttcattgtttttaatgctattgtaagttggatttttaaataacatttgtattaatgcattgatactctatagaagcacactcaatttttgtattttgatcttgtagcctaccaatgtgctaaactaatttagtattagtggtttagtagttgctaagcttgtttttagtgaattctttcgtatttctatataagattttatcatctgcaattgagatagttttacctcttgctttttaatctagatgacttttatttcatcttattgctcatygtagcttttgaaaaattacattgtattcacagtgccctaccatttgatatttttatttctattatatcatgaacatcctttgaatttcacagaaaaaatggtttaactcatcattttaatgctgttccatagtatgttatatgcacctactcccctggggtaaatatttaggtggtttcatttatttgtcacccactctacagatgtctatatgcacatattctcccagccatcccagagttttctgatttcccataacgtcagtgattaaactcctgatctgtctgactagctagacatgctgactgactgacagttccattgctactttgcataatttaagatcaacagctacatttggatctcagat

SEQ ID NO: 541240 - DNA, 669 bp, Homo sapiens
tgctgggccctcaattttcttctgacttcattgtttttaatgctattgtaagttggatttttaaataacatttgtattaatgcattgatactctatagaagcacactcaatttttgtattttgatcttgtagcctaccaatgtgctaaactaatttagtattagtggtttagtagttgctaagcttgtttttagtgaattctttcgtatttctatataagattttatcatctgcaattgagatagttttacctcttgctttttaatctagatgacttttatttcatcttattgctcattgtagcttttgaaaaattacattgtmttcacagtgccctaccatttgatatttttatttctattatatcatgaacatcctttgaatttcacagaaaaaatggtttaactcatcattttaatgctgttccatagtatgttatatgcacctactcccctggggtaaatatttaggtggtttcatttatttgtcacccactctacagatgtctatatgcacatattctcccagccatcccagagttttctgatttcccataacgtcagtgattaaactcctgatctgtctgactagctagacatgctgactgactgacagttccattgctactttgcataatttaagatcaacagctacatttggatctcagat

SEQ ID NO: 541241 - DNA, 506 bp, Homo sapiens
tgagatcagttgacggatattgcagttcaaatcccagcgctktctgctgcagagttccatcttgctcagagaaggtcaatgttttgttcaatttacaccttcaatgaattgaatgaagcccacccacattatagagatcaatctactttactcaaagtctagttattttgcattaatgttatccaagaaacattctcacaaatcatccagaataatgcttgatcacctatctgggcactgtggttcagccaagatgacaaataaaattaattatgacattcttcaatttaagaatattctgaggaaattagcctttgtcctaataaaacaaggaacaaacaactgtttctaaaaattttcaaccaacagtcaaaaagccattcctatagattgttgctcaagttcattctataactgtgggtgaaaaaaacatgtatttgttgaaaacagaaggagagaaaaatgaataagcagaaagtaaaaaaaaagacatgagaataataata

SEQ ID NO: 541242 - DNA, 666 bp, Homo sapiens
gttgacggatattgcagttcaaatcccagcgctgtctgctgcagagttccatcttgctcagagaaggtcaatgttttgttyaatttacaccttcaatgaattgaatgaagcccacccacattatagagatcaatctactttactcaaagtctagttattttgcattaatgttatccaagaaacattctcacaaatcatccagaataatgcttgatcacctatctgggcactgtggttcagccaagatgacaaataaaattaattatgacattcttcaatttaagaatattctgaggaaattagcctttgtcctaataaaacaaggaacaaacaactgtttctaaaaattttcaaccaacagtcaaaaagccattcctatagattgttgctcaagttcattctataactgtgggtgaaaaaaacatgtatttgttgaaaacagaaggagagaaaaatgaataagcagaaagtaaaaaaaaagacatgagaataataataaagatgacagccgttatttcactggaaacaatgcaaatgagaagacagatgagcaacatctttaaagtcctaaaaggaaaatactgtgaaactagattctattcccagaaaataatacctttctaaaacatatatatgtataatttaaattgacaaatcataatacat

SEQ ID NO: 541243 - DNA, 666 bp, Homo sapiens
gttgacggatattgcagttcaaatcccagcgctgtctgctgcagagttccatcttgctcagagaaggtcaatgttttgttcaatttacaccttcaatgaattgaatgaagcccacccacattatagagatcaatctactttactcaaagtctagttattttgcattaatgttatccaagaaacattctcacaaatcatccagaataatgcttgatcacctatctgggcaytgtggttcagccaagatgacaaataaaattaattatgacattcttcaatttaagaatattctgaggaaattagcctttgtcctaataaaacaaggaacaaacaactgtttctaaaaattttcaaccaacagtcaaaaagccattcctatagattgttgctcaagttcattctataactgtgggtgaaaaaaacatgtatttgttgaaaacagaaggagagaaaaatgaataagcagaaagtaaaaaaaaagacatgagaataataataaagatgacagccgttatttcactggaaacaatgcaaatgagaagacagatgagcaacatctttaaagtcctaaaaggaaaatactgtgaaactagattctattcccagaaaataatacctttctaaaacatatatatgtataatttaaattgacaaatcataatacat

SEQ ID NO: 541244 - DNA, 506 bp, Homo sapiens
tgagatcagttgacggatattgcagttcaaatcccagcgctgtctgctgcagagttccatcttgctcagagaaggtcaatgttttgttcaatttacaccttcaatgaattgaatgaagcccacccacattatagagatcaatctactttactcaaagtctagttattttgcattaatgttatccaagaaacattctcacaaatcatccagaataatgcttgatcacctatctgggcactgtggttcagccaagatgacaaataaaattaattatgacattcttcaatttaagaatattctgaggaaattagcctttgtcctaataaaacaaggaacaaacaactgtttctaaaaattttcaaccaacagtcaaaaagccattcctayagattgttgctcaagttcattctataactgtgggtgaaaaaaacatgtatttgttgaaaacagaaggagagaaaaatgaataagcagaaagtaaaaaaaaagacatgagaataataata

SEQ ID NO: 541245 - DNA, 508 bp, Homo sapiens
gtttagggagcctcttaagcctgtccatgaacctctgccattcatttatagcatggtgtcagctgcagagtaataggatctatgtgggcctggaagtccaacaggcctgggtttgaatctttttcaaacatttttgcttgttagcagctggtttggacaaataatttcaacttakttttctcatctgtgaaacagggggaaaaagcacttaccctgtagggctgttgtgaagattgaacaagacaactcatgttaaatacccaggcaccgtgtccgcctgcagcaggcagtcagtacatggtggatctcgtgccccaagcctcctctttatggagtccctcaagttgccccagctggcctcggattcctcccacctccacctcctgggtagctgggactacagcacgccatgcttcagccccctttgtgatcattcaaagccgtttggttccctgcaccctctcacatttactgcaattcctatagaatccaaattcttttaacctgg

SEQ ID NO: 541246 - DNA, 508 bp, Homo sapiens
gtttagggagcctcttaagcctgtccatgaacctctgccattcatttatagcatggtgtcagctgcagagtaataggatctatgtgggcctggaagtccaacaggcctgggtttgaatctttttcaaacatttttgcttgttagcagctggtttggacaaataatttcaacttagttttctcatctgtgaaacagggggaaaaagcacttaccctgtagggctgttgtgaagattgaacaagacaactcatgttaaatacccaggcaccgtgtccgcctgcagcaggcagtcagtacatggtggatctcgtgccccaagcctcctctttatggagtccctcaasttgccccagctggcctcggattcctcccacctccacctcctgggtagctgggactacagcacgccatgcttcagccccctttgtgatcattcaaagccgtttggttccctgcaccctctcacatttactgcaattcctatagaatccaaattcttttaacctgg

SEQ ID NO: 541247 - DNA, 478 bp, Homo sapiens
cttcctcaatgtgtccacgaatgccgggtgccatgggagaatataagaatataaataataaaaatatgtagtttctactcagaacttaaaattgagagagacagaatttacaggcaagtttaaataacatcaaagacagtaaaaatgcatatttcctaataatgacatgagcgagcgccaaygtaatagccttggcagtaaacgccgtgagttcagaagagtcacggtgagctggactagtcaggggaggcttctgggaggagggcccggagcgggacctgagagaagaacaggcagtgtgtctggaggatggaccaggaagggcagacccggagcctcatacagggtgcaggtacagaagctgcccccaggtgatgagctctcgtggccagaaccaccagctctagggaccagcccttgcgcgtatgtgcatcagccttcgtgtgtgctgttccctatgtctggaatggccgtcctc

SEQ ID NO: 541248 - DNA, 478 bp, Homo sapiens
cttcctcaatgtgtccacgaatgccgggtgccatgggagaatataagaatataaataataaaaatatgtagtttctactcagaacttaaaattgagagagacagaatttacaggcaagtttaaataacatcaaagacagtaaaaatgcatatttcctaataatgacatgagcgagcgccaatgtaatagccttggcagtaaacgccrtgagttcagaagagtcacggtgagctggactagtcaggggaggcttctgggaggagggcccggagcgggacctgagagaagaacaggcagtgtgtctggaggatggaccaggaagggcagacccggagcctcatacagggtgcaggtacagaagctgcccccaggtgatgagctctcgtggccagaaccaccagctctagggaccagcccttgcgcgtatgtgcatcagccttcgtgtgtgctgttccctatgtctggaatggccgtcctc

SEQ ID NO: 541249 - DNA, 661 bp, Homo sapiens
agtttggtgagatgaaacatgcagggctggcatggaattcttttgtctcctcttgtagaaacaacagggaccytcagagacagaaaaatacccagagctcctctttgagagctggtacaaactgtctctttggtgcagggtagtggtggctcataaaaacccactcaattttggttttaaaaaaatcttcttcagaacttcagagtaggtagtaattaacacaagaatatgtaatttctgatatgagtggaccacccagaatgtttctaattcatccactcctctggtccccagttccttgtcttcttaggaaaatttcctcttttacatccatctgtacctaacggttcatgctttgccctgactcccgctgtgtcttaccatgtttgtgttcttatgtttctcactctcagcctctcttccctttctctccttcctgtctctcacagcttcctctgtccccaatgctttctgcatcttttgtgccaggtgctcttttcctttctctccacctctgtctttccaggagtctttgcagagctctctctatgtaggcttcctcacgcctgacgatttcttgggcctctgtacctcagctctccatgcccaccgcttatcctcagttggcctcgttcccctgatgccctgaatattcccagac

SEQ ID NO: 541250 - DNA, 637 bp, Homo sapiens
ttgctccccctgctcgagtgccctcaccccagtgagctttctcaattactgcatgtattagtctgttttcacgctgctgataaagacatacccaagactgggaagaaaaagargtttaattggacttacagttccacatggctggggaggcctcagaatcacggagggagacaaaaggcacttcttacacagtggcggcaagagaaaatgagaaagaagcaaaagcggaaacccctgataaacccatcaaatctcatgagacttattcacagtcatgagaatagcaagagaaagatgattggcgaaaagagaaaaactccccacagcatgaggggaattgtgggagctacaattcaagttgagatttctgtggggacagagccaagccatatcactgcacaaaattagtccacttgtggtgaggtcaggcctgaatgagaatacccacatcttttcctccttctctgacccttatccctgccttgcccactctttagaagatcattgttggttcccatcttcattcagagatgtctctcaccatttgtggggcctctctctttcccagtgtccttctaactaaaagaggagtgtgaaattgcaggtgggccgggaattgttcctctcttagaaggca

SEQ ID NO: 541251 - DNA, 637 bp, Homo sapiens
ttgctccccctgctcgagtgccctcaccccagtgagctttctcaattactgcatgtattagtctgttttcacgctgctgataaagacatacccaagactgggaagaaaaagaagtttaattggacttacagttccacatggctggggaggcctcagaatcacggagggagacaaaaggcacttcttacacagtggcggcaagagaaaatgagaaagaagcaaaagcggaaacccctgataaacccatcaaatctcatgagacttattcacagtcatgagaatagcaagagaaagatgattggcgaaaagagaaaaactccccacagcatgaggggaattgtgggagctacaattcaagtygagatttctgtggggacagagccaagccatatcactgcacaaaattagtccacttgtggtgaggtcaggcctgaatgagaatacccacatcttttcctccttctctgacccttatccctgccttgcccactctttagaagatcattgttggttcccatcttcattcagagatgtctctcaccatttgtggggcctctctctttcccagtgtccttctaactaaaagaggagtgtgaaattgcaggtgggccgggaattgttcctctcttagaaggca

SEQ ID NO: 541252 - DNA, 418 bp, Homo sapiens
actctgtctcaaaaaaaaaaaaaaaaaaaaaaaaattgacttctcaccagctctcaaaacacaaacttgcagctcagacttgagcagtggggggtactgataggattgctctctgtcctctgtggtacccactctgccccccacacctacacaaccctccattatctccatatgaaattggagactgactcctttggagacagaagacaacaagagttcagtatggagcatcactgaagatgaggggagcatagaaaatggcagggtggaaaaaaaacacttaaaaaattggtctaccttccttcacaactgtcctgggacaattagcccccaaggagaggtagcagggggctccaaaggagactagtattttatgacttgcccctagcctgcagtartgggcaggtgacgcccatgg

SEQ ID NO: 541253 - DNA, 495 bp, Homo sapiens
aaaatggtgtacaattcagggaagtgtgcttcatagcacattgctttgtcccagcaagttgytgacaaatcttgaatattctaaaataggcagacagacagataaggtgggttggctgccatgggatttttctccttggttaaataagccactgcctcctctattctttctgctgattctgctcttgctccaatctcatgagatactccctcaagagggatgcatttttaaagagtggatggaagagaagagattgttaaaaaaaaaagaaaggaaaaaaagaagtttttattactcctgttacttcattctacagtgtatctgcgtaaataacaccttaacacatgccaaaattaccagttccttacactccacgtagcccttcacaggaatttatatgaggcaggagaaaacaggaagtcctactctgggtatatgatccctaaattagaggtggtttttgaggtatcccttcactaaaaggctttatttgac

SEQ ID NO: 541254 - DNA, 495 bp, Homo sapiens
aaaatggtgtacaattcagggaagtgtgcttcatagcacattgctttgtcccagcaagttgttgacaaatcttgaatattctaaaataggcagacagacagataaggtgggttggctgccatgggatttttctccttggttaaataagccactgcctcctctattctttctgctgattctgctcttgctccaatctcatgagatactccctcaagagggatgcatttttaaagagtggatggaagagaagagattgttaaaaaaaaaagaaaggaaaaaaagaagtttttattactcctgttacttcattctacagtgtatctgcgtaaataacaccttaacacatgccaaaattaccagtyccttacactccacgtagcccttcacaggaatttatatgaggcaggagaaaacaggaagtcctactctgggtatatgatccctaaattagaggtggtttttgaggtatcccttcactaaaaggctttatttgac

SEQ ID NO: 541255 - DNA, 606 bp, Homo sapiens
caagataaaagccacaaactcttattgtctactcatggatatgatagactttcacctttgtcatattccattggttagaattaagtgacaaggtccataccaaactcaaggtgggaaggattccacaaagactcgaatactaagatgggggatcaytagagaccatcttagaagtcaggttagcacaacctgtcaataactgacactctaatcaagagtgctaggtgcctacgctgtttgtgtgcctcttcattgataaggctgctctcatgcttgactcataatggagagcaataacacactgccgcatccctcccctccacctgcatgtccagtagtgtgcctggtttgctcttctatggaaaaataaaaggaattggactcatgctttctctttacttgctgacactgaattgaaaattccctcaaaagcctatttcttaacccatagcatgcgatattctggcttttatcctgagccctggtgaacaacaggtggtgaccccaagggacctgctttgcatgacagcctcacacctggttttcctctcagtcctctcccagtctctcctctttgcctcataagtttagttacaccccgaacac

SEQ ID NO: 541256 - DNA, 606 bp, Homo sapiens
caagataaaagccacaaactcttattgtctactcatggatatgatagactttcacctttgtcatattccattggttagaattaagtgacaaggtccataccaaactcaaggtgggaaggattccacaaagactcgaatactaagatgggggatcattagagaccatcttagaagtcaggttagcacaacctgtcaataactgacactctaatcaagagtgctaggtgcctacgctgtttgtgtgcctcttcattgataaggctgctctcatgcttgactcataatggagagcaataacacactgcckcatccctcccctccacctgcatgtccagtagtgtgcctggtttgctcttctatggaaaaataaaaggaattggactcatgctttctctttacttgctgacactgaattgaaaattccctcaaaagcctatttcttaacccatagcatgcgatattctggcttttatcctgagccctggtgaacaacaggtggtgaccccaagggacctgctttgcatgacagcctcacacctggttttcctctcagtcctctcccagtctctcctctttgcctcataagtttagttacaccccgaacac

SEQ ID NO: 541257 - DNA, 415 bp, Homo sapiens
gtggtggcttggcagtcttctcctgtcctctgctcttggccccagacccgcgctcacagccacctcctgaagccaccagctctgcaccctctcggcctcgcaggggaagaggggactggatggaagccgcggactctgggcgctgtcaaggtcactgttgtgaaaagccgggagacctgatgtggacacagggaggcctggaccggaggcgcggctggccagaggcttcgcgtctgcccctcttccttcagagcctcctgctcccagggaagctccgcgcgtgtcctcaaagcagagagtggtttccaaacggaccccccagcatccgattgggctatcccgccccaggctggagggtgggggctmatggggtctctagtcaccaagtgccccacctgagaggacccggtctctc

SEQ ID NO: 541258 - DNA, 622 bp, Homo sapiens
aaatcgtgtcgaatgaaaaagagggatgggggcaaaaaattttgccttgagccggccctgccattagatgaacccattaagagcaatttctgtttggtagactcagagttcactgatggatgctgtcgttgttagatcactttaaaaactgtacagtgtggtccagcacagagcacagtctttcaaatgaaagaaagctggatttaaattctgactgtgtctcctagggtgtagccttgaaccaaggacattccttcaactcttgctttgatcataagtaaaatgaaggataatcagtaatgtgagtatactgaaaaaaatgaaagcactgagcatggtgctggcatccaagagaggctcaataattttctttatttttatttcatagaattcctgacctcaaagaacatatctatgagtgatttctgatagggaaacatgttgaccttgtcccaaatacctagtgctttcaaaaaatagtaacatgtctaacagtctatacaaattcttctctcttgtcaggtagaagtgagagcaagagtcrtaacagcaaacacccttctgacctctgaaatgcttcaaactttagattacaaagattttgttgtcacggaccgggaca

SEQ ID NO: 541259 - DNA, 662 bp, Homo sapiens
aacactgctacctgtggcctcaggctgcagtgtcagctcttccctgggtctccagcctgccagtctaacctgaaaattatgtacttgccagcccccacagtcacgtgagtgaactggcccaggctgstcaccagggtcagtttctctgtgtgtcattaattcattcagtcttcagcagtctctttggagctgagatgtacctaccatctgccttttgggtgcttagggtggagaaccagaaaagtataacctagtgtgtatcctcaaagagctaacaatatggggtggtacctataggtctggaaacactttactgactctgtgaggcataccaggagacgtcagagaacagtccctcctcaaatgccaaatgagatgcagaagaaatagtttgctcaagttcatgggccagatatcccagtggtcagggagtttcatgaatgagatggaactttgcatggaacccgagggatgtgtatgatttgagtagatgaagaatatgagactttccaagcagctagaagttagggagcagcaagatgtgtggtgggattgagcacagttggttcagaggatagactgcagttttaataatttgtagtaaatatctcccaactgtttggcactattggagcaagttcttgaatgccaaatgaaggcat

SEQ ID NO: 541260 - DNA, 608 bp, Homo sapiens
aggccaactgcaaagaacactgagcgaggctctgtagatggatgtaataaaaatctataaaacaatgtgtttaaacctaagaattctactgctttccaattccttccctctgctccttttcctaacctcctgcttctccagcccttccctctgtccctttcayccctcaggccctcctctccccttagtccccaccaccctgtcacttctaaattgtggctctagcattgtcccattacctgctacgtgactgttctctccacagtggtcctgctcctgtgagtcagagtgtgtcatttcctcacctaaaacactccagtggctccacctcggtcttgtgaagcttctagaatgtcaggcacgtgagcatatgagggcatacctggttcatcttaggcactaaatttttgttgactgaatgaatgaaatatgaatgtattaaattgcatcacagaaagttataaaatgtaaaacactgaaaaattaagaaatattttattttatgtaactagtgtgcatatcaattcattccgagtctgttgagcctgtgtatgaattttataagattgcataacaaattatcacaaacattgactttaaacaacacc

SEQ ID NO: 541261 - DNA, 608 bp, Homo sapiens
aggccaactgcaaagaacactgagcgaggctctgtagatggatgtaataaaaatctataaaacaatgtgtttaaacctaagaattctactgctttccaattccttccctctgctccttttcctaacctcctgcttctccagcccttccctctgtccctttcatccctcaggccctcctctccccttagtccccaccaccctgtcacttctaaattgtggctctagcattgtcccattacctgctaygtgactgttctctccacagtggtcctgctcctgtgagtcagagtgtgtcatttcctcacctaaaacactccagtggctccacctcggtcttgtgaagcttctagaatgtcaggcacgtgagcatatgagggcatacctggttcatcttaggcactaaatttttgttgactgaatgaatgaaatatgaatgtattaaattgcatcacagaaagttataaaatgtaaaacactgaaaaattaagaaatattttattttatgtaactagtgtgcatatcaattcattccgagtctgttgagcctgtgtatgaattttataagattgcataacaaattatcacaaacattgactttaaacaacacc

SEQ ID NO: 541262 - DNA, 608 bp, Homo sapiens
aggccaactgcaaagaacactgagcgaggctctgtagatggatgtaataaaaatctataaaacaatgtgtttaaacctaagaattctactgctttccaattccttccctctgctccttttcctaacctcctgcttctccagcccttccctctgtccctttcatccctcaggccctcctctccccttagtccccaccaccctgtcacttctaaattgtggctctagcattgtcccattacctgctacgtgactgttctctccacagtggtcctgctcctgtgagtcagagtgtgtcatttcctcacctaaaacactccagtggctccacctcggtcttgtgaagcttctagaatgtcaggcacgtgagcatatgagggcatacctggttcatcttaggcactaaatttttgttgactgaatgaatgaaatatgaatgtattaaattgcatcacagaaagttataaaatgtaaaacactgaaaaattaagaaatattttatyttatgtaactagtgtgcatatcaattcattccgagtctgttgagcctgtgtatgaattttataagattgcataacaaattatcacaaacattgactttaaacaacacc

SEQ ID NO: 541263 - DNA, 271 bp, Homo sapiens
tggggaaggagggttggatgtgtgagcacagagagaaggtgtgtaagggtcaccyaggccaggaggaggctgagggtgagccatgcagggagagggtgattgctggccctggtgggggctccccatgtggtttgggtcatgaagttagagaagacaccaacgatgagggacagtgagtagatggcagaatcactggattggtattcccagggtgggggtcgaaggattgttggaattgatgtgctaaagggtggacttcaagcctggaatg

SEQ ID NO: 541264 - DNA, 271 bp, Homo sapiens
tggggaaggagggttggatgtgtgagcacagagagaaggtgtgtaagggtcacctaggccaggaggaggctgagggtragccatgcagggagagggtgattgctggccctggtgggggctccccatgtggtttgggtcatgaagttagagaagacaccaacgatgagggacagtgagtagatggcagaatcactggattggtattcccagggtgggggtcgaaggattgttggaattgatgtgctaaagggtggacttcaagcctggaatg

SEQ ID NO: 541265 - DNA, 271 bp, Homo sapiens
tggggaaggagggttggatgtgtgagcacagagagaaggtgtgtaagggtcacctaggccaggaggaggctgagggtgagccatgcagggagagggtgattgctggccctggtgggggctccccatgtggtttgggtcatgaagttagagaagacaccaacgatgagggacagtgagtagatggyagaatcactggattggtattcccagggtgggggtcgaaggattgttggaattgatgtgctaaagggtggacttcaagcctggaatg

SEQ ID NO: 541266 - DNA, 271 bp, Homo sapiens
tggggaaggagggttggatgtgtgagcacagagagaaggtgtgtaagggtcacctaggccaggaggaggctgagggtgagccatgcagggagagggtgattgctggccctggtgggggctccccatgtggtttgggtcatgaagttagagaagacaccaacgatgagggacagtgagtagatggcrgaatcactggattggtattcccagggtgggggtcgaaggattgttggaattgatgtgctaaagggtggacttcaagcctggaatg

SEQ ID NO: 541267 - DNA, 343 bp, Homo sapiens
taaagcaagaattcctggacctaccaccagatattctgattgggttgataaagaatcaactgcattggaaccctgaaaaatcatcaaaggtttattgcaacctagcaagtccagaaaaatcaactggaactcaggagcagagctttgtggcamcatatcttacccttggcccattcctccctgttcaagtcagtagtgatcttgaagacagcagcctggttccttagtgtgggctccaatgccagtgggagccgagtggaccatgttctcaaagtgttgtggttgtctaccttttcctgttgggtgactccgtgaaggatgataagaaatggcttacattggg

SEQ ID NO: 541268 - DNA, 343 bp, Homo sapiens
taaagcaagaattcctggacctaccaccagatattctgattgggttgataaagaatcaactgcattggaaccctgaaaaatcatcaaaggtttattgcaacctagcaagtccagaaaaatcaactggaactcaggagcagagctttgtggcaccatatcttacccttggcccattcctccctgttcaagtcagtagtgatcttgaagacagcagcctggttccttagtgtgggctccaatgccagtgggagccgagtggaccatgttctcraagtgttgtggttgtctaccttttcctgttgggtgactccgtgaaggatgataagaaatggcttacattggg

SEQ ID NO: 541269 - DNA, 523 bp, Homo sapiens
tgaaaatagcactgggcctgaggcctggcccctgctgtgtgatgccccctcttggggagagcctggtttctgtggcatgcagaaacttccctgtgcttcctgtgggcttggggtgagccaggtcctcctgggggaactgggcactgtgggacaggagggtccctggyctggggtctccatttgcctccttacccccatcaacgaagcaccagaggagccaactcaataaacctcaatgcacggcccttcctggaccataggtgctcagggccccctgagctgcccgggggcagaacacttggcagtggccagtgcttccccaacaactcccccatgcacagatgcctggtggacacacttcctttaaccctgctcagctggagctcagcccccatcctagtacctctgcctcctcctccagggcaggaaaagaaaacccaaccccaaacccatggagaatcctcaccttgggcgaggccctggctgggactcagcctcttgtcagaccctccagtagctccat

SEQ ID NO: 541270 - DNA, 523 bp, Homo sapiens
tgaaaatagcactgggcctgaggcctggcccctgctgtgtgatgccccctcttggggagagcctggtttctgtggcatgcagaaacttccctgtgcttcctgtgggcttggggtgagccaggtcctcctgggggaactgggcactgtgggacaggagggtccctggtctggggtctccatttgcctccttacccccatcaacgaagcaccagaggagccaactcaataaacctcaatgcacggcccttcctggaccataggtgctcagggccccctgagctgcccgggggcagaacactkggcagtggccagtgcttccccaacaactcccccatgcacagatgcctggtggacacacttcctttaaccctgctcagctggagctcagcccccatcctagtacctctgcctcctcctccagggcaggaaaagaaaacccaaccccaaacccatggagaatcctcaccttgggcgaggccctggctgggactcagcctcttgtcagaccctccagtagctccat

SEQ ID NO: 541271 - DNA, 454 bp, Homo sapiens
aaggacatgcccatgacactgcctcaggaggtcctgacagcatgtgcccaaggtggtcaggatmcagcttgcttctatatattttagggagaaaatacatcagcctgtaaacaaaaaattaaattctaaggtccctgaaccatctgaatgggctttcttctaggccagggcactctaaaattgaagaacctgaacattcctttctattgataatactttcagccagttgagcccattcagaccacagcaaggtgccaggccaggcaagggctgacttgagatacctgccagatgagtcactggcaaaaggtgctgctccctggtgagggagaaacaccaggggctgggagaggcccagaaggctctgaaggagttttggtttggctggccatgtgtgcaattagcgtgatgagctctgacatggccttgcatggacggattgggcaggacaccc

SEQ ID NO: 541272 - DNA, 454 bp, Homo sapiens
aaggacatgcccatgacactgcctcaggaggtcctgacagcatgtgcccaaggtggtcaggatacagcttgcttytatatattttagggagaaaatacatcagcctgtaaacaaaaaattaaattctaaggtccctgaaccatctgaatgggctttcttctaggccagggcactctaaaattgaagaacctgaacattcctttctattgataatactttcagccagttgagcccattcagaccacagcaaggtgccaggccaggcaagggctgacttgagatacctgccagatgagtcactggcaaaaggtgctgctccctggtgagggagaaacaccaggggctgggagaggcccagaaggctctgaaggagttttggtttggctggccatgtgtgcaattagcgtgatgagctctgacatggccttgcatggacggattgggcaggacaccc

SEQ ID NO: 541273 - DNA, 418 bp, Homo sapiens
acagaattaaaagggggcaccaagaatactgagctgagaaactatacaatgggagttgccattaaacagaatggggaagagcaaatttggggagtttcagtggctccacatagacatattaattttgagattcctaactgacatccacatggataagtcagggagtgttgtgtgtagtgtccagtgttttggtgtaatatgaaatatcaggaaattaatgacacaaaaatcagtaagaaagcaaagaaagataagcagtcaaagtcgtgagcctaatcatcctstaacatttaaaaaatactaaagatgaaacctgcaaaaaaggactaggggtaattatcaaaaacatggtggagggaaagtaggttaagttttctggaattctataaaaaaagttttacaaaggggaggtagagat

SEQ ID NO: 541274 - DNA, 614 bp, Homo sapiens
tgagttatcatatgtattacatgtatatacactgaatcatccaggttttcttctttagtcagtaatgagagtcaaataacaacraatttttaaaattttctttcaaaagacttaaagaatattttcactggataaaaaattctaggttgacagatttttttcttcctttcagaactttaaagattttgttccacctctatggcttccctgctttctgatgagatgtgtacagaaattcaaattattgttcccttatcagtatctagttttcctctgcctgctttcaagattttctctttatcttcggttttccacactttgactgtaaatgcctactttggttctctttgcatttattttggttggaattttcagagtttcttcaatctataaacgtaatccttttaccaaatctgaaaagttttctgtcatcatttagtcaaatattttttctggctctttctcttatactgtgcctattagacctttcaaaactgcccccatacatctctatggttctattttttcaccccaatctttcataactctcttcagattttctatcaatctataatcaagttcatttacttctctataatattaattctgctaat

SEQ ID NO: 541275 - DNA, 614 bp, Homo sapiens
tgagttatcatatgtattacatgtatatacactgaatcatccaggttttcttctttagtcagtaatgagagtcaaataacaacaaatttttaaaattttctttcaaaagacttaaagaatattttcactggataaaaaattctaggttgacagatttttttcttcctttcagaactttaaagattttgttccacctctatggcttccctgctttctgatgagatgtgtacagaaattcaaattattgttcycttatcagtatctagttttcctctgcctgctttcaagattttctctttatcttcggttttccacactttgactgtaaatgcctactttggttctctttgcatttattttggttggaattttcagagtttcttcaatctataaacgtaatccttttaccaaatctgaaaagttttctgtcatcatttagtcaaatattttttctggctctttctcttatactgtgcctattagacctttcaaaactgcccccatacatctctatggttctattttttcaccccaatctttcataactctcttcagattttctatcaatctataatcaagttcatttacttctctataatattaattctgctaat

SEQ ID NO: 541276 - DNA, 614 bp, Homo sapiens
tgagttatcatatgtattacatgtatatacactgaatcatccaggttttcttctttagtcagtaatgagagtcaaataacaacaaatttttaaaattttctttcaaaagacttaaagaatattttcactggataaaaaattctaggttgacagatttttttcttcctttcagaactttaaagattttgttccacctctatggcttccctgctttctgatgagatgtgtacagaaattcaaattattgttcccttawcagtatctagttttcctctgcctgctttcaagattttctctttatcttcggttttccacactttgactgtaaatgcctactttggttctctttgcatttattttggttggaattttcagagtttcttcaatctataaacgtaatccttttaccaaatctgaaaagttttctgtcatcatttagtcaaatattttttctggctctttctcttatactgtgcctattagacctttcaaaactgcccccatacatctctatggttctattttttcaccccaatctttcataactctcttcagattttctatcaatctataatcaagttcatttacttctctataatattaattctgctaat

SEQ ID NO: 541277 - DNA, 614 bp, Homo sapiens
tgagttatcatatgtattacatgtatatacactgaatcatccaggttttcttctttagtcagtaatgagagtcaaataacaacaaatttttaaaattttctttcaaaagacttaaagaatattttcactggataaaaaattctaggttgacagatttttttcttcctttcagaactttaaagattttgttccacctctatggcttccctgctttctgatgagatgtgtacagaaattcaaattattgttcccttatcagtatctagttttcctctgcctgctttcaagattttctctttatcttcggttttccacactttgactgtaaatgcctactttggttctctttgcatttattttggttggaattttcagagtttcttcaatctataaacgtaatccttttaccaaatctgaaaagttttctgtcatcatttagtcaaatattttttctggctctttctcttatactgtgcctattagacctttcaaaactgcccccatacatctctatggttctattttttcaccccaatctttcataastctcttcagattttctatcaatctataatcaagttcatttacttctctataatattaattctgctaat

SEQ ID NO: 541278 - DNA, 380 bp, Homo sapiens
cattagaccccaggtgaacaccaggtcttaggtggacattaggcccctggtggacataaagtaccagtggacatccatgttgcaggtggacacccagcgcccagatgggcatcaggccacatttggacattgaggccccaggtggatatcaggcctcaggtgaaccctaggtccaacatagacatcaggccttaggtcgacactcaagcaccagatggactgctgcacctaagtagaaaacagacccctatctggatatctaagatacaggtatacaacaagccccaggctgacatccagaccccaggkggacaccatagcccaggtgaacagcaggcaacagtttggcaccaagtacctaagtgaaacaaagccttagg

SEQ ID NO: 541279 - DNA, 546 bp, Homo sapiens
gcttataaatgttctaatctacttttgaatgtgtattcgtgacccaagattggttttttccrggccccatcattctaatgacttttttttttttttgagacagagtctctctctgttgcccaggctggagtgcagtggtgttatctcgactcactgcaacctccacatcccaagttcaagcaattctcctgcctcagcctcccgagtagctgggactacaggcacatgccaccatgttcggctaattttttttttctttttttttttttagtagagacagggtttcaccatgttagccaggatggtctcgatctcctgacctcatgatcttcctgctttggcctcccaaagtgctgcgattacaggcatgagccactgcacccagcccagagttttttttaacaaggttcttctcagcaattctagtatccagatataggcccatcatagacatcacacaagcgtgtacttcataatcctggtgaatacagaagtttcctggactccttgatgagctactgctttcgctcctatatcagtgttttc

SEQ ID NO: 541280 - DNA, 480 bp, Homo sapiens
gacccaagattggttttttccaggccccatcattctaatgacttttttttttttttgagacagagtctctctctgttgcccaggctggagtgcagtggtgttatctcgactcactgcaacctccacatcccawgttcaagcaattctcctgcctcagcctcccgagtagctgggactacaggcacatgccaccatgttcggctaattttttttttctttttttttttttagtagagacagggtttcaccatgttagccaggatggtctcgatctcctgacctcatgatcttcctgctttggcctcccaaagtgctgcgattacaggcatgagccactgcacccagcccagagttttttttaacaaggttcttctcagcaattctagtatccagatataggcccatcatagacatcacacaagcgtgtacttcataatcctggtgaatacagaagtttcctggactccttgatgagctact

SEQ ID NO: 541281 - DNA, 546 bp, Homo sapiens
gcttataaatgttctaatctacttttgaatgtgtattcgtgacccaagattggttttttccaggccccatcattctaatgacttttttttttttttgagacagagtctctctctgttgcccaggctggagtgcagtggtgttatctcgactcactgcaacctccacatcccaagttcaagcaattctcctgcctcagcctcccgagtagctgggactacaggcacatgccaccatgttcggctaattttttttttctttttttttttttagtagagacagggtttcaccatgttagccaggatggtctcgatctcctgacctcatgatcttcctgctttggcctcccaaagtgctgcgattacaggcrtgagccactgcacccagcccagagttttttttaacaaggttcttctcagcaattctagtatccagatataggcccatcatagacatcacacaagcgtgtacttcataatcctggtgaatacagaagtttcctggactccttgatgagctactgctttcgctcctatatcagtgttttc

SEQ ID NO: 541282 - DNA, 297 bp, Homo sapiens
tggagatggtgccgctgtcacagggcaccagagcagcaatgtgacagcttctcatggaggcagactctgttcccagtccctacycaaccctggcttgatccttgtcagtgtcttatttctttgccttgcctttatctcagcctggcttcccttccaggcagctctgagtggctcttggtccaggcttgtctccatctctccttcctcttcccaactccctaaactcaggacccagtcactcctgctccttacatacacacacacactaacacacgcacacactcactctcaccctct

SEQ ID NO: 541283 - DNA, 297 bp, Homo sapiens
tggagatggtgccgctgtcacagggcaccagagcagcaatgtgacagcttctcatggaggcagactctgttcccagtccctacccaaccctggcttgatccttgtcagtgtcttatttctttgccttgcctttwtctcagcctggcttcccttccaggcagctctgagtggctcttggtccaggcttgtctccatctctccttcctcttcccaactccctaaactcaggacccagtcactcctgctccttacatacacacacacactaacacacgcacacactcactctcaccctct

SEQ ID NO: 541284 - DNA, 626 bp, Homo sapiens
gcacagtgcctgacctttcccgcagcctcctccccactggtcttccatgagaggatcaacccttggagtgtccagagattcctgttaaatgckaaagaccacaggagagtttgggagggggaagatgtttggggagcagcttagttgtcctgaggtgcccatcacccttcaccgtttcagcaatatggatcttccaaggatctgggaatgggaaccaggcataagacagatacatgtggatgagaagaggccagagtctttctctgtgtaggcaccatccagcccaagatgagcattgctccagaaacacatgcactcatgatgctaaacccaatctattgaggacttaatacaaactgcgatttttttaaagcatttaattcttaccacagtcctttgacatcttattatatccattttacagataaagaaacaggcacagagggtttaagtaacttgcacaaggtcacacaatcacaactagtaaagccagaattaaagtccagtcagtctgcattcaaagcctgtgctcctgccccaaagtgacaattagtgacttaaaggcaagaaaaacagaccctcctctacccaccatcctcatacacagccttccagcccaggatctg

SEQ ID NO: 541285 - DNA, 626 bp, Homo sapiens
gcacagtgcctgacctttcccgcagcctcctccccactggtcttccatgagaggatcaacccttggagtgtccagagattcctgttaaatgctaaagaccacaggagagtttgggagggggaagatgtttggggagcagcttagttgtcctgaggtgcccatcacccttcaccgtttcagcaatatggatcttccaaggatctgggaatgggaaccaggcataagacagatacatgtggatgagaagaggccagagtctttctctgtgtaggcaccatscagcccaagatgagcattgctccagaaacacatgcactcatgatgctaaacccaatctattgaggacttaatacaaactgcgatttttttaaagcatttaattcttaccacagtcctttgacatcttattatatccattttacagataaagaaacaggcacagagggtttaagtaacttgcacaaggtcacacaatcacaactagtaaagccagaattaaagtccagtcagtctgcattcaaagcctgtgctcctgccccaaagtgacaattagtgacttaaaggcaagaaaaacagaccctcctctacccaccatcctcatacacagccttccagcccaggatctg

SEQ ID NO: 541286 - DNA, 626 bp, Homo sapiens
gcacagtgcctgacctttcccgcagcctcctccccactggtcttccatgagaggatcaacccttggagtgtccagagattcctgttaaatgctaaagaccacaggagagtttgggagggggaagatgtttggggagcagcttagttgtcctgaggtgcccatcacccttcaccgtttcagcaatatggatcttccaaggatctgggaatgggaaccaggcataagacagatacatgtggatgagaagaggccagagtctttctctgtgtaggcaccatccagcccaagatgagcattgctccagaaacacatgcactcatgatgctaaacccaatctattgaggacttaatacaaactgcgatttttttaaagcatttaattcttaccacagtcctttgacatcttattatmtccattttacagataaagaaacaggcacagagggtttaagtaacttgcacaaggtcacacaatcacaactagtaaagccagaattaaagtccagtcagtctgcattcaaagcctgtgctcctgccccaaagtgacaattagtgacttaaaggcaagaaaaacagaccctcctctacccaccatcctcatacacagccttccagcccaggatctg

SEQ ID NO: 541287 - DNA, 663 bp, Homo sapiens
ctgaggaaggtggattgcctgagctcaggagtttgacaccagcctagccaacacggtgaaaccccatctctactaaaatacaaaaaaatagccaggcatggtggggtgtgcctgtattcccagctacttgggaggctgaggcaggagaartgcttgaatctggaaggtggaggttgtggtaagccgagattgcaccactgcaccccagcctgggcaagagtgagaccttgtctcaaaaaaaaaataattttatcaaaccattttcatctttgaaacattttaggtctcctctttggctttttcacattataaataatactgtgataaacatccttcagcagaaaccttcataggctagcttcctagaagtagaggtattaggtccaaggttgtgaattgttttaaagctattgatttttctggataaaattgcttccagatatattgtcccattgcattgcaatcagtggatctcaccttcagtattttgtgcaaaaaaaaaagaatgtttctccttttaaagattatatttaaaatagctttcaaatattaaaaatttgtatctacaaataagagacagtgaaaaaattaataaaagaaacacaaaagtagaaagtagatgaaaacattaaaattcagatcacagccctctgtcatggagaa

SEQ ID NO: 541288 - DNA, 663 bp, Homo sapiens
ctgaggaaggtggattgcctgagctcaggagtttgacaccagcctagccaacacggtgaaaccccatctctactaaaatacaaaaaaatagccaggcatggtggggtgtgcctgtattcccagctacttgggaggctgaggcaggagaaatgcttgaatctggaaggtggaggttgtggtaagccgagattgcaccactgcaccccagcctgggcaagagtgagaccttgtctcaaaaaaaaaataattttatcaaaccattttcatctttgaaacattttaggtctcctctttggctttttcacattataaataatactgtgataaacatccttcagcagaaaccttcataggctagcttcctagaagtagaggtattaggtccaaggttgtgaattgttttaaagctattgatttttctggataaaattgcttccagatatattgtcccattgcattgcaatcagtggatctcaccttcagtattttgtgcaaaaaaaaaagaatgtttctccttttaaagattatatttaaaatagctttcaaatattaaaaatttgtatctacaaataagagacagtgaaaaaawtaataaaagaaacacaaaagtagaaagtagatgaaaacattaaaattcagatcacagccctctgtcatggagaa

SEQ ID NO: 541289 - DNA, 569 bp, Homo sapiens
tttttgttcttttatctatccttgatacatttttcttttaattaatttttaccccaacttttagtgctggctgagttgtcgatttgttgctgggatggaaagaagaaatttgcaccttgtcctttgcaggttatgagagccctgtctgtcctcgtggttatgtggwtgtcttttagattattgtgaatattgagctttgaaaataacctaacagtcaatcaattgctgagattctattaccagtagtgggacacaatgtacatcatgtagagaggcagactcgtcgctgacaaaagggctgacccctggaaaaccagcacagagccagctcttctgtctgaatccactctctccaaaacataacataagtcatggaaagaaatgagtctcaagaaatgagactcttaccgtgatgagagggggacattgaaaagctactttagtgattagggagagaagtccccttttgcatcccaaatcaagcagaggactggtagtccaaatataattttggaataacctgagtcacctgggccttgaggaatcctggcctcttagtccacatttgc

SEQ ID NO: 541290 - DNA, 455 bp, Homo sapiens
gctgcaatagcttttttgttcttttatctatccttgatacatttttcttttaattaatttttaccccaacttttagtgctggctgagttgtcgatttgttgctgggatggaaagaagaaatttgcaccttgtcctttgcaggttatgagagccctgtctgtcctcgtggttatgtggatgtcttttagattattgtgaataytgagctttgaaaataacctaacagtcaatcaattgctgagattctattaccagtagtgggacacaatgtacatcatgtagagaggcagactcgtcgctgacaaaagggctgacccctggaaaaccagcacagagccagctcttctgtctgaatccactctctccaaaacataacataagtcatggaaagaaatgagtctcaagaaatgagactcttaccgtgatgagagggggacattgaaaagctactttag

SEQ ID NO: 541291 - DNA, 455 bp, Homo sapiens
gctgcaatagcttttttgttcttttatctatccttgatacatttttcttttaattaatttttaccccaacttttagtgctggctgagttgtcgatttgttgctgggatggaaagaagaaatttgcaccttgtcctttgcaggttatgagagccctgtctgtcctcgtggttatgtggatgtcttttagattattgtgaatattgagctttgaaaataacctaacagtcaatcaattgctgagattctattaccagtagtgggacacaatgtacatcatgtagagaggcagactcgtcgcygacaaaagggctgacccctggaaaaccagcacagagccagctcttctgtctgaatccactctctccaaaacataacataagtcatggaaagaaatgagtctcaagaaatgagactcttaccgtgatgagagggggacattgaaaagctactttag

SEQ ID NO: 541292 - DNA, 630 bp, Homo sapiens
caggaagctgtttaggcatctcaacacagggtcaaaaagctcctaggtacrcaaataaatgtgcacactggaaattgagttcagtaatttttccatggcctagagaactatgatgatgaaaatgttctacatttgtgctggccagttcagtagccactagccacatgtggctattgagtaactgaaatgtggctagtacaactgaccaactaaattgtaaattttgttttatttgaattaattttaattttaatagtcatctgtggctattggctactgtactgggtagcacagagatgagaaataatagaaacctttttgttcggttgtttcaagagctaacattgtcaaaagctcaattcctgttttatgtaaggttttggtttatattttctcaaagaagtgaagtgcagaaaaaagaaaacaaaacaaaaggatgatcaagcagaacttgaagggtgaagcagagatacttaactcagggtggggacaacagcaatgaccttgtttgaaatgcagctcctgtctctgtggctctctgtgctctgctggggcatcagttcctttacttcttagttaaagcagttatttcgatggtgcaacgcttttttggtgcaatgattttttaca

SEQ ID NO: 541293 - DNA, 639 bp, Homo sapiens
taatttttccatggcctagagaactatgatgatgaaaatgttctacatttgtgctggccagttcagtagccactagccacatgtggctattgagtaactgaaatgtggctagtacaactgaccaactaaattgtaaattttgttttatttgaattaattttaattttaatagtcatctgtggctattggctactgtactgggtagcacagagatgagaaataatagaaacctttttgttcggttgtttcaagagctaacattgtcaaaagctcaattcctgttttatgtaaggttttggtttatattttctcaaagaagtgaagtgcagaaaaaagaaaacaaaacaaaaggatgatcaagcagaacttgaagggtgaagcagagatacttaactcagggtggggacaacagcaatgaccttgtttgaaatgcagctcctgtctctgtggctctctgtgctctgctggggcatcagttcctttacttcttagttaaagcagttatttcgatggtgcaaygcttttttggtgcaatgattttttacacagctggtttatctccagtatggaagctctctgcttaatcatcttgatttttctgggcttgttcccactctgcagatgtaagcatgacacctg

SEQ ID NO: 541294 - DNA, 579 bp, Homo sapiens
atattttccctaaacccaggtctctatggcattctacagaacactctgcatccttctaagggacactcgaagagcaaatggattgtacagtgagttacaaataaaatggccaatctcagcatgaaagactgagggtgttacctgaatgaggatgcagaccctccatctacatataagcaaacctaggtgaccatgagcctgccagaaagaaatcacatgctatgtaaaggcttagtaacagtgatgaatatctgaacttgaaatccagctccagagcagttcagtggcctctcttccaggaacagaagccaaagcagctcaggattsttgaaggctctgaaaggtcagtgagaatcctggtatatgttaagactttcccaccaaagaagggctccgtgtgtagagactgaaaaaggattcccaactttggtcccttcaaaaccagaaacaaaggtgggggatagcccaattaagtggccctagagatttgcccaggagctggagccttccggagaagtccagttttcctatgcagggagaggactgggagttctctggtcacaagcgttctgcctttgt

SEQ ID NO: 541295 - DNA, 647 bp, Homo sapiens
cataattataagcttccagtgggcatctagcacacagtaagcactgaataaagtagtcaaataatgaaaatgacaatgataataacaagctcctgtctctacttttaattgtttgtgctctgtagcattagaaaaaatggctagtatctaaaagacatttgatagttatctgttaagtggacaagtgaaaatggaaatgttttctttgtaaattctgttgaaaaagcacagaaatgaaatggagacagctctattatgagcaccttaaagatgaaaactacatctattccatttttgtctcctgcaacttataaaacctaacttacagaagctctttgataaatagatggctaaattaaaggtgtcctcatacagtttggactatacartgtattaggtgtctacaatcaggtagcatactagcatttttgtgagtgtgaaacatttttctacttttatgataatctgctgagcctagagttgggcaatttgcatatttattatgacactcttttggcaaatggtagcagagcatcttgttctaacaaaattactgttatcatgacaattaaccagcaggtagaagaacacatcttgttccaaaaaagtcaatatatctctttccaacttcaaatgaggaggaatga

SEQ ID NO: 541296 - DNA, 587 bp, Homo sapiens
gatctaggttgtgtgcttcgtatgagaatctaatgccagatgatctatcattgtctcactttgcccccagataagaccatctagttgcagaaaaataagctcagagcttccactgattctacattatggtaagttgtataattatttcattatatattacaatgtaataataatataaaatagcacaataaatgtaacatgattgaataattctgaaaccatccccacctttccccagcccatggaaagattgtcttccacaaaaccggtccctggtgccaaaaaggttggggaaaactaacctaaagtaattcactgttataagtcttacctggattgctgttttcagaagagacttttagtatctgtttttctttgtagtcagaaagtaactggcaaattctatgtataaaattgtaataaaccaaattactattttaatactgatataaaaaatacttaccaaatgtgaaattcttaacagtatttcaaacaatatcagaatawcagaacttaacagtattatcccatccacttatgagtacattctgcaaacttctctttaagcttctaattaaagaagaaaa

SEQ ID NO: 541297 - DNA, 603 bp, Homo sapiens
tctttcccatttcatgaaccataacacaacttccacagagcatctatgacatgattaaactttctgacctgtcctgtattttcctctttcgtaattagtcattctactttaggacaacaatttgccatataagatcctctctcatacaacatttctttccttcataacttttcttaccatcaatacatcttcacatctacaactttctttagatctctctcccctactaatttctgatgtccacctaaaccaaaaaggtcagataacgcaaggcaaaacagaggagagccttaggttttgagaaggacctgtctgcttaaagttcttggggttccatgaggaaaacagagtttctcctaaaatggggtttgtcgaaccttctatttttccttaaggagtcccaggctgtcagaaattaccttagatcctctcacgtgagcatcaagagtggcaacaagacagacaagggaaataattcggacaactgagcagaaaaagaaaaacttactactgtcsccaccataaagatggataaactgaggcaccatgcagtttaaaaattcatgttcacatagagttaggctccacagctcactctcttac

SEQ ID NO: 541298 - DNA, 608 bp, Homo sapiens
tgacctcccaccccagatcctggctccttctctcttgccagctctactccaggcatcgagcttccctctctctctcttttttggtctctctcaaatctttctcttttcttatcctctctccctccaccccttgccattttagtcagtctttctctttccttcttctcttttgtctctcaaactcttttttctttctatcttggttcatatctgttcagggaaagcctctttctgtctcggcctctccttttttccttttcactgtttattcttccctctctcctttatctctccgttgctctacttctctgcctttttctgagtctgtttcctctcaccatctctctctccatccgtccctccctgtatctgcccctctctccatctcgctgctgtgtccagctctctctctcgctcattccttcctcgccatctggggatctccccggctccgtgtcccctgcaktgccccgcgccccaatcaccggccaaagcgcccgcggagcagagcagggccagcccggccagcgcgcagagcaggggccgcatggtgccggcctggctgaaagcagcacggcatgtgcccgcagccgcccttcccggatcgt

SEQ ID NO: 541299 - DNA, 606 bp, Homo sapiens
tgacctcccaccccagatcctggctccttctctcttgccagctctactccaggcatcgagcttccctctctctctcttttttggtctctctcaaatctttctcttttcttatcctctctccctccaccccttgccattttagtcagtctttctctttccttcttctcttttgtctctcaaactcttttttctttctatcttggttcatatctgttcagggaaagcctctttctgtctcggcctctccttttttccttttcactgtttattcttccctctctcctttatctctccgttgctctacttctctgcctttttctgagtctgtttcctctcaccatctctctctccatccgtccctccctgtatctgccyctctctccatctcgctgctgtgtccagctctctctctcgctcattccttcctcgccatctggggatctccccggctccgtgtcccctgcagtgccccgcgccccaatcaccggccaaagcgcccgcggagcagagcagggccagcccggccagcgcgcagagcaggggccgcatggtgccggcctggctgaaagcagcacggcatgtgcccgcagccgcccttcccggatc

SEQ ID NO: 541300 - DNA, 550 bp, Homo sapiens
tgacctcccaccccagatcctggctccttctctcttgccagctctactccaggcatcgagcttccctctctctctcttttttggtctctctcaaatctttctcttttcttatcctctctccctccaccccttgccattttagtcagtctttctctttccttcttctcttttgtctctcaaactcttttttctttctatcttggttcatatctgttcagggaaagcctctttctgtctcggcctctccttttttccttttcactgtttattcttccctctctcctttatctctccgttgctctacttctctgcctttttctgagtctgtttcctctcaccatctctctctccatccgtccctccctgtatctgcccctctctccatctcgctgctgtgtccagctctctctctcgctcattccttcctcgccatctggggatctccccggctccgtgtcccctgcagtgccccgcgccccartcaccggccaaagcgcccgcggagcagagcagggccagcccggccagcgcgcagagcaggggccgcatg

SEQ ID NO: 541301 - DNA, 642 bp, Homo sapiens
aaattttcaatttttgtcaagctggctaatgtaaaacatcatcctgttctatgtttaatagcatttccctgattactawtatgaagcattatatattgcctattcatgtttcatattttgtataatgtctatatcctttgttcattatttaattgtgttatttgtattctttatgtattattctttaacacattgctgtttatatgttggttatattttacattttcttctagtttatgggaagtctttttcttttcctaaggcaatctgttgataaatataacctgtgaatattaaagttattaaagttatcaaacatttgagataaatttattcattagctctttatgagttattggtttttttcaggttaaaagaaataacttctttttttgttttttgatgtgaagaacttggtggagaaattaaaatttcagatgcagaaaaagaagcaagaaaatttctggaatgacaggcatgagtagataacaggtgtgatggttaatactgagtgtcaccttgcttggattgaagggtgcaaagtattgttcctgggtgtgtctgtgagggtgtcaccaaaggagattaacagttgagtcagtgaactgggagatgcagacccaccctcagtctgggtggtca

SEQ ID NO: 541302 - DNA, 642 bp, Homo sapiens
aaattttcaatttttgtcaagctggctaatgtaaaacatcatcctgttctatgtttaatagcatttccctgattactaatatgaagcattatatattgyctattcatgtttcatattttgtataatgtctatatcctttgttcattatttaattgtgttatttgtattctttatgtattattctttaacacattgctgtttatatgttggttatattttacattttcttctagtttatgggaagtctttttcttttcctaaggcaatctgttgataaatataacctgtgaatattaaagttattaaagttatcaaacatttgagataaatttattcattagctctttatgagttattggtttttttcaggttaaaagaaataacttctttttttgttttttgatgtgaagaacttggtggagaaattaaaatttcagatgcagaaaaagaagcaagaaaatttctggaatgacaggcatgagtagataacaggtgtgatggttaatactgagtgtcaccttgcttggattgaagggtgcaaagtattgttcctgggtgtgtctgtgagggtgtcaccaaaggagattaacagttgagtcagtgaactgggagatgcagacccaccctcagtctgggtggtca

SEQ ID NO: 541303 - DNA, 447 bp, Homo sapiens
tgtttatatgttggttatattttacattttcttctagtttatgggaagtctttttcttttcctaaggcaatctgttgataaatataacctgtgaatattaaagttattaaagttatcaaacatttgagataaatttattcattagctctttatgagttattggtttttttcaggttaaaagaaataacttctttttttgttttttgatgtgaagaacttggtggagaaattaaaatttcagatgcagaaaaagaagcaagaaaatttctggaatgacaggcatgagtagataacaggtgtgatggttaatactgagtgtcaccttgcttggattgaagggtgcaaagtattgttcctgggtgtgtctgtgagggtgtcaccaaaggarattaacagttgagtcagtgaactgggagatgcagacccaccctcagtctgggtggtcac

SEQ ID NO: 541304 - DNA, 638 bp, Homo sapiens
cccttctgaaaattcccttttactagtcagctcttagcttcttggaaggaaggcccttcgtctaggacaatgttcatctcaccacataaaaattcacaattcatggcacgttagttcaataaaatattatgctttctatgaatgataattataaaaacttgctataaatggragcgagtttaacattaaatcacatgaaacagacatattaacaaaaatagatacattagagcaattgaattataaatgtttttttccttcaaaaattttccttcatgttatgttcacattcttttagcagcaaatgacaatgaactgccattgattttattttattttttgaacttaagtagtgtatccacaagtacaccattgccctgtccaatctttaggggagatattctattatctaaaactcggtaaattgacctatcatgttgttggtgatatcttatttaggtaaaaatattaggtatttagaacaatgcatttctgaatattttgactgatattattatagatggatttagaatctgccctttaggggtccagaaggaggtaatgtttggatatcattaggctagaatattttattgtcctacaaaaatgttgataaattgcttataagggcttatgta

SEQ ID NO: 541305 - DNA, 638 bp, Homo sapiens
cccttctgaaaattcccttttactagtcagctcttagcttcttggaaggaaggcccttcgtctaggacaatgttcatctcaccacataaaaattcacaattcatggcacgttagttcaataaaatattatgctttctatgaatgataattataaaaacttgctataaatgggagcgagtttaacattaaatcacatgaaacagacatattaacaaaaatagatacattagagcaattgaattatamatgtttttttccttcaaaaattttccttcatgttatgttcacattcttttagcagcaaatgacaatgaactgccattgattttattttattttttgaacttaagtagtgtatccacaagtacaccattgccctgtccaatctttaggggagatattctattatctaaaactcggtaaattgacctatcatgttgttggtgatatcttatttaggtaaaaatattaggtatttagaacaatgcatttctgaatattttgactgatattattatagatggatttagaatctgccctttaggggtccagaaggaggtaatgtttggatatcattaggctagaatattttattgtcctacaaaaatgttgataaattgcttataagggcttatgta

SEQ ID NO: 541306 - DNA, 638 bp, Homo sapiens
cccttctgaaaattcccttttactagtcagctcttagcttcttggaaggaaggcccttcgtctaggacaatgttcatctcaccacataaaaattcacaattcatggcacgttagttcaataaaatattatgctttctatgaatgataattataaaaacttgctataaatgggagcgagtttaacattaaatcacatgaaacagacatattaacaaaaatagatacattagagcaattgaattataaatgyttttttccttcaaaaattttccttcatgttatgttcacattcttttagcagcaaatgacaatgaactgccattgattttattttattttttgaacttaagtagtgtatccacaagtacaccattgccctgtccaatctttaggggagatattctattatctaaaactcggtaaattgacctatcatgttgttggtgatatcttatttaggtaaaaatattaggtatttagaacaatgcatttctgaatattttgactgatattattatagatggatttagaatctgccctttaggggtccagaaggaggtaatgtttggatatcattaggctagaatattttattgtcctacaaaaatgttgataaattgcttataagggcttatgta

SEQ ID NO: 541307 - DNA, 638 bp, Homo sapiens
cccttctgaaaattcccttttactagtcagctcttagcttcttggaaggaaggcccttcgtctaggacaatgttcatctcaccacataaaaattcacaattcatggcacgttagttcaataaaatattatgctttctatgaatgataattataaaaacttgctataaatgggagcgagtttaacattaaatcacatgaaacagacatattaacaaaaatagatacattagagcaattgaattataaatgtttttttccttcaaaaattttccttcatgttatkttcacattcttttagcagcaaatgacaatgaactgccattgattttattttattttttgaacttaagtagtgtatccacaagtacaccattgccctgtccaatctttaggggagatattctattatctaaaactcggtaaattgacctatcatgttgttggtgatatcttatttaggtaaaaatattaggtatttagaacaatgcatttctgaatattttgactgatattattatagatggatttagaatctgccctttaggggtccagaaggaggtaatgtttggatatcattaggctagaatattttattgtcctacaaaaatgttgataaattgcttataagggcttatgta

SEQ ID NO: 541308 - DNA, 338 bp, Homo sapiens
gcagggttgtttggaggattaagccagatagtcccagtaaagccccattagcgccccctggcctctggattattattttttattatttttctggctttcttaggaaactttccggaatgcgtccaggtgttgaagcgggaaggctggacaccctcccttggcgttgcggttccttccagacgccccctcttcttaggctgttttcaagggcatgcccggcaacatgtgctctacccaagagcgcttcacagatcttcctgtgggtctaaaaccagaacgctttcttccccgacccctgctcccrtatcaccccaacctcaagtcttttggcacagccg

SEQ ID NO: 541309 - DNA, 475 bp, Homo sapiens
gaggatatacagcccagtgaggaaaatactgaggttccaacattgtcacacattgaacaaaaacttacagaatttagaaataacttttagaaggatggcacttttttgccagaatcctttagatatgagaagaaagtataagaagtagcaacatttaagttaattaacagaaatacttcagaggaacatgtgacttcccaattaatagagagaagtatttacttgtatttattagtrtctcttctatttttactttatgacatttaggggccaacatagtgtaactaaacactcatgtgtgagtgaatgctcataccaagtgctgtgaagtagttgaggacatcagggatgtatgccctaggaccacagacatctgtctaaaagcaaacttccactttgagagactacagaggaaaatgtttattcagacctttattatcacttagtcataatacttagaaacttctaaaacata

SEQ ID NO: 541310 - DNA, 588 bp, Homo sapiens
catgctcaggcagtgagtaatttctgttaagtgaatttttggaagctaaaaattacaacaaatcttctcatttkattgccttttaaaaaaatctaccaaattttccctgacttccaaaattataatgctgtattctagagatgatgtcacttcattgtttcatcaaaagtgagcccctggaatgatgactcatacaggttaatttgcctttaatgtggcaatttgatgcttagaaatggttctgatttattaatgactatctttgtttcccctagaaataaagtctgtgtatagaacaagatccctccatcaatgctcctaaatgttatggacattattgcttttgtctatttcattgctgcagggagtattcacattcaattaatctagttaggcctttggctacttacttctttacattttcagacatctatttttttatactgcgcttattttcctgaattggattttgctgacattattcactaataagaataatctattttttaatatggcaattgactgatcaattcattctgggtataatctttcaatttttgacagttctcaggtgacactattgttaca

SEQ ID NO: 541311 - DNA, 629 bp, Homo sapiens
caactgcatcccaatgggtttttttaatgacatgaagagagaattctaaatttcttcaggaaaaatacatttgcaagaataatgatagaaatttggccttagcaggtatcatgctataattactaaaatgataagataaccaaattaacaacaatcaaaccaagagttcaaaacagattcatgtatataataaagacaaatcagactgtgagaaaattgctatccactggaattaaaaaaactagaaccacttcttataccatacaccaaattttcatacagattaatgatttcaaactttaaaattcaattttttaaaaagtcaaaagaaaataagaaagaaaattttcctgaagttgtcatgaagaatggcagtcctttctaagctaactcagtgcccagaagtcataaagaaaaagcacaccaaattctactacataaaagtacatatttctacacagtcttacaaaatgcatgtaagattaaagagaaataactgaggagaaatatataataatgattttatactcttatrtcaatcacaattcattaggaataacataaaatttttactaaccattatttaatcatgcagtactcaccgaaagcttgctatacgtctgcaactt

SEQ ID NO: 541312 - DNA, 308 bp, Homo sapiens
aaattaggaatgccactcttacagaacaaatcaatgcaagtgatgtgactacccaaaaatcatgaatcataatagtcttcagttagatawgttgcaatctcagatatagttctactatgtaaacagagtcaaattccaattctttatcaaaaagtgctagcgaaggttgcctgatgtgttccagtgtagatcctcaatccaatggccagaagatgagagagcagaagagatggaagagaaatcttaagaaattctgctgagaatatgcgccctttcttcataacactgtgtttcttgtgttgagagca

SEQ ID NO: 541313 - DNA, 308 bp, Homo sapiens
aaattaggaatgccactcttacagaacaaatcaatgcaagtgatgtgactacccaaaaatcatgaatcataatagtcttcagttagataagttgcaatctcagatatagttctactatgtaaacagagtcaaattccaattctttatcaaaaagtgctrgcgaaggttgcctgatgtgttccagtgtagatcctcaatccaatggccagaagatgagagagcagaagagatggaagagaaatcttaagaaattctgctgagaatatgcgccctttcttcataacactgtgtttcttgtgttgagagca

SEQ ID NO: 541314 - DNA, 308 bp, Homo sapiens
aaattaggaatgccactcttacagaacaaatcaatgcaagtgatgtgactacccaaaaatcatgaatcataatagtcttcagttagataagttgcaatctcagatatagttctactatgtaaacagagtcaaattccaattctttatcaaaaagtgctagcgaaggttgcctgatgtgttccagtgtagatcctcaatccaatggccagmagatgagagagcagaagagatggaagagaaatcttaagaaattctgctgagaatatgcgccctttcttcataacactgtgtttcttgtgttgagagca

SEQ ID NO: 541315 - DNA, 622 bp, Homo sapiens
tgctgtgagctgcgcctcggtggtagatggtaggggaagagatgggacataggccaccaggacagggcgagcaggattgctgcagcccgtggcctagggattagggaccctttgctttgaaatgtaaatagccaaaataatagtattctatctcacagtgtctrtaaaagaaccagagcctactttcagcaggcacctggctgtaagttggaaaactacctcctatcatgaagatgtcagaagtttatttttcctttcaatataaccaaatgacatacacaaatggcctcccctattaccagatgaatttaggataaactgtgtatgacaaatggtgctgtcaattcttcttcttgaggactaattatagagacctttctgtctttgcaatctcttgagcagattgtctgtgattcacgtcacatcacattctggttttattgtgcaataaaacacttttctttctgttctgttattgtgggttttttctaggactggagacaattttccttttaattatatttctcaaacactgtccacaattaccagacattgtatatacgtataaggtgcccaccaagcttcaccttagagaaggctttccctctcattcttccagtca

SEQ ID NO: 541316 - DNA, 626 bp, Homo sapiens
tggctttcagtgcagccctaaacaaattcataaactttctaaaagcattatgagttttttgtgattttttttatcatcattggtgtattttatgtatggctcaagacagttcttctagtgtgtcccagggaagccaaaagattgaacaygcctgctctacatcattatttttcatctatttacagtatgctagatgatagtgttaatttattagtctactcctttgggaaacaaagatggtcagtggtttaagtttttttagaaccgtttttgaaaatatgaagctatggtaatcatacctaagtgacataattaggaaataaaatttctagaaaaagcatgaaagcgttatggttaaagttcaagaacaatgaaacgggagtattggttatttaagacaaccgtcctgcaaaggcaatcatttcatcacaaccattttggtgaaaaagaataatgtgtcagaaggaatttttagaataattttctgattatatggcagtgttaaatttttatttgtattatttgtcatatataagtctgtaaataaaagagaacatggcctgactttcagatgcatcttttcacacatatattctccctagaagggcactggtgtgcttttcaaa

SEQ ID NO: 541317 - DNA, 626 bp, Homo sapiens
gggcatttgttagtttttgatgtactgtttatggttttctatatacaagatcatgtcacctacaaacagcaayattttaatttttttccctcaatttgaatgtcatttttaggggcattttcttgactaattcttctgcaaagtacttcactgctatgttaaaatagaaacattgaaaatggaactatgtagccttaccctggtgtctataaatttgaagaagaaaacagctctttaactttttataaactagtttcaggaggtacagatcttcttttgttgggtccccagggtaatgggatgccctatgaacttgtagtagggaagagtgtgtaactgtgtcacaaggctgctgggtatgcagtggattccaccttcaagtggctttttaccaggggctttggttgttgtgactcccatctaatgtctgggtgggctggatttccttcaggagttttatttatagggcagaaactaggacagatttctgcagttgggtgtgtatacggtggaccttatatcgggatgtggtaagtgtggctaccactgagtatttggaagttttttttccacatcactgtgtgggttcctgtgttggcaggaattgctgtgaactgtggcaaaga

SEQ ID NO: 541318 - DNA, 626 bp, Homo sapiens
gggcatttgttagtttttgatgtactgtttatggttttctatatacaagatcatgtcacctacaaacagcaacattttaatttttttccctcaatttgaatgtcatttttaggggcattttcttgactaattcttctgcaaagtacttcactgctatgttaaaatagaaacattgaaaatggaactatgtagccttaccctggtgtctataaatttgaagaagaaaacagctctttaactttttataaactagtttcaggaggtacagatcttcttttgttgggtccccagggtaatgggatgccctatgaacttgtagtagggaagagtgtgtaactgtgtcacaaggctgctgggtatgcagtggattccaccttcaagtggctttttaccaggggctttggttgttgtgactcccatctaatgtctgggtgggctggatttccttcaggagttttayttatagggcagaaactaggacagatttctgcagttgggtgtgtatacggtggaccttatatcgggatgtggtaagtgtggctaccactgagtatttggaagttttttttccacatcactgtgtgggttcctgtgttggcaggaattgctgtgaactgtggcaaaga

SEQ ID NO: 541319 - DNA, 626 bp, Homo sapiens
gggcatttgttagtttttgatgtactgtttatggttttctatatacaagatcatgtcacctacaaacagcaacattttaatttttttccctcaatttgaatgtcatttttaggggcattttcttgactaattcttctgcaaagtacttcactgctatgttaaaatagaaacattgaaaatggaactatgtagccttaccctggtgtctataaatttgaagaagaaaacagctctttaactttttataaactagtttcaggaggtacagatcttcttttgttgggtccccagggtaatgggatgccctatgaacttgtagtagggaagagtgtgtaactgtgtcacaaggctgctgggtatgcagtggattccaccttcaagtggctttttaccaggggctttggttgttgtgactcccatctaatgtctgggtgggctggatttccttcaggagttttatttatagggcagaaactaggacagatttctgcagttgggtgtgtatayggtggaccttatatcgggatgtggtaagtgtggctaccactgagtatttggaagttttttttccacatcactgtgtgggttcctgtgttggcaggaattgctgtgaactgtggcaaaga

SEQ ID NO: 541320 - DNA, 246 bp, Homo sapiens
ttaatttattcttcttctctaaatgttgtggagccacatccacctgtgtaaataacactaactgggtaaaakcttttttatactaagccagaaatcattatacctggtggttttattttaaatgtatgaacagtattctataacattcaaataagtaatagaaatttaattctatatatatggaaagaaaagttatacaggcacactgagaataaattggaatctggaactgaatgctgattagca

SEQ ID NO: 541321 - DNA, 246 bp, Homo sapiens
ttaatttattcttcttctctaaatgttgtggagccacatccacctgtgtaaataacactaactgggtaaaagmttttttatactaagccagaaatcattatacctggtggttttattttaaatgtatgaacagtattctataacattcaaataagtaatagaaatttaattctatatatatggaaagaaaagttatacaggcacactgagaataaattggaatctggaactgaatgctgattagca

SEQ ID NO: 541322 - DNA, 246 bp, Homo sapiens
ttaatttattcttcttctctaaatgttgtggagccacatccacctgtgtaaataacactaactgggtaaaagcttttttatactaagccagaaatcattatacctggtggttttattttaaatrtatgaacagtattctataacattcaaataagtaatagaaatttaattctatatatatggaaagaaaagttatacaggcacactgagaataaattggaatctggaactgaatgctgattagca

SEQ ID NO: 541323 - DNA, 617 bp, Homo sapiens
gtgcagccctaaacaaattcataaactttctaaaagcattatgagttttttgtgattttttttatcatcattggtgtattttatgtatggctcaagacagttcttctagtgtgtcccagggaagccaaaagattgaacacgcctgctctacatcattatttttcatctatttacagtatgctagatgatagtgttaatttattagtctactcctttgggaaacaaagatggtcagtggtttaagtttttttagaaccgtttttgaaaatatgaagctatggtaatcatacctaagtgacataattaggaaataaaatttctagaaaaagcatgaaagcgttatggttaaagttcaagaacaatgaaacgggagtattggttatttaagacaaccgtcytgcaaaggcaatcatttcatcacaaccattttggtgaaaaagaataatgtgtcagaaggaatttttagaataattttctgattatatggcagtgttaaatttttatttgtattatttgtcatatataagtctgtaaataaaagagaacatggcctgactttcagatgcatcttttcacacatatattctccctagaagggcactggtgtgcttttcaaa

SEQ ID NO: 541324 - DNA, 231 bp, Homo sapiens
ctggatggcagacacctgaggagccaggtgcctgaaacttcctccacctgcttgaggagcaccaaaacccaggtgctggctggacaaccccttctggctgcctaagcaggtggcagaagaaggaaacaaggtcagaggcagagtrttgaaccctgcctcccaggtgggtggaagatgcctgtcgccaaactagggcccagcttgccgggtgaggtgggtgaactggtgatc

SEQ ID NO: 541325 - DNA, 608 bp, Homo sapiens
tatgtctctcttccctactcccaccgttcctaccacccctcattagtctaaaaatgaggatccgatgtgaaactaataaatcacagacagctaagctgatctttgtactggacaaccttatatccaaatgagtcattgagccttgaaataaaaattatgaccatatttttgactgaaaaattgaaagtaagttataaatgccagtgggaagattaaatcaaatatggtttgggtaacatttrccacattttccccatattataatgtaagaaagatgtctttaaagaatggaatggttgtatcaatatataatttgagactgaattattttcagatttaagtcaaattgacatgaattaaaaaaaattataccaactaagatacattaaaagctattgaggaagaataattataaaataggaaatacactttagttcatctgttcatctgggaaatctggaattaactgtcaaagtaatctaattaattgaatctatttcaaaataacactttaggtatgaatatttctttatatctgctttatcataatcctaaaatgtggcaacatacagacattaaaattatttcagcactgtaagactacatta

SEQ ID NO: 541326 - DNA, 236 bp, Homo sapiens
cagggtcaactgcaactagaakaaaagctcctaagggcagaaactaagtggctcacttcctctgtaacactgccgtgcccagcactgtaccagcaccccagcagagtcaacaactttccgtcaagccacacacttacggtctcatcgtccagtggaggccgcagatgagacatagtgtgccaaatcccaaatgcacagggtgccagacaagtctgcgggaggcaggaggactaggg

SEQ ID NO: 541327 - DNA, 236 bp, Homo sapiens
cagggtcaactgcaactagaagaaaagctcctaagggcagaaactaagtggctcacttcctctgtaacactgccgtgcccagcactgtaccagcaccccagcagagtcaacaactttcygtcaagccacacacttacggtctcatcgtccagtggaggccgcagatgagacatagtgtgccaaatcccaaatgcacagggtgccagacaagtctgcgggaggcaggaggactaggg

SEQ ID NO: 541328 - DNA, 236 bp, Homo sapiens
cagggtcaactgcaactagaagaaaagctcctaagggcagaaactaagtggctcacttcctctgtaacactgccgtgcccagcactgtaccagcaccccagcagagtcaacaactttccgtcaagccacacacttacggtctcatygtccagtggaggccgcagatgagacatagtgtgccaaatcccaaatgcacagggtgccagacaagtctgcgggaggcaggaggactaggg

SEQ ID NO: 541329 - DNA, 627 bp, Homo sapiens
tgtcattgcttccagaattatttcccttgctccatcgtggggatcccgcaatactgctgctgctgaaatcactgttgttgctccttccagaactgtcggcaccgcagcattattatcactgcagctaccactggagatggctacagacaccagaaacggaagagcacctctcccctcctccggcagtgtgactttcagtcggctcctctcgtagccagatggtatagaaatgacacaccaatgtccttcagaacatacatgcaaaataktttaaatatattagaaattctattccccttagaaaactaagtccacctacatatttttcaaaaatccatcagcaatacagaataaaggcattggttctatacagcgttgcaagaatattttaacaatagaaggtattttaatgtcattcaccacattaggagattgaaaaagggaaaacacaggattaccttagcagatgtaggaaaaaaataagatggtaaaatacaacattcatttatattaaaatctttataccaaactaggaaaagcagacaaatttcttaacctgataagcttatctataacaaaaccatcgacaccaccatatgtaatgttgaagcataatcgttatttttt

SEQ ID NO: 541330 - DNA, 629 bp, Homo sapiens
attgtcattgcttccagaattatttcccttgctccatcgtggggatcccgcaatactgctgctgctgaaatcactgttgttgctccttccagaactgtcggcaccgcagcattattatcactgcagctaccactggagatggctacagacaccagaaacggaagagcacctctcccctcctccggcagtgtgactttcagtcggctcctctcgtagccagatggtatagaaatgacacaccaatgtccttcagaacatacatgcaaaatattttaaatataytagaaattctattccccttagaaaactaagtccacctacatatttttcaaaaatccatcagcaatacagaataaaggcattggttctatacagcgttgcaagaatattttaacaatagaaggtattttaatgtcattcaccacattaggagattgaaaaagggaaaacacaggattaccttagcagatgtaggaaaaaaataagatggtaaaatacaacattcatttatattaaaatctttataccaaactaggaaaagcagacaaatttcttaacctgataagcttatctataacaaaaccatcgacaccaccatatgtaatgttgaagcataatcgttatttttt

SEQ ID NO: 541331 - DNA, 641 bp, Homo sapiens
tggctggaacagcgtgtgctagcggtggaagcaggggatgtggtgacagaggtcaggggtggggatggtgtgcagagcagtcctgtggggcctgggagccacaggaggacttgggcttccgctccaagatgagagccactgagggaggaatgaggtccagcctttttttttcttttaaaactttgacctggcagtcagcttcttttgttgtgtttccttttttcttttgaaatgaggtctctgtcacccaggctggaatgcagtggcacagtctcagctcactgcaacctctgcctcctgggctcaagagatcctcccacctcagcctcccaagtagctgggactacaggcaccaccactgcacccagctagtttttgtgttttttgtagagacggggtttcaccatgttggccaggctggtctcgaactcctgggctcaagtgatccacctgcctcagcctcccaaagtgctgggattacaggcgtgagccactgcgccccacctgtttctttgttaattggaattccccgtgcgtgaaagtggagtgaggaggtgtgatacgcctcccctgtgcccatcaycaactccagcccctgctgtctcccatctgtgcagttctgtctttgctcccaccagtac

SEQ ID NO: 541332 - DNA, 638 bp, Homo sapiens
ctgtctgtgctagacttagctccaggtttggccccctcctgactgaggggttggctcacacccctttcacctccayccccacccccacttgccacactgtggcctgctcccatgggtgaaccccctgtaggtgccaggcagctccagcccgtctgcctgcctgtgcaccctcagtcccttgggcctcccccccccccacccagaggtcctgagagagggtgctctccgggatcagctctgtgaaagtgaggggcagacagagagcactgagccactatctggctgtgaagatgagtttcagacacataagccagttcaccagagaacagtcaagacagcagatacttaggaaggaaatcctgctgggagcttcagaggagcaggggtgtggggaggaggacatggatgcttgagtaggtgtggtgggcggcccagggcctggtcccagctcttgcatccggggctagttcccctgcttccctaaggatgccccctctgtgacacagtggacacagataaagctgtcttttggctaggcgcggttgctcacgcctgtaatcccagtactttgggaggctgaggcgggtggatcacaaggtcaagaaatcaagaccatcctggccaacatggtgaaaccc

SEQ ID NO: 541333 - DNA, 531 bp, Homo sapiens
gtgcaccttctggacctcagtatcttcaattttaaaatcattgttttgaatctgatttctaattgttaagctgaagtgtttctttaaatttttaagttggttaaaatgtgtgtgtgtgtgtgtgtgtgtgtgtgtgtgtgaaagaacctgctccctcatcctcaacagcctcatcaatctccacccattacccatttttattagttgcttatctttccattatttcctcatgcaaacacaaatacatattaatttatttacacgtattagagtaaagtgatttctaaatctgaagaggcatcagactcatccagggagctttttaaacamgtggacacttagtttctattttatacctattgactgaacaaaacccctggagagtggagcccagaactttgacaaagttctctcaggcagttttctgtgacagacacctctcagggtacttaccccagcccacatcacctttacccaatagggatctgtccccttttgtctgtgctgttgagagtattgctcctggccaca

SEQ ID NO: 541334 - DNA, 531 bp, Homo sapiens
gtgcaccttctggacctcagtatcttcaattttaaaatcattgttttgaatctgatttctaattgttaagctgaagtgtttctttaaatttttaagttggttaaaatgtgtgtgtgtgtgtgtgtgtgtgtgtgtgtgtgaaagaacctgctccctcatcctcaacagcctcatcaatctccacccattacccatttttattagttgcttatctttccattatttcctcatgcaaacacaaatacatattaatttatttacacgtattagagtaaagtgatttctaaatctgaagaggcatcagactcatccagggagctttttaaacaagtggacacttagtttctattttatacctattgactgaacaaaacccctggagagtggarcccagaactttgacaaagttctctcaggcagttttctgtgacagacacctctcagggtacttaccccagcccacatcacctttacccaatagggatctgtccccttttgtctgtgctgttgagagtattgctcctggccaca

SEQ ID NO: 541335 - DNA, 531 bp, Homo sapiens
gtgcaccttctggacctcagtatcttcaattttaaaatcattgttttgaatctgatttctaattgttaagctgaagtgtttctttaaatttttaagttggttaaaatgtgtgtgtgtgtgtgtgtgtgtgtgtgtgtgtgaaagaacctgctccctcatcctcaacagcctcatcaatctccacccattacccatttttattagttgcttatctttccattatttcctcatgcaaacacaaatacatattaatttatttacacgtattagagtaaagtgatttctaaatctgaagaggcatcagactcatccagggagctttttaaacaagtggacacttagtttctattttatacctattgactgaacaaaacccctggagagtggagcccagaactttgacaaagttctcycaggcagttttctgtgacagacacctctcagggtacttaccccagcccacatcacctttacccaatagggatctgtccccttttgtctgtgctgttgagagtattgctcctggccaca

SEQ ID NO: 541336 - DNA, 486 bp, Homo sapiens
cccatctttggcacgtagcctgtggggtggcaggtgctcaggctttggtgacaaggtggatgggatgcccagaaagggagagcccatggctgaaggcgtgggcaggattgtggggaaggtggttggaattagatgcccagagcaagaatttaytggcacaggtgggcagacagaggtgaccaaaggacaggtgtaggtcagcaggtggctgctagcacctacctcactctctggaacccgattcccttcatcctaaaggggatctcagaacgttccacacaccccctccgcctccaccctggccctcacccaggctcaccgcacagccaggtagcctggacacacatctccatgaaccacttgaagggtgtggcctccatcttgccccccatgatcatcaccatctcatccgtcagcttgatgtcgggttcccagccgagattgccgcccggcgagctttcaaacatgaagccaaagtctgcaaaa

SEQ ID NO: 541337 - DNA, 486 bp, Homo sapiens
cccatctttggcacgtagcctgtggggtggcaggtgctcaggctttggtgacaaggtggatgggatgcccagaaagggagagcccatggctgaaggcgtgggcaggattgtggggaaggtggttggaattagatgcccagagcaagaatttattggcacaggtgggcagacagaggtgaccaaaggacaggtgtaggtcagcaggtggctgctagcacctacctcactctctggaaccsgattcccttcatcctaaaggggatctcagaacgttccacacaccccctccgcctccaccctggccctcacccaggctcaccgcacagccaggtagcctggacacacatctccatgaaccacttgaagggtgtggcctccatcttgccccccatgatcatcaccatctcatccgtcagcttgatgtcgggttcccagccgagattgccgcccggcgagctttcaaacatgaagccaaagtctgcaaaa

SEQ ID NO: 541338 - DNA, 586 bp, Homo sapiens
ctgactcacggcagacagacctctggggtggcacatctgtcagtgcatttgagctccctgccatcccctagygaggggtctgactgagggcagacagatggacagacatcatcttttatggagagctgtactaaatttaacacatgccagaagaaactggcattagcaaggaaaagcactgagctcccaaacaaaatcagggttctttactgaccttctttttcaagttcactaactccacatcgcttcaccttgaacttggccagatatggggcttttgcagcactgaaaacaacaaaaagaatgtggcacccatgatgcagccgagaaaaacttcacacgcggacgctgtggaagcgggggatgggtagggtgaggcgctcacctctgcatcggggtcccagacttgtagtcgacgtccagcacaatggcttcggggttgctgggcagggagcagcctgtgcagggacagaggcagtcacagggagtgcatgtgtcaccacaggtgagccagagtcagtttccaacacggatgttacgtgcgtgtccaccctgcaggcacaccccacccctgtggaggggcctc

SEQ ID NO: 541339 - DNA, 586 bp, Homo sapiens
ctgactcacggcagacagacctctggggtggcacatctgtcagtgcatttgagctccctgccatcccctagtgaggggtctgactgagggcagacagatggacagacatcatcttttatggagagctgtactaaatttaacacatgccagaagaaactggcattagcaaggaaaagcactgagctcccaaacaaaatcagggttctttactgaccttctttttcaagttcactaactccacatcgcttcaccttgaacttggccagatatggggcttttgcagcactgaaaacaacaaaaagaatgtggcacccatgatgcagccgagaaaaacttcacacgcggacgctgtggaagcgggggatgggtagggtgaggcgctcacctctrcatcggggtcccagacttgtagtcgacgtccagcacaatggcttcggggttgctgggcagggagcagcctgtgcagggacagaggcagtcacagggagtgcatgtgtcaccacaggtgagccagagtcagtttccaacacggatgttacgtgcgtgtccaccctgcaggcacaccccacccctgtggaggggcctc

SEQ ID NO: 541340 - DNA, 586 bp, Homo sapiens
ctgactcacggcagacagacctctggggtggcacatctgtcagtgcatttgagctccctgccatcccctagtgaggggtctgactgagggcagacagatggacagacatcatcttttatggagagctgtactaaatttaacacatgccagaagaaactggcattagcaaggaaaagcactgagctcccaaacaaaatcagggttctttactgaccttctttttcaagttcactaactccacatcgcttcaccttgaacttggccagatatggggcttttgcagcactgaaaacaacaaaaagaatgtggcacccatgatgcagccgagaaaaacttcacacgcggacgctgtggaagcgggggatgggtagggtgaggcgctcacctctgcatcggggtcccagacttgtagtcgacgtccagcacaatggcttcrgggttgctgggcagggagcagcctgtgcagggacagaggcagtcacagggagtgcatgtgtcaccacaggtgagccagagtcagtttccaacacggatgttacgtgcgtgtccaccctgcaggcacaccccacccctgtggaggggcctc

SEQ ID NO: 541341 - DNA, 315 bp, Homo sapiens
gactcaccccaagcagtgcttccccacccaccctggctgtccatcagaaccaccagcagccccgctgctagagactctcattcatctggttggggccacgcacgggtatttttaaagcttcccaggcaattctgttaagctgcagggactggaacaagattccagaaggtggtttcygaagcactgcacttacttgatgacagccgacacgttggtgatcttgttaaagaaatcaaacccccgctggtaaaagtccttcgctgggcccgacaaggagcctgtgttctcctctactaactgctccaggaggtcgcc

SEQ ID NO: 541342 - DNA, 315 bp, Homo sapiens
gactcaccccaagcagtgcttccccacccaccctggctgtccatcagaaccaccagcagccccgctgctagagactctcattcatctggttggggccacgcacgggtatttttaaagcttcccaggcaattctgttaagctgcagggactggaacaagattccagaaggtggtttccgaagcactgcacttacttgatgayagccgacacgttggtgatcttgttaaagaaatcaaacccccgctggtaaaagtccttcgctgggcccgacaaggagcctgtgttctcctctactaactgctccaggaggtcgcc

SEQ ID NO: 541343 - DNA, 600 bp, Homo sapiens
actccagggtttcatcccttatgaatgcacaaagccaccaacatccaaggatggtgtcaggtccacatgaatggaaggtctaggaaaacgatgacaggagctgcaaaggcagtctggttttcctgacaccaagaggatcgatccttcagagtgtggagagggcagggtgacctcaaattgtggagccatgtgctaaattccacaaatctcaggaatgaaactaagctgtgtttcctgaaactggcgtggccgtgcattctgccataccttcaagagccctgactcaccccaagcagtgcttccccacccaccctggctgtccatcagaaccaccagcagccccgctgctagagactctcattcatctggttggggccacgcacgggtatttttaaagcttcccaggcaattctgttaagctgcagggactggaacaagattccagaaggtggtttccgaagcactgcacttacttgatgacagccgacacgttggtgatcttgttaaagaaatcaaacycccgctggtaaaagtccttcgctgggcccgacaaggagcctgtgttctcctctactaactgctccaggaggtcgccgatgt

SEQ ID NO: 541344 - DNA, 614 bp, Homo sapiens
ctggggacgggggccaacactccagccagggtctttgtggccctctctgattacaaccccctggtgatgtctgccaacctcaaggctgcagaggaggagctggtcttccagaaaargcagttgctaagagtgtggggctctcaggacacccatgatttctacctcagcgagtgcaacaggcaagtgggcaatatccccgggcgcctagtggctgagatggaggtggggacagagcagactgataggaggtggcgttctccggcccaagggcacctgccttctgtggcccacctcgaggactttcaggggctcaccatcccccagggttcctccctggtgctccaggggaactccaagagactcccactgtggactccaaagatcatgatagcagctctggactatgatcctggggatgggcaaatggggggccaggggaagggcaggctggcgctgagggcaggagacgtggtcatggtttacgggcccatggatgaccaaggattctattatggagagttgggcggccacaggggcctggttcctgcccacctgctggatcacatgtccctccatggacactgagcaagcatccttgcccaggtagtggcctc

SEQ ID NO: 541345 - DNA, 614 bp, Homo sapiens
ctggggacgggggccaacactccagccagggtctttgtggccctctctgattacaaccccctggtgatgtctgccaacctcaaggctgcagaggaggagctggtcttccagaaaaggcagttgctaagagtgtggggctctcaggacacccatgatttctacctcagcgagtgcaacaggcaagtgggcaatatccccgggygcctagtggctgagatggaggtggggacagagcagactgataggaggtggcgttctccggcccaagggcacctgccttctgtggcccacctcgaggactttcaggggctcaccatcccccagggttcctccctggtgctccaggggaactccaagagactcccactgtggactccaaagatcatgatagcagctctggactatgatcctggggatgggcaaatggggggccaggggaagggcaggctggcgctgagggcaggagacgtggtcatggtttacgggcccatggatgaccaaggattctattatggagagttgggcggccacaggggcctggttcctgcccacctgctggatcacatgtccctccatggacactgagcaagcatccttgcccaggtagtggcctc

SEQ ID NO: 541346 - DNA, 515 bp, Homo sapiens
ctaggattacaggcatgagccaccacccctggcctcattcatttgactttcattttcgtttttattattatttgttttagactcagggtctcactcagtctcccaggcgggagtgcagtggtgtgaccttggcttactgcagcgtcaaattcctgggctcaaatgatcctcctgtcttagcttctgagtagctgggactataggtacatgccaccaagcccggctaattttttttttttttgaggccgcgtctggctgttgcccagctatagtacaatggcgcaagtatagctcactgcaacctcgaattcttgggctcaagcaatcctcccacctcagcctcccaagtagctagtactatagacgagtgccaccatgcccggctaattttaaaaattttttgtagagatgagatgtcactgttttgcccaggctggtatcaaactcctggacwcaagcaatcctcccgccttggcttcccagagtgctgggattataggcgccagctaccatga

SEQ ID NO: 541347 - DNA, 508 bp, Homo sapiens
tgtcacctttgatacttctctctcttgtacctccccatcctccgcccccccagtatctacatcatcaccaagtcttgtcaaatttaggtcctcatatttctaaaatccatctaatgagttcyccaaggacccaaatcttaaaccaccttttgtttggcccctacttgcatttccagccccattttgcaccaggtgccctctttctctctgcttttagtcacactagccttctttaaactcttccagcaggctatgaggcctttcacacatttttctctttgtataggacacttcctctctgcattaaagtaagactagctactgcaacaaacttaaacatcttaatcacttaacacaataaaagtgtatttcttgcttttacaaagtccatcttggatattcctggttggcaggtggccttccacatgatcattcagagacccagatgccctctggctatgttctgtcatctcatagggtcttaacactactcaactggatcctatgt

SEQ ID NO: 541348 - DNA, 647 bp, Homo sapiens
gtgtgtgtttgcatatgtatgcagaaaatatacaataatttatgtgcaaagttgagaaatggagagttgttagttgatataatgaacacggtgtaaggcataaagtaaacacttaacgaatcatatgtgtcacataagcacagggagctcttgcctgcaaaaccaatcaaaagtagccacccagtcagtttctatcatacaccctattttgctctyaaattagtgattattatttattcattattttttactttttaaatttaatattttgtcatcccctactctcacctcaaacagataatgagcttcatacgaaaaaggactttaacgtctccaagtgatagtttaatcctcagtgctaagaaaacagcttggtacataataggtgtatagtaaatatttggtgatgtagccctgatatcttgctattccatatttatggcctgcacttttcattattgttaaattgccttcaaccttgcttcctaagaacttacgtacttctcagtctgtcagtgacctaactctaacagtgctacttacctcaaattcttttttgtacagatcatttgatgattcccacatctgctactttcctaaattactctgtagaattaattttccctgtttctctcttgtctcaggat

SEQ ID NO: 541349 - DNA, 656 bp, Homo sapiens
ccagtatcctttgttgattttatgtttccctgtttgattgctttggaacctttgttttaaatcaattgaccatgtatgtgaccagagatgtggaatttttgttctgttctactgatctacatgtttatatttagccaatgccaaaccaacttgattagttgtaaatttatagtaaatmttgataatagttagaacaagttctccaaacttgaaaaaatgatttgattagtctaggtcctctttataataaaataattattaatataattattaataattattaatacaattaattaatcaattaatttatttgagacagagtttctctcttgttgcctaagctggagtgcagtggcacaatctcacctcactgcaacttctgcctcccatgttcaagctattcttcttcctcagcctccgagcagctaggattacaggcgcccatcaccacgcccagctaaattttgtattttcagtagagatggggttttgccatgttggccagactagtctctaactcctgacctcaggtgatctacctgctttggcctcccaaagtgttgagattacaggcatgagccactgcacctggcatatttaatttataatttataatcagtttgttaataatcaccaaaaagcttgttagagtttga

SEQ ID NO: 541350 - DNA, 420 bp, Homo sapiens
tcctccaggaggcgtctcctgcctccactcccctactccccgcaccacttctctgtgccagggtagttagtttccctccagcaggacaggtgactcagtgcccccctccctactacagccatcccaccctgccagtttccaatgccagtcatcacaaactccaggcagtattcacactgtattccgactccgaatcgtgtcccctggagttgtgctacagggtgtgccaggactggagggagcagctcagtggcccgttccccctctcagtactattcaggggatctcaggcggtcctcctgggacagtagggctgatgggagamtgagacaccagggaggacctagtgctgggccagaggcctggctggggtcaggataatcacagcccatgacagagatggagaaaggaaggtaaata

SEQ ID NO: 541351 - DNA, 394 bp, Homo sapiens
ctgcttcaccttcttggcaggaaaagtgtcggttgtttctctggcttcacgctgatccctcgcttgagctcccctcccgcccctgcctccgtctgagtctcacattgttctcggtattggggcatcatccccttccgcattcccacctgcctctagatcccattcatcctcccggcccaactaacgaatgaacgaacgaatgaaaatgtatggagtactataatgtatgggcaatattatttaacttattttttaaaatccacaaaccacccttggggacaaatattattamcccttctctgtggaccgtgaaggagaagtaactttgaccactatgcaagtcaggaaatagcagctcctgctaaaattcagatttcaggggcttcaaacacca

SEQ ID NO: 541352 - DNA, 394 bp, Homo sapiens
ctgcttcaccttcttggcaggaaaagtgtcggttgtttctctggcttcacgctgatccctcgcttgagctcccctcccgcccctgcctccgtctgagtctcacattgttctcggtattggggcatcatccccttccgcattcccacctgcctctagatcccattcatcctcccggcccaactaacgaatgaacgaacgaatgaaaatgtatggagtactataatgtatgggcaatattatttaacttattttttaaaatccacaaaccacccttggggacaaatattattacsccttctctgtggaccgtgaaggagaagtaactttgaccactatgcaagtcaggaaatagcagctcctgctaaaattcagatttcaggggcttcaaacacca

SEQ ID NO: 541353 - DNA, 420 bp, Homo sapiens
ttatatgcaggacaggagcaatgtgagctctgtgagcattcaagatacctacaaaatcaagaaaaatgagacactatcatcaatctagctgatatcgcaagaggcactgcttcatgacagagtccgtgcatccagtcaaggagcagcctgacaaatctgcacataggaccagagacaatgtcccttgtccccatctggtgggaaagtaaggtccaatataagaaactcccaagcagatccaaggcagccttggaaaaagggactraaccaagtcattatggaaccctggtcattgctggaaaaggagtgagaaaatccaatgccataggctgaaaggttgggtcccctgcagaactcacactttcaaatcctcacctgaaatgtgatggcctttgaaaggtgatcagtcataaggtgcaa

SEQ ID NO: 541354 - DNA, 621 bp, Homo sapiens
cagaactccttctaggtttcacaaattataataatatgaataatatccagtatttattattatatagcaagtgcacagtgtgaatcatttaatctccaatcaatgctgtaaggcaagttctagtataacctccattttacagatgaagaaattgcrgcacaggcaggttaaatatactttccagcaaaacaatgcggccaagtgatggaggctgcaaccacatttggtttacctctggaacatgtgctcataactaggagattgtcttattaactttttatatttctctgacatgataaatggctagttaatgaattagggaggaaattgatgaacagattttgccattctgtacttacagagcactgaagctcatagccacattgtcaaatgtttatctcagtctttccctaaagggatgtctcctatttacactccagtctgtgaaggatcctttgcttttctgactggtgtcatctacaacatgttattttgtccagaaacttgcctcatacctttagctttggctcaagggaagatactcatagcctaagatgcagaagaaaatatctgactacctgagttccagattccctctgttttgccatttctgaaggacca

SEQ ID NO: 541355 - DNA, 621 bp, Homo sapiens
cagaactccttctaggtttcacaaattataataatatgaataatatccagtatttattattatatagcaagtgcacagtgtgaatcatttaatctccaatcaatgctgtaaggcaagttctagtataacctccattttacagatgaagaaattgcagcacaggcaggttaaatatactttccagcaaaacaatgcggccaagtgatggaggctgcaaccacatttggtttacctctggaacatgtgctcataactaggagattgtcttattmactttttatatttctctgacatgataaatggctagttaatgaattagggaggaaattgatgaacagattttgccattctgtacttacagagcactgaagctcatagccacattgtcaaatgtttatctcagtctttccctaaagggatgtctcctatttacactccagtctgtgaaggatcctttgcttttctgactggtgtcatctacaacatgttattttgtccagaaacttgcctcatacctttagctttggctcaagggaagatactcatagcctaagatgcagaagaaaatatctgactacctgagttccagattccctctgttttgccatttctgaaggacca

SEQ ID NO: 541356 - DNA, 621 bp, Homo sapiens
cagaactccttctaggtttcacaaattataataatatgaataatatccagtatttattattatatagcaagtgcacagtgtgaatcatttaatctccaatcaatgctgtaaggcaagttctagtataacctccattttacagatgaagaaattgcagcacaggcaggttaaatatactttccagcaaaacaatgcggccaagtgatggaggctgcaaccacatttggtttacctctggaacatgtgctcataactaggagattgtcttattaactttttatatttctctgacatgataaatggctagttaatgaattagggaggaaattgatgaacagattttgccattctgtacttacagagcactgaagctcatagccacattgtcaaatgtttatctcagtctttccctaaagggatgtctyctatttacactccagtctgtgaaggatcctttgcttttctgactggtgtcatctacaacatgttattttgtccagaaacttgcctcatacctttagctttggctcaagggaagatactcatagcctaagatgcagaagaaaatatctgactacctgagttccagattccctctgttttgccatttctgaaggacca

SEQ ID NO: 541357 - DNA, 621 bp, Homo sapiens
cagaactccttctaggtttcacaaattataataatatgaataatatccagtatttattattatatagcaagtgcacagtgtgaatcatttaatctccaatcaatgctgtaaggcaagttctagtataacctccattttacagatgaagaaattgcagcacaggcaggttaaatatactttccagcaaaacaatgcggccaagtgatggaggctgcaaccacatttggtttacctctggaacatgtgctcataactaggagattgtcttattaactttttatatttctctgacatgataaatggctagttaatgaattagggaggaaattgatgaacagattttgccattctgtacttacagagcactgaagctcatagccacattgtcaaatgtttatctcagtctttccctaaagggatgtctcctatttacactccartctgtgaaggatcctttgcttttctgactggtgtcatctacaacatgttattttgtccagaaacttgcctcatacctttagctttggctcaagggaagatactcatagcctaagatgcagaagaaaatatctgactacctgagttccagattccctctgttttgccatttctgaaggacca

SEQ ID NO: 541358 - DNA, 463 bp, Homo sapiens
tcaattgtaatcaccggactctcttgagaagtaaaccacaacatagccaccaagctatgcttcatagtttgcattgaatttgatggaagatgaacactccacttgacccccaaatacrcaggtgattgccagcagggacagttccaaagtgcaaatggagtatgatttatgacacacgtcagaaattacaccagttgctggttttcattatgttgcctaactctgatctgcatgaggtacctgccttacaaagggtatgcactggaaggctcataaaaaatcatgtgttctgttattgagacacaacttctgtttccttcaagtttaaacgtcaaaaatcacctggctgacaaatctctttctctagaatattgatgcactgtacactaagactctggcatgcttcctcaaggaagaataagaaaagattttcatattaaatgtttccattttccatgtgccc

SEQ ID NO: 541359 - DNA, 640 bp, Homo sapiens
aggattttttcaattgtaatcaccggactctcttgagaagtaaaccacaacatagccaccaagctatgcttcatagtttgcattgaatttgatggaagatgaacactccacttgacccccaaatacgcaggtgattgccagcagggacagttccaaagtgcaaatggagtatgatttatgacacacgtcagaaattacaccagttgctggttttcattatgttgcctaactctgatctgcatgaggtacctgccttacaaagggtatgcactggaaggctcataaaaaatcatgtgttctgttattgagacacaacttctgtttccttcaagtttaaacgtcaaaaatcacctggctgacaaatctctttctctagaatattgatgcactgtacactaagactctggcatgcttcctcaaggaagaataagaaaagattttcatattaaatgtttccattttccatgtgccctgacattatactatccccttttcttttagttggctaaggtgaaaaggctgcagtagttkcttctgttaaccaggagttaaattatagtagttttacaaattctacactgtttaataactttaagaaagaatttttgttagtgaattatttttctcaaactattaaacc

SEQ ID NO: 541360 - DNA, 588 bp, Homo sapiens
aaaagattttaaaaaactttgttttccaaactaccataaaaaaccaacaagtgacaaaagcaaataacaaaaacttagaagaaacttgtaataacagagataaaggattaatgtatattttaagaatatgaaacactcttaaaattgaaggaatcaagaccaaaaccatacaggaaaataaacaaaacatgaatagggatgtcccaaaattatataatgacctttaaaacatgatatatttacattcacttataatagatgcatgcatctcaaaaccatgctgagttaccacttcttgtctgtcagattatcaaaaattaaaatcttggtaacttattccattggtgaggctattacaaaacagtctcacagattcatactttataaaagaaaatttggctatatkgaacaaacctatatgtttatactgttacttagaaatttcactgaatataagcttctgtaaatataaaaatagttcttatagcaccaggtataattacagaatactgaaaacaaattagttgcctgtatacagggcattgcttaaatacactctgataaatactcagatggcggtaatagcag

SEQ ID NO: 541361 - DNA, 588 bp, Homo sapiens
aaaagattttaaaaaactttgttttccaaactaccataaaaaaccaacaagtgacaaaagcaaataacaaaaacttagaagaaacttgtaataacagagataaaggattaatgtatattttaagaatatgaaacactcttaaaattgaaggaatcaagaccaaaaccatacaggaaaataaacaaaacatgaatagggatgtcccaaaattatataatgacctttaaaacatgatatatttacattcacttataatagatgcatgcatctcaaaaccatgctgagttaccacttcttgtctgtcagattatcaaaaattaaaatcttggtaacttattccattggtgaggctattacaaaacagtctcacagattcatactttataaaagaaaatttggctatattgaacaaacctatrtgtttatactgttacttagaaatttcactgaatataagcttctgtaaatataaaaatagttcttatagcaccaggtataattacagaatactgaaaacaaattagttgcctgtatacagggcattgcttaaatacactctgataaatactcagatggcggtaatagcag

SEQ ID NO: 541362 - DNA, 612 bp, Homo sapiens
taacccagcttaatgctaaaatgtaaaactgaattgattttggcagatggcaatgtttggtagactaaaaattctcaagtattcaatgataaataatttctccttccaagtaaaactgaaagattatatagttgtatttttatgcaaaactagtttggcaatgagaaattaatttttcacaaaatcaggtattataataatattttaagtatatgtagataaatacatatatttgaagtttctgttattaatctaaataattttattcttataatgatttcatatgttaaataaactttgccatttttcttttgttttaagaatttcttcttggaaccaccagttgaatataagaagttcaataaaaagcagattaaaatccctctcacaaagayatctattcttaaaccaaactcaagatccccaaaacaaccttctactaggtgacatacaggtggtgaatgaagatgactacttatttctaaaacagcagaccaacattaagttgtctagggcctttgatacccaaattttctcccatcccacgtataagatgactgcccaactatcagccaactggcaatgaaacctcagcaaaaccataagtctctt

SEQ ID NO: 541363 - DNA, 682 bp, Homo sapiens
gagcggggctggtgactaagccagaagttactgtctgcatcctttgtaacttacaaataaaaatgaggaccagacattagttatgaaatgcatgaacaaccactgctctgggagccacataaaaagatggtgattccaaacatttaaccttagcatttgtctgtgtggtttcatttgaaaatgatggggtgcttgaaactctcagaacttagaaaactcttaagtttttttttttttcttaagacagggtcttactctgttgcccaggctggagtgcagtggtgcaatcatagctcactgcagccttgaactcctggcctcaagggatcctcttgaatacctgggattacaggtgcatgccatcgtggccaatttttaaatttttttgtagagacaagggccttactatgttgcccaagctggtcttgaactcctggcctcaagagatactcccaccctagcctcccaaagtgctgggwttacaggtgggagccaccatgcctggtcaaaactctatgcattgaaataacaaatataagaaatagataaaaatataatacataatgaatataataaatataataaatatacaaatatataaatattgtattctatatgtaaactcatgtattttatatatgaatatattatatgcgtaacataatatattgtgtgtgtatta

SEQ ID NO: 541364 - DNA, 578 bp, Homo sapiens
tatctctggcatctctggaatgatacattaaaaaattggtaacaatggttgcctcttggtaggggaactgggtagctggggacctcacgaattttgctccatctacatgaaagtataactcagaaaatctgaaaaccatttgttcccatttgacttaaaatcaaattcccacatgatttgggcgctgcctacttcttcatcttcaatttataccactcttctttgctcttaggaccctctagccactagaatataaattccttgtaggcaggaatatggctttcttgtccactttttgatctccagcactgagcacaatgtataacactcaatagaaattcattaaatatttttgtgaagtgataatggatttcatttgcagttttagtagggattaagagatgtaatgtctagcaccgtacttggcacataacagtatggggttttccttctgtgtatcacttgaagggctgttatttaaatatgagtagaccttcagtaygttctgctccagaaaccagtaggagaaagtcagagaaggaaaaatactaattcatcattaaaaatgccctaacaaa

SEQ ID NO: 541365 - DNA, 569 bp, Homo sapiens
tggccaatactggactgtgtttcatcctagacaatttcaagacacaagtttgttttatgttctattaataccgtataagaataaacactagaaattgtaattgtaagacaccatcaattaagtctcactctgatctcagagatgctgaaatttgaaaaaaatatgtgttgtgtcttagaattgatgaaagacagtaggtcctgttttttagcttttggcagtgaggatccactgaggtggagggggggcaggccatgtgtctggggccgcagacgctggctgctgwccagtatcagcgtccacacaggaagtggaatggtgaagcaccatcccagtcaagtctcctcacttggaaaactggctaaatccacggctgggaaacagatctcaaaagctgcacaggtcccacttgagctttttggtgggccttgtaaaatgagccctttgcgtgggcatctgacagacctgggttcttgctctaaagctgctactcatcaaccaagaaattgaaagatgaaaggctccaaagtgcaaagaggggccaggcatggtggctcatgcctgtaatc

SEQ ID NO: 541366 - DNA, 453 bp, Homo sapiens
cattacatgggttgggaggagtgtagagtgtgcaggcccggtgagatatcatgttagtacttacatcgcatgatcaaaaaatggtagacaaatccctccctgggtggggatttccatatgataatgaggcaaagggtaaagattggtcattgttctggtcctgtgtgcatggaggtgataggaytaactcccttgaatgagaattatgatagaatgcttcttatcttagtttctttatggtattccagccagtgaggatggcaccagtggaagttcaaggtctggtagtcagtgggtggagaaaaatgcattatgggagtggaggcaagtcctgtccctactctgtctcactaggatatgtaccttctggtgcattatttgcctttctggctattttgctagggattgagagtaatctcactgtgggagtgcagtggatgtggtcaattccag

SEQ ID NO: 541367 - DNA, 534 bp, Homo sapiens
gaggtctccggatggctccccaaagacaggtctttttggtgttttaagaaagttaacatgagaagcataaggtaagctaatatcattacatgggttgggaggagtgtagagtgtgcaggcccggtgagatatcatgttagtacttacatcgcatgatcaaaaaatggtagacaaatccctccctgggtggggatttccatatgataatgaggcaaagggtaaagattggtcattgttctggtcctgtgtgcatggaggtgataggattaactcccttgaatgagaattatgatagaatgcttcttatcttagtttctttatggtattccagccagtgaggatggcaccagtggaagttcaaggtctggtagtcagtgggtggagaaaaatgcattatgggrgtggaggcaagtcctgtccctactctgtctcactaggatatgtaccttctggtgcattatttgcctttctggctattttgctagggattgagagtaatctcactgtgggagtgcagtggatgtggtcaattcc

SEQ ID NO: 541368 - DNA, 465 bp, Homo sapiens
taattgagcaatgaacaatttgtgaatccggcagccttcagaatcacagcagattcacagagcctcccggggtgcctcatggtcaaaacgaatttatagaccaaaaaaggtaaagtgaygtacagaaacaggaagtgaggtacagacacagtgagattggtaacaactgggcatttgctttatttgaacacagtttgaacattcagtagtctatgagtggctgaagtatggctgctgggattggctaacactcaagcattgtcacaagtgcacactactaaattaggttttcaattttgtctgactattaaggtaggttacagttcccccatgaggactcaaatgcagaagtacagagtccttctgaggccatatttagtttgctttaacactttgtggcaaaattcactgaaaggattgtctatacatgctatctccaatccccctcctaaacttatctaattg

SEQ ID NO: 541369 - DNA, 638 bp, Homo sapiens
gcttagtagttctgtgagactcctggcccatggcarctgagccaaagtgttcctggtcgggaaaccaaaagctgttactgaaacaccaggggtgtggtctaggtcctgcagctcaccacacagaaagccaatcaatataaccaattgccaaggaagaaggctgagttggatgctgtagcagaggagatgcaagctcggtctcaaatccgtcttgctgatcaactaaaattatgagttttcatagcagtgaagaaatgtaacaatgtgtagaaaaacaggaactcaggagacctaaggaagcaatcataatttatgaggggtctggtgtcccattgtctggatgggatcatctggtgagtttcaattctttgatactttttgagggacgtaggggtcctttactaaggatgaaattcatataaaacaaataaaagtttcaagcattaagatcagaagggtcaatttctatgtttatacaaaaaaaattctctatgggactacaggggaggtttcaattccactgccagtgctagctccagtcggcctcaagtctgcctatgattctggcaaactgaatcaggaccttggccaggagaatagcttcctctcccatctctgggctcctcacccatctgtag

SEQ ID NO: 541370 - DNA, 538 bp, Homo sapiens
tcacatggtaaggagaggaatggggatgaccactattggtctgtggcccaggggttggggacctctgttctatataacagagtctaggggaaccactaaataagtctatgcatactatgtgaactaaagtaaaaatgacaacatccctgagccttattagtttcttacttgatgtgatcagggtgattttaagaattaaatgagaaaagacatgaaaagtcctragcacagtgttaggcacaaaagagatataacacttctgaaatctaacttcaggactcaagactgctactaagtagtagcaaaagaagagaatcacatacttgcagtcatgtggattttggagccatagtcttacttttagtaaactaattaaaaattatgtgtattataaaacataatatcaatttatgctagagtaatatttcagtaatagagcaggaaatttacaaatactagttaccttgatcaaatatttttcccatctgtctgcagtaacagatttgccaattttcctcatcagcttcaaatggagctc

SEQ ID NO: 541371 - DNA, 538 bp, Homo sapiens
tcacatggtaaggagaggaatggggatgaccactattggtctgtggcccaggggttggggacctctgttctatataacagagtctaggggaaccactaaataagtctatgcatactatgtgaactaaagtaaaaatgacaacatccctgagccttattagtttcttacttgatgtgatcagggtgattttaagaattaaatgagaaaagacatgaaaagtcctgagcacagtgttaggcacaaaagagatataacacttctgaaatctaacttcaggactcaagactgctactaagtagtagcaaaagaagagaatcacatacttgyagtcatgtggattttggagccatagtcttacttttagtaaactaattaaaaattatgtgtattataaaacataatatcaatttatgctagagtaatatttcagtaatagagcaggaaatttacaaatactagttaccttgatcaaatatttttcccatctgtctgcagtaacagatttgccaattttcctcatcagcttcaaatggagctc

SEQ ID NO: 541372 - DNA, 551 bp, Homo sapiens
cttgtgttcttggctatggcaatctggagagtagtctctgcctcacaatggggatggggcaggaaggcatttatcttgacgcctccactgtacatgtgcacagattcttacctgtcttaccaaatatctcaatgagttctggcttctataaaaaaaattgtcatagactgagtgccttaaataataaatatttatttctcacagttctggagactgaaagtgtgagattaggatgccagcatggttctggtccttgtattaattcattttcattagttcattttcatgctgccrataaagacataactgagactggggagaaaaagaggtttaatggacttacagttccacatggctggggaggcctcacaatcatggcagaaggcaaggaggagcaagtcacgtcttacatggatggtggcaggcaaagagagcttgtgcagagaaactctcgtttttaaaaccatcagatctcatgagactcattcactatcacgagagcagcacaggaaagacccacccccataattcaatcacctcccaccgagttc

SEQ ID NO: 541373 - DNA, 544 bp, Homo sapiens
tggagccaggacccgcaagaccctcttcacagggcggcacctctcacctgcttctcccctttccccgctcggcaagaggaatctggagccagcctttgccccctttagacaggctgcccctcctactgctccccaagtctgtcctctgggggaaacacagaagaggaagagaaggaccaggggctgttccgtcctttcagcactggtcaaatttccatgtgagcctcagtttcccccagtgcaaattgggtgcccatcctcactccatccaaagagcatcaggcactcctcagcccatccagtagacagtgagcccctgttttgaaggtaggggcagagggggaaatggagccctcccacggtagcctgggtccatgtgtcactcacccccacctccagctgtgcctgggtgtggcccaggccagagtgaagatggaagctcccctatcactggtcctacccmcccttgccggctgccctcttcacgccctcccacccgtcagagaggatccaggccctggccgatgacagaggaatcgtctgg

SEQ ID NO: 541374 - DNA, 376 bp, Homo sapiens
ttgggtgtccgggtgggaaaaacaagcagattcagacaaggcttcatggttaaggagagtctgacactttgaccattaaagcaaaactgagcaaaacaaaatgcttactgccttgtcttatctcttagagagaaaggggacagtgggaagggcccccgggctgggtgttgatcccaccctaaccagcgccagtctcagagacctggcctcaggtggctggggcagggagttcagggtctcagtccagcccggcgtcaggtatggggtgggtgcttgccatgtgtggcctcgtctggcctctgtggccctttcagagagatcgttatkgtcatttttcagatgaggaaactgaggctccgagaagacacgcagggag

SEQ ID NO: 541375 - DNA, 551 bp, Homo sapiens
gcccttgccagactggagcctgaacagtgatccmggagaatgagaaagggggtcaggtatcttttttttttttgagacagggtctcccagggtggagtgaagtggcacgatctcagctctctgcagcctccacctcatgcctcatgcttcccaagtagctgggactacaggcatgcaccaccacacgtggctaatttttgtatttttagtagagatggggtttcactatgttggccaggctggtctcaaacccctggcctcaagtgatccatccgccttggcctcccaaagtgctgggattacatgtgtcagctaccccacccagccatgatatcattttttattaacttgacacagacatttcccaaagccccctctacgaagtgagaaggggctgcttcagctctgtctctcctgtccccactgtggtcctcacccccaacccccaaatacagcctctcctcagtcccaggtcagcttcctgcccctcccttattcacagagctttaactgaagccctcctccaggaaccaacaccaaaaccaaaaccc

SEQ ID NO: 541376 - DNA, 635 bp, Homo sapiens
agtgaacccagaatttcctgaagcagtacagccagtatgtagccccctaaatcctccaggagtgatatcaccatgggctacgatggacaccatagttccagacaggaaggatttttattcctccaatgtagttcctgataaaactcatgaagttggatcttatttagctgcccaaatgtctccatcagaccagacgcttagctcatttgcttccattgttgctcaatatggcaaaggcctccctcaggaagtggaagaaattgtgagggaaacaattgttcaacccaaatcagagttcctcgaattcagtgctggcttagaaaaactactgaaggaagaaactgaaaccttcccctcaaaatatgaaagtgatacagggaatctttctccatcaaagttaataggtagtacagaggagcccaggcgagccacttctgaatgccatcctgaggaattaaaagaaacagtagaaaaggccgaggctccrttaataactgagagtgcttttgatgctggttttgagaaacttcttaaagaaataactgaagctcctccttatcagccccaggtgtcagtgagagaagaaactcacgagaaggagtcctcacagtcagagcagaccaggttcttgggga

SEQ ID NO: 541377 - DNA, 569 bp, Homo sapiens
tggtaagattttgtgggctcaagtcgagcctcattctaagacctatgtcagtcagtcacattctgagaccattcacagaccttctttgccttgtgttgccacttgtattgtcgttatattcccactgtacaagtaggcatggtaggttaaagtgcatttaatggttatcataaatgaaatgtaagtgattgtaaaaaaaaaattacataatttatttccaaagtcaaatctagcaattkggagaggtttctcttctttttctattctgtataacacaaatgtcttaggctatcacagctaatcaggatagcctgtgcttgcaaattttaaaggaatcctcaaatgattactagcatattaagcacttactaaatgcaggcatggagctaagtgttttgcatatgttatttaattctaattttagccttatgaaatcagcatcaccattcccattttatagatgaagaagcaagtgtccgtaaggttgagtaactttccctaaaatgcatacccaggaggtagcagagtcaggattcaaaccaagtatagctgactctaggtccagagtc

SEQ ID NO: 541378 - DNA, 289 bp, Homo sapiens
ctgaactgcccaacttcatccttcatcttttcctcctgaacctcaaaagcagagggccctttgacactgctgtctgccttcagtccatgcttcatgcagcaaccagagagggaccctgctggccacacacccagccttgtcactcccctgctcaaaacccttccatgrttcccactgccctctggataaggtctggctccttggcctggcattcgaggccctccaggctctggaccctgccagccttatcagctcatctcatgtggctgttcgacttgcagccaagtat

SEQ ID NO: 541379 - DNA, 455 bp, Homo sapiens
gtccgaggaatttcactggttgaactaacaggacttggtgagtggtgggcttccagcagggtggggaagagggaggttgtccaggctgtatcagaggtttgaaacctrgaaggatggtgggggcccttctcagaaatgagaaccacttgtggaaagtgatattctccattttagcctgttgagtcaaggcattttctaaggaggaggagacagggtgtgcacctgggtgcagcagggtgaaaaggctgaccatccctcaccttgtcatagtctctagagtagatcagtggggagctaccagcccaccggccttgtcaatctgagaccaccaggcaaggtgcacttagtaagcagtggcccagaggcatttcccatgtgcacccacgccccccgtacccaagctattcctgcagtgcccccatctcctctcccacatccccccagccttgtactgc

SEQ ID NO: 541380 - DNA, 601 bp, Homo sapiens
tgactgcagtgtgaaaggtggacagacggggcaggggtggaggcacggaggccagtgaggaggctgctgctgtggactgtggaagcacaggcctcgggctgcagtgtggggaccgcgtagtgcatgtccgaggaatttcactggttgaactaacaggacttggtgagtggtgggcttccagcagggtggggaagagggaggttgtccaggctgtatcagaggtttgaaacctagaaggatggtgggggcccttctcagaaatgagaaccacttgtggaaagtgatattctccattttagcctgttgagtcaaggcattttctaaggaggaggagacagggtgtgcacctgggtgcagcagggtgaaaaggctgaccatccctcaccttgtcatagtctctagagtagatcagtggggagctaccagcccaccggccttgtcaatctgagaccaccaggcaaggtgcactyagtaagcagtggcccagaggcatttcccatgtgcacccacgccccccgtacccaagctattcctgcagtgcccccatctcctctcccacatccccccagccttgtactgcacttccagcttgggaacctgg

SEQ ID NO: 541381 - DNA, 601 bp, Homo sapiens
tgactgcagtgtgaaaggtggacagacggggcaggggtggaggcacggaggccagtgaggaggctgctgctgtggactgtggaagcacaggcctcgggctgcagtgtggggaccgcgtagtgcatgtccgaggaatttcactggttgaactaacaggacttggtgagtggtgggcttccagcagggtggggaagagggaggttgtccaggctgtatcagaggtttgaaacctagaaggatggtgggggcccttctcagaaatgagaaccacttgtggaaagtgatattctccattttagcctgttgagtcaaggcattttctaaggaggaggagacagggtgtgcacctgggtgcagcagggtgaaaaggctgaccatccctcaccttgtcatagtctctagagtagatcagtggggagctaccagcccaccggccttgtcaatctgagaccaccaggcaaggtgcacttagtaagcagtggcccagaggcatttcccrtgtgcacccacgccccccgtacccaagctattcctgcagtgcccccatctcctctcccacatccccccagccttgtactgcacttccagcttgggaacctgg

SEQ ID NO: 541382 - DNA, 620 bp, Homo sapiens
tggcctcatcacgctaatttttcacttctctgattgtttgagccccggttcactcctctctactccctcattctcccttaaaaacagagggcaccgagggaacccagtcagaggcacccaagacaggtgcggtggctcacacctataatcccggcactttgggaggccaaggtgggaggatcccttgagctcaggagttcaagaccaacctggcaacacagggagacttccatctcgacaatttttttttaattagctaggtgtggtggtgtgcacctacggtcccagctacttgggaggctgaggcaagaggactgtttagccctaggaggttgaggctgcagtgagctgtgattgcaccactgcactccwgcctgggtgagagagcaagaccctgtctcaaaaaccaaaaggaaaaacaaatcacccagttacctctgcacaaatcaaagttgagctcagcttacactagagcctcttccctactatagaagctatcgctgaatagatctgtgtttaccacctttaacaagggctgattttgtttatctttgatcaggtaatatcctctccctggcagatcgatgatcaattacagtgggaccttcaatccagatggg

SEQ ID NO: 541383 - DNA, 635 bp, Homo sapiens
ctccgtagaagttcagtagagggacctcttcacacttgccccggttctgatcctgcatgaacagtactttatcctctcctcctcttccctgctgcagtcttacgctccatgcagtccctcttccagggagctgctggactcatctccacgcagtaggagtctggctgcatcaccactgccctcctcttactggaaacgcttcagtccaakttctgtagctctgtgccctgactctgccctgtctcacacacaccaggcaggtcacgttggtggattaatgggactggatgaaggggacatcaggcagtggaagtggctgtacggaaacagggtgaaggctacaccccatctaaagagaaccaacccaactctgattattgccatggaagaatatggcctccatgtttccagatcctgattgttcaacataattttgggaatctgggtttttatatgaaatagcctaattttcaagcgttggtttatatatatatcttaaaacactatatgggccatcaacaaagcgtgtctgtgggccacacacccacatgttgggaccacttttgccctttgctgtgtggccccaagatgttggcagctctccataaatgccatgccctttcctctctgtgact

SEQ ID NO: 541384 - DNA, 635 bp, Homo sapiens
ctccgtagaagttcagtagagggacctcttcacacttgccccggttctgatcctgcatgaacagtactttatcctctcctcctcttccctgctgcagtcttacgctccatgcagtccctcttccagggagctgctggactcatctccacgcagtaggagtctggctgcatcaccactgccctcctcttactggaaacgcttcagtccaatttctgtagctctgtgccctgactctgccctgtctcacacacaccaggcaggtcacgttggtggattaatgggactggatgaaggggacatcaggcagtggaagtggctgtacggaaacagggtgaaggctacaccccatctaaagagaaccaacccaactctgattattgccatggaagaatatggcctccatgtttccagatcctgattgttcaacataattttgggaatctgggtttttatatgaaatagcctaattttcaagcrttggtttatatatatatcttaaaacactatatgggccatcaacaaagcgtgtctgtgggccacacacccacatgttgggaccacttttgccctttgctgtgtggccccaagatgttggcagctctccataaatgccatgccctttcctctctgtgact

SEQ ID NO: 541385 - DNA, 541 bp, Homo sapiens
ctggcaccatgtgtcccaggtcccctggcctggagttggccccgtggagctctgaggcctccaagatgagtgaaggggaggagccaggaagatggcagctcttttctgggcsgcaggaggagggtggaaaaagcgagttcaaaagcagattggaagagaggggcccagactggaggttgggagcttttttctttcctgggtttcatttgccagttttttgttttttgggggttttttcgccaagcctctgggactgtcagatgggaaggcagggattaaggaactggagtcctctggccacaccatctgggggaatggcttggactgaggtcagggacctcaggcagggactaaggtggtgttggggtcaggccttgcccagggtcctttgcctcacctttctgcagcacagcattcccactgccaaaatgcacaaagtaattgtcctgcctcttttcccaaattatcctcacctttgcatttgagccaagagggatctctggagtcccttcttcttcctaaagggtacactgaggcagag

SEQ ID NO: 541386 - DNA, 496 bp, Homo sapiens
acttaccccaacctgaagaccaagtgcrcccagccccaatgcagaacagttgctgagctggatcccccctgcagggcatgaggaggcccctccccttctccaccctcagaacccatccaactgctttcagagggtctgagcgtacctccagccagaaaaacctaccctcaccttggtctggggccaaggtccaaagtccccaagtcaggtgcttgacgtcataaaactgcaaggggaagttggccgtggccaggtcggagcacacctaatttcgtgcacctaatttcgcatcactgagtactggagaaggaggagtccaggcctggcccagccaagccagcagccccggccatcccaagagactcatgacccactgtgcacccaggaaacatagcaagtgtcagctttatgcttggctctttgaaattatatatttcacagatgatatctaagaaatctgaatctcaaagctccgtgacagaggcagaatcacaaa

SEQ ID NO: 541387 - DNA, 309 bp, Homo sapiens
gtgtctgcctgggatgccatgaccttccctcccctaattcccaagctaggaaggcaatgcctccagaagccagacagccaatgatcaaggggaccacctaccaaaacccctccttctgcagagagcgcacgtggtccttgcagagcacaaacgagatttcagccttcaccttttctccctcttcaatggggtcaacaatgagaaagtcccctgtagrtaagaagagaaaaggcaaagtcaggcctgcttgcaataaggaaagccaaagccataggaaggggttctatctcctagagagggctgcctctc

SEQ ID NO: 541388 - DNA, 309 bp, Homo sapiens
gtgtctgcctgggatgccatgaccttccctcccctaattcccaagctaggaaggcaatgcctccagaagccagacagccaatgatcaaggggaccacctaccaaaacccctccttctgcagagagcgcacgtggtccttgcagagcacaaacgagatttcagccttcaccttttctccctcttcaatggggtcaacaatgagaaagtcccctgtagataagaagagaaaaggcaaagtcaggcctgcttgcaataaggaaagccaaagccataggaagkggttctatctcctagagagggctgcctctc

SEQ ID NO: 541389 - DNA, 495 bp, Homo sapiens
tgctgcgggccagggtcagcaggtccagctctaggtcaacttgagctctaaaagcaacggcctccagattacagagccaccaagaaagaggactctgttaccatctgtcatgttatgaagagctgcaatatgcccctccctctggaagttgtggtgctaagactgattcacatggaggaccaggcccttcagggcccattaaccctggtccagccactctgcatgcgcagagcctccccttcgggaacagttgaaccacctcctctgcccagcacatcaaccatgttcagtacagcctagctgtaaatgctaaagaaggcccctaatgaccaccatggtgccaggtggatagcaaaattggttgcagtaagatgggttgagtatttttctagccagttgggctggattatcygaggcattcttaccccttcattctctgccctgacagaacccccccattccttcactaccacctcccaccagaagcactggaac

SEQ ID NO: 541390 - DNA, 648 bp, Homo sapiens
ctctttgagaaagtgtcaactgaagtcttttgcccattaaaattttttttcttactgctgagttctgagagttccttatataatctggttacaagttcttaggtacgtgatttgcaaaggttttcttctctattttctctgtaagttttataagttttacatttatctacmatctgttttgagtaaatttttgcatatggtaccaagtatggctcaagcttcattttcttttttttttaattttagattcagagggtacatgtgccaagttcgttcgtttcatggatatgctgcatgatgctgaggcatttgggcttctattgaacccatctcccaaatagtgaccaggttaccaaacaggtagtttttcaacccttgcctccttccctatctacttttggaatccccagtgtctattgttcccatctctttgtccatgtgtacccaatatttaggtcccacatataagtgaaaatatgtggtttttcgttttctgtttctgtgttaattcacttaggataaaaggttcattttcttacatatgaatatgtgtaattgtgccaacatcatttaatgaaaatatatctgctctccactgaattacatttgcatctttgttaaaaatcaattgaccggctgggtgcagtg

SEQ ID NO: 541391 - DNA, 651 bp, Homo sapiens
ttgaatcagcagaggatgtaaccacttagatagcactatgtgactcaaataaatgacagattgagtctttcaagtgtcacagtatataataaggatcacaaattttgtgtgtgtgtttttttattaagagaaaaaaaatggctttggagtcaagtacacttagtcttaaatcccggctccactgtttgctagcgatgtaactgggtgtattacctcatctgtacaatggggataataccmccaatctcatggttaaataaagtagtgtgtgtaattgctcagcatagtagcatagtacttgacacacagcaaatagtagcaggatcaaatgggagaatatataattgcccagtggctgtaagacaagaaactcttagtgttattacttctctatatttcttagagatgcctaattccatttcttaaaactgagaaaatgatcttatcattaaccaagtttcagtaagtagtaggatcaaatggggtggtgtacaaatgggtttatacattatgaataactttactttgaaaggctaatttcttgtgtctttattcataaaagttttccattcatctctcacttgtctgtttttaaaaattcattcatcggtgttttaaaccaactggagactagggagtccctaaaggcct

SEQ ID NO: 541392 - DNA, 651 bp, Homo sapiens
ttgaatcagcagaggatgtaaccacttagatagcactatgtgactcaaataaatgacagattgagtctttcaagtgtcacagtatataataaggatcacaaattttgtgtgtgtgtttttttattaagagaaaaaaaatggctttggagtcaagtacacttagtcttaaatcccggctccactgtttgctagcgatgtaactgggtgtattacctcatctgtacaatggggataatacccccaatctcatggttaaataaagtagtgtgtgtaattgctcagcatagtagcatagtacttgacacacagcaaatagtagcaggatcaaatgggagaatatataattgcccagtggctgtaagacaagaaactcttagtgttattacttctctatatttcttagagatgcctaatyccatttcttaaaactgagaaaatgatcttatcattaaccaagtttcagtaagtagtaggatcaaatggggtggtgtacaaatgggtttatacattatgaataactttactttgaaaggctaatttcttgtgtctttattcataaaagttttccattcatctctcacttgtctgtttttaaaaattcattcatcggtgttttaaaccaactggagactagggagtccctaaaggcct

SEQ ID NO: 541393 - DNA, 239 bp, Homo sapiens
gccacactctagtgtcccacagagggaccacaggagtctcctcctcttgccttccatgcccccactctgtccaaaactgctagtagtgccacacaaggacayagaaactgagagcaagactgagagaataagactaagagagagagaattctgaaaatagaacaaaatgctattttatcaaaacagagcagagtttggaaggcttctagtgctctatcttctcactaaatatttgtatg

SEQ ID NO: 541394 - DNA, 558 bp, Homo sapiens
tcagggaggcccctggccgccgcatgcmccatgttagcgtggagcaagccccagcctatttagagaagatggaggctgtggcgggaggccgtggggagggggaaggagaaaagggaagaaaaggagcttttgatgcacatcatgtctgtggaattgagtatgactaattaatagattttatttttagtaatctcttaagcattccatacattgggccccacgcctgagctgagcttacaagaggcctcattcgcaaaatgcaaatgattcccggcctgctggtgccttctctctctccttccttgccttttctttcctttccttttttttttttaggggagatttaaaggaaaattgccatgtaatagaaaagagattccatcactacatctaattaccacgaagggtaaaccacttaaccaaagaagcgtcatgggctttttttatctttaactttaaacctgccttaaatgccacaaaacgtactcatcagtgctggggccgctgaggttattctggctacttagaggctgtgagggtcagcccagccgcggacgt

SEQ ID NO: 541395 - DNA, 739 bp, Homo sapiens
ggcaatttcaatgctgtgtggtgaggttaacgctctttgtcaagaaarcagacaaggaacactcaatcccactagggaagatgtaatatttaagatgagatacagaagatgaatagaagtttaccagacaatgtgggaaatggcaagaggctgtttcagatcattatttatttttcttgttttttggccttgaactatataatcacatcctgtgttatcatcatcatcgatagcagtgacatggtggaaaaaacctagaacagtagtcagaagatttggctactaaaagaagggacaggatcaggtaatccgtgagctggacttggtctgtaaatttaggtatgttagaagtatccatttattttctgtaattcacctttactcttagtaactgagtaacagacaaaataacttatcctttttgaagttttccccacttccctggggttaaggtggggttctgcctggaatgggagtgtcttctggttgttgatcatctatataaaacagcttacttctgacatatgagttgttgtgtctagatagctctttctcgtctggtttgacagatatttgatatgtccgagtcatggacttttacctttttctagaatgtctgtgtttctgtttgcctagatgcgttacaatgccattcctcttgggtcttgctgccttccaagcaatgttgccaataacaagagcctagatccctgatcccttgagatccaaagactttttt

SEQ ID NO: 541396 - DNA, 531 bp, Homo sapiens
agtacatgagtccccagatttccacgtctcagtcctgtagcacaaattgtaaagggaaaatgcacctcgttatttgtggaaatccttcggatgcctgtttgagacattcctgccttctagtcgaagtctcctgaatgcaatctaaactttccttgatggctaaggatcacgcacagctattctttttactctgctctattacgctgatgccctttgtgactaccttctgcagggttatttgctcctaaatgaaatggccccagcatcatttcatgcttttgaagtttctgcgctctctctttctcgcgctgtgatcttctccctgactgtcagcactccagtatcactttgtgctcsctttgttgtgcttgtgtcggatggtgagcgaaccctcagaacacaactgtacagcaggacttggctcactggactctcattatctggccacatctgcagcagataccaaatacaggctttctcaacacccacttcaacctccttccagtgtgctttcttttccacgagcctaga

SEQ ID NO: 541397 - DNA, 531 bp, Homo sapiens
agtacatgagtccccagatttccacgtctcagtcctgtagcacaaattgtaaagggaaaatgcacctcgttatttgtggaaatccttcggatgcctgtttgagacattcctgccttctagtcgaagtctcctgaatgcaatctaaactttccttgatggctaaggatcacgcacagctattctttttactctgctctattacgctgatgccctttgtgactaccttctgcagggttatttgctcctaaatgaaatggccccagcatcatttcatgcttttgaagtttctgcgctctctctttctcgcgctgtgatcttctccctgactgtcagcactccagtatcactttgtgctcgctttgttgtgcttgtgtcggatggtgagcgaaccctcagaacacaactstacagcaggacttggctcactggactctcattatctggccacatctgcagcagataccaaatacaggctttctcaacacccacttcaacctccttccagtgtgctttcttttccacgagcctaga

SEQ ID NO: 541398 - DNA, 529 bp, Homo sapiens
ctgcatatttttaatgcacacaaggggaaataaaggcagcagatggttttatgtaatcttcctatgaattttgaactgagagtcctcattcatgaagacttgaaaaggttttgttgttttttttctttttttacacgtcctctgtgggtcaagccaaccagctctggacatgccctggtgaggctgtgtgtgtttgcctctgccagggcagggaagctgagaggagcctgcttgccttcttctggcctggtttccactccgtgttctttcttgtggttctttgtctgtgaacacacgagtggtcctcaacgttctcagtgttcacaatggaaaactcaaggcaaactcatgaatccttcataggcataggtgtgctrtgaaaatctgaaccttatgttcagtcttatgtttgaaatgactgaggatctgtgctatggcagggacatctgtcagcgagagggtcaaggggaacaggtggggcagatgcaccagtgtaagagaaaagataacagttcccacttttaagtga

SEQ ID NO: 541399 - DNA, 425 bp, Homo sapiens
ctgtagctgtaagcacaggcatcgattttttcattttaaatcagtctgaagacaaagggaagaatgggttgaagaaaaaaaaattaaagatagtgaggaaacaaaatcaaaattccagcccagtctttcacttgctgtaggggtatctgagacatagggaggtatgagtcagtacatctctcccccgagarcatcatgtacaacgtttcacctttgccacctcttgcaaacccctcccagcagagtgttggtttttagaagcacccgggcaaagaacagacaaagggaggataagctgtgggggcggggagaccaaggtagtcttatgtaacttacatctttatgaaaactcattttgcttttattttaagaagtgctatttatgaattccccagggggttaaaaagcttaagagatgggttttt

SEQ ID NO: 541400 - DNA, 671 bp, Homo sapiens
gcacctgagccagcaaagtgcctgtaccccagggaatatatagtccagtacatcagggaggctgccctgggacatagggaactaaagcaggcactccccaaagcctgagatccacctatctaaggctgtggctaccaacagtgaccccacttgacttcaaagccacggcccttgcrgaatgacacagcccactaggagtctggggactggcctgacatggacatttccagtgtctgcacaccctgcctagggacttggggactaggccagctgacccatcatcaacgccactgacacacaaagggcccacctaggtgcctgatgactgacccatttttgctactgccagtgcccaaatgccccactcagggcccaacactaccaccaccagttactgcatgactcacctgaggcgcaaggaatggcctgccaagggcatatttctaccacatctggtgactgcacaaaccacctagctaggtgcctgaagaccagtctgcccagcacccgcatcctcagaaaagcctccacaacctaccacagcctaagccactaaggacaccactgatacttattatagccaaagtaatcatatggagaccacattttgttgcccactcaaaatcaaagcccaagaaccttacccaattgaccttatagatacatctaca

SEQ ID NO: 541401 - DNA, 607 bp, Homo sapiens
  misc_feature (1)...(607): n = A,T,C or G
nnnnnnnnnnctcctaaaccataatttctcatcttttgactaatatgtggttctgcaaaggcaatctagtccctaggcgagaagggggttgttttgagaaagggctgttatcatmtttgattcaaactataaagttcctcccaaagttagttcagcctatgcccaggaacaaacaaggacatcttggaagctagaagcaaggtggaattggttaggtcagttctctttcactgaagagacaataatttttaagaagagaagggagatactttgaaaagagaacttagatttcccttaggagtgaggtagcctcttctcactccacttcctgtttcaattttgtgttcccatcatgaagtttgcagcatccctgaatcttccatgctgcctttcacattcaggttattccctcttcctggaacatgaccaccttctcccctaactcctagggatatcagtctgttgatgtcagatgctgtgatatctcttccgatgctcaaaacaaagtaagtctctaacccaagcacctccataccattgtgtttatccttatcgtaggtgctatcacagcgcatccattctgccctcaagacaaaaagcagatagg

SEQ ID NO: 541402 - DNA, 570 bp, Homo sapiens
ctggcttccctcagagcctgagcaccgaagtagagctgctggcctttgttaagggttagtcctagactttcagagtatcacagtctcagcattttattgcttaaagcaggtcacagggccaggccacgtgcaaagggaaaaacttcacaagagcatgaatactgggaagtgtggttcactgagatataatagcatccacattagtaaactcattaatacagcccacttctcctctcaatagatattctcacctttaaacctctgttaccctattagaatcaataattctctatactgatgacaccatgttagtatttcagcctgtggttcctggcccatacccaaattcgtataaaaagagtttcttggatacctttgtctgaatatcttgctgataccactcactcaacatttgcaaactgagctcctgaattctkttttcttttttttgaaaagggtctcattctgtcacccaagctggagggcaatggcatgatcatggctcactgcagcctcaaactcctgggctcaagcaatcatctcatctcagcttccctaggagctgggact

SEQ ID NO: 541403 - DNA, 595 bp, Homo sapiens
tgtacaggcttagtcacagctctgagcttgctgaggtagtcaaggtcttagtcacactctgagctccctgagttagtgagggtcttataagccaagattgtttttcccataaccctccctcctcagcctctaagactgtctgccaactcctccctgcctggggggacttgttgctttagrgtaaacagactcagccccaggagccaggctaggtatgaccaagtatagcatccaggcagctcagagccaccatgaccatccatacctattgaaacaaaagtaatgttctgcctattcttcaagatcccatcagttaacaagggaaccttaagagtcagtcattttcatcagccatcagcatctatgaaaatacgtatttttttactccaagccagaaaatatgatgtttgcacaactgcagagcagtggcctgggaatcaaacgtgaatgtcatatgtaacctaataaacaaagtttgtatgtatatttgtaacaaaacaaagttatgtattcccctctcccttgcaccagggaggtaaggaggtggaattgtgagtttttaatcaagcaagcaaatgagaaataaatagaatat

SEQ ID NO: 541404 - DNA, 555 bp, Homo sapiens
ggtaatgtctttctgtttttatgatgacaatatttcaaaatttcgaaaacccataggaactatgaatatttgagatggaaaaagttctgggtgattggtaagtagctgggcatacttcagacaccaaggttgtattccgagcttggctactgagaagttcaggtcaaagttttcatacttagccttagggctctctctctcagcayacagaggcttctacttttttttttttttaatcttgcccaaagctttattacaaaaaacaaacaaacaagcaaaaacacttcagttccacctctatgttgactcttttgatatccccaattcttatttgattctcctctaattacccttgagagtagattcactaaatttccaagtactcaactcaaacttttatagttgttgtaaaggtatacaaatgcaaattctttacagaaaatctctgtggaaggaaagttgccattggaatggatattccaatcataactccccatatgctagcaactcaaatatttctgaggcactggaataagagccccagtgcattattta

SEQ ID NO: 541405 - DNA, 555 bp, Homo sapiens
ggtaatgtctttctgtttttatgatgacaatatttcaaaatttcgaaaacccataggaactatgaatatttgagatggaaaaagttctgggtgattggtaagtagctgggcatacttcagacaccaaggttgtattccgagcttggctactgagaagttcaggtcaaagttttcatacttagccttagggctctctctctcagcatacagaggcttctacttttttttttttttaatcttgcccaaagctttattacaaaaaacaaacaaacaagcaaaaacacttcagttccacctctatgttgactcttttgatatycccaattcttatttgattctcctctaattacccttgagagtagattcactaaatttccaagtactcaactcaaacttttatagttgttgtaaaggtatacaaatgcaaattctttacagaaaatctctgtggaaggaaagttgccattggaatggatattccaatcataactccccatatgctagcaactcaaatatttctgaggcactggaataagagccccagtgcattattta

SEQ ID NO: 541406 - DNA, 555 bp, Homo sapiens
ggtaatgtctttctgtttttatgatgacaatatttcaaaatttcgaaaacccataggaactatgaatatttgagatggaaaaagttctgggtgattggtaagtagctgggcatacttcagacaccaaggttgtattccgagcttggctactgagaagttcaggtcaaagttttcatacttagccttagggctctctctctcagcatacagaggcttctacttttttttttttttaatcttgcccaaagctttattacaaaaaacaaacaaacaagcaaaaacacttcagttccacctctatgttgactcttttgatatccccaattcttatttgattctcctctaattacccttgagagtagattcactaaatttccaagtactcaactcaaacttttatagttgttgtaaaggtatacaaatgcaaattctttacagaaaatctytgtggaaggaaagttgccattggaatggatattccaatcataactccccatatgctagcaactcaaatatttctgaggcactggaataagagccccagtgcattattta

SEQ ID NO: 541407 - DNA, 614 bp, Homo sapiens
gccaaatttctactttaggtccataaacataaaatgttcttagcatagctaaaatgatcaaagaatagcaactgagttagcttaccattctatcatctagaaatgatgtgcttttgtttttttttattttatttaactttaaaatggttgaaatgtttgatggctagcaggaaggtttatgagaggtgtcctgttgagttgtgagtcgcaatagccagattgaggatagctgaatcaaacttaaggatcagtaaagttcaaagaatccctgaggagcaagagtttggatacagatkaatagtgagaatcacagcaagaagcacaacagacaccaggcagactgatgataacagacatagagaaatgtgggagtgcaataaggtagcatgttcaaatgggaaacgaaaagaaaaaaaaaacatcgggatgtagaggccagtgcaaattaacaagtggtagttaaaacataccaggaattagaaggcatctttacattaacctaacatgttgttaaatcttgatatcaggattcttttaggtgcaggtggcagaaaacccttaaagtggtttataaaaattaatggcaataaaaagtgttagggtaggctgtaggt

SEQ ID NO: 541408 - DNA, 644 bp, Homo sapiens
ttccaagcaggaatttgaaggagatgtaccagatagtgtcagaccctaatggatcatcttaggggaaacttgccccagcgtgaaacttttctagtagccctaaatatttctgatttgaaacatactcttaaacctaactctaactttccaactctctgaatatggatgtaaaggaaacatagacacagagtcataatcaagtagaaagtgttactactatattaggtgtcaaccatgttcatcttgtgaaaaagaatgtccagtccataaatgatcctaactgaggacaaagatatgagaataggattttatgtattggcaacatttccatcttttcttttaatttttaaaacattatcamacatagctatcttacttttttcgaatagtaactattcttcagatcatttaatctttggaaatttttaggaaaataatccaaaacatagaaataaggcaaaagttgggtgatgtaattttaatgtcacatgataattcaagtccatctaagaattttctaaggaaatgtgtttgagtcactgtgtactattgcaagaagctgctagacttagtaaagttattattaaattacataaatgttcaggttaaaattcaaataatttatgcatagtagaaaagttaac

SEQ ID NO: 541409 - DNA, 627 bp, Homo sapiens
ctgagtagttctcattacacctctctcccatttcttttccctgcaattctctgtgatgggtatactgagggtttctcaatctcagcactgccaacactttgggatagctgatttcctattgtgatgagttgtttggtataggatgcccagcagcacctctgacytctacccaccagataccagtggcaccctctcccaaactgtaacaacccaaaatgccttcaacactgccaaacatcccacagggggcaaaacttcctgttatctctatatagtggcctctgaaaaccattcaacttgtagtaaaacaattgatttataattcctacatcaagagaagggtttcttttcccatggtctaataacaatcctaggcctaatgtccataatccaatgtttaatatatttaatcataattaaaataattttacattgataatatttatatagatgggcataagacagggacccaggatgctgtgatagtctacacaaatataatatacctgttttccatgctggatggagactttatgctaatttccatagacttctatcaatttatgtgaaggattctttttatattagttgttaaatttcttcttagaattttgacctttacctaaa

SEQ ID NO: 541410 - DNA, 325 bp, Homo sapiens
agttctcattacacctctctcccatttcttttccctgcaattctctgtgatgggtatactgagggtttctcaatctcagcactgccaacactttgggatagctgatttcctattgtgatgagttgtttggtataggatgcccagcagcacctctgacctctacccaccagataccagtggcaccctctcccaaactgtaacaacccaaaatgccttcaacactgccaaacatcccacagggggcaaaacttcctgttatctctatatagtggcctctgaaaamcattcaacttgtagtaaaacaattgatttataattcctacat

SEQ ID NO: 541411 - DNA, 627 bp, Homo sapiens
ctgagtagttctcattacacctctctcccatttcttttccctgcaattctctgtgatgggtatactgagggtttctcaatctcagcactgccaacactttgggatagctgatttcctattgtgatgagttgtttggtataggatgcccagcagcacctctgacctctacccaccagataccagtggcaccctctcccaaactgtaacaacccaaaatgccttcaacactgccaaacatcccacagggggcaaaacttcctgttatctctatatagtggcctctgaaaaccattcaacttgtagtaaaacaattgatttataattcctacatcaagagaagggtttcttttccmatggtctaataacaatcctaggcctaatgtccataatccaatgtttaatatatttaatcataattaaaataattttacattgataatatttatatagatgggcataagacagggacccaggatgctgtgatagtctacacaaatataatatacctgttttccatgctggatggagactttatgctaatttccatagacttctatcaatttatgtgaaggattctttttatattagttgttaaatttcttcttagaattttgacctttacctaaa

SEQ ID NO: 541412 - DNA, 635 bp, Homo sapiens
catatgttctgtatgtgtatttatggaagaaagagctggtgaattctgaacatttatgattttcatacaggcaccaatttattcctcgttgctgctcatgaacttggccactccctggggctctttcactcagccaacactgaagctttgatgtacccactctacaactcattcacagagctcgcccagttccgcctttcgcaagatgatgtgaatggcattcagtctctctacggtgagtgatgctggaaaaattaggcattgcagmtctacaatgacagtcctccagaaagctttccagtgctacctaaagtatttctgatttggcctgaagcactttgagaatgtttgaaaggcacacaaattgacagatgcatcacatttttttttaatgtttgcatccccaaatctgtttcctttaggacctccccctgcctctactgaggaacccctggtgcccacaaaatctgttccttcgggatctgagatgccagccaagtgtgatcctgctttgtccttcgatgccatcagcactctgaggggagaatatctgttctttaaagacaggtcagaccagaaaattatattttcctatctattcttttgatgtacagtgcttagaaagaaaaacagaa

SEQ ID NO: 541413 - DNA, 568 bp, Homo sapiens
atgggattttattgtcctaactcactagaatttgaatgaattccgatagtgttcacaagaagcacagattggaattggtgactgtgaaatatctcaaaggaagtgtccaataagcaactgatctattggtatgaaacttaagagagagaggtctaggtgagaaattcaggttaaaagtttaccaacaattataagaaataactaaaactgatctataaataaactataacatatagatacaaatatataagacacagaaagggcagtgaatcagagttatctactcatttattcattcattcattcactcrctcattcagggagtatttattaaggactggctgtgaactggacattattaggttggaattaaaaccaagccttcctctttaccacaacaatgcactataattatttttaaaatcaatggcttcaagtaaaatgtcttggatttattttttcaataggaaatgagttctgggccatcagaggaaatgaggtacaagcaggttatccaagaggcatccataccctgggttttcctccaaccataaggaaaattgatgca

SEQ ID NO: 541414 - DNA, 518 bp, Homo sapiens
agacatacctgagaccaggtaatttaaaaaggaaagagatttaattgattcatagttccacatggctggggaggcctcacaatcctggcagaaggcgaatgaggagcaaagtcagggtcttacatggtactaggtaagagagcatgtgcaggggaactcccccttttgaaaaccatcacatcttgtgagacttattcactatcacaagaatagcacgggaaaagacccgtccccatgatttaattacttcccacgggaccactcccaagacatgtgagaattatgggacctacaattcaagatgagatttgggtggggacacwgcaaaaccgtatcaaaccacttcagcatacatagtcactaggatttccctcagacttgcaaagcgaaagaactcttactgaaagaagggacacttacccttaaagggacacttaccctcaaaagtactaagtgccactttttctattctattgcatgtaacctaacatttcccctgttgagcaagtttctacaaa

SEQ ID NO: 541415 - DNA, 518 bp, Homo sapiens
agacatacctgagaccaggtaatttaaaaaggaaagagatttaattgattcatagttccacatggctggggaggcctcacaatcctggcagaaggcgaatgaggagcaaagtcagggtcttacatggtactaggtaagagagcatgtgcaggggaactcccccttttgaaaaccatcacatcttgtgagacttattcactatcacaagaatagcacgggaaaagacccgtccccatgatttaattacttcccacgggaccactcccaagacatgtgagaattatgggacctacaattcaagatgagatttgggtggggacactgcaaaacygtatcaaaccacttcagcatacatagtcactaggatttccctcagacttgcaaagcgaaagaactcttactgaaagaagggacacttacccttaaagggacacttaccctcaaaagtactaagtgccactttttctattctattgcatgtaacctaacatttcccctgttgagcaagtttctacaaa

SEQ ID NO: 541416 - DNA, 649 bp, Homo sapiens
acatatgttgtattagacgatcttccatgaatacctaactggaaattccaagattcagggccatgtgaatctaggctggctgcttaaccaaaacttaatttaatttttttcgtttattttaggaaaaaaaattaacgaaaagatgtttcaagcaaccagtttccaatccacgtcagcaactatgacatttaatgaaacactrtgagcatttagcatgagagctctggactcagatgcagggagctttgctagagaagggaggaaaaagcaggcatgatgtggcgggttgtgggggactccaaggctctatttccaacttccatcagagaacttctgttttcacctggttttcaaatttgctttccaaaagggatttggtttaagtaaaggatacagaggtttataaaagtttgaaaacttctacattgcaggatgtgcaggctcttgccagatgggacagtgtatgagactcttccagggtgacgtcttaggcaatttcctgtccaatcacagatggtcacatgctgctttcctgagttaacctattaactcacccttgtttcccaggcctcagtggagctaggcttgtcacgtcttcacagtgactagattccctcacagtcgagtatatctgccactccttgacttt

SEQ ID NO: 541417 - DNA, 649 bp, Homo sapiens
acatatgttgtattagacgatcttccatgaatacctaactggaaattccaagattcagggccatgtgaatctaggctggctgcttaaccaaaacttaatttaatttttttcgtttattttaggaaaaaaaattaacgaaaagatgtttcaagcaaccagtttccaatccacgtcagcaactatgacatttaatgaaacactatgagcatttagcatgagagctctggactcagatgcagggagctttgctagagaagggaggaaaaagcaggcatgatgtggcgggttgtgggggactccaaggctctatttccaacttccatcagagaacttctgttttcacctggttttcaaatttgctttccaaaagggatttkgtttaagtaaaggatacagaggtttataaaagtttgaaaacttctacattgcaggatgtgcaggctcttgccagatgggacagtgtatgagactcttccagggtgacgtcttaggcaatttcctgtccaatcacagatggtcacatgctgctttcctgagttaacctattaactcacccttgtttcccaggcctcagtggagctaggcttgtcacgtcttcacagtgactagattccctcacagtcgagtatatctgccactccttgacttt

SEQ ID NO: 541418 - DNA, 374 bp, Homo sapiens
tggacatgtgttctgggtctatcatttctaattctgggaaagagcacatgacaggctctgctttattcttgtgttcatctctaatccaatyaactagagccatactggtgaggttgctggtacaaacattattgtctaggtctgccatatccatggggactttggaggacatgtcagagaaggaaaaacaaataggcatgcataacaaacatatcattcacaatattctaggcagtgggtacagcgaccttgagggctggagaaagaagagagcttggtacatatagggaaattcaagtggttcagaatggctggagtgtagcatttggggtaggagataataagagatgagatggatcagtaaccagggctgg

SEQ ID NO: 541419 - DNA, 374 bp, Homo sapiens
tggacatgtgttctgggtctatcatttctaattctgggaaagagcacatgacaggctctgctttattcttgtgttcatctctaatccaatcaactagagccatactggtgaggttgctggtacaaacattattgtctaggtctgccatatccatggggactttggaggacatgtcagagaaggaaaaacaaataggcatgcataacaaacatatcattcacaatattctaggcagtgggtacagcgaccttgagggctggagaaagaagagagcttggtacatatagggaamttcaagtggttcagaatggctggagtgtagcatttggggtaggagataataagagatgagatggatcagtaaccagggctgg

SEQ ID NO: 541420 - DNA, 607 bp, Homo sapiens
acagtttttcctagagcctgctctacaatgtcacaacccctctagattttttgccttaggtatgtcaggacacataaaatgtctaggtggtagaaataagcatcctgtttgcagggctcatgaggagggcaagtggtagattctctgcagttctggaacccattgtgaaccccaagccatggagactctagtctactggctgagcatgctcagcccataaagtgcccaaattatgagaacaacttgcccttgaaacaacaacacacataagataaaataactgacaaatcgtctttattaaataagcaaatagtctacacagatacagtcacttgtctgttgcacacgagtgcttccccttctcttgggaaagatcactctatgtgacaaggtgcaagctaagcagcagcccatttgaatgccctgtaataacataaaaatgaccggcaagatacagattcacrctcaagttcccttgagtgtgactcgagtcacagcacaggcaggagaaaacgaacattcaattcacagagacttaggtgaagaattattagcttcatttaaagtgcccatattgtgccttctacatatctctttcaacaattaa

SEQ ID NO: 541421 - DNA, 605 bp, Homo sapiens
gtactaataataacagcatgaattatgagtgcttactatttgctggtaactctcctaagttcttattatctttgtattacctcagaaaagcaagtatgaatgaaatatagtttatgaaaacaattttttttatgtcattgaattttccatttgtgcaatcttttgcaaattatttaattgcatatttgcttttggtaatttattgcctaaaatatattattaactgcaataaggaatctactataaaaaatagatgtatctttacaaagaagaccttataagtagtagccaataactcttttaaaaaatctttgtgtcaagacacwttctttctgcatttgtaagcttactaaactcaaattgcatgaataactcattttacagagtgatctggcactgttagaaaaaaagtacacaaacagaattgtataaattcacaattaaagcacaccaggctccatagctttaaatgaatggagttggagaaagaaaaaaccattaccatttgacaccatggttcaaatgtcatttttttctttcaaaaatgacctaccggtagttattggccaaaccctcttttgaagtctttgactcccatcaccagt

SEQ ID NO: 541422 - DNA, 462 bp, Homo sapiens
catttagttttagaacaatcctgtaagataaatgcagtagtttctattacaaatgtaaagagctgaataccagaaatacaaagtggatataagagtagatctccattaccctatatattatccatatcatatactgatgcatgattttcttaggttattttaggaatctgttatgggaaagggggtgaaacgcagatgatgtcattctcacaataagtaagacttcttacataagagtcaagataaatacttatactaaaagtcatgctaagacaagtaggaaaataaaagatctctatttacatgaatgtattctctctctctctctctctctctcwcacacacacacacacacacacacacacacaggtgcaaactcagatggtcccagccaaggataataggttctggcacatggccagtccttaaaagaatttatacagcacaaaaaaaatgtcttgg

SEQ ID NO: 541423 - DNA, 544 bp, Homo sapiens
actccttcatttattgattcagtatcttagtgtaaaattactgaagtactaccaactgccatgcactgsgttactatcctaagcactatgaggaattatataatgaacttaacatacatctttatcttcagccaacaacacttgtgacattcatttagaagccttctgaagagtgatattccaaacaaaatgcagatgaaaagatgtgaatgcctttagtctgttgattctttattggcagaaaatgtttcattttttgtggacttcctgaaataccatcctagaactacaggaacaagttctttatactggaaaaaggaaactaaagagaacgtttctctctttcctaattacagcatggtagaagcagtaatagttaaataaaatacttaatgacagttttttttctcagttatcaagaatgaagtatatctctgatctatattgaaatgatattttccattagaaactttgtgcatctgactggtggtagttattattttcatcaaaattattcttacaatcattttcaaatgagagattt

SEQ ID NO: 541424 - DNA, 544 bp, Homo sapiens
actccttcatttattgattcagtatcttagtgtaaaattactgaagtactaccaactgccatgcactgcgttactatcctaagcactatgaggaattatataatgaacttaacatacatctttatcttcagccaacaacacttgtgacattcatttagaagccttctgaagagtgatattccaaacaaaatgcagatgaaaagatgtgaatgcctttagtctgttgattctttattggcagaaaatgtttcattttttgtgracttcctgaaataccatcctagaactacaggaacaagttctttatactggaaaaaggaaactaaagagaacgtttctctctttcctaattacagcatggtagaagcagtaatagttaaataaaatacttaatgacagttttttttctcagttatcaagaatgaagtatatctctgatctatattgaaatgatattttccattagaaactttgtgcatctgactggtggtagttattattttcatcaaaattattcttacaatcattttcaaatgagagattt

SEQ ID NO: 541425 - DNA, 614 bp, Homo sapiens
tggtaggctccagccttgacaattggtatgaattgattggtattcaaattaggacaaaatcttaatgttttccctgtttgaaaaatggggcgggaggaggagttcactttgtaaaaataatattttatctgtaggtatcaaattgatggttaagagagggaaattattattaaattttcagagaaggggaaatatgatgttattttatattgctctgttattattacttgaactgcattaccagatattcattgaataaccatatataataaattgatcagatagcatatctgggtataaatgaggacaataaatataaaagcagtgattttttaaaatattttattggactaggatttaaggccaaacttgtgtaaaacatctctttattccagttcagtcgaatctggtggcaatattaaaatggyttcagggtttgacttgcccccgtccattagtagcaaatgaatacagagtagctagttacagacaagagaaacagcctctgacacagataagatgttcccaatttttcacttatctttttagtggaaagcacacttatcttttgttccttctcttgttagtgtatttgttttaacaagacaaggaac

SEQ ID NO: 541426 - DNA, 531 bp, Homo sapiens
tttcagcacttgcttttcactctatagttctaggaccctatccaaaccatatctcttgtagggcactcagtttgctaatcaataaaattggggagagatgcatataaagtgatctaaaatctgtgacctgaaaggatggaactgaaggtcattttttttaayatttggaatagtcagaaaaagaaataataaaaaccggtactaagaatggatattcacaagtgaagacattttgaaggtgaagattttgttagacatagaaataatttactaaataaagacactgagtcattcctattagcctatgtgagacagtaacctttttcaacagtttagatatccaaatagaggtatggtatcttatgcaacctgagtttttaataatacctagagagtaagtatttaaatataaatatagaatgatacagagatgaaaagcttgggatcattagccaacaaaagtatttttttacattatcaattctactactacaatggtttacttggagactgtcatagttgatttccccc

SEQ ID NO: 541427 - DNA, 604 bp, Homo sapiens
accaatgttgtagaatatattcttgggcaaggacaattaaagattctctggacttgacaactatgatggctgctgcaatctgtaggatgtaaatcatttgacattttctaaatatcagttctcatttctaatratatgattgaaaaatggtatataggttgtatcagacatgtgaagggtacccagcaaaactcaaatcttgaaattccaaataaaatatctacaaatgtataagaagaatgattacatattggggctctgggcatggaaagaggaagaaccatatggctgctttcctcacctgaatccttcatccaaagactttccagaaattgacatctccctcagaaatggtcatcaaaaccataaccaaagaaagaaaaaagaaaagaaaaaaaaaagaaaaacctcacagagaaacaagagtatatagctgctagtcaaagtaaatgtatgcttgtatgagatcttacagcttcacgttttttaggacagttttaattatcacccaacgtattagtttcacagttcaactcagcatgataaaccctgtgggataattttactacaaaatggcctattttccatacacacaatttgatta

SEQ ID NO: 541428 - DNA, 614 bp, Homo sapiens
ctgatttcttgttattaagggtatacctctgaagactgtaaatcattatttatatattacattacatatcattaaatgcttgagaccgtggttttacatttctataacatgatctccacttacttattaatacataatatttataaagtgccttctttctgttaaataatgtataataattatttaatgtaagactcacaataaccctgtaaggtaggtataattactacctatgttactacctctagaaatcgaagtttagaggtcaagaatcttctccaaagtatcaaacctacaataaatggcagaaccaggacatgaatccaactatatttggctccaaagcccaaacttaataaacaaataatgaggtctccccacaaaaaaaamcaagtgaattggttattcaaacctcatgcattgatggcaaagcattttggagattctgctttccattaaattcttatgtaacgtacataaattcatcagaaagcatacaaacaaatcaagtaaatataggaaactctgtttcctagcatcatttagataagggtttctcaacctgagcactattgacattttggagtggataatcttttgttgtgggcggatgt

SEQ ID NO: 541429 - DNA, 614 bp, Homo sapiens
ctgatttcttgttattaagggtatacctctgaagactgtaaatcattatttatatattacattacatatcattaaatgcttgagaccgtggttttacatttctataacatgatctccacttacttattaatacataatatttataaagtgccttctttctgttaaataatgtataataattatttaatgtaagactcacaataaccctgtaaggtaggtataattactacctatgttactacctctagaaatcgaagtttagaggtcaagaatcttctccaaagtatcaaacctacaataaatggcagaaccaggacatgaatccaactatatttggctccaaagcccaaacttaataaacaaataatgaggtctccccacaaaaaaaaacaagtgaattggttattcaaacctcatgcattgatkgcaaagcattttggagattctgctttccattaaattcttatgtaacgtacataaattcatcagaaagcatacaaacaaatcaagtaaatataggaaactctgtttcctagcatcatttagataagggtttctcaacctgagcactattgacattttggagtggataatcttttgttgtgggcggatgt

SEQ ID NO: 541430 - DNA, 615 bp, Homo sapiens
taaaaaaaatgggatacatgtgcagaatgtgcaggtttgttacatatgtctatgtgtgccatggtggttttccttctgcacctattgctttttttctaacttgtgcaatttattcatcatattcactccatgccatgtactgctataacccatcccccaatttgaaaatagtgaaactaaggtacataaatttaagtaacttgcctaaggtcacacaagtagtaagccacaaagctgagattcaaacccaggcaatttgaagccagagcctgtacttccaacatactacaactcactggaaaccacagtaaaataatcccataatgtttattgtttagccacaccacagagtaaagcagctcataacaaaggaaacacggtaaattttagtgccaaacaaatcaaatctctctcttttgcgtatgtatgtatatatatttccattatttttgccttttacatatatggtaaatggtatatatatatatatacacacacacacacacacacacatatatatgaatgaaatatatgtycccttattgagaaaatgggggatgggttatggcagtacatgttctagaatacagtatagtgacttcattgcacaaacta

SEQ ID NO: 541431 - DNA, 605 bp, Homo sapiens
agtgataattcacattgtaccttttcaaaaaaaaaaagtctttaagtctttctaaccacaatgcatacattaatttttctttcaagtaaaaatgatgagaaagtgctatctcctaccatactacatgcagtagcaaagagttaacacatatttcccgtttkgtcacacaggccattaaaaaaaaagtgtacttaagggatgagatttaataaaatcagtaatttttactgcgttgttaagtacactggcataagagaaatggactttttttctttaatttaactgtgagtgtctggtagggtagaatacagtgggtacgaatgcagttttaattataagcattgccctgcttgatgcctgcaaaggcaccagaatttttatccttcataacttctgcatcattagtgcaaatgccaacacactgaaaaaggtaaataatgtcttaatattatggaaatagttttgacctcacagcccttggatgtttgtggaccacacttttagaattcctgctttggggtaaggagcaggattctgttttcagttatctgagtcaaaggtcctcagaggaaataactgagaaactaggtagatgactgcatgct

SEQ ID NO: 541432 - DNA, 611 bp, Homo sapiens
actctggtttgatgggatggatgttccctgaaaagtttacgtcggtgcaaaagtaattgccatttcaatggcaaaagccgcaattacttttgcaccatctaaatatttaataggttggttgacttgtaaattatctgccttagatgtttacttttgtgtattgctgacattttctkgagacattattggcattttgtgtgtaatccttaaaaaagaaaaacaactatgttcttgaaaatttaaagaatcttaatgttgtttgtggtcattttgggcagagaatgcctagagttgccagaattgcctaagtcaaaattcagcctgcaaatttagggttagcagatatagcagatacagaaacatcatgatcagaaaagtgataacatgatttttgaaaagaaaaccatacgaataatgccataatggcttggaataatgtagatttgaatgtttaacttcattttaaatactacctcaaaaggatctacccatgacagggatgaatatgcttgaagaatgtcttaatttatgtgtttgtgatgtttgatttgcagtttcctaccgcatttgaattcaatgagtattttctcattaccattttggaccaccta

SEQ ID NO: 541433 - DNA, 617 bp, Homo sapiens
cccgctgctgccgctgctgagagcagagcatgctaaaccaggactcagcaggcagtgactgtctgaggccctgggcaggtcacttaagctatctgggccaggctcttgtcttgaccagggccccccagtgaccgtaaygaggaagggtttggataagaatgtgtcaattgtttccattacttctctgcatggggaaaaaggggcccataagacaaaaacatcggaaacacagaaaacattagatctctaattttaatagttgagaggaaggttataaaataaaacagacaacacagagcttcatgacggcctcggattggcagtcaacccagggatacagaaatgtaaacaaaaacagagcttccagataacattactgtgtgctatgtgactttcagaatacagcagcgtcccagacactctaaagtcaagtgaaacaagagattttagaatcaatctatacacatttcagagggcagtccaggaaggagccttcctctcaggtcagcccagggctgggcctgagcctgagcccggggacgtgtagacactacccattttgggcaggggaggccaaagtggttctgcttcaggtggggtttggctttaaggggctg

SEQ ID NO: 541434 - DNA, 579 bp, Homo sapiens
gcctacatttatagagtgctcaataagtgttagctgttattaagaacctattctgtgctagatatatgctaagcacataaacgtcatttcactccatctttataaaaccttgggatatgacttakttctcagattttataggtgaggaaactggggcctccctagaccagactggcagagttgtttccttacagcataagttaatgaaaagacaagtcagcaaactttggaaaataatttggcattatctagtaaagctagagataccaggcctatgaacctctaattcctttctgaggtatatacccaacacatcagcattctcaaaagacttgtacaaaaatgtccatagcaccatcatttgtaacagtcaaacacgggaaataacccaaacccctcttaacagtagaatcgataacttctggatacctggatgatggggtatcacaaaggaacacactggaactatccacaatttggatgactcttaaaaagatgacattgagcaaagagggtcagatacagagagatatgtattggatgattctatttgtatgaaaaatgaaaacaggcaaaaca

SEQ ID NO: 541435 - DNA, 564 bp, Homo sapiens
agtgctcaataagtgttagctgttattaagaacctattctgtgctagatatatgctaagcacataaacgtcatttcactccatctttataaaaccttgggatatgacttagttctcagattttataggtgaggaaactggggcctccctagaccagactggmagagttgtttccttacagcataagttaatgaaaagacaagtcagcaaactttggaaaataatttggcattatctagtaaagctagagataccaggcctatgaacctctaattcctttctgaggtatatacccaacacatcagcattctcaaaagacttgtacaaaaatgtccatagcaccatcatttgtaacagtcaaacacgggaaataacccaaacccctcttaacagtagaatcgataacttctggatacctggatgatggggtatcacaaaggaacacactggaactatccacaatttggatgactcttaaaaagatgacattgagcaaagagggtcagatacagagagatatgtattggatgattctatttgtatgaaaaatgaaaacaggcaaaac

SEQ ID NO: 541436 - DNA, 561 bp, Homo sapiens
tgttcatctgctgcacagcatgctgagccatgcagcctggtcaagtggacatgggcccatatgaggatccatagtccctgttcatacaaggctggctgactcttcagctctgagggagctatttctgcaggcccaaggtgcgctgcagggaaagcaggttgcacatacatgcataaacatggtccttctgcctaaaagrtccctagaccttgtccctgagtgaaggcagcatgtttaatgtagagaaccagcctgcttaccagacacctgaccccacataccagttcattgggaggacagaatttccctctgcccaatggcacagacgatctgagaggacaggggtgagagggagagtgagagaaggaaaggggaagggacatttgttgagcatttactgcaggccaggcactatgctagttgcttcacgtttgtatgaatataacaattgttatattcataaaaatcctatgctgtaaactcattttaacaggtgtggaaactgaagcccaacaagctgaaaacacttgtacaagccacatagccaagaaacactggagg

SEQ ID NO: 541437 - DNA, 634 bp, Homo sapiens
gggacttcagcagtctatgacaacatcttagaatgctcactacccagtgcatatttgatgtacatattaaatggttgatattattgatataacagttcatatctcttcaaaccatatcatgacagaatggcagttataccactgaggcaaaactgttaaatgtatactcttgtccttttcacaactaaaactgtttctgtttttcttttctgacaggaaaaagagaataaatttgccagatcaatgtctgcataccacgtgcctgagggcatgtcatctgcttgagcacagatgtcacatgtggtgtggtggctacaattagcactactacttgatttcagtttatgatagcatgctgtcatcttccaagatccatctagtttcttcagggtccaaactggggattaaatggagatatgatgtgaaacatcacccctgtgtcatttagaatctttaggacagtaytaatttccaccactcccagtccccaggatttaatattgttttgattcattaatttggatgaggcaggggagagcatgtgaaagttctccacctggtcttccctcactacgatagctcttatcccacaggttaaaggtccaatgtgatagttgtactgaatatcaaatat

SEQ ID NO: 541438 - DNA, 648 bp, Homo sapiens
ctgccctcataatgtaatatgaaagtatcaatatttatccttttaacttatgaaggggaagcaaatacattagtatttgctaaaagctttcaaaattcttggggtggggatggtatatgaaagcacaaagcagttagttgcaataagttctgatttattagagaaataaacatttactaggcaaagaaccttagaataactggaattcatcaagttaccactctttttttttttgtgaaaagaccaaacaattttggaataactccacatagatgaaacaacgtaaactgccatggctaaagccagaactcttgtaatgtctgttaaagtgacaggtaatttgaaagctgaatgaaccagtgcccattcactgatgtaggtgacaatacaggactctccatgtgtccacatgtcttcactgatgattaggaggtacaacatggagaagagtgttccaacccctaaggtgttatctgggtgctaagataacagttgtctattaaaatcattagggaaatttttaaacaaaataaagttgcctaaatatataattgagaattctcagtgctagcaaatatcagaaaagagagtaaagctatcagtatyaggcccctccaatgtgtggggaacagtgcaggtgacatagac

SEQ ID NO: 541439 - DNA, 630 bp, Homo sapiens
aaataatttgcccaaactcacatagccgtcagtgacagagctaggactcaactgcctctgtcaactcaactcaactcaactccaatgtggcagtgaaaagtagccattgacaacatataaataaatgaaaaggsctgtgttctaataaaactctatttatcaacactgaaatttgaatttcaaataatatttatgtgtcaaaaaatgctaatcttcttttgtcccactctgctgccccaaacattaagaaatgtaaaaaccattcatagtttacactttatacaaagacaggcagtgggtcagattttgcccatcggcaatagttttcaatatgtgtacagatttccataaaagactgatacattctttaaatattgtgtgattatttaaaaggttaacctgtgttaaattgaaaattcactaatgtgttagaagcagtttcctaattatatggataaacagtgttactacccatgtgtgagcacatacacaacccccgaagaatcttttgagaagtcttaatttttttttttttttgagacggagtctcactctattgccccagctgaagtgcaattgtgtgatctcagctcactgcaacctctgtctcccagctttaagcgattctca

SEQ ID NO: 541440 - DNA, 630 bp, Homo sapiens
aaataatttgcccaaactcacatagccgtcagtgacagagctaggactcaactgcctctgtcaactcaactcaactcaactccaatgtggcagtgaaaagtagccattgacaacatataaataaatgaaaagggctgtrttctaataaaactctatttatcaacactgaaatttgaatttcaaataatatttatgtgtcaaaaaatgctaatcttcttttgtcccactctgctgccccaaacattaagaaatgtaaaaaccattcatagtttacactttatacaaagacaggcagtgggtcagattttgcccatcggcaatagttttcaatatgtgtacagatttccataaaagactgatacattctttaaatattgtgtgattatttaaaaggttaacctgtgttaaattgaaaattcactaatgtgttagaagcagtttcctaattatatggataaacagtgttactacccatgtgtgagcacatacacaacccccgaagaatcttttgagaagtcttaatttttttttttttttgagacggagtctcactctattgccccagctgaagtgcaattgtgtgatctcagctcactgcaacctctgtctcccagctttaagcgattctca

SEQ ID NO: 541441 - DNA, 473 bp, Homo sapiens
tgcagttagcagctttaggcatggatgccctggcagtgtgatctgatgatcatcgggctggtacactggagggaaatctttctgctgagagggaggtgagcaaagagtctctgattgtcacattcaacttgttccgtctttggcttctccttccwtccatcctttgatgctgctgtgatcctaggaagtttacaaagcatttagttttatgcaccatggtttcgtaagtgttctcggtggggatgagccttcttggtgatcagggcccttttgtctggcggcattctccccaactcaggcatattactgctcttctgttgctgcctggattttttttttttttgaagccttcattcttgatgtcatgggactgtcaggacaatttgcctgtcttctgaaatcctcatcatgtgagagtcaccatttatgtaagttttacactccttgcctttggtacaacaatactgtctggg

SEQ ID NO: 541442 - DNA, 588 bp, Homo sapiens
ctgtgcagttagcagctttaggcatggatgccctggcagtgtgatctgatgatcatcgggctggtacactggagggaaatctttctgctgagagggaggtgagcaaagagtctctgattgtcacattcaacttgttccgtctttggcttctccttccttccatcctttgatgctgctgtgatcctaggaagtttacaaagcatttagttttatgcacmatggtttcgtaagtgttctcggtggggatgagccttcttggtgatcagggcccttttgtctggcggcattctccccaactcaggcatattactgctcttctgttgctgcctggattttttttttttttgaagccttcattcttgatgtcatgggactgtcaggacaatttgcctgtcttctgaaatcctcatcatgtgagagtcaccatttatgtaagttttacactccttgcctttggtacaacaatactgtctgggaaagcagaagatgctatctgtgttatctgggcccctcctcacagcagagcctgctgggaaggaaatttggttgttaattagactttaacctgggattagaattttaattgga

SEQ ID NO: 541443 - DNA, 588 bp, Homo sapiens
ctgtgcagttagcagctttaggcatggatgccctggcagtgtgatctgatgatcatcgggctggtacactggagggaaatctttctgctgagagggaggtgagcaaagagtctctgattgtcacattcaacttgttccgtctttggcttctccttccttccatcctttgatgctgctgtgatcctaggaagtttacaaagcatttagttttatgcaccatggtttcgtaagtgttctcggtggggatgagccttcttgktgatcagggcccttttgtctggcggcattctccccaactcaggcatattactgctcttctgttgctgcctggattttttttttttttgaagccttcattcttgatgtcatgggactgtcaggacaatttgcctgtcttctgaaatcctcatcatgtgagagtcaccatttatgtaagttttacactccttgcctttggtacaacaatactgtctgggaaagcagaagatgctatctgtgttatctgggcccctcctcacagcagagcctgctgggaaggaaatttggttgttaattagactttaacctgggattagaattttaattgga

SEQ ID NO: 541444 - DNA, 619 bp, Homo sapiens
gaattcactgaatgtctttcctgggggaaatgctgcttttctcctctgtcagggtctctagaaaggtgagggttctgccaggtttaagaaagatgaatttccagttaccttgtgaaggttgatttcaggactctgttctgggtcatactaggaagcctgccatgggcacatggcacgtggttgttgtggccaagtaatgcccatcagataggtaaagacctcctcttcctgggctgcctggggaagtccagtctgaggaaatctgtggccagaatctgagccagagatcagaaaatgagccaggccacagagtgtgcagggatcatagagaaaggagcaagaagagccaaggactgaaaaatgtacaacccaagccacctggagaatgattctgtgctttgtgacacttctgtccaagaaggcagcatggggtggaagcacagagcatggacactggaattggacaatctggctggagttrtgctgccattactagcagttaactgagtaatgagcagttacttggcctctctaaacctgttttcttatctgtagaatgcttacttcatgttgctgtgagaaattaatgagttaatatatgtaaggtacttaaaaccgt

SEQ ID NO: 541445 - DNA, 603 bp, Homo sapiens
acactgtgttagaaactagagattagagtagtcagcaaaacacacacataaacagttcctgccctcataaagtttcttcttgaaaggagaaaagtgtgatattgattatgccacactttttcatgtgcattggttaagcacttttgacccttaggtagagagagccatwgtatctgttgaaagtttttgtgaactagaaagcacttgagcagattctcaaagggatgcctggcttttcattcactcagctccttgtacataagtggaccctcatcatcatcagatgttcgttgagttaaactgatgtgatgtatggagcaaactttttgttcatggattgggactaaagaggaggagaaagtcatatggattggagtctggcttctgtgttgggcaaatgctcaaatgtcgctgtagtcacatgctctgaagtcttgtcttctggctctccaattcaggaaacaaattttaactattcatttacttagaggcattgggctctgaagaactgattcaaaataatttacatttgggtatgcagctattaggtagagtgaatacttatgtacaacaatcatggctatcccgttttggaatcaaatc

SEQ ID NO: 541446 - DNA, 583 bp, Homo sapiens
gtgcacagagactagattcaaattggatcaaataaactaatattggcaatgtaagactatatgctttggcaaatgtaatatatatgcattcaagtgaaaggggaataacaagtccactaagcaaatgctcattcaaatgttttcaagcattaaacacataaccaatcagttagcattagcaaccatttaagaaaaggaggggtgttctaacaattgcatataattaacyacttctagatgtcaaacagtacgagcagagccacagacacagaaggataaaccatcctatcacttcacaagagcctcatcccagagtatgccaccagagaagtgaataacaaaggaatttcctatatcttctaaccgtaacgggtaaaacattaaaaaaaaaaaattcttctaatgcaacaataatgggacaaaaaacaatgtatatttatggtgtattttcaggaactgggagagaaaagccttagaaacacgtcaagaggaaagtctctggattaaaccatctaagtttagcatgacatttcaagctttttgactcctttttttggtttttgaaaacaatcctcagtggcag

SEQ ID NO: 541447 - DNA, 522 bp, Homo sapiens
caccacgatttcacaccctactaagaaccaccctatgtctcaaagtctactgctcaactgtatactacactatacccaagtgtagtaatgtggcacatcaacctttcttggtaggaggttttttaaaaatccaacactgccagatgaaatgtgaatttggactcctgatcattcctttaattatgctatcaatcagccattaccaccctcttcttctatcacagtactatgcttctccttaaaagcactacaaacattaaaatacctatcaaaaattctttatttcattgtattagtggcaaatatatctaaaactgtgactatgttatcagtgagaagtacagcctcagagctgtctatattttctactaaagaactacgttgcatataaggcactttagatgttgaacaaagacacacacttttttcatcaataactgcayattagcaactatgactgactctcatgcttgtagtccaccatacataaacacagcccttgaaatttctgatccaaataca

SEQ ID NO: 541448 - DNA, 593 bp, Homo sapiens
aatcacgcataaaggttgcaaaagtctgcaggtcattaaaaaaaaaaaaatccacgtttgtttttgttttttttttcactagctcctcctacatttagtgctatggcaatactgcccaatggtagtaagtactggttctaaaactaaacgccctgggtatgtaaatcctgactgattccactactctgtgtaactgtgggcaagttacttaagttctctaagtctacccctcttcactcacaggaaggggtagtagcctgtaactcctagctcatagggttactgaagaatgaatggagataatattggtaaagggtggttagcacagtgcctggcacatagaaagcacttaataaatattagtttactattacttctcctgcttcccctattactactaccatcatcacttagtgaacatggcagcgtgaacggaatgtagagctggaggactaacttgcratttttgttaaataagctaatttttaggtccaaggactatgctaaattaatgccaattaatgatttggcacagtaaaaatgtctgacacttatgctattcctccttaattggaagagcttgcccttacctc

SEQ ID NO: 541449 - DNA, 499 bp, Homo sapiens
atcttaaatcaggagggataaaacaggcaagtctcaataaatacatttagtgggagatctaatttacgaygtatacaatcttcatttatctttttcttggaatcctttatcaatgttcatgaggaaaatcatcactaatgagggactaatagagccaatatttaaatttcaacctccaaagggcatttgcctttacaaaacttatgccttgttattaatgcctatgagaaaatatgatcctcacaattctcatataataaaagttttaatagtttagacttgttttcaacattttaagagttgcaattctttcctaaaattatttccttcaatttacctatgaataacatgattataaatataataaaggtattcccaaaagtctttttattgacataatggcatctatcagaagacttagtattacaaagattcatagcattattctcttaaaataaaatgctataaagatatgtgtaaatatgacagagaggggaaa

SEQ ID NO: 541450 - DNA, 499 bp, Homo sapiens
atcttaaatcaggagggataaaacaggcaagtctcaataaatacatttagtgggagatctaatttacgatgtatacaatcttcatttatctttttcttggaatcctttatcaatgttcatgaggaaaatcatcactaatgagggactaatagagccaatatttaaatttcaacctccaaagggcatttgcctttacaaaacttatgccttgttattaatgcctatgagaaaatatgatcctcacaattctcatataataaaagttttaatagtttagacttgttttcaacattttaagagttgcaattctttcctaaaattatttccttcaatttacctatgaataacatgattataaatataataaaggtattcccaaaagtctttttattgacataatggcatctatcagaagacttagtattacaaagattcatagcattattctcttaaaataaaatgctataaagataygtgtaaatatgacagagaggggaaa

SEQ ID NO: 541451 - DNA, 541 bp, Homo sapiens
gcaccacagattaatcaatattatcaatgattaaatgacacgtactatttcacacagaagcaaaatgttctattaacatttaatatttttctttttctttttttctttcttgagacggagtcttgctctgtcacccaggctggagggcagtggcatgatcttggctcactgcaacctctgcctcctgggttcaggcggttctcctgcctcagcctcctgagtagctgagattacagacgtgtgccaccatgcctgtctaatttttatatttttagaagagacagggtttcaccatattggtcaggctggtgtcaaactcctgacgttgtgatctgcctgccttggcctcccaaagtgctgggattacaggcatgagccactgcgcccagcctaatatttaatatttttcttatttacaaaactgataaatgttgactgctggaaattttggaaaacacaaaaagccttccttttytttaatttccacataagtttatgaccgctgttaaatttcactgttttcttctaatgaaaaagtttc

SEQ ID NO: 541452 - DNA, 599 bp, Homo sapiens
ccatttgacttccctttttctggtaactctrtttttttttaaattttgttctgaaatattttagagtttaaaaaacacaaaagaacaatacaatgagcatacttgtacttagcatacttgtacttaataccattataacacaaatcctgatcatgtctgccttctccccttcatcccattgctccagaggccaattaaacaatttaaactatatacatatattaaaacagtaaataataatatttctgaaacaagatttataactgggatgagctttaaatgcaaaggaagtatgtatctacttagatcctataagttcctcagctatgccatataaattttgtttaggatatggacaaggaagatttagaaaggtgtatcgattgaggagttaacatttgggaagaaagggaagaaaattttaataattggtagaagaaaaggggaggacaagtgagggaggacattgctgtaactaagactgttccttcatctaaaagtagcccaagtaaagaagaatatattgaaattaatccaaaaggctctcactaactatattctcacttctgatgttaattttggccttcatcatccatgac

SEQ ID NO: 541453 - DNA, 609 bp, Homo sapiens
ccatttgacttccctttttctggtaactctatttttttttwaattttgttctgaaatattttagagtttaaaaaacacaaaagaacaatacaatgagcatacttgtacttagcatacttgtacttaataccattataacacaaatcctgatcatgtctgccttctccccttcatcccattgctccagaggccaattaaacaatttaaactatatacatatattaaaacagtaaataataatatttctgaaacaagatttataactgggatgagctttaaatgcaaaggaagtatgtatctacttagatcctataagttcctcagctatgccatataaattttgtttaggatatggacaaggaagatttagaaaggtgtatcgattgaggagttaacatttgggaagaaagggaagaaaattttaataattggtagaagaaaaggggaggacaagtgagggaggacattgctgtaactaagactgttccttcatctaaaagtagcccaagtaaagaagaatatattgaaattaatccaaaaggctctcactaactatattctcacttctgatgttaattttggccttcatcatccatgacctctatgact

SEQ ID NO: 541454 - DNA, 564 bp, Homo sapiens
ctgaggtagaaagagctatcaaggatgcctttgaactctggagtgttgcatcacctctcatcttcaccaggatctcacagggagaggcagatatcaacattgctttttaccaaagaggtaggtacaaagcagtcatgctcagttttgctttctttggctaacctgaaacttggcaaggatctaatacaaatgttcttatttcagatcacggtgacaattctccatttgatggacccaatggaatccttgctcatgcctttcagccaggccaaggtattggaggagatgctcattttgatgccgaagaaacatggaccaacacctccgcaagtaagttaatcaagattatgtccacacacagcttctgaattaaccttttacagattagaatacacacacacacacacacacaataaaggtaacataatatttcaaactcacaaaaagtgatcatttgaaatttttgcwacctcatgatactaagtcaatttgggatttttttaaaaaaagaaagaaaaagacatgctgaatctgattactgaccttacttcttaggtcagagat

SEQ ID NO: 541455 - DNA, 542 bp, Homo sapiens
taggttgtctttagtgaactcagtgaacatttaataaatttgaatttcaagcacactttatctattagcaagcccaaaatacattccatctggtttctagttttgctgaaatgtgcagagtttatcatatctagcccagccggccagggctagcgcacagcccaatcccttccagctccaggatttctccctttatctctgcagagaatcacgagccccggagtcggggtagagtgttttgttcacttacccaccataaatcccatcaggaaagatgccagcgcagcagccaagcacatccaaaggtacagacggcccctggattccgccatggcttcttgaggaccgagcttggggcgcctgctacattcgcgagcttcggggctrcagagaaacagagagcgcgctggcaggaggctgtgagctctgggtggcctccgctgaccttcgcaaggccacgcctccgccctacccgctggggacctgtggtccccaggggccctcgatgggggaaaggaagccctgcagagggaggagacatt

SEQ ID NO: 541456 - DNA, 609 bp, Homo sapiens
ctgttcccagaacatatttactggtttatctcatatcgtggcctacttcrtattttacacttttgaaatacagaaaatcattacattctcccaataaaactaggctagtatatgcctccaagcatttgccaatattttgtcttttgttgagaattttcttagcttattttgtcacatggttaactcctatgtcctttcatgactcacgtgtcaagacttcaggaaacattgtctaactcccaggctgggctgagtgacccttttctgggtaaataatgaattctaatcataatcttcatagcacttaccatactaatttgaggtctgaagtattccattgtctgcctcaacttacttaggcaaaggaaccatgccttagtcttattctggcctcaggacttaacaccatgtcgaacacatagtggatactgaataattcactattaacaaatttctacttttacttgaccctacattacaatccacataaaacggtcggattgcaaaatataaaaagtaccaacaatttcacatacctcagtttcatgttcatccacaatcgatatatagttggcatttgtctcattggggtaagataagaggacatca

SEQ ID NO: 541457 - DNA, 609 bp, Homo sapiens
ctgttcccagaacatatttactggtttatctcatatcgtggcctacttcatattttacacttttgaaatacagaaaatcattacattctcccaataaaactaggctagtatatgcctccaagcmtttgccaatattttgtcttttgttgagaattttcttagcttattttgtcacatggttaactcctatgtcctttcatgactcacgtgtcaagacttcaggaaacattgtctaactcccaggctgggctgagtgacccttttctgggtaaataatgaattctaatcataatcttcatagcacttaccatactaatttgaggtctgaagtattccattgtctgcctcaacttacttaggcaaaggaaccatgccttagtcttattctggcctcaggacttaacaccatgtcgaacacatagtggatactgaataattcactattaacaaatttctacttttacttgaccctacattacaatccacataaaacggtcggattgcaaaatataaaaagtaccaacaatttcacatacctcagtttcatgttcatccacaatcgatatatagttggcatttgtctcattggggtaagataagaggacatca

SEQ ID NO: 541458 - DNA, 609 bp, Homo sapiens
ctgttcccagaacatatttactggtttatctcatatcgtggcctacttcatattttacacttttgaaatacagaaaatcattacattctcccaataaaactaggctagtatatgcctccaagcatttgccaatattttgtcttttgttgagaattttcttagcttattttgtcacatggttaactcctatgtcctttcatgactcacgtgtcaagacttcaggaaacattgtctaactcccaggctgggctgagtgacccttttctgggtaaataatgaattctaatcataatcttcatagcacttaccatactaatttgaggtctgaagtattccattgtctgcctcaacttacttaggcaaaggarccatgccttagtcttattctggcctcaggacttaacaccatgtcgaacacatagtggatactgaataattcactattaacaaatttctacttttacttgaccctacattacaatccacataaaacggtcggattgcaaaatataaaaagtaccaacaatttcacatacctcagtttcatgttcatccacaatcgatatatagttggcatttgtctcattggggtaagataagaggacatca

SEQ ID NO: 541459 - DNA, 609 bp, Homo sapiens
ctgttcccagaacatatttactggtttatctcatatcgtggcctacttcatattttacacttttgaaatacagaaaatcattacattctcccaataaaactaggctagtatatgcctccaagcatttgccaatattttgtcttttgttgagaattttcttagcttattttgtcacatggttaactcctatgtcctttcatgactcacgtgtcaagacttcaggaaacattgtctaactcccaggctgggctgagtgacccttttctgggtaaataatgaattctaatcataatcttcatagcacttaccatactaatttgaggtctgaagtattccattgtctgcctcaacttacttaggcaaaggaaccatgccytagtcttattctggcctcaggacttaacaccatgtcgaacacatagtggatactgaataattcactattaacaaatttctacttttacttgaccctacattacaatccacataaaacggtcggattgcaaaatataaaaagtaccaacaatttcacatacctcagtttcatgttcatccacaatcgatatatagttggcatttgtctcattggggtaagataagaggacatca

SEQ ID NO: 541460 - DNA, 635 bp, Homo sapiens
gctgatctcaaatgcttaggggaaaagtttttttaaaaagttcaaacatatgccctatttaacatgtgataacacatattctatattaaatatcctgaatgattatagtgcatgccacacaatcacttgttctgttgctaacaatcagatattgattaaaaatgatwaaaaaaaacaagaattaaaggaaaaattaaattgcaataattactattttactccaaactcatatttcagaccaaatatgctgttctggcagctcgcatttgtcttcaggaaaactaccagtaggaagaacacccaagacatttctaaaccttgtgcttgtctcctttagaaatgatagagttggagggaactgatgcccagagatacgtagtgatctactcagttgggtagtagatagtatgattcatgggtcttaatgcagtatattttctacaacacagtgcttcaaggcaaaagttaaagtgttatactttggtagtgtagcgtggtagtaaagttaactcccttttacaaaagtcttaattgtgtatatttatacttcataaatagcacaccttattgcctctttaagcagaaggaatggaacatatttaaaagttaccttgatgacagagtcattgctatac

SEQ ID NO: 541461 - DNA, 561 bp, Homo sapiens
caaaaaaggtctgtaaatcagtacagacacaaccattcatttttttttcaaatatattctatctgcagttgatgaatcaacagatgtggaactcacagatacagagggctgactatatacatatataaacatgtatataagtgcattaaaayttacaccaaactcaacattgagtttcactgaagagaataaagaactgggtgtagggggcaaggggggaatgctgaagaagcactgctcctttttattttatatgcttctacagagcctgagtttttaaaataatgacaaaatatagatttcttataaataaatagaaaataaatatataaagatagactaataacaacacctgagaggactaacaaacactgtagatacggctttcggcttttgtttgatccatataaataattgatcattgctatttcatttgcatcaatgaagaaacaaacatttgtgtttttattatttataaaaatagctgccatttattgagtgcatccctcttgagctaaatcttctacaggccttaaatctacaggcctattgagtaaaagc

SEQ ID NO: 541462 - DNA, 561 bp, Homo sapiens
caaaaaaggtctgtaaatcagtacagacacaaccattcatttttttttcaaatatattctatctgcagttgatgaatcaacagatgtggaactcacagatacagagggctgactatatacatatataaacatgtatataagtgcattaaaacttacaccaaactcaacattgagtttcactgaagagaataaagaactgggtgtagggggyaaggggggaatgctgaagaagcactgctcctttttattttatatgcttctacagagcctgagtttttaaaataatgacaaaatatagatttcttataaataaatagaaaataaatatataaagatagactaataacaacacctgagaggactaacaaacactgtagatacggctttcggcttttgtttgatccatataaataattgatcattgctatttcatttgcatcaatgaagaaacaaacatttgtgtttttattatttataaaaatagctgccatttattgagtgcatccctcttgagctaaatcttctacaggccttaaatctacaggcctattgagtaaaagc

SEQ ID NO: 541463 - DNA, 561 bp, Homo sapiens
caaaaaaggtctgtaaatcagtacagacacaaccattcatttttttttcaaatatattctatctgcagttgatgaatcaacagatgtggaactcacagatacagagggctgactatatacatatataaacatgtatataagtgcattaaaacttacaccaaactcaacattgagtttcactgaagagaataaagaactgggtgtagggggcaaggggggaatgctgaagaagcactgctcctttttattttatatgcttctacagagcctgagtttttaaaataatgacaaaatatagatttcttataaataaatagaaaataaatatataaagatagactaataacaacacctgagaggactaacaaacactgtagatayggctttcggcttttgtttgatccatataaataattgatcattgctatttcatttgcatcaatgaagaaacaaacatttgtgtttttattatttataaaaatagctgccatttattgagtgcatccctcttgagctaaatcttctacaggccttaaatctacaggcctattgagtaaaagc

SEQ ID NO: 541464 - DNA, 674 bp, Homo sapiens
cattttgcttgaaggtgtgtgcaagtatgcttgtatttttttaaacgataatatggtcacatgagcatatactttattttttaagagtttatagttacccaacacaagttcttattgattccctcattcttaacacctgcacagtatttcattttataattaatggattgtaggtttattcttttaaaatcacttgtgttgttctcatgttttttttttttccactaaaaagtgttgcaatgcacaaaactacaaatataaagagggtcttctctggatctctgttgaaaaactttgaataaaaattacaagttcaaatcacacgtaaaataaacattttaattcatagggcttttatgcaagatgctagtagcagcagcacagttttattaatatccctgaatctctcacaaaatttgactgagccactgggataccagggtatacctatgacaaaacaatgtaacagggtgtcatcatgacttttgtgaggttaaaccacagagacccagggaatcaccaactgtttkggaagaaggaaaggaaaggaaaaaaatctttaatggccctgggaactggaaaaactagaaatacaattgctaacatctatgttcctaaattcagagattcctactaggcaaaaagaacttagcagattaatctgagaacagcag

SEQ ID NO: 541465 - DNA, 620 bp, Homo sapiens
ctgccttccccttctaccagtccagtggcagatcagccctcctaatttayttcacatttgcatatatcacttccagatgaggaacctgagtctcagagagagtgaagaacttgcctagcatctgtggtaggctgaaaagtggccccccaaaagatatctacatcctagtctctacaacctgtggatgttagcttacatggcaaaaaaggttgagggagctctgcagatgtgattatgctgaggatcttgagatgggagcttaccctggatgatatggacaggctctgaatgccattacatgttcataagagggaagcagagagagattctacgagacacagagggcagaagatgatgtgatggtggaagcagagagaaagatttgaagatgctgctacctgtggagatggaggaagggcccatgagccaaggaaagtagctctagaagctggacaagttaaggaaacagattcccccctagagcctctggagggaagtggccctgctggcaccttatcaaactgacaccattgccactgatttcagacttcttgccttcagaactgtaagaggatacatttctgttgttttaaatgactaagtttatggtaatttgctat

SEQ ID NO: 541466 - DNA, 584 bp, Homo sapiens
tgagagcaacagtttgagcaaaagctgcaggtaggaatgatgactgtgaccccccagcctgggctaggatggagtacaaggtggccattagacagacgggtgccaggatgggagatarggggtaggggagaggcttgaggggccagagaggaaaggtctctccttctttcacagcaaccttggaggcttcatgttgaagatatcaacagcacaagatgcaaggtgtatagagccctgatctcagagaaggtctgcccaagagagccacccaagcaggaatatccatgctggacttcgcatgtgcaaaaacatgcccttttactggctcaagccactgagataggagtgtgtttgttatggtaattggcctccccaactaatgtgccaggagctatccacgtaaggactcaattattaatttagcacttcctaacaactctcaggggccctcagagcctgcctcagaggcctcacccttatgtggggaaggcagcctcctcccctccatacatgcacagataaaggcagcagaggatggcaggatgtgtcaggcatggtagagagggtcagaggccctcaagtaa

SEQ ID NO: 541467 - DNA, 637 bp, Homo sapiens
ggaagttgccctgggtgaatcaaggagtgagtggtgactgaatgtgaaggcctaggacattactgtaccctactgtacacttcataaacactgtacacttaggctacactaaatttataaaaaataaagtaattgtgctatgatgttacaatggctacaacatcacttggcaataggaatttttcagctccgttataatcttatgggatgggatggctattgtatatgtggtcctttgttgaccaaaacattgttataggacacatgactttattgtcttagatcaatggttttccaactttagcatgcataacaattgcctggagagcttgttaaaacagaatactgggcctcacacccagagtgtctgattcagtaggactgtgatcaggactgagaatttatattcctgagaatttatattcctgagaagttccctggacactgatgctacagatcctggaaccatactcagagaattataggatacttaaacgggctatggtatttattacatcactctcaaatatcaatgtattttttatgggaagttaacayttacatgggcaagagaaataactcctattgtatcctaatatggtaacaaaaatttatattagctgattcaaaaactagc

SEQ ID NO: 541468 - DNA, 632 bp, Homo sapiens
gagaataaattagaaaggaggaggcaggccagagtttgtttgcaaacaattctagtgtgaaaaatgaccttaatgcaataatgtgtgtaataggagttaagtcctccttgctttcaaggacagcttttgctaaactccttgaattcaggtattttgctttccttatttctaaatctttagctgagcaagcaagtratggacacacagtacatttgtagtaatagtagtcgtaggttggagcaagagtaattgcaattaccaacctatagtagtagtagtagtagtagtagtagtagtagtagtagtaagtaggtagtagtaatagttgtagacagatagaaagttggggactggaatttatttctacctagtctgatacatctatgtgaaagaatttgacttgagatagactccaagggatatgttgagtgaaattcatgggtacaaatttctgaggtattttattaaactgtggaaatcattgagaattcattctctttattcctttcctatcttccccagattagtatgagactgcattcccagggaaggggataggctctgtagactgagactttccatgaatgtgctttcaagttacacacttgcaggagcttgggaataatctagta

SEQ ID NO: 541469 - DNA, 577 bp, Homo sapiens
gcaggccagagtttgtttgcaaacaattctagtgtgaaaaatgaccttaatgcaataatgtgtgtaataggagttaagtcctccttgctttcaaggacagcttttgctaaactccttgaattcaggtattttgctttccttatttctaaatctttagctgagcaagcaagtgatggacacacagtacatttgtagtaatagtagtcgtaggttggagcaagagtaattgcaattaccaacctatartagtagtagtagtagtagtagtagtagtagtagtagtaagtaggtagtagtaatagttgtagacagatagaaagttggggactggaatttatttctacctagtctgatacatctatgtgaaagaatttgacttgagatagactccaagggatatgttgagtgaaattcatgggtacaaatttctgaggtattttattaaactgtggaaatcattgagaattcattctctttattcctttcctatcttccccagattagtatgagactgcattcccagggaaggggataggctctgtagactgagactttccatgaatgtgctttcaagtta

SEQ ID NO: 541470 - DNA, 573 bp, Homo sapiens
ttccttttctgtatcaaagatactaattaatatgaccctaattcacctggagacacataggatggtagaataaagtcacctcaggatcacaccaatctgaatatttcttagacaagaaaagccttaaagaactagattacacaggacacctcagaggaaagtctaggcttactaaaaacacagatggtcgccaagaatacgaattcacgcttattatcctaccaacttccacgtgaagagattcatgctgactaaatataagttatttgctaattttaattattcaaagtgattatttttcaagccacacttattccaaaacctctcttgacctgcttkctgtaagatggataagttttatttgccttgatattctgagtgtccactacaacattgttcctgaataagtaataacacgtatgtatattcttatacactagagaagcttcagagttatcggactaaagatttttaaaatgcctttacataaaaagcaggcaaaacagcattttcactagtacacaaatatccaagtgcttaaaacatgtggttcagaaagtaagcatcactgca

SEQ ID NO: 541471 - DNA, 573 bp, Homo sapiens
ttccttttctgtatcaaagatactaattaatatgaccctaattcacctggagacacataggatggtagaataaagtcacctcaggatcacaccaatctgaatatttcttagacaagaaaagccttaaagaactagattacacaggacacctcagaggaaagtctaggcttactaaaaacacagatggtcgccaagaatacgaattcacgcttattatcctaccaacttccacgtgaagagattcatgctgactaaatataagttatttgctaattttaattattcaaagtgattatttttcaagccacacttattccaaaacctctcttgacctgctttctgtaagatggataagttttatttgccttgatattctgagtgtccactacaacattgttcctgaataagtaataacacgtatgtatattcttatacactagagaagcttcagagttatyggactaaagatttttaaaatgcctttacataaaaagcaggcaaaacagcattttcactagtacacaaatatccaagtgcttaaaacatgtggttcagaaagtaagcatcactgca

SEQ ID NO: 541472 - DNA, 643 bp, Homo sapiens
gtacaaagtgtgagagtatctaccatggaaaagggatttcacatccaaataaactaaatgtctcaatcagttgacaccttccagcctctgacatctgccacctcagtgctagtacactaggcttatgaacaaaatagcaatggtgtcaagaacagaagttacacatggccccacagggatgtgttttcattcaccaaggttgccgtaactactctgctgctgaacatccagacttccagccaaaaggaacaatgctgaacctttgaaatgccaccatttcttcaggaaaccaaccagctctgttgtggcaagttgattacattaaaccattttgctctgamgtgtcagtaattcatcttgaatatatgtaacacaggattgtttctgcttttcctgcttcccagatctcagtcagcaccactctcagataacttaaaacatgtttgatccataagtacatgacactacataacctcatgtattagtccattatcagattgctataaagaaatacctaagactgggtaatttataaagaaaagaggtttagttagctcatggttccacaggctgtacagcaaatatgattctggccagaggaggcctcagaaaacttagaatcatggcagaaggcaaaagggaa

SEQ ID NO: 541473 - DNA, 545 bp, Homo sapiens
agccatgttagtgtgttgcaatccagaagccactgactttagccccaagaacaccaaggacttctacatcttagcatgtaggtataattccacctgcttgaataggaaaagcaagcattttctgcggttattgcttttattcctggtttcagggcagttggcttttgtttttaacacctgtatcaaggtataatttacataccaccaaatccagccattgtaagtctacagtctatagttctatgattttagtgactctatagaactgtacaattgctaccagttttagttttttccatcaccccaaacaggcatcacattttgatcatgcctgtttatggttattccctgttctcacttcctgtcttaggaaaccactgatgtacattctgtctctrtaaatttgccttttgatcctttgggccttttgtggaatttcatgtaaatgtaatatgtagtcttttgtgtcagccttctttaacttgtgtttttgagtttcctctgtgttgtagcatgtattcatagtttgtctctttcaactgtgc

SEQ ID NO: 541474 - DNA, 656 bp, Homo sapiens
ctactaaaaatacaaaaattagcctggcatgggagcacatgctggtaatctcatgtatttgggaagctgaggcaggaggattgcttgaacctgggaggcagaggttggagtgagccgagaytgtgccactgcactccagcctgggtgacaaagcacgactccacctaaaaaaaaaaaaaaaaagagagagagagaaggcaaaaaaaagaagatatggaactgtaaaagagggaccaaccagtaggaattctcatcagagagggatgcagtttttaccacagagagggatgcagctctgagacaggggaggggaaggaaataccctgaattctctcttctacattgccatcccctattgccttccattaacccagctggatgccagacaggaagggatctcaactgctaccctctgcatgagtttgccttcttgggctcagagcagggcagagaattgtcgagagactggatcttgagcgggtgagaatagagaggcacaggagatatcaccatgggatataatcatgcctctgattttctcactgatcagaccacacctagagcactgtgctcaattctggccattaccttctaacatggtcattgacatacaaacctatttaataccaatgatcatgaacagatactgtaggaac

SEQ ID NO: 541475 - DNA, 664 bp, Homo sapiens
tgtgaatttgacagcttacaaagaaagcagaaagaagttgaattctggaagcttagagtgggaatctgggtcatagcttctgtctcaagtttttattttcctctaggaagaatagccagaggaaaaaaatgaggaagactccaatatttttaagaagattaaaaaagtgattttttcattatgsaaatctcaaaccattttaaaaaataataaaagcttggaatattccaaaaaatttaacaccaaaatcactgtttttgtcattttctatggtctctctgaagtttctccctcttcagcaatgatgtagttaagtaactaatacaagataatatggtatgtctattttcaagagccccctcttattttacaggactttgtccatagaaaagctatgattaagcgttgtgtattttgtagaaaggctctgagatttaaacaccaactatcagcaacatggggactgaatcatttagtgctaaatcacatacatctgtaatcttttggaaattaagcaaaatacttatatattaaatattatgtttgctgagacaaattcaattcagtagtatttggaattagtttcaaatgaaacatttagtagcaggcctttggaagaaccacaggactaaattgaacaatttttacccagtgtcttaagagt

SEQ ID NO: 541476 - DNA, 550 bp, Homo sapiens
tgaggcttaacagaagagaaacttacaaaatgatttgggaagagattgcagttctctgatgttttgctgagtggaagaaatagaaatagagtttggggctactgaggtggccagaatttgtgggacagggtactggagaagagaatactgtacagagcaggaactttaaaaatatgcagagagaacccattgggtctttgaaaactaagctgcatatatgcagggtaagactacacaaggcctaaaagagaagagttcctggtgagctgagaactgaacaatgattccagaggtcacacagtgcttggagatgttgacattccaaccatttaaagtgaagaaatcccatcgaaaactcagagaatttaactgagatgttaaaaagaccacattttagaattaaggatcattgcctgaagtaagggcaactctacacccaccctaaaaaggcrtaaaaccaagcctcagtaggatcaagatgatctgctagtagcttaagtgcgtgctaaaataaaactccatgctcttcaaaggaaaatatagtctaagc

SEQ ID NO: 541477 - DNA, 369 bp, Homo sapiens
acagcgttggaatagaaatgccaccactttgtctttctactttcacagaaaagatgtgttggttgagtataacataatatcaggaagaattcattcaattccttcattatatctttaccgatcagcctctttatgctttgttttgttcttcaagctgtttagtgtcccaaattctcttcactttgtctgaggtcttgaaaattgtaaaatcctatgaagattcatctgcagaaaaagtttaacttgaaaatctaattatttataagacycacttttgtgaaagaataaaacatgatcatgcttgagtctaaaactctggacatttatagttgcgatcagatttatttccattctatattttttcaaatg

SEQ ID NO: 541478 - DNA, 369 bp, Homo sapiens
acagcgttggaatagaaatgccaccactttgtctttctactttcacagaaaagatgtgttggttgagtataacataatatcaggaagaattcattcaattccttcattatatctttaccgatcagcctctttatgctttgttttgttcttcaagctgtttagtgtcccaaattctcttcactttgtctgaggtcttgaaaattgtaaaatcctatgaagattcatctgcagaaaaagtttaacttgaaaatctaattatttataagaccmacttttgtgaaagaataaaacatgatcatgcttgagtctaaaactctggacatttatagttgcgatcagatttatttccattctatattttttcaaatg

SEQ ID NO: 541479 - DNA, 649 bp, Homo sapiens
tgtacactcactgtgtcctgttcctagtggctggcaagctaaattatttctgatctaatatttttaaccaattagaattttattcattaatttaatcatttattaaattaacattaaataagcctttacaaagagctaggttctctgctagactatagcagaaaactataaagactaaaaaggaaaacaagacagatttcctactcataaggagctctggactgcttgagtttcaacatgtaaatatatataattacaacataagatataattttaatacaaccctctaaaaaacataagttaaacttacaaatctagcaccgaaggstttggaagccttcagagaacagctgatatttgagcttgaaggatgaatagaattttccacaaagtaaaggagaaacctcataaaagaccaaatcaaatatccagaccccacactgaaccacatgaaagcttactccttataaaggagtaaaaagagaatccaacatttatggataaatataaacaaaaattgaaaacaaaataattttccataaaagatttttaaagttgtaaagatttcagaaaaaaaatttccaatataaaatcttcattttctcttttgttcttgatcataagatccagtatgcaagttagagtagat

SEQ ID NO: 541480 - DNA, 649 bp, Homo sapiens
tgtacactcactgtgtcctgttcctagtggctggcaagctaaattatttctgatctaatatttttaaccaattagaattttattcattaatttaatcatttattaaattaacattaaataagcctttacaaagagctaggttctctgctagactatagcagaaaactataaagactaaaaaggaaaacaagacagatttcctactcataaggagctctggactgcttgagtttcaacatgtaaatatatataattacaacataagatataattttaatacaaccctctaaaaaacataagttaaacttacaaatctagcaccgaagggtttggaagccttcagagaacagctgatatttgagcttgaaggatgaatagaattttccasaaagtaaaggagaaacctcataaaagaccaaatcaaatatccagaccccacactgaaccacatgaaagcttactccttataaaggagtaaaaagagaatccaacatttatggataaatataaacaaaaattgaaaacaaaataattttccataaaagatttttaaagttgtaaagatttcagaaaaaaaatttccaatataaaatcttcattttctcttttgttcttgatcataagatccagtatgcaagttagagtagat

SEQ ID NO: 541481 - DNA, 379 bp, Homo sapiens
cctcgcacctgagtctctgctatctcggcctcatgagcccagcacctcccctccttgtggcaggacccagcccctcacactgacctgtctcccactaccctcagtgtcaaaccgagcttatgccacaccgtcccgccccgcctgctgagcgcctgccatgcccaccactctacacggggcctgcctctaggccttggctcctgcaggtccttcagccaracgtgttgtcccctatgagcagccagggtggggccacctgccctacacccaccggggccctgagctccttagggatttgcagaacagaggggagaagtggagattccaggtgcatattagagatagagctgatgaagcctggtgacccagtggacttggt

SEQ ID NO: 541482 - DNA, 498 bp, Homo sapiens
gattcccacacctccaggacccctcgcacctgagtctctgctatctcggcctcatgagcccagcacctcccctccttgtggcaggacccagcccctcacactgacctgtctcccactaccctcagtgtcaaaccgagcttatgccacaccgtcccgccccgcctgctgagcgcctgccatgcccaccactctacacggggcctgcctctaggccttggctcctgcaggtccttcagccagacgtgttgtcccctatgagcagccagggtggggccacctgccctacacccaccggggccctgagctccttagggatttgcagaacagaggggagargtggagattccaggtgcatattagagatagagctgatgaagcctggtgacccagtggacttggtggggggatggtgagggagagagaggcgtcatggccactgtgactctggtgagttcaggggctgctccccacgctggggaagacttggggaggagaggt

SEQ ID NO: 541483 - DNA, 303 bp, Homo sapiens
gggcttgtccctgactttcaggcctctttgtaaatgtttgggagtcatctccatctgggtatcctgtcctgagtggcctcatggccacacccacaatctgctccacgctcagacayccagagccagccccgaggagtccttcttgaccccgtttccctcctcctgcaatccatcacttagttctcattttaactccacacttttccctggtgccacccatgccactccttcaccgctcttgctggctcagtgcagacactgccgtctgtccctagacggctccggcagcctccttcctaccag

SEQ ID NO: 541484 - DNA, 303 bp, Homo sapiens
gggcttgtccctgactttcaggcctctttgtaaatgtttgggagtcatctccatctgggtatcctgtcctgagtggcctcatggccacacccacaatctgctccacgctcagacacccagagccagccccgaggagtccttcttgaccccgtttccctcctcctgcaatccatcactyagttctcattttaactccacacttttccctggtgccacccatgccactccttcaccgctcttgctggctcagtgcagacactgccgtctgtccctagacggctccggcagcctccttcctaccag

SEQ ID NO: 541485 - DNA, 649 bp, Homo sapiens
gaagttacaaacccacccccattccctcatgcttctttttagtaaatccctttccacaaccccagtcccagcaaatactgatctgttctttgtctctataattttgcctttccctgaatattacatcaatttaatcatacacatatgtgacctttgggattgggcttcttccacttaggataaagcattgcaattcactcatgatgtttcatgcatgtagttgctgcagtggataccaactttatataaatggattccgtaagttttgtcaaagaatcttatcctatagtttgaggataaggcatgraagactatatacttaatacattgtctcagattatttggtgactgaggtctttggattgcaccgtgagaagccctgaactaggcaacaggaaacaaactttccttgactaattcagaagagagtttgtaggtagagacaaaggggtacagagtcaacgttcccggcactctatccattctcaaatctaatagaaccttgaaaaagcaaaggattctagtcttattggtcaaggtctcatccactaataagatctcctactttaaagcaggcttttaaaaaaaatcattacatcacagattttgcattcagcaaaatgtgattatctcgacaataaggcagagt

SEQ ID NO: 541486 - DNA, 649 bp, Homo sapiens
gaagttacaaacccacccccattccctcatgcttctttttagtaaatccctttccacaaccccagtcccagcaaatactgatctgttctttgtctctataattttgcctttccctgaatattacatcaatttaatcatacacatatgtgacctttgggattgggcttcttccacttaggataaagcattgcaattcactcatgatgtttcatgcatgtagttgctgcagtggataccaactttatataaatggattccgtaagttttgtcaaagaatcttatcctatagtttgaggataaggcatgaaagactatatacttaatacattgtctcagattatttggtgactgaggtctttggattgcaccgtgagaagccctgaactaggcaacaggaaacaaacttyccttgactaattcagaagagagtttgtaggtagagacaaaggggtacagagtcaacgttcccggcactctatccattctcaaatctaatagaaccttgaaaaagcaaaggattctagtcttattggtcaaggtctcatccactaataagatctcctactttaaagcaggcttttaaaaaaaatcattacatcacagattttgcattcagcaaaatgtgattatctcgacaataaggcagagt

SEQ ID NO: 541487 - DNA, 589 bp, Homo sapiens
cttcacttgctcacctcctgctgtgtggcctggttcctaacagatcatggaccagtattgtctgtggcccaggagttggagacccctgtcctagagtacacagtgaaaaagtttgatagagaggggaacagtggaagattttgttagatatgtcacatgattaatggatgactaaagttttgtttggtgatctaggatgatagagatgttgagacatgaaattagttggcttcaagttctaagctgtcctgtgtgagaaattgyctcatcagccaacacaggctttgacatatgggtagcttcgtgtttcttaggatacttgggctggtcagaaagtgccaagcatcagagaaactgagacctcggtataggtggaggaagtctaatgatagccacagtcagtagcctagtctgatttgtttttagcaaatctagactattttcttaatcagtaactacttctttagtaactacttacaaggcgactgcctttgccaaggtatatgttctctgaaagctgattcttcatagatcactaactgtagttttgaggttctgtgatttccttcaaaattcacagaaccttgag

SEQ ID NO: 541488 - DNA, 621 bp, Homo sapiens
caagtctgttggagtttgctggaggtcmactccagaccctgtttgcctgggttatcagcagcggaggctgcaggacagcgaatactgctgaactgtctgggttttatatgaactccatcccttaccatgctacgttgggtatgttactgtgcctcagttttctcatctatgaaatgtctaaattagtgcctacttcgtaaggtggctgagataattaaataggttactataatttttacagacagggtctcactttgtcacccaggctggattgcagtggcatgatcacaactccctgtagcctcaaactcctgtgctcaagcaattctcccacctcagactcttgggaatacagatgtgtaccccacacctaatttttaaattttttgtaaaaatgcggtcttgctatcttgcccaagctagtctcaaactcctgacctcaggcaatcctctcaactcggccccccaaaatactaggattacaggcatgagcttataaatgagttatcacacataaaggacttataaattcctggcacatagctagcactcgataaaaactggaggaaaaagaataaataaggggagaaatatgatcagatttgtttttaagatgataaa

SEQ ID NO: 541489 - DNA, 621 bp, Homo sapiens
caagtctgttggagtttgctggaggtcaactccagaccctgtttgcctgggttatcagcagcggaggctgcaggacagcgaatactgctgaactgkctgggttttatatgaactccatcccttaccatgctacgttgggtatgttactgtgcctcagttttctcatctatgaaatgtctaaattagtgcctacttcgtaaggtggctgagataattaaataggttactataatttttacagacagggtctcactttgtcacccaggctggattgcagtggcatgatcacaactccctgtagcctcaaactcctgtgctcaagcaattctcccacctcagactcttgggaatacagatgtgtaccccacacctaatttttaaattttttgtaaaaatgcggtcttgctatcttgcccaagctagtctcaaactcctgacctcaggcaatcctctcaactcggccccccaaaatactaggattacaggcatgagcttataaatgagttatcacacataaaggacttataaattcctggcacatagctagcactcgataaaaactggaggaaaaagaataaataaggggagaaatatgatcagatttgtttttaagatgataaa

SEQ ID NO: 541490 - DNA, 621 bp, Homo sapiens
caagtctgttggagtttgctggaggtcaactccagaccctgtttgcctgggttatcagcagcggaggctgcaggacagcgaatactgctgaactgtctgggttttatatgaactccatcccttaccatgctacgttgggtatgttactgtgcctcagttttctcatctatgaaatgtctaaattagtgcctacttcgtaaggtggctgagataattaaataggttactataatttttacagacagggtctcactttgtcacccaggctggattgcagtggcatgatcacaactccctgtagcctcaaactcctgtgctcaagcaattctcccacctcagactcttgggaatacagatgtgtaccccacacctaatttttaaattttttgtaaaaatgcggtcttgctatcttgcccaagctagtctcaaactcctgacctcaggcaatcctctcamctcggccccccaaaatactaggattacaggcatgagcttataaatgagttatcacacataaaggacttataaattcctggcacatagctagcactcgataaaaactggaggaaaaagaataaataaggggagaaatatgatcagatttgtttttaagatgataaa

SEQ ID NO: 541491 - DNA, 621 bp, Homo sapiens
caagtctgttggagtttgctggaggtcaactccagaccctgtttgcctgggttatcagcagcggaggctgcaggacagcgaatactgctgaactgtctgggttttatatgaactccatcccttaccatgctacgttgggtatgttactgtgcctcagttttctcatctatgaaatgtctaaattagtgcctacttcgtaaggtggctgagataattaaataggttactataatttttacagacagggtctcactttgtcacccaggctggattgcagtggcatgatcacaactccctgtagcctcaaactcctgtgctcaagcaattctcccacctcagactcttgggaatacagatgtgtaccccacacctaatttttaaattttttgtaaaaatgcggtcttgctatcttgcccaagctagtctcaaactcctgacctcaggcaatcctctcaactcrgccccccaaaatactaggattacaggcatgagcttataaatgagttatcacacataaaggacttataaattcctggcacatagctagcactcgataaaaactggaggaaaaagaataaataaggggagaaatatgatcagatttgtttttaagatgataaa

SEQ ID NO: 541492 - DNA, 589 bp, Homo sapiens
gagggcaattttcttagcctccctgagcctcattttactcatttgtaaaatgagaataataatcatgcttattttatagtgttgataaattgggacagtgtagaggattaagcatggtccctagcataagtgttcaataaatgttacctctttgtttattccaaaggtgattctgttcttatcaaaattatatgggaattataaggggtragaattcgttacatgtgaaatatttgtttactataccactaacagtgagcctcttgagaatagtgatctctgctgtctctttcctttggaacttcctgcagtccttgtaacaattcatacagaagctgcttgtagcaagatgtcaatcatttagctacaactggtgaaaatgcgcaaattttcacaaaatggttatctgtttctttttcttctaccccaaggtcaccatgtggtcttggttttatgggcgactacatctttagaactaattgatgatgtgcattttttacaaaatcagtaatttttttttttttacaatgggttacctttgacatgagaacattcttgtttctaaaggagagaaaattcacaatcccag

SEQ ID NO: 541493 - DNA, 600 bp, Homo sapiens
atcatcagacacccatagattctgtttatgtttccacagagggtagctgtttctgacccttttgttattttccttgagcaaaagttgtgggatcttagtgaaattataaccacagtctcatccaaggacaccctctgctcaaggagaaccattagaactttcttctgctttatttgaattttaaggggaaaaattgttcttttatctgcttaagaaactataamttaagagggcaaaccagcagaattactagataagggaacatacaatttagaaattttaagttctaaaatcatattgtaccttctgcctctgtgtagatatacagatatcctgggagaaaggactggtttatctcattgaagctaatgacatgtcggttaggggattttaggctatttgtgggatttctccccctaggtttccccataataagtgaaagcgtaatctagtctctcagaataatgatatacatttgttcaacaatgcttggcgagttgggagcagcaggagtgggaaagctaaaaatttacatggtccggagcttgagattggcaagacagaacagtggaagacctggagggggctgaggggactcaa

SEQ ID NO: 541494 - DNA, 490 bp, Homo sapiens
aaaatgtaagaaccatcccgatcctcacagagcttgccaccagctatatccccagtggccacatccgttcccacaggactcacgttctcaaattatgagggcgcaaacaaatccccaaagccatctacaagtccgttggtcagtcacctgctccgctctgatgttgaaagattactagttcaggggagccatgcraatcaacacaatcaacttcactttttgtttcaggcctcagaagattagaacatgagacagcactttaatctggtttggtattgggctgatgtggagagttctgatgaattttctttgttttataaactgaggaaaccttgtcactgacccgtatttcttttctggactcttcttgacagttttcctcatttctatctggttttgcaacaggtctgtgtttgaatctattgagggctgaaatttttcatgctgcattgacaactgtgagcccagaatttagggtgttttgtcaaca

SEQ ID NO: 541495 - DNA, 538 bp, Homo sapiens
tcttgtctacttaactttaccaatgaaagtttcaacatagagattcaccatcaaaactgagcaacaagccggtgaaactgatcaataaaaaacgggcgggggggcggggggaacaaccaagatcctcatgttgattttttgttaagttccytacacgctcatccccacatcataggaatcattgtttcattctcttcctcactttgttcttgcaaatcaaatcccagtcttttggccattgagtccaaatatttgctagagataagcccaccaaggcctaatgttgttttgacgtgaattcatacctctttcatccaaaaaccttcatccttactcataacattcactcaggatgcatttggagttgggaaggtattcattgtaataggtataacaaagctaatgatttacagtaattccactctgatgagtctcaagtgacatcatacagaattataggtggaaaatatctcttatacaccatcaagttcttggataccagtggaggaatttcctccatgtattgttttagtgtttc

SEQ ID NO: 541496 - DNA, 526 bp, Homo sapiens
agtaggtatttgtcctgatttcctcctggagtgtgggtctggctttttgtttttgttttttaacatgtattgactayttcctcactttcacacatatacatatattacttaagtctcaaaacactgctgaaaaataggtatttatatctcagttttaccaaggaagaaactgaatcagagaagttaaggaactcacccagagccacacagtgagaggcagaagcaagcctggtacccagattttctgactccaagtgatattctctttcaaatacatcttcactaagcagccccagactcattcttgttctatgtctttcccatgccacactgaagcatggcagataaatcacttgtctgggcataactttgttcatccagaaggcagctgtgctaagagcctacctctggagtctgagcaaattgggtcttattccttaagtagtaatcctcgaaccttagtctcctcagttgtcacaagaggacaaaaacatcaaccaacaggattgctgtaagggttaaaaga

SEQ ID NO: 541497 - DNA, 527 bp, Homo sapiens
aggagagaggcctggggtcacgcaggagccctgacatctgaaccccttctccagggaagcacccaggcacagagcttgacccccagggtcaggctggaagcgccctgggagatggacagggcctggggatgcagcttccacctcggcaggtgcagctcccatgacctggagtgccggagtctttgctccagccacagcgagagcctgttgtccctatactaccactctttcttgctgttcacacatgcagtcccctgtgtctggagctccttcctgctttccctgcctggagagagcctgcccatccttcagagtccaatgcaaatagtttctcttccaggacaatttcccgacttccctagagagaatctattgctttttcagctccaggggtaccttgtaaccactgctggtgttatacttgtcacactctgtgttgagcacctgcagggtgaaacctaggtattgggtcctcccaatccccrgccccatttagaggctggccaatgaaaggggctgattaaatg

SEQ ID NO: 541498 - DNA, 412 bp, Homo sapiens
taatgggttcttgggagagctgtcattaagacgcagcagctcaaaggaccctgactgtcacagaaaggggcctgtggggatggaaggaggtagggaatggaagggaagggaagggagggctgagcctgggtgtggagatcccatcctcccctcagggctgggagctatggctgtcaagggttattaagcacaggcttaatgacagggttattcagcacaggcagtataatggctagctccggggctagaaacttccttgaccayaccgtggagattggccatgctgctgccttgcctttggggccccaggcctgacctgacccctccaccagtgttcccacctgccctcccccgctcctccagcaatgcccagctccttccctggtggcaaagggtctgtgttgggtgtact

SEQ ID NO: 541499 - DNA, 606 bp, Homo sapiens
tgcggcagctccatccccaagtgcccccatcaatccagtgaatgaacgtgccctaggggaagaccccacccaccccacagagatgggatgtgcactctaacactgtctgccctcccactgtggcctagaggcaaaggtaacaactgaagagacacctgcaaaccagagccacggacagattccagaagctcctcctgagtagttctctgctcccacataacagccctttgtgagcctccactgcagtaagtggagggttagcagcactagggacctgagtgagtggcctgggagccaccagggctcatcccacttctggagggttaagctggctctcctgcagctcaggctggcccaacagccttggcctggagcgaaactacctttgctgtgcacagtcttgggaggccacagcctcaggctgctcctcaggtttttccaaagggccagggcagcccctggtttcctggggatagggcagggcttattctccccmctccctggtctggcccgtgcgtctcaactcagcacttcttgaaaacgcctctctccatcccgtctccttgccacccgccagcagcctccatggttcccattcgacaaggc

SEQ ID NO: 541500 - DNA, 588 bp, Homo sapiens
cagctgcgtccgtcagcagcagacctgacccacatctgggctggctgggcccccagacatcacacaccagcagcagagctacttgtcactcaaaaagcatcaaacaaacatcgatgtcacatctcctgtgtgcccagcactgtgccaagtgctaagaatagaacagtgaacaagacggtgaaaagccctgccctcgaagagatcatgctgcatggcaggttccctaaatggacaaggaaatccatgaattccaagggacttcaaggtgcggcagaggctataaaggagatgagctgctgcgagacagagaatgaggagaccgggtgggcaggggcggtttcctggaggaggtgacattagagatgtgaaggaggaggaaaggagagccagggtactgccaagggtcctgcacaggtttgcttgtctctgtccrctcccccagcagtccacctgcggatccaccacccctgggtggacaggccagcgccgccctgaggctgggcagtgggggcctggtgagaccaggcgcggtggcccctcaccttcagcatctccatgtggaagatgaggggctgggggttctgctgc

SEQ ID NO: 541501 - DNA, 636 bp, Homo sapiens
aactgctaaagtaaaacggtggggaggactattggattgggagatctctaaaatcccattgggattgatgaaaaagagaactatcagcagaaaagaggaagggaacaaatgagttgttagtaccttagttcctaatttatgttcctttattgtagattcttttcttggccactacactccttagaaatataattcaacactgtttctttttccatttttgatgatatgcaaagtccagctttactcagccacattttgtccactggcttatatttaatttatattttaggatacagattccacgtatgtatttattaccataataataatttttcttctgtctattccaattgagttttatttcattttctgaggaaaacttttacatatgtatttattgcataattataattatactagttgccaatttctgaaccattgatttttagttaggwctatgtgtgaactcaactttaagtttttaagttagagcacatgaaatactttgatgccttctagtaataaacttattattaaaactgtaaggcttagttttttattcaaggtttaatttttattaaactttataatgatttacctgtggttatatctgccccagtgaccaagctggaccca

SEQ ID NO: 541502 - DNA, 275 bp, Homo sapiens
accctggggaagggcctagaatgtagcatgttctatacttattctgaaactgtgttttccattgaacattttgctaccaagcccagtctgagaaactgctccatttcctctttgcctttctagggcatatatgctaatgaacatgcttaattctctgtctcacaacctctgctcagggaagtggaagacctttctctttggttacagatggggaaacagatggattcagtgtcttatgcctgggacttkggggagattaactgttagtcttggta

SEQ ID NO: 541503 - DNA, 457 bp, Homo sapiens
ttccaaacattactgatgctcagttaagatcaacagatggaactgatgatgagatcatatttgaaatataaattatctgatatcctgccaaatgaaatactgtggcagtcaggattcatttttatctaaatgaaaaaaaattccccgaagaggaagaaagagggcatgttaattactatataattattctggtatatctattgctccatttagtctttccttttgtaatgcgtgccagtaattatcttttcaaatcttacctagatcctccgccccaaaaccccagcattctttctcttgtttcccattcgacacatatgtaacgtgatgacatgaaaccttccttaatatatatgttcatgcctcatttattctgttgcmggggcttatgctctgatggtaactgaggcaatgttcttttaaatctttttttgacacctatgaacatgttcttcga

SEQ ID NO: 541504 - DNA, 631 bp, Homo sapiens
tgcatctttccaatttttgcctttgccttcacacatccrtcttccctctgagtatgtgtgtcagtgtttctgcctctcctcctttttataggggcaccaatcacattggatttagggccatcctatcccagtatgaccccctcttaacttgtcacatccataaagactttatttccaaataaagtcacattctgaagttctagatgggcataagattttgtgggacactatttgacacactgcagtttaccatctgtcccccagattctcattcatcccacatgcaagttatattcaccccagtcctatgtcatccaaagtatggatccattctagtattaatggtaagtttcaaattttctgtaaatatcagctcaaaaagtttcaatttaattatctcaattattagaatcagaaatgagtgaaactcaggatatggtccattatgaggcaaaattgctcttcattcacagacctgtgaaactacaaaacaagtatctgcttccaagatacagtggtagggcaggcataggatagacactgacatcgtgaaaaggagaagatggaaggaataaagggtcatttgtcccaagcaagttcaaaactcagcaaagcaaattccgttaggccc

SEQ ID NO: 541505 - DNA, 631 bp, Homo sapiens
tgcatctttccaatttttgcctttgccttcacacatccatcttccctctgagtatgtgtgtcagtgtttctgcctctcctcctttttataggggcaccaatcacattggatttagggccatcctatcccagtatgaccccctcttaacttgtcacatccataaagactttatttccaaataaagtcacattctgaagttctagatgggcataagattttgtgggacactatttgacacactgcagtttaccatctgtcccccagattctcattcatcccacatgcaagttatattcaccccagtcctatgtcatccaaagtatggatccattctagtattaatggtaagtttcaaattttctgtaaatatcagctcaaaaagtttcaatttaattatctcaattattagaatcagaaatgagtgaaactcaggatatggtcyattatgaggcaaaattgctcttcattcacagacctgtgaaactacaaaacaagtatctgcttccaagatacagtggtagggcaggcataggatagacactgacatcgtgaaaaggagaagatggaaggaataaagggtcatttgtcccaagcaagttcaaaactcagcaaagcaaattccgttaggccc

SEQ ID NO: 541506 - DNA, 590 bp, Homo sapiens
tgtctatggtaagatagcactgtgagagtttcacttgagtaagctggaaaatcttctgaggctagtaagtccttctgaggtccttcaaaaaggattcattcacagttgagcattgagatgactatacctgtcaacacatggtttgaagtcttgtgagagaccctgaccaagaaccatctgcaaagacattcccagattcttggcccacagaaactgtaaagtaaaaatgtatgttgcttttagacactacgtttttgggcagtttttatgtagcmatcattatctaatacatgcttgtacttggattgttttaatccactctgaccattttttgctttgaactgtaatattttgttaaattatagagaataacaattttttatgtattttggatttatttctactattgtattttgtgctttctacttatctcacctggatgacattttttttttcttacactttttggtttctcttgaattgttctggtatttttttcttattttagtccctgttttaatttggaagtaatgtgttttatttcaactttgtgtttgaaatggttactgcagtaattagaagaggcatac

SEQ ID NO: 541507 - DNA, 590 bp, Homo sapiens
tgtctatggtaagatagcactgtgagagtttcacttgagtaagctggaaaatcttctgaggctagtaagtccttctgaggtccttcaaaaaggattcattcacagttgagcattgagatgactatacctgtcaacacatggtttgaagtcttgtgagagaccctgaccaagaaccatctgcaaagacattcccagattcttggcccacagaaactgtaaagtaaaaatgtatgttgcttttagacactacgtttttgggcagtttttatgtagccatcattatctaatacatgcttgtacttggattgttttaatccactctgacmattttttgctttgaactgtaatattttgttaaattatagagaataacaattttttatgtattttggatttatttctactattgtattttgtgctttctacttatctcacctggatgacattttttttttcttacactttttggtttctcttgaattgttctggtatttttttcttattttagtccctgttttaatttggaagtaatgtgttttatttcaactttgtgtttgaaatggttactgcagtaattagaagaggcatac

SEQ ID NO: 541508 - DNA, 430 bp, Homo sapiens
gagcagggattcaggtctggggtgtgtgtgtgtgtgttacatgactttgaaagtctcttcctgctctaaccgtcactggagccacaaggaggtcctttcagagggagcacattccaacctcctcagtcactaacccccgccttgtggctgcagaaacgttcctggcctctgacctcaccagcttccacccagggaggccaggagagaaccccaggggrccacagccatcgctggaagtttgggggcagggaggcctgagggaccctgccactgtgccttggtggctctgtaagactggctcagtcccttcccatctctgagccccagagaatccctgccttttggggctgcagtgaaggagaggaggcttggcaccctgtgcattctcagcatggccagggcattggaggtgatatttatgtttatcagt

SEQ ID NO: 541509 - DNA, 622 bp, Homo sapiens
cttgtaaatacgattgtgtgcacaacacttcctagcacttcacctttacaaggtgctattaatgcccatttcttatttgatccatacatcattgtggttgtatccccctgagacagataaggaaattgagactcaggaagtaagagaagcagcttgcccaatgtcacatgccgataagggcagagttggggattgagctctggctcgctacttccgggttcagtcccagccactgctggcagcctaaggtgaggggatgaggtcccagtgttggcctccatggcccagggatccaggcagtggagtgagctgctatggcaggggccactcaactgcagaccccctaactcaaacagatctgctgctcgacacttgacttccctcagccacctccaccccattcctttctctttcgacttcccygtcttctactttccctgtccttccctctctctctcctgagcaagaggagaaatgtgcctgagaccctcattcttcatcttcatcacctgcgcctatcagtgtcctggtgcacagcagatactcaaagaataaacaaatgccctcctaggtgttagcccagccctgtgccccacagagtccaggatgaagtggcctggtg

SEQ ID NO: 541510 - DNA, 431 bp, Homo sapiens
tgactttcccttggaatgatataatccaaactctttgccatgcctatggtggttttaaaacatgtctgcacattgtttgacattctcccaggaagaaattaatcgagtctatatctcctccccttgaatgtgggtgggtcttggtgactaccttgataaaccgaatgcgatacaagtgacactgtgactttcaaggctagatttgaaaataccctgcagcttctggcagtttctcttgagatacttgctcagaagcatttcatccaccatgtaagaagttaggctatcctaagtgtacacggagagaccacaaagagaacragaaagatagccagtgaaccagaaagattccagcctccagttggttttctgcctaatccaggctccagacttgtgaatggagaagtgttgaggtgaccccagctccagcc

SEQ ID NO: 541511 - DNA, 464 bp, Homo sapiens
cttatcccaactgtccttgccgtatgttcctgtacgcggtagacttttkggactatgaggaaatcaaaaaacaaagtgtagcaactggccagttgtggtggctcacacctgtaatcccagcactttgggaggctgaggctggaggatcgcttgaggtcaggagttcaagactagcttggtcaatatggcgaaaccccatctctactaaaaatacaaaaattagctggatacggtggtgcatgcctgtaatcccagctacttgggaggttgaggcaggagaattgcttgaacccaggaggtggaggtcgcagtgagctgagatctcaccactgcgctccagcctgagtgacagagcgagactctgtttcaaaaacaaacaacagacaaaccaaagtgtagcaactgacctcttatgaggtattttatattgtgaggggcaagcaagaaataaaagactaattatg

SEQ ID NO: 541512 - DNA, 582 bp, Homo sapiens
cctctaagtataatactggtgtaatttagacgtattagcagttctttggaatttttatttcattttttgtttgtttatttttaattgcctcgtcatgtggaaaagtcattcttgtataatttatccacgatggcaaaaatacgtaagtattttatcttcatagcttgaagaatttgtgcctttgagaagtttctctgaagcttaatcggaatgggraaatttcagaatggtaccttttaaataatcttaacaaagagcaagtttaacctgagtggtcaacttttgcagcagatgattgaaatgctaatatttctagactgtgtcctgtcttccaaagatacaataaccatgtttgtgaagttcatacctatttttccttttcctttgcagttttatttgccctctttccttcttttggagtctgattagggttttgttttggggtttttttttttttggttttttgttttttgagaaaagtgaataagagaggaattacctggagctaagattttaaaaataatttctgaaagactgataaattatttctttttttaggaagattccaaatttggcctcgaa

SEQ ID NO: 541513 - DNA, 618 bp, Homo sapiens
tggacagggaagagaggggacaatgtcaccgggagacccagaatgtgggggtgggatgaagaggcacagaggagggtagggaagggagcaaagacagggaaggacaggcagaggcagcaggcatcagggcatgtggacgtggtgaggacagaggcagccacgggcgtgtaggaagaagcttggcagaaaaaaaggggtggaaagagggagaacaaaggcaggcgggagaagagtatgggagcccaggagacggacattgagagaaagacaggattgtaaaaagatagagagaacaagagagtaagatgtgtcccagagccgctggcaagagaacaaggtagagacagcaagacaggcagattcattagtaatgaagacatatgaaagccctggctttaaaactggactctctgtgctggtactcatcaggggctgtrggacagtctgggccaggccacaggaaggaggcccaggatgctgaagcatggcagatgagcagagagccatcaccagagaggcacacgtcacatcttttgctttggactgaattttaactaaaatctcatcttttaaatttctttcctcaacacttccaccctctgacataacagccaaact

SEQ ID NO: 541514 - DNA, 618 bp, Homo sapiens
tggacagggaagagaggggacaatgtcaccgggagacccagaatgtgggggtgggatgaagaggcacagaggagggtagggaagggagcaaagacagggaaggacaggcagaggcagcaggcatcagggcatgtggacgtggtgaggacagaggcagccacgggcgtgtaggaagaagcttggcagaaaaaaaggggtggaaagagggagaacaaaggcaggcgggagaagagtatgggagcccaggagacggacattgagagaaagacaggattgtaaaaagatagagagaacaagagagtaagatgtgtcccagagccgctggcaagagaacaaggtagagacagcaagacaggcagattcattagtaatgaagacatatgaaagccctggctttaaaactggactctctgtgctggtactcatcaggggctgtgggacagtctgggccaggccacaggaaggaggcccaggatgctgaagcatggcagatgagcagagagccatcaccagagaggcacacgtcacatcttttgctttggactgaattttaactaaaatmtcatcttttaaatttctttcctcaacacttccaccctctgacataacagccaaact

SEQ ID NO: 541515 - DNA, 639 bp, Homo sapiens
tttgtgcttggcttacttcactcagcataatgttttcaaggttcgtcctttaaacgggtgagaaaatcggggcttaacttgttcaaggccaccaaggttgtatcagaagcaagactagaacccaggcctcccgactccagagcagagcttgctctataagctgcagcatccctcggtggctcagctcttcatgcaaaatcaccaccctgaaacaatttgcaggaggtgttttgtcatctggaaacacaggcatagaacagagacggggggacagactgcagggggtgtttgagatgacccagaccgatcttttgctttacagataaggaaactgaggcccagagtggggaagccatgagcctkccccgaggtcacgcagggagtgacagagccctcacgtttccagtcttctgtcttagctcccatctctcaccgccctcagcctgctggcttattcttctacatgccccctcccttctaaagggaacggtcattgagaggaatccagttatttatttactaagcctattgacccagagcacctggtcaggtcatgcctaaaataaaccgctaaggcagacaggatgaaaggggctgctgtctgctgggaggggatctgagtgggcctggggtagcggc

SEQ ID NO: 541516 - DNA, 639 bp, Homo sapiens
tttgtgcttggcttacttcactcagcataatgttttcaaggttcgtcctttaaacgggtgagaaaatcggggcttaacttgttcaaggccaccaaggttgtatcagaagcaagactagaacccaggcctcccgactccagagcagagcttgctctataagctgcagcatccctcggtggctcagctcytcatgcaaaatcaccaccctgaaacaatttgcaggaggtgttttgtcatctggaaacacaggcatagaacagagacggggggacagactgcagggggtgtttgagatgacccagaccgatcttttgctttacagataaggaaactgaggcccagagtggggaagccatgagccttccccgaggtcacgcagggagtgacagagccctcacgtttccagtcttctgtcttagctcccatctctcaccgccctcagcctgctggcttattcttctacatgccccctcccttctaaagggaacggtcattgagaggaatccagttatttatttactaagcctattgacccagagcacctggtcaggtcatgcctaaaataaaccgctaaggcagacaggatgaaaggggctgctgtctgctgggaggggatctgagtgggcctggggtagcggc

SEQ ID NO: 541517 - DNA, 616 bp, Homo sapiens
tagataaaccataatgcttgtctgaatttcagtgtccatatctataatacaggactaaaaatatgcatcaggttgagaatcaggtttcttactgttggagtttatagataaccaagcgaaaatgtgtagaatgatccrtatggtaatgaattagagttggtgacattagtatacactcatgtttagcttaatgtagataaagatgcttatagaagtatttatagttatgtgtatatatgtgaattagtataaaaacatattttcttgctctgtccactgagatgactagaatcaatgacactgcagtagctataagcacacctaggactcagattttgatttctaatatttattctccataaaagcaaccagagctccagggatccttggagaaataattgattctgggactgagacaagaaatgtctaagacgaatctaggtcatcttgcagatgctagaaagtgctcaaaacacacacacacacacacacacacacacacacacacactatatgtaaatgggcatgggagccaattgaaggacctcccaatggcaaaagctggaatagtttcaccaaaacaaataggtaaaatttaatgttactctggtattac

SEQ ID NO: 541518 - DNA, 383 bp, Homo sapiens
ccaagaatacgaattcacgcttattatcctaccaacttccacgtgaagagattcatgctgactaaatataagttatttgctaattttaattattcaaagtgattatttttcaagccacacttattccaaaacctctcttgacctgctttctgtaagatggataagttttatttgccttgatattctgagtgtccactacaacattgttcctgaataagtaataacacgtatgtatattcttatacactagagaagcttcagagttatcrgactaaagatttttaaaatgcctttacataaaaagcaggcaaaacagcattttcactagtacacaaatatccaagtgcttaaaacatgtggttcagaaagtaagcatcactgca

SEQ ID NO: 541519 - DNA, 601 bp, Homo sapiens
agctgcatagcattagtgcttactcttttgaatagcacaatatgcccttttccatttgcatcaaaaggcacaaagagaagggcagtgtctctaaaagccaagattggcattttggtgattttggctcaagatcataagacaaccattttggtagcctcctggtctatcaataattgccaaggcctcccaacatgcttgtgatacagagccaaatagggaaacaagctagttgtctggtcagaaggaaagggaacattcctaagctatttcttttatgttttcttttttccatagctgtgcagagcaactgggaacactagagggagttctgattttgtgcaaagtcytgttctcgtttttaaattaagtcattgcatattgtttaaagtcaactttatttcattttatatttatttatttatttatttgtttgtttattatagagatgggcatcttgctgcattgcccaggcaggtctcaaactcttggcctcaagtgcttctcccaccttagcctcccaaagtgttgggattacaggtgtgagccatcatgcccagcctctacttaccttaaatagcaaaaaatttttcattgcaggtta

SEQ ID NO: 541520 - DNA, 601 bp, Homo sapiens
agctgcatagcattagtgcttactcttttgaatagcacaatatgcccttttccatttgcatcaaaaggcacaaagagaagggcagtgtctctaaaagccaagattggcattttggtgattttggctcaagatcataagacaaccattttggtagcctcctggtctatcaataattgccaaggcctcccaacatgcttgtgatacagagccaaatagggaaacaagctagttgtctggtcagaaggaaagggaacattcctaagctatttcttttatgttttcttttttccatagctgtgcagagcaactgggaacactagagggagttctgattttgtgcaaagtcttgttctcrtttttaaattaagtcattgcatattgtttaaagtcaactttatttcattttatatttatttatttatttatttgtttgtttattatagagatgggcatcttgctgcattgcccaggcaggtctcaaactcttggcctcaagtgcttctcccaccttagcctcccaaagtgttgggattacaggtgtgagccatcatgcccagcctctacttaccttaaatagcaaaaaatttttcattgcaggtta

SEQ ID NO: 541521 - DNA, 601 bp, Homo sapiens
agctgcatagcattagtgcttactcttttgaatagcacaatatgcccttttccatttgcatcaaaaggcacaaagagaagggcagtgtctctaaaagccaagattggcattttggtgattttggctcaagatcataagacaaccattttggtagcctcctggtctatcaataattgccaaggcctcccaacatgcttgtgatacagagccaaatagggaaacaagctagttgtctggtcagaaggaaagggaacattcctaagctatttcttttatgttttcttttttccatagctgtgcagagcaactgggaacactagagggagttctgattttgtgcaaagtcttgttctcgtttttaaattaagtcattgcatattgtttaaagtcaactttatttcattttatatttatttatttatttrtttgtttgtttattatagagatgggcatcttgctgcattgcccaggcaggtctcaaactcttggcctcaagtgcttctcccaccttagcctcccaaagtgttgggattacaggtgtgagccatcatgcccagcctctacttaccttaaatagcaaaaaatttttcattgcaggtta

SEQ ID NO: 541522 - DNA, 601 bp, Homo sapiens
tccatggtcttgccttcgtgttcactagttctttcttctacagaatcaaatgttctattaattcatttcagtaacatttttatttcagatgtttctcagttccagtatgtccaggtaactgttttacaaataattttaagcctgggcaaagtggctcacatctttaatcccagcactttgagaggccaaggcagaaggattgcttaaggccaggggttcaagaccagcccrggcaacatagtgaaagcctgtctccatttattattattaagaaaaatgtaaaaaattataatttataataaaaaattttatatccctgcatctgtgttttactcatggtatattttactataaatcttcaaacatgtttataatacttattttataattccttatctgataatcctaacattcctattatttctggaactaattttagtaactgtggtatttcctcctatttatggtctgcatgtctatttgcatgctgaatattgtgaatgacatattgctgcgtgattgcatttatttgtcttcttgtaaagaagttggtgatagatgacttgacattttaaggattgttttcaggattttgataaag

SEQ ID NO: 541523 - DNA, 619 bp, Homo sapiens
ctgactgcagcctggaactcctgggctcaagtgattcttccacctcagcctcccaagtagctaggactacagccacgtgccaccacaaccagctaatttttttttaatattttttgtagagagggggtcttgctaggttgctcaggctggtctcaaactcctggcctcaagcaatcttcccaccytggtgtcccaaagcgctgggattataggtgtgagccgctacgtccagcccgtatcgaactcttgaccacacttgggactcaacaattaactgttattatttcaaagtatttaataaatctctgaacttttttctattaagtctaatgtttgatactgaaaaagctaaagtcattggagagtttttacttgtacacttgtttttcaaataaaaattaaaccgaagggaaagaaactacaaatacaaacgggtctggcccctcatgcatatatacatacacacagggtttttattcttaacatcagttaccttctgcccttctcacaaagcttctcaatttcagctttcagatcctgctccttctgcaaaaactccttcttctctttctctatcttcttctttgtttcttcccgctttattgtcacatcctgaata

SEQ ID NO: 541524 - DNA, 592 bp, Homo sapiens
ctgcagggatgctggtgcagagcaggcagggaattgaattacacagggttgtggctttgccaagtgctcataacacacattgagaaaacagagcagccatgggatgggaactgagagcacgcacgagggagtggttccagtggatgaccttggagcgtatgctgtggaagaaggggagagaacatcaaggcagtgatgcagagctgcacgaaagcaccggaaggattgaactggagatgctcgcgtggctgaagggttgctgagtgctgggtactagagggagtaaactacagagccagggtagtgtccgagtgggcagtgcatgggattggcrtgaagaggcttacaagggtgacagggtctagaatgtgaccacaggggtaaatgtctaaggagggggtggacacagtgagatttgagtcactcctgggaatctccaaaactctgttcatggctctattgtagcattttttatattatattgtgatttttggtttatatgccagctcccttttctagacccctgagggtaaaatctgttgcctgtaatctgatgtccttagtgcctagcccagtatgtgatacacagtag

SEQ ID NO: 541525 - DNA, 592 bp, Homo sapiens
ctgcagggatgctggtgcagagcaggcagggaattgaattacacagggttgtggctttgccaagtgctcataacacacattgagaaaacagagcagccatgggatgggaactgagagcacgcacgagggagtggttccagtggatgaccttggagcgtatgctgtggaagaaggggagagaacatcaaggcagtgatgcagagctgcacgaaagcaccggaaggattgaactggagatgctcgcgtggctgaagggttgctgagtgctgggtactagagggagtaaactacagagccagggtagtgtccgagtgggcagtgcatgggattggcatgaagaggcttacaarggtgacagggtctagaatgtgaccacaggggtaaatgtctaaggagggggtggacacagtgagatttgagtcactcctgggaatctccaaaactctgttcatggctctattgtagcattttttatattatattgtgatttttggtttatatgccagctcccttttctagacccctgagggtaaaatctgttgcctgtaatctgatgtccttagtgcctagcccagtatgtgatacacagtag

SEQ ID NO: 541526 - DNA, 599 bp, Homo sapiens
gggaacaggatcgctgtgggaggttgagcctggagctctgaacagccactctgcgcccaatctgctgtagcgctgagggtcaggaaggcctctgggagttctctagaagaaggcgctggggaggaggagttaacatctcatttcattagagcatgccagttctgttctgggtgtgacttttgaagaatattgagttctaccagtagaactttggggactgaaacctgttgaggatttgtagtaagactgtgtcccgaaggcgttcttccttttcttctgtctctgactttaacaagcaggtttccctataagctttggtgtttgttaaacagatcatttgtatgtgcaataaaatatgtttaaaaattagaaaaataacatctcccgatactatgttattttatatttttaatggtatgattacttttatttgattttctggtttgtgatgataaatgcataagaatggcagtgttctctgcatcatgtacatttcaaggtgtagactgtgttctgaaggkagagtcggccccacatccttaccttcttttcctgtggtttattgcagaactcagctgccttcacctcctcctgccatt

SEQ ID NO: 541527 - DNA, 502 bp, Homo sapiens
ggtatggtggtgcaggcctgtggtcccggctactcaggaggctgaggtgggaggatcacgtgagaccgggaagttgaggctgcaatgagccgtgattgtgccattgcattccagcctgggcaggcgacaaagcaagaaaaaaaacagataccttgaatgataacattaatgataaaaattgcatagcataacagctattcacatggatgtcagattagtcactgttcagctttctctttaatactacccaagtatttcatagtgtttaggatttactttgctaagttcctgaagtgtttatattgaaaatatttttatttttattataaaagtaaacagtgagaattatggggaatttgtttgcttattttgagatgaggtctcaccatgttgtccaggctggtctcaaactcctgggctcaggcgatcctcccacctcagcctcaggagtatctgggatkacaagtgtgcaccacagtgactggcagaattatgtttatta

SEQ ID NO: 541528 - DNA, 564 bp, Homo sapiens
gcccctgttccagtccacgtgactcttatgcatcatgatgttgagattcactgatttagacacgcagacaataaatactgattcttggactacagagccaaagacaaatcgagtgacgtattctagctcatggagccagctgggcaaagccagcagggatttattgctccttagatgatcaawgctgcccccagggctgctgtcatctcctgatgacgagcaacattttcacaacatcagggggctggtggagaaaatcggggggtctccggagcaaccccgggagcagtactgggcccagaagcctgccccagccgcgcacacagagtctacctgtcttccaatgcgagtcccgcgaggtgaagaattagagcatgttgttcatttataatgtttgctttgcttttggaaacaccctggggcaactcaggcaaggttttcaatgtggtgtttgacttggcttagctgcaaagttccccctttttggtctgtttatggcaagttagcacacggccccatatccaggagcctaacaccagccccagcagaaatcagggagcgggc

SEQ ID NO: 541529 - DNA, 564 bp, Homo sapiens
gcccctgttccagtccacgtgactcttatgcatcatgatgttgagattcactgatttagacacgcagacaataaatactgattcttggactacagagccaaagacaaatcgagtgacgtattctagctcatggagccagctgggcaaagccagcagggatttattgctccttagatgatcaatgctgcccccagggctgctgtcatctcctgatgacgagcaacattttcacaacatcagggggytggtggagaaaatcggggggtctccggagcaaccccgggagcagtactgggcccagaagcctgccccagccgcgcacacagagtctacctgtcttccaatgcgagtcccgcgaggtgaagaattagagcatgttgttcatttataatgtttgctttgcttttggaaacaccctggggcaactcaggcaaggttttcaatgtggtgtttgacttggcttagctgcaaagttccccctttttggtctgtttatggcaagttagcacacggccccatatccaggagcctaacaccagccccagcagaaatcagggagcgggc

SEQ ID NO: 541530 - DNA, 564 bp, Homo sapiens
gcccctgttccagtccacgtgactcttatgcatcatgatgttgagattcactgatttagacacgcagacaataaatactgattcttggactacagagccaaagacaaatcgagtgacgtattctagctcatggagccagctgggcaaagccagcagggatttattgctccttagatgatcaatgctgcccccagggctgctgtcatctcctgatgacgagcaacattttcacaacatcagggggctggtggagaaaatcggggggtctccggagcaaccccgggagcagtactgggcccagaagcctgccccagccgcgcacacagagtctacctgtcttccaatgcgagtcccgcgaggtgaagaattagagcatgttgttcatttataatgtttgctttgcttttggaaacaccctggggcaactcaggcaaggttttcaatgtggtgtttgacttggcttagctgcaaagttccccctttttggtctgtttatggcaagttagcacacggycccatatccaggagcctaacaccagccccagcagaaatcagggagcgggc

SEQ ID NO: 541531 - DNA, 588 bp, Homo sapiens
ggaccagagggaagcggcacgatgaaggtatgagagtgtttctgttggcgggtccagcctctgcgctctgactttctccagctcagagatatcccttcacccaggttcctacagrgccccatgctctttccttatctgagaaccacagattggaatccacaaggagtctagctgaagatcatttagtccagagggtgcaaaacttttcctggaaagggtcagacggtaaatattttcagtgttgccggccacagtgtctctgttgcacctgctcgactctgctattgtagtcccaaagcagccatagacaatacataagtgaaatgggcatggctgtgttccaataaaactttatttgcaaaaacaggcagcagggcaggtttggcccaccagtcatagatctagcgctcaacactcccatcctacagatgctgaagtgtagcctcaggaagatggaactgacttgaccaaggctgcatggctcccaggaccagaccagaactcagaacatctgctcctcaatcttcaaatctctttttaaatgctattcaaccagctgcttcctcctggcaaagtggggtcctggaa

SEQ ID NO: 541532 - DNA, 589 bp, Homo sapiens
accagggatttcccaagccctccggaaatactgtaacttgacaacaatggagaaagactttcacccatgcggttggaatgctagccttaaaatatatacaattgttacatgtcaataaaaataaataaataaatgtttaaaaaaaaaaatgtccttccagggaacatcacacacyggggcctgttgtggggtggggggagtggggagggatagcattaggagatatacctaatgctaaatgacgagttaacgggtgcagcacaccaacatggcacatgtatagatacgtaacaaacctgcatgttgtgcacatgtaccctaaaacttaaagtataataataataaaattaaaaaaaaagtccttccaacaggtttcaaaagtgaggttctaatttaagccttgcagggtctctaatgtgaagccagtttggtggggttgaacgccaaaaggataggaagggcttctctttcgagaatgcggggagaaagaaaaatcagtattttgactaaaagaaagtatttaagttacgatcagaaatatatttgtctagaaataaaaatgcattccccctgaccccccatcccttta

SEQ ID NO: 541533 - DNA, 613 bp, Homo sapiens
acatctgcctgtacctgaggacctgcccagggaaggccgagggagacagtaggggactgaggacaagagtgggagccaggcagcccacccatcctcagttctccctcgtgttagatgcagaaatcaagttacctcgactgaactcattttaaaaatgactttactccattctgtgtcaatgttgcattcttggctttgaccttgtgtattaaagaagcagctcaatgaaaatgttccgacattacctgtgagctgtgaaagaggyggctgattattttgttggtatcatttgtctaaagctccatgggacaaattattttcataatcctagtgcaagtaaagatcatgtttcctaaaggtgatctttaaactattttttcattgacagtagaaagctgagagtgaaattttgcgtttagttatacgaacgacactaatgtgtttatagcacctctattcccctccttcctcccacccaccatccttctacatgttaagaaaatattttctctttttttcaacagactttctcttttattataaactgcctcaaattctttttaggagtagataagatgtcaataaacctgcatggcaacatatcttgaggaaa

SEQ ID NO: 541534 - DNA, 535 bp, Homo sapiens
cccaggcacaattcagccctcaactaggtcattccttaatatgtccgtatcctcactcaagttgtggggagaggcccttcccatattatagctgcagaggccgacttggggaggacaggggagaagctgagaaggtgggaggccccattttgaaatgggacttgttagtcctgtcacacagtgctttggtggctgacagcccggctcagggcctggcttgagggaagggcagtgaggccagacttcctattcagcctcctgccctcccaggttccaccagggtccccactgtggccactgcagacctgagactcaagtctttcaactccatcagctagagctggcccygtggctgcccgagggatgcggggacacaggcagcctgccagcttcccttccatctgccacaaccgagtgtagctggaggtagccagcagtgacagcaacccccgcccgggcccctcaggactcctcacagtgagatgcccagacgcatctgtcgtgggcagtgggtgaggtcaccgagagcaggaac

SEQ ID NO: 541535 - DNA, 535 bp, Homo sapiens
cccaggcacaattcagccctcaactaggtcattccttaatatgtccgtatcctcactcaagttgtggggagaggcccttcccatattatagctgcagaggccgacttggggaggacaggggagaagctgagaaggtgggaggccccattttgaaatgggacttgttagtcctgtcacacagtgctttggtggctgacagcccggctcagggcctggcttgagggaagggcagtgaggccagacttcctattcagcctcctgccctcccaggttccaccagggtccccactgtggccactgcagacctgagactcaagtctttcaactccatcagctagagctggccccgtggctgcccgagggatgcggggacacaggcagcctgccagcttcccttccatctgccacaaccgagtgtagctggaggtagccagcagtgacagcaacccccgccygggcccctcaggactcctcacagtgagatgcccagacgcatctgtcgtgggcagtgggtgaggtcaccgagagcaggaac

SEQ ID NO: 541536 - DNA, 488 bp, Homo sapiens
agcacccaccacgtggggatttgcattgatacctgtgtcttttaagccaatattcatcaagctcctattgttggccagaacccgtgttgagtgctaggtagaggacaaaagtggtgcaagcctgctcccctcgtgctcttgggtcagaattccagggattacagcatcacgggtctagaccaagcttctccttaaccaagatgccgtgcctaaaactcgggggtcgggggtggtccatgacatttcatggggaaaattacatatgtgtttcctccagttgaaatttggcatttcctttgcttctgatgatagatgataaaccatctyggggtccctagtacctgtggctttgccaacaatagaaatcacagatgttttccatatcataggaaagttttgcaggtttaaacatatcgcttatgcccacatgcctacttcaaaatttcaggagttctaagacctgctactgaatcttcttatttatgtat

SEQ ID NO: 541537 - DNA, 641 bp, Homo sapiens
agaactgatcaacagcttcacgtttcttttctctctagaacgggggttctcagtgggagaggggtggatttggcgatactgggagacttccctggttgtcacagcctgagggagtgctaccggcgtctagagagtagaggccgcaatgctgacacacatcctttaaggcacaggacatccccacgacaaacatgccagggcccacatatcaatagcactgggctgagaaagtctcctctaggaaacctgtgtctaggaggctctgctcttcatcactgcccccagttccctttccttcccctctctcgccttcccacatccccctgtgcccacyacatggccaggggaatgagcccctgcctcgccggcgggaggacacctgcagagttcccagagctgtcaagctcctccgccacgtgcgtggcagctggtgcctgggcgggccctgcacttgggctccagctcgccttcatggcttcagatctcctcggctcatgaagcagctcatgaaactctgggttctcacgcaggtaaacaggaccagcatttccacatgaagaggaggactgtgtgctcatttttcattttctcaatcatttattccaacagctgctgtgatcctcccacataaaaaaagacca

SEQ ID NO: 541538 - DNA, 641 bp, Homo sapiens
agaactgatcaacagcttcacgtttcttttctctctagaacgggggttctcagtgggagaggggtggatttggcgatactgggagacttccctggttgtcacagcctgagggagtgctaccggcgtctagagagtagaggccgcaatgctgacacacatcctttaaggcacaggacatccccacgacaaacatgccagggcccacatatcaatagcactgggctgagaaagtctcctctaggaaacctgtgtctaggaggctctgctcttcatcactgcccccagttccctttccttcccctctctcgccttcccacatccccctgtgcccaccacatggccaggggaatgagcccctgcctcgccggcgggaggacacctgcagagttcccagagctgtcaagctcctccgccacgtgcgtggcagctggtgcctgggcgggccctgcacttgggctccagctcgccttcatggcttcagatctcmtcggctcatgaagcagctcatgaaactctgggttctcacgcaggtaaacaggaccagcatttccacatgaagaggaggactgtgtgctcatttttcattttctcaatcatttattccaacagctgctgtgatcctcccacataaaaaaagacca

SEQ ID NO: 541539 - DNA, 636 bp, Homo sapiens
aaagtcatcaagattttataaaaaatttctttcactgcccttaaacttaagaaatcttatctcatcaagagcatgactaaatatccactttatcctctcctcctcattcatattttaatatttaattcactcatttatctggagtcctttttgatacatctctaaaagacagataattccacaatgagttgctagctaaacattacttgaaatttcaggatgggactctgtcctcaccaccaagctttgtttccaagagatgccatgactgataaaactgaggttggaaagatcaatgtcttacagaaaacagaagattggggggaaacgattgaaacagcactgaatatgtttatgaaatgcatccactcactcaacaaatatttaccgtgcctctgtgtcatccaagttccagggatacagcagtgagcaaagttcctgactttgtaaggtttaagtgatagagacagagacagatgttaaataacgcagtacatcaagggckgaggaggccttgaagaatagtggatggagggtgcctgcagtgaggtggtggctgctgttgtcaggctgggagggagcccgccctgccatgaggacctctgggcatctgcaggagacagggagcaggccatg

SEQ ID NO: 541540 - DNA, 591 bp, Homo sapiens
aactaacagtttcttgaattcacatgtgctgtcttacttttgtgagcgtgaattgtatacattttataacctttcaatctggacaaaattagtttggttagtagcacaaagtaataatacatgtatgtttcggggcagaggtgggggaagggaatggtaaggggaagggcagaaatgctgaaaattaaaccaataacttgagacttggaggaattcattattttttcaaaaaggaaattgaagacataaactgaagatacacactaggtaggaaacatcaacaaatgtgacatgattatgaatattatcttataattrgggaaatagccattttgacggtcattacactttatgtgaggttagtgtacaatgtggcgtaaaagactggtgtaaaaatgagatggatttctgcaagttcaaacttaaaatcgtgcatctgactagatataagctgttgcgagtgcattacatctcccactccagtctaggaaaggtggagtccctttcatttacacgactattttcatgactgggcaaattcacagaggaaacacagggatcacattccttcgatcataaagtcctcaaaag

SEQ ID NO: 541541 - DNA, 610 bp, Homo sapiens
tcagaaaggtaaagagcttcataactaacagtttcttgaattcacatgtgctgtcttacttttgtgagcgtgaattgtatacattttatacctttcaatctggaccaaattagttggttagtagcaccaaagtaatatacatgtatgtttcggggcagaggtgggggaagggaatggtaagggaagggcagaaatgctgraaattaaaccaataacttgagacttggaggaattcattattttttcaaaaaggaaattgaagacataaactgaagatacacactaggtaggaaacatcaacaaatgtgacatgattatgaatattatcttataattagggaaatagccattttgacggtcattacactttatgtgaggttagtgtacaatgtggcgtaaaagactggtgtaaaaatgagatggatttctgcaagttcaaacttaaaatcgtgcatctgactagatataagctgttgcgagtgcattacatctcccactccagtctaggaaaggtggagtccctttcatttacacgactattttcatgactgggcaaattcacagaggaaacacagggatcacattccttcgatcataaagtcctcaaaag

SEQ ID NO: 541542 - DNA, 467 bp, Homo sapiens
tttcaccatgttgcccaggctggtctcgaactcctgacctcaagtgatctgcctgcctcggcctcgcgaagtgctgagattacaagcgtgaaccaccgcgcccggccccagcttccgttttttaatgttattatgtatcagtcttttttttccgggcacttaggcgctgggtcattaggaagcctttccccacacgcaggtcctagtcaaccgtgctttttagcggcgagtaggccctgcggctctgcccctaacatgggcgcggggcacgcggccaggggcccgtgggagggggacagggcgcgcgaacccaggttctcaggccgcgtcgccgcgcgtgcgcactgacagccgggccgagccagcccgggtcccgcagggaagaacgccagcggcgcgcggaggccgcgctgccctgggccgcgaggtccctatggctgcyccaccggaagccccgcccccttctg

SEQ ID NO: 541543 - DNA, 417 bp, Homo sapiens
gaaacagcgcagcgaacctgctgagcatgagtaacatacccaagaaactaggattcactgttagaagccactgggattctaagcttatctgttacttcagcaatctgattaacacaatgtgcaaaactgcattcctgacaacagccttctaagcccttcctgctacattccccatctgcacaagtgacccaccatccacccacaggccatcacctcctaaccagtatggacatgtctctatctcagcgttcctactcccaacactcatcaagcccattatmttttcccatgtggccacaatctgttccaggtttgctcccctccaatcccttctgcaatctgcctgaattgtgaccttcctaaagtgcaaatctgatcattctgctttaaaaaaaaaaatagttttagcctactgtc

SEQ ID NO: 541544 - DNA, 417 bp, Homo sapiens
gaaacagcgcagcgaacctgctgagcatgagtaacatacccaagaaactaggattcactgttagaagccactgggattctaagcttatctgttacttcagcaatctgattaacacaatgtgcaaaactgcattcctgacaacagccttctaagcccttcctgctacattccccatctgcacaagtgacccaccatccacccacaggccatcacctcctaaccagtatggacatgtctctatctcagcgttcctactcccaacactcatcaagcccattatcttttcccaygtggccacaatctgttccaggtttgctcccctccaatcccttctgcaatctgcctgaattgtgaccttcctaaagtgcaaatctgatcattctgctttaaaaaaaaaaatagttttagcctactgtc

SEQ ID NO: 541545 - DNA, 639 bp, Homo sapiens
aaatgataacattttacaataagtttttattggacctagattataaatagtgatgaatatttatcttggaatttttaaggaatatgtgcaatattccctaataaataaatgaaatttattacccatgtaaaacaaagtatgttaataccataaccacaaaagttatacatggatagttctattgtcaatagtgccaacatttacaatgcagtcttaacgtagtaagatttgctgtttattctagcaatggtgattgtattctctcactaaagtatttaagcaaagggggcattaatccctggtgtctacccttgatgtgtcacttctcagaggaaaaacgttttacctgtagtacagagatatggatggctaacttgaagagttaagaaacaaaagtggaaatctttcctctaaccaagcccaaggttatttgacagtggcacatgttagagaaagaaaggaactcactaaaaaaatgccaatctattttcaaaaacataaagtgtgagttattttrgtgaagcttattgtgcaaaaatgcttagtaacatgaatacttagtagtacattctttcaaatgtattgtgctattaaatgtaacagattagaatcataatttctacataacattaaaaagca

SEQ ID NO: 541546 - DNA, 512 bp, Homo sapiens
ataatggtcacaatatgtaactgatacaatagygcagagaagtgaataaaataactatataagaaacttttctgaaaggacattaatccattttgaggcttgagtctcagcatttggaagtcttcggtattaaaaatatcttaatcatcataggcttatggattaaaatagcaaagaggattactttcctatttcccatttggaaccctagagaaagtttcacaaaatgtgagaggtctaagtgatgcaaaggggttggaaattgcaggacagaaaatcctccaagtttgttaacatttctcattctatacacaccctactcttccccctccatgactgtcactacccttctgttttgtttttacaggacctgggatggaattctgaaattattgtgagccccacttcaaatccacaccccctccaaaacaatacatgagagataccttgtagtattgatacagtgagttacctgaaggtctgtagaagtttgcgtggggctgagaacagaa

SEQ ID NO: 541547 - DNA, 243 bp, Homo sapiens
ttcttaccatggtgccaggaatactgtattatataacgtagattctcaataaatatttattgaagtgtcatgcataattgttatttccctagacttctccaaatctaaaattgtatattcaattattctgaatataaatctttttacaatcatctctccaaaggaaatgtccaarcaacaacaccattctcaatagttgcaaacttattgtgacagaaaaatataaggctatagtattaaaag

SEQ ID NO: 541548 - DNA, 642 bp, Homo sapiens
gcatattgtgacttattgattaagactcctagataagatcataatgattatgagtttggggtagggagagatttgtccagtctgagatggggtgtgtgaattcagaaataaagttggatttacattaatcatagaaagttgattaggttcatgtaatcagagagaagagggggcattccaggatatttgatcatgtattaattacatatttagcaatgtgagtttattaatatagttaatacatggaaagataatccatatttacaagctgtttttcacgtaaaatgcagaattctgtttaacaatctttattctcactatggaaattcagtttaaataaacatctcagaaatttttaaacaaaaacaaaattcttgtaaagtaaacaaagtgtagtccacagatctctgtgtacggtgagtctggagtcagtttaataagcaaactgtcaacgtgcctagtttggcatttgaattaataagacaagaaaagtcttatttcaccyacatgatcctcattaacaggttaaaatgtggcatgtgcaggttcattcaaaatcattgctacagtctatgaaggtaaatattctttgctgcttcagatgttgacataaatcttcccaaatatttttgattgtcttca

SEQ ID NO: 541549 - DNA, 642 bp, Homo sapiens
gcatattgtgacttattgattaagactcctagataagatcataatgattatgagtttggggtagggagagatttgtccagtctgagatggggtgtgtgaattcagaaataaagttggatttacattaatcatagaaagttgattaggttcatgtaatcagagagaagagggggcattccaggatatttgatcatgtattaattacatatttagcaatgtgagtttattaatatagttaatacatggaaagataatccatatttacaagctgtttttcacgtaaaatgcagaattctgtttaacaatctttattctcactatggaaattcagtttaaataaacatctcagaaatttttaaacaaaaacaaaattcttgtaaagtaaacaaagtgtagtccacagatctctgtgtacggtgagtctggagtcagtttaataagcaaactgtcaacgtgcctagtttggcatttgaattaataagacaagaaaagtcttatttcacccacatgatcctcattaayaggttaaaatgtggcatgtgcaggttcattcaaaatcattgctacagtctatgaaggtaaatattctttgctgcttcagatgttgacataaatcttcccaaatatttttgattgtcttca

SEQ ID NO: 541550 - DNA, 619 bp, Homo sapiens
aaagaaggaaagaaacccctagcagtctttaagatatgtcctacagtcacatagattttgcaatataaacttatattgaatctattttctttatgaactgtttaaaatagacttagcctactactataaattctagttattagcaaatatgacataacgtaacagatgttaagtttaatccttaatcttaataaactttactatttaataacaagtgtataatttccaaatgtagcagtgtgtctttattccaaaacatcattttttttccatatactttattcatgttccacattcacctatgatggcataaaactaccagcttgtttaactcatataagaagtctagacttagtacacagggttacagctgatagagtatgtcactgaggactcagatttttttctgtctgtctgctccatctttcctaaaagttagcttatgtcyttggaaatggaaatggaagtggtggaggggtagtttattttatgaaagaaaaaacattctaaaatcccagcctacttctgcttatatcccaatggccagaaatgtgttatatcgttactcctacctacaaaggagtatggaaaggtaagtatgtttagctgggtatgtttt

SEQ ID NO: 541551 - DNA, 619 bp, Homo sapiens
aaagaaggaaagaaacccctagcagtctttaagatatgtcctacagtcacatagattttgcaatataaacttatattgaatctattttctttatgaactgtttaaaatagacttagcctactactataaattctagttattagcaaatatgacataacgtaacagatgttaagtttaatccttaatcttaataaactttactatttaataacaagtgtataatttccaaatgtagcagtgtgtctttattccaaaacatcattttttttccatatactttattcatgttccacattcacctatgatggcataaaactaccagcttgtttaactcatataagaagtctagacttagtacacagggttacagctgatagagtatgtcactgaggactcagatttttttctgtctgtctgctccatctttcctaaaagttagcttatgtctttggaaatggaaatggaagtggtggaggggtagtttattttatgaaagaaaaaacattctaaaatcccagcctacttctgcttatatcccawtggccagaaatgtgttatatcgttactcctacctacaaaggagtatggaaaggtaagtatgtttagctgggtatgtttt

SEQ ID NO: 541552 - DNA, 645 bp, Homo sapiens
gtgaggagacaaggaaagtgagatgaagaagtaggaagatttaatatcagaatttattttattttattttatttatttattttttgagatggcgtgtcactctgtcactcaggctggagtacagtggtgcgatctcagttcactgcaacttccgcctcccaggttcaagtgattctcctggctcagcctcccaagtagctgtgactacaggcgcatagtacacatgcggctaattatttgtatttttagtagagatagggtttcactgtgttagccaggatggtctcaatctcctgacctcatgatctgcctacctcggccttccaaagtgytgggattacaggcgtgagccactgcacccagccaatatcagaatatttttgagataatttgtgtgagccatgggggcttgatccaggcaacctctaggaagtatctaggatgctttccagaattacgcatttgagataaggaccattgtagtatttctctattagctctaatccctcagtatttgtgggggctcctggggacctaactcctctatatggcctggccgtgctcatattgagcccagtatagtctgtcgtgtgtagaagacgtcagttgctagcagcatgagataagtctgagtttaaaatgcag

SEQ ID NO: 541553 - DNA, 171 bp, Homo sapiens
gccaagcctctcaaagcttttggttttatgttcattctctatccaacggcttttctaagacagkggtaagcactccatagttcacttctcatgtgcccctgggtatctgatcaatatccaacaatgaattttttttctctcatagctttccaaaacccagtttcaatgcca

SEQ ID NO: 541554 - DNA, 288 bp, Homo sapiens
tccagttgagccaggtagccactcacatcctgccactgaaggaggtggcyaatgcacaatttacaaatgaaactgcacgtccattaaattaaacccaatggaaaacacacgtgtgacctgtcctgtcattcacagccatggggtgagagggaaccggaggagagggtgccaaccaagggggtctggaaggtgggtgggagggtatgtgttagggtggacagtggagagcctcctcctccttccaggagccccagttcctccagggctgtggatagcagggttagaaca

SEQ ID NO: 541555 - DNA, 194 bp, Homo sapiens
ccctattcttgaaagttgggcttttcatgtagatgagatcaagtatttctttatctttcttaaggtggcagtagtaaggctaaataacattcctcccgattccacccccgccagagtccccaggcstggctcccaacaagggaatggagagctgccagtgtgtactgcttgtgggcttctcccttgccgtggat

SEQ ID NO: 541556 - DNA, 587 bp, Homo sapiens
ggatggcttaaataaccagaaattcatgttctcaccagttctggaggctgggagtctaagatccggatgcccgcctggccmggttttagtgaaggttctcttcctggcttgtggatggctgctttctcgctgtgtcctcacatggcctgtcctcaaatgtgagacatctgtctgtcctcctcttctcataagcagaccagtcctattggattaggaccccccccccgccatatgaccacatttaaccttaatcgcctcctaaaagccctagctccaaatacagtcacattggaggttagggctttaacctatgacttttaggaggatacgattcagttcatagtagtcaccaagatagagcataaacttgttatcatgatatatagggagtgtcaaagcaacatagctttcctgtcctattgccagttccctccttcatagcctgaacctcggtcttgccaaattcctctttattgattagagacagcagacactgttactcttccatacctttcttatacttgtttcctcatcctggtgtgtctttctcctttcctgtgtctttttgccgagtaaataggtactaa

SEQ ID NO: 541557 - DNA, 637 bp, Homo sapiens
caatgtgtccagccccagtataaaatcttgatttataaaataactctgtcattatgatgatgggaagatagcatagacagttaggagaacttagccctgacccaagagggagaaaattcttcaatctcatttaaaagcaaaaggtcaatttttgttgctgttatttttagcaagggaagtttaaggaaacacatttctacacttcactctgcaaaatgaacacatggagagagcatcattttagagaagaaaattgctgctacctgttttacatcagctaaaactagatcatattttagaggtaggtgtgaagagtatttgcttcacctaagtttgttcaacaaagttgatcaaaaactaataatgttcccgagtcaactgatacatattatgggaggggtggttcagttgactcttattcttcatatcagccagattcatttttgcccttaactattacttataagtaggcatagcaggatgagatcaaaagagaaactggccctgagcctttgctaasaacctttcattaaatctggtcccttttcctagcaggcataaagggccattgccacttagcttagagagtctccatgcctgagcaacagcttggtagtcaccaagaaaagaagagcag

SEQ ID NO: 541558 - DNA, 360 bp, Homo sapiens
ggtcagggcaccattcaccattattagcattaacaggtgccctgtatatgttaccaatgcaaamttctactaggggagctcattcacatggaacatcgatgcaggaatgggtgtcctctagcttagctcaggcacagagtgagctgcatctacaggtgattttgtgttctgaatttgagaaagatcctctgcccctcaatatcttcctatcacattatatacactgctgatgcctaaaatcccatcattaagggttcctttgagttggggattgtgcttctattggtagacaaatagtgcagaagaggtaattttgtttcattattggtcacttcctagctatgcaatcttgagcaccag

SEQ ID NO: 541559 - DNA, 515 bp, Homo sapiens
gggtcagggcaccattcaccattattagcattaacaggtgccctgtatatgttaccaatgcaaaattctactaggggagctcattcacatggaacatcgatgcaggaatgggtgtcctctagcttagctcaggcacagagtgagctgcatctacaggtgattttgtgttctgaatttgagaaagatcctctgcccctcaatatcttcctatcacattatatacactgctgatgcctaaaatcccatcattaagggttcctttgagttggggattgtgcttctattggtagacaaatagtgcagaagaggtaattttgtttcattattggtcacttcctagctatgcaatcttgagcaccagtcctttgctttcttagaaatagtgacaaaaatgcctaggccactgttcccaaggtgaggggtcctgcctggtccaaggactcttttcttggaaaacccagaatcctagggttgggctcagccttcwccgggttgatgatccagggactcaaatt

SEQ ID NO: 541560 - DNA, 618 bp, Homo sapiens
tcaggtgcttgatttaggtactttactcatattatctcattttatctttatccagaattaccagatcaggtactgatattatccccaacctacagatgaggaaatgaagttcttggaaattgtactagatgcgyaatgagcagcagatgaagcttggatagaaactcaaatctctctgactcaagatttatgctctaagttacaataaacaccggagttacacttaaagagcttatggtctaattgagaggacagaaaattcacaagaaagaacctgtgaagagtagtggttatgtgcttaggctgtagacctgaatttggatcccacatcacactaactttctgtgtgcctgagcaagttatttcacttttctgaatttccattttctcatctgaaaaaatagaatacatccctcatagaattgccaggaggattaaattaggttactcatgtaaacagtgttttgtatttaataagtgctgtgattattaccacttttatctgttttctgtaacgacgacagagggtgtattatatcatgtactaaaggcaccttgcccaaactggaggagaaaaagtatcccaccggttcaagtgcattactggtagcaggcccc

SEQ ID NO: 541561 - DNA, 542 bp, Homo sapiens
catttgttcattcatgcaaatatattttcagcatctacaaagtgtcaggccctgtcttgggcactgggggttctgagatgaataggacaacaattctctctataacgaacgatcttgcggtcttgggcagacctgccctacacatgcccacttcttactaccccttctctcagaggctggcacagggtggccaggggatgcagggcaccactagctgttcccggctgtttaggctccagccttaggttctcccaaagagcaagcacctgttaggggcccagggcagtacatgtgatgtatgtaaatggtaagattatgaattctgccagaccgtccttccagaagcccagttcagatcatgtcatggccctatttgaacatcctcgtgggtcctgttctgcctctgccctgcccccaccctgccccacactctgtcagcttccttatcccatggccaccctgyacttcttaatcaccaagtcccaaatctgaggagtcttggatccctcctgccttcctgggtcgtcctagttttctctcag

SEQ ID NO: 541562 - DNA, 633 bp, Homo sapiens
ggctgaataaattttggtagaatagatggacaaacccatccctcttctttacaaccaaactccctgcaggaactcaggaatgggaggcacttgcttacaagcaagtgcctaccacctaggatctaagaaggactctgtctgccatcttggagcctgtggaggcttgctgggaacaggaaggctgtggtccaaggccatttttgctggctgtacrtggggtttccagaaccaaagggggcacacagctcttcttaaaatttcagcatttatgcctgggataaactgaattctatttgggcaagagatgtgctcatgtacacaaagcaaagaaccacacagcgacttctggtggcacaccaaacaaaaccagagtaatctgggaaaaagtaacttgggttcacggaaacagtggcatggtttatgccaaattcccaatcttcctgctaagactacagacacacaatctgtgtgatactgcaccgctcaaggatttaactaatgaaaggtgggtttgtgctcgtgttttgtttttttttaaaaaaactccctgtactggtataaggctaatggggtgcttcaaaagctcctgctgtacaatgaaaagaagagacagaagactggagggaaggagtt

SEQ ID NO: 541563 - DNA, 635 bp, Homo sapiens
acataaaaaaaattaaagtgtgaactagctttgaagctctttagcaataactgcatttgtttagggtacatgctaaaattgattttttttttcctgaaaacagtactctagaaggaataaaatatggttkgtgcttatatgccactggggtatacatgtgagatggtatcatgtgaggcatcctttagggtaaagaaaatatgtttctctgttagaaaacaggatgagtatatgattggatataatgtaggcatgctgagctacgtctcattcagtacctaaataagaagaccctaaacattctcagtcagaagcgattggctatatttaattttttaaagtaatagtagttggaatggaccttcagaaaagttgactgtgtaaagaaataagtcagaaagcttagtattcaggtctagacatcatgaattaaccatctggcagaaatagaatccagcaaaaacgatcttacgtaatttccaggacaaaatggtaggacagatctaggctctggtggataagtggtagtgagaagtatataacaaatagtgcttgtcactggagaaagtagttttcccagcttctgaatgtagttgactgccaagattgcatcaatggagtacctagttaacaag

SEQ ID NO: 541564 - DNA, 593 bp, Homo sapiens
agcaataactgcatttgtttagggtacatgctaaaattgattttttttttcctgaaaacagtactctagaaggaataaaatatggttggtgcttatatgccactggggtatacatgtgagatkgtatcatgtgaggcatcctttagggtaaagaaaatatgtttctctgttagaaaacaggatgagtatatgattggatataatgtaggcatgctgagctacgtctcattcagtacctaaataagaagaccctaaacattctcagtcagaagcgattggctatatttaattttttaaagtaatagtagttggaatggaccttcagaaaagttgactgtgtaaagaaataagtcagaaagcttagtattcaggtctagacatcatgaattaaccatctggcagaaatagaatccagcaaaaacgatcttacgtaatttccaggacaaaatggtaggacagatctaggctctggtggataagtggtagtgagaagtatataacaaatagtgcttgtcactggagaaagtagttttcccagcttctgaatgtagttgactgccaagattgcatcaatggagtacctagttaacaag

SEQ ID NO: 541565 - DNA, 602 bp, Homo sapiens
tgaaatgtgacatggaaggattttgaatgggtatgctgaacagcaagctggattcctttttcagtggcaaagagaccagaagggaactatgctgcttggcatcacaggcgactagaatgtgggtttagtatcctgtaaatacaggctkctgacagaagtctaactctgcattttttcatattgccacatcccaagttatctgaatatctgccatttttaccaaaggtcattttgactcctgatgtcttggctcttctctgaaattcagcattgaaagtaaagttattctccagaatggaaattgaggtttgtacattttggttgaaataaataggaccaatttgttgcctaaaagtttctcagctttaaggagttttgatactttattagagaatgctactttgttcattctactaagtatcttttaaatgtgctatccagtattttaagaagaaatacataagatagtattctggttttccaatgctgtataacaaaccaatccaaatattagtggcttgaaatgacaccatgtatttactcatgaatctgcagtttgggcagggctcagatgggacagcttgtcattgtttcagtgtgtg

SEQ ID NO: 541566 - DNA, 268 bp, Homo sapiens
ctggttttgatggctgggtccttgggcctggccagtcttcctcttagcctctggatctagaagggaccataagaggagtaggccctggttcctgctgtcctggtggctgggcccagcaggggccctcactcttgaagtccaggactgggtctgacctggtgggagcacctgccagaggatgctctttcccaggacggatgggccctrtgtctcaggagtggggttgggggacagccttcagcagcagctcacaccctaccttccccag

SEQ ID NO: 541567 - DNA, 545 bp, Homo sapiens
cgtacctgtgctcccacgttcccggctggagcggaagggaaggaaaggtcatgagaaggccgcagaaggcctccttcccacccacctggctgctgcgaccctcacctggtgctcccctcccacagtcggcctgggaggtgctcaatgaaggaaccattgcccagccagtagaggatgctgaagttggggaagcggctgcaggccacacaggataagctcagcgttccatctagggacacaggcagcagttagctcttcagaagagcaggcccttcccctaccctgctctgctgtgccctcyctgccagctccccccagtccccatgcatctggaacctagagaactgctctgcacaccacctaggtgggaacgtccgttacagaagtgcagttgtctccgagaggccctagccctaaacacggggaatgtgaggaatggtccttggttcacgtgatgaatcctcttctgaacctgtctcctcaggatgaccttttctagtgcccagcctcggtgacttgggagcccaggtgacaaaggcagtgct

SEQ ID NO: 541568 - DNA, 671 bp, Homo sapiens
acttcttcaaggaagccatctttgagccccaagactaggtcaaatgacactactacatgtgtttacagcatcatgaacctttcctacataatgcttattaaagttgtaattttatttttatctgtgtttgttactgtaatagccatctctcccacctaagagtaaagtttatctgggcaaaaaccatgtttatttttgtacacttttgtaattctggcayatagctatgtgtctagacacatagcaggcattaaaaagtatctactgaatgaatgttaacttcctgctggataaagtggctctttcctataatggccctaaagagaaaaattatagggtacatctgagatctggctaattttttttttaataatttcaacttttattttagattcagagggtacatgtgcaggtttgttacatgggcatactgcgtgatactgaggtctggggtgcgaatgatcctgttgcccatgtaatgagcacagttacctaacagatagtttttcaaccgttgtccccactccctcctcctcttgtagtccccagtgcctactgttgccatctttatgtccatgaatatccaatgtttagttcccacttataagtaagaacatgcagtatttggttttctgttcctgcattaactggcttatgataaaggcctccag

SEQ ID NO: 541569 - DNA, 671 bp, Homo sapiens
acttcttcaaggaagccatctttgagccccaagactaggtcaaatgacactactacatgtgtttacagcatcatgaacctttcctacataatgcttattaaagttgtaattttatttttatctgtgtttgttactgtaatagccatctctcccacctaagagtaaagtttatctgggcaaaaaccatgtttatttttgtacacttttgtaattctggcatatagctatgtgtctagacacatagcaggcattaaaaagtatctactgaatgaatgttaacttcctgctggataaagtggctctttcctataatggccctaaagagaaaaattatagggtacatctgagatctggctaattttttttttaataatttcaacttttattttagattcagagggtacatgtgcaggtttgttacatgggcatactgcgtgatactgaggtctggggtgcgaatgatcctgttgcccatgtaatgagcacagttacctaacagatagtttttcaacygttgtccccactccctcctcctcttgtagtccccagtgcctactgttgccatctttatgtccatgaatatccaatgtttagttcccacttataagtaagaacatgcagtatttggttttctgttcctgcattaactggcttatgataaaggcctccag

SEQ ID NO: 541570 - DNA, 646 bp, Homo sapiens
ctgctgggcccaccatggctcctgtgaagatcagccatgtggtatcattttcttctcaggtatattaatyagcaggcatgatttgttttcttaataactgaaaggagtgaaaaaaataggagtcttggctccactttcaggaaactcccaatctaatagaagagacattgtgagttcagagtctaagagaagaaacagctcttgccctcaggttgttcccacagaagtgcaggatgcgcaaaagaagtcttctcagaagttgaaagtacagaaagcagcaccctcaggattccgcccagtttgaagggcactggcaaagctgtaagcccagaaactgcaccaggatcctcagaaggggagtttgatcattctatcatttagaacagggtaggacacttgaggtaatcccagacctgtgaggttaccaccagcatcaagtgtgatctcagcctccttcctaaaagttctacaatatcccaattagagctagatcctaggccctgagaccaggcctgatctgatgtggtgattctgagggacttcccaccctttcctctcctgtcactgctctatttactcctactccacctctttcccttctgttatcctggtctttctcaaggggtgccattggcatttggggcca

SEQ ID NO: 541571 - DNA, 362 bp, Homo sapiens
gggtgtgtgaatatagtggtggggggcccaggtcagtgtgtgtgtgtgtgtgtgtgtgtgtgtgtgtgtgtgtgtgtgtgtgtgtgtgtgtgtgtgtrtgtatgtgtacgcgccccagtacaatacatggctgcaggcctggttgcaggtctggttcctgattgcagctcttttgccatcatcctgatctggaccctccagagaacggggagaaggggcagacatctgtaagccacttttgaagaaaccagagaagcttggtttcctctgtaatccctcccttgttcctctccagggctttggggttctgtgccaaactctaggctacaaagatggagtggtctgtgtgaagaggaggcttc

SEQ ID NO: 541572 - DNA, 160 bp, Homo sapiens
tttttctttttgatgttattgttagatttagctcttataccactctgygcttgttagactgattcatggtttgtccatctctcccactaaatcatgggttcgtggcagacagcatctatgtatcgatcatttttagcacctagcacagaacctagcacat

SEQ ID NO: 541573 - DNA, 160 bp, Homo sapiens
tttttctttttgatgttattgttagatttagctcttataccactctgtrcttgttagactgattcatggtttgtccatctctcccactaaatcatgggttcgtggcagacagcatctatgtatcgatcatttttagcacctagcacagaacctagcacat

SEQ ID NO: 541574 - DNA, 160 bp, Homo sapiens
tttttctttttgatgttattgttagatttagctcttataccactctgtgcttgttagactgattcatggtttgtccatctctmccactaaatcatgggttcgtggcagacagcatctatgtatcgatcatttttagcacctagcacagaacctagcacat

SEQ ID NO: 541575 - DNA, 523 bp, Homo sapiens
gactgaatctatagtttaagtgaaatttgctgaagaaatgagagaaaaaacattaaagcatgttgaaatgtttaaacaggtactataaaacatatgggtttaattccaaaagatattctgtagggaaattatctcagattttcctcaaaggaaaaatgaattaaagaacaataactaatgtataaaatatctataagaaatgctattttgaaaagctcctttaccagattattcataacatatctgtttatcatatgactgtttattaatgtaattttgatgacataagggtttcctgaagtatcaaaacaaatttctgcttgtcggattgccacagcagaaaacaaataataacatgcatggacaatacaaatgttatttttatcctaaagtaaagcatgcccaagatayatcttgttaagtacaaaatgtcacaacaatctagaataacaataaggataagaatctgttgaatactcaggaaagaaatattactaaattcaaaaagtcaaagaggaaatgg

SEQ ID NO: 541576 - DNA, 521 bp, Homo sapiens
gccaacgctctctacctatcaaatgactcaaactttctttcccagagaatttgaattctgagtgattttcacctttctttggttactgtagtcttccattaaattattgaacacagaaatgctaaaaattcctcaaagaaggccttgaatttcatgcatatagtctttcctgcactactatgtagcaacaccccaaaagtatcttgagaatatggatttttttaaaaaaatcatgttcttcataaaacttaacaatgtgmaattgtgttttggtgcaaagtcccaaaagattgtgctaattgattccacaacacttatttttatgcctttaaattcatgttgaaggtgtggcattatgacaatggagtgattgattgctatggtgaaaggcggaaaattttcttctcaaatggattctatctgaacacagatgagaaactttttttatgtttcttttaactatttataatttgaggaattatgacacctgataccttgaaagtagtgaaggagaaaaattg

SEQ ID NO: 541577 - DNA, 600 bp, Homo sapiens
gctttgtagtgaagtggaatttgtatcagccttggagtcagatgaatttggaatagtagacttaactatggttgttatcaaccatgtgactatcaggttccctatccgtaaaatcaagggaaaacctgtctcatggtgtaattgcaaatttcaagtgatttatttgaaaatgtacaaggtatcaggtgctcaacaagtactaattttgttttctctgttgctcacttgtaatgtggaaatgcaagtatctattactttcttactttaatatagccaagctttttagatatcaaagaagtctatttatgttatatgaatcaaaggctaatgatcagacttgcaaattgaaaacaggccactccttttacactagagattttactaaacagaaaaatcttttcatagaaacagcatcatttttttctgtccttgaggtaagaggagcttgcaatgaagagaagtataagccatgaaatarcgagtttttataaccatatttctacagttgattataaaatctgctccccctccattaattattacatcttaagaaaagaaatgtgaatatagtaaccagctatagagcagagctgccctgta

SEQ ID NO: 541578 - DNA, 600 bp, Homo sapiens
gctttgtagtgaagtggaatttgtatcagccttggagtcagatgaatttggaatagtagacttaactatggttgttatcaaccatgtgactatcaggttccctatccgtaaaatcaagggaaaacctgtctcatggtgtaattgcaaatttcaagtgatttatttgaaaatgtacaaggtatcaggtgctcaacaagtactaattttgttttctctgttgctcacttgtaatgtggaaatgcaagtatctattactttcttactttaatatagccaagctttttagatatcaaagaagtctatttatgttatatgaatcaaaggctaatgatcagacttgcaaattgaaaacaggccactccttttacactagagattttactaaacagaaaaatcttttcatagaaacagcatcatttttttctgtccttgaggtaagaggagcttgcaatgaagagaagtataagccatgaaataacgagtttttataaccatatttctacagttgattataaaatctgctccccctccattaattattacrtcttaagaaaagaaatgtgaatatagtaaccagctatagagcagagctgccctgta

SEQ ID NO: 541579 - DNA, 626 bp, Homo sapiens
ttgtctcactacaattatgtaacgtattgcagtccatttttatagatgagaagactgaagataaagaaaaaataattyacttttctttaaatggatactaaaagatgataccacgttttgaacccagattttttgagcaatttaaatcacattatactgtttccaaccatagattatatcataaatattttggcatagtgaagagcatggaaagagtcaggttggatacacttctgaagaagataaagatatgttattatttcagagaaagatgagtgtccaggataaaatttcagaaggggcttctttggctctttattaactttgttttttgggttatctttgtttgtttgttatgttttttgagatggggtctttctctgttgtccaggctggagtgcagtggtgcaatctcagctcactgcaaactccacctcccgggttcaagtgattcttcttccccagcctcctgagcagctgggattacaggcacccaccaccacgcccagctaatttgggcatttttttttagtagaggcagggtttcaccatttggctaggctggtctcaaactcctgacctcaggtgatcacccatctcggccttccaaagtgctgggattacag

SEQ ID NO: 541580 - DNA, 626 bp, Homo sapiens
ttgtctcactacaattatgtaacgtattgcagtccatttttatagatgagaagactgaagataaagaaaaaataattcacttttctttaaatggatactaaaagatgataccacgttttgaacccagattttttgagcaatttaaatcacattatactgtttccaaccatagattatatcataaatattttggcatagtgaagagcatggaaagagtcaggttggatacacttctgaagaagataaagatatgttattatttcagagaaagatgagtgtccaggataaaatttcagaaggggcttctttggctctttattaactttgttttttgggttatctttgtttgtttgttatgttttttgagatggggtctttctctgttgyccaggctggagtgcagtggtgcaatctcagctcactgcaaactccacctcccgggttcaagtgattcttcttccccagcctcctgagcagctgggattacaggcacccaccaccacgcccagctaatttgggcatttttttttagtagaggcagggtttcaccatttggctaggctggtctcaaactcctgacctcaggtgatcacccatctcggccttccaaagtgctgggattacag

SEQ ID NO: 541581 - DNA, 501 bp, Homo sapiens
tgttttacaactgttaactcatttggccaatattatccctaggaagagggcgctaatattgctctccattgttcagatgaggaaactgaggcacagagagggtaagcgacctctctgtgtaccctaagcagggcgcacagagccttaacacacccagctcctgcatctgtgcctttgatcaccatagggtggcctctctgctgcccgcgttgttctctgaagtttccactcatatggagactaaactagaacgactgtcaccaggcatggtgcttttgctcaagttatatctcactgaatccctcacagctcggaagatgggccgggagccctgtccccttgcagctgtgttgtcccagccccaggccatgctggagcacggaggtggctcaggtgtttgtggggaatgaagggtcacactgagtgcagggctgggaaggactggcctaggaggcggggccggggtggaggtgcccstgctgagttctgcccctgctgtgt

SEQ ID NO: 541582 - DNA, 606 bp, Homo sapiens
tttcccaaggaatttatttttaaatttggaggtaccatttaggatcgctttattggcactagtttttaaattttgttgcattgcttctcttccatttcccctctattgcacatgataagcrttattttctcatttgtcaggaaggaaattcccatcacaatatctagcagctcttgaggctgtgaatgtcttataattttagaaggttcagatcagaaaacatacagtttctgactcttaaaagtacaacctagatatgtaacacattgaaagactgactaatccagtcttgatcacttaaggatttgaggagtcgagtcctgcactttcaaccaagtgtcaggcattgcttcagtatttagctcttcttgagtctagaaggtctttgagattctggccataaaaatgaacttaagagcaataaatgtattgttgtagcttaaagttccaggagcacagcttaggtgctgaactatcttttaaattttttcctttgtgaaatgtttgtagcttgggatggctagtcagaggaacaatggtgttataaaagaggtgggttagattcgcctcaccacctgatcatttcattttggatgctactaccaa

SEQ ID NO: 541583 - DNA, 249 bp, Homo sapiens
gctcccatgccttttagttttgtgtgattgttttaggcctttatttctccaggcatactttgtacatgtctataagcagatgagagggagcaagggcacataggggctgatagaggcaaatgtaaatcccgttttttccctattaactcatgaggcctgctgggtagcagcaggcattaccagacatttaattgtgtgtaaggtaaggytggcacaattccagcatcatggtggagcaagaattatact

SEQ ID NO: 541584 - DNA, 589 bp, Homo sapiens
gcactgcacatttactgccttagatatcacagcaggttttcactccaaaccacctaagtatgtagatttttaaacaccacttaaacgatcttctgccaaaagaattaaattaccatttatagcctattcctctattaaaaattaatgaatttactagctcgtaggatggaggccttcatttgttttataaaaaaaagctttgatctgcaattctccaaggctgtgattgtttttattcttcagttcttctcattaaaaataaatacctccgttctctaagatacacctgcaaagcacttaaaatacccatttgaagaacaggaaacctattttagtttccctgctaaagaatctactgtttaaagtgcttctgcaatgggaaaagctcttttcttcagtacccaggcaccattctgggtggtgaaggaccaaaatccaaggtttgcacctaatcactatttacagagcaagctcaaagggcarcttcttaaagctgaagatctaagctgtaatcagaattccacacatactgtcttttgttcaagagggagtaatgagtcaacttgaagtcagtttgatgcattgaata

SEQ ID NO: 541585 - DNA, 617 bp, Homo sapiens
cctgcattcctaaaggaggcaagagctgtcagagtcaaattcacagtggagatctcaggtctagttttagctttytaataggcaagctgtgtgaccttgttcaaatcacataacctgtctcaatctgtttcctcaatggttaaactagggtgttggggtagataagcttatgatccctttggctataaaactcagtgactttacatggctttggctcagtatttcattatataatgtgaataatggcataagctaaattattgtgattcaaatacttagtatattatcttatacattctctagctacagtggtttgtattttaaagaaataacccacatcaaaccctttttcttcttttcaggcagccattagcaccaaccagggagtaaaactttattcccaagtatgtcatacgagcagtctataactgatttcaggagcaaggacccagaacataaagtagcgccatgagaatggtaatttgggtggtatcagaataggctgctctagaagatagggctaagcagtatctggctgttctgggactcatcattgcaaggagaaatcttgcttgaactccccaggaattaaatgctagctctaaggagtagttccc

SEQ ID NO: 541586 - DNA, 619 bp, Homo sapiens
ataccatagtgcctaaaagtgtaagttccaaagaaaaactacatgagctcaaatcctacctcaagtattcgctacctctgtgactaaagtaatttatttaaattttccaggcttcatccaattgtgttagaaatcaagaaaaacagtatctatttcataaggctcttgtgcagattagcaagacaatgactttctagcatgaaccacgttgaagtaaatactaataaactttagtaaaattattattataccataactttcttattagtcataaggattctattaaatttgatgtcttctttagactgattttgattttggagacattcacacttttttttttgcatactttaagttctagggcacatgtgcacaacgtgcaggtttgttacataggtatacatgtgccatatkggtttgctgcacccataaatttgtcatttacattaggtatttctcctaatgctatacctccccctgaccccctaccccacgacaggccctggggtgtgatgttccctgtcctgtctccaagtgttctcattgttcaattcccacctatgagtgagaacaggtggtatttagttttctgtccttgtgatagttggctcagaatgat

SEQ ID NO: 541587 - DNA, 625 bp, Homo sapiens
ctactatcaaatatgttgataattctgaactggtttctttattttcaaggttacaacaggcggttcaccaacctagataccctttctatattacatatattagatctcataccactttaccaggactcatgtctgctggtaaccataaagttgactgtttggtctcttttgcaacccaagaagctaaggagttccataatctcactcatgtcaatgctgctggattaaaagataaatttgctcttacctggaaacaggctaagtttattgttcacagctgccctcagtgtcaggtctttgtacttccaaatcaggaacctgacattaatcccagaggcctaactcctaatggtttacagcaaatggatgtgactcawgttagctcctttggcagactgtcatatgtgcatgtttctgtagctaccttctcaggtttcatctgggctacttatcaaacaggggaaggcatggcccatgttaaaaaaatctgttttcttctgttgcagttattgggcttccatatcaaataaagacagacaaggtccctggatatgttagtaaggcttttgacttatttatgcaacagtggggaatttcccatattactggaatcccttataatcct

SEQ ID NO: 541588 - DNA, 629 bp, Homo sapiens
tgactaggtaccttcctgaccataggtatccattagtatgtttgctgaaataatttttagattcataagtaaaatcctgtattatgcttccagaacataacagacatttgttcatttacacttcaacaaacttgacatgatccagaattttaaattctctaatcaaatatatctgaaagtaattgtacacatttattaatatatcatataaaatataatatcacaaacactaagattacacatctattgattcatttattattaggtgtaatatggaacatgtttttcttcttatttgacaaatggaaacatacaaataggctgtatattaaaatcaaatatacattgtatacattgataaatttccatgtgtgctagcttaatttttccaattagaatttatcaaataaaaccattggtttttaagatattagctacatttcaacatatcacaggaatttttaatgaattatctcttgtcaatggtttcaaatactcacatcytggtccagaaaagcaatgcttctttcactgaggattgccatagatacctcatgcctctatgtgtcctcatgaaacacaggaatatacgtggctgatccatggatatagaactagttcctagtggc

SEQ ID NO: 541589 - DNA, 604 bp, Homo sapiens
gtttattatagcattgtatgttataataagtcagatttttaaaataatactacttaaaagattaactgttacattttcagacagaatttacaagaaacataaaagagtcagaacttgtgggtgtcaaagatgaaaatggtttccctttccagtctctgcaaagagctaagtactctaaaagtaagagtggtcatcaaattaaaagtcattctgaacttgtgggtgtaaagacactatgaataaacttcagaaaaatttaatggtgggtcacgtaactatcttaaactagacaaatttaattccaaggttcttaagagtattatctgactgcacagagagtttcagctcaagtctgagaaggggcagtttcaaagatatttgtgaatatggtgcttgcctattccacaaagtstttaaataaattacacagaaggaagcaccatagccttcccttttgaacaggagcatctattttaattacctattcctccttttctccactctgtgctgggaatacaggagaaatgtcctgtctcaatagatgtgtaatagagaaaatacataatttaaaatgtacacaataggacctgcacccaagcatccc

SEQ ID NO: 541590 - DNA, 663 bp, Homo sapiens
acatttccaagggaacgtccgcggctgggctgaccctcacagcctctaagtagccagaataacctcagcggccccagcactgatgagtatgttttgtggcatttaaggcaggtttaaagttaaagataaaaaaagcccatgacgcttctttggttaagtggtttacccttcgtggtaattagatgtagtgattggaatctcttttctattacatggcaattttcctttaaatctcccctaaaaaaaaaaaaggaaaggaaagaaaaggcaaggaaggagagagagaaggcaccagcaggccgggaatcatttgcattttgcgaatgaggcctcttgtaagctcagctcaggcgtggggcccaatgtatggaatgcttaagagattactaaaaataaaatctattaattagtcatactcaattccacagacatgatgtgcatcaaaagctccttttcttcccttttctccttccccctccccacggcctcccgccacagcctccatcttctctaaataggctggggcttgctccacgctaacatggkgcatgcggcggccaggggcctccctgacacagggccaggatgcaggtccggagccaagagcaggggcattgcaccttcctggctctgggtgacgctggcaggggaggggacagcacc

SEQ ID NO: 541591 - DNA, 530 bp, Homo sapiens
aaaaaccacactttctttgttcagccatttctccatgctttcctgaggtttgtgcttctctttccccatccctctccctttcctcattcctacgcctcatcwgttctctcttagatgcaataactcttactcattctgaaagaccgtgccacaatctgtacctccagagaaatctgccttatcctctaatattaagatgaccacataatttatcatgcaaacttgaactcttttgagaataaaaaggaacacaatgcataattacactgggaaaacaggtgtaaactaggaaaatcctggcaaatacaaatacatgtcatcttgcctaaaatagatcaggtatttttagagagaaaaaagtattccttcccactctaacatccaagagaactgtagtaagttattttggcctctttcatctctccacttattccactccaggaaggtgacatatttttgcctgataatttttctaagaatgagctgggcatgtgaggtccacttttctctttcttctctgaggtccagca

SEQ ID NO: 541592 - DNA, 638 bp, Homo sapiens
ccatgtctgcaagacactcaagcagcctgaaggagaggcccatatggcaaagaactatgacttcttcaaaacaaccagcattatcttgccaggtatgtgagtgagccaccatggaagtggctagtgcrgccccagtaaagtctacgtaactgcagcctcacctgacatcttgactacaatttcataagaaaccctgagctaaagcctttgaactatttcattcccaaattcctgacccacagaaactgagatttaaaggtttttgtttaagctgtgaggttaagggcagcatagccacagttaacaaataaagattttgtttgatgtaaaactatcaactattctgttacctgtcttttgtccttagtgtcctgtcttttgtcctcctagactttagccttcctctccacaccatcctgatgtgggagtgcatatgagaatatgtatctctgacactagggggattccatttgctttgttcccttcctcactgtttttgaccattccaaaacaagagcttcacacaaatctaaatctctacatttttatgctgctatattcctcctgataatatacgtccaaatcccttattgtcaaaaaagctcataaaaatattcccaaggaattccactgtttat

SEQ ID NO: 541593 - DNA, 232 bp, Homo sapiens
ttttcttattaacctgtcatttgtgcgggggttggtagggggacttaatcactggtmtctttgcatcagcttgactggagctaaacgatgtttttttccaaaatgagttcactcctatggctgccaaattggtgctggttatcacctaagagtttggctaggattgtcagacatcttagttcttttctgtaaaggcttcacagagctggttagtctgccatggagtgagcag

SEQ ID NO: 541594 - DNA, 653 bp, Homo sapiens
tcttaatgactgtcttttaggaagggttacttcttagacccatgtgtaactcacaaatagataggggaaacctattagagaaaacatatgaggttgccacagaaacgttaagtaagccctacctctggtaggtgagcagttccagggtttccatttttttctgacagtatatgaaagaaaatgcttaaaaattttgaaattctagaatgaagacagcatcacgtaactttgttctcattgcttcaaagttttgggaggaaaccatggctctttcatgttccccattggcccctccccaacaataattttaccacatatgctactggtttgcagtggtttgatttgttgttttcttagagggaaaatgaaaatttatcatttctggaacttcatacttccattcttttaggagactttgtgaacttcaaagccctttagttttattctatttaatcttcayaaaaataatttcagggttatatttaataattatatatttgttttgattaaaaagataataggaaataactcacatatatttatttataaaacctttctaaaaaccacgtgctgttacaaaagcaccacattcctagcacctcactcattacatttccctgtgctatgctcttgctagtctatacataagcaaa

SEQ ID NO: 541595 - DNA, 502 bp, Homo sapiens
tcaaagggaagctggaaatcctttttaaatcaatttttaatgggaaactcyccccgcacacacacacactttttttttgaggcacagtctcactatgttgtccagactggttttgaactcctgggctcaagagatcctcccacaccagcctccccagtagctgggactacaggcatgacccactgcacccagctaaatttttcaattttaaaatgttggcaactcacttaaatgtaagacaaataaacacatctgtaggctggcagtgctgcccacactgcccagactaggggttagggggtctgtatgggccatcaccaggctgctaaccacagcaaccaatatgtgccaagcctgactacacgtaccttctcattccaccctcctggcagcctcacatctgctttacaggtggggaactgaggctctaagagactaagaaaattacccaaggccactgcagctagccaggggcaggtatgggagtcagagctgggtgcag

SEQ ID NO: 541596 - DNA, 485 bp, Homo sapiens
gggcctgggctttcccacttccctcctgcacgcgtgcctggcacagactcacrtgtaagggggcagcgaggtggggcaggtagccctggagccctggccaggagcccatgggccaagctctttgcatctgtgggccttagtatctcatctggggtaacagtccctgtcccaccgagcagcgtcaggaacagcggaggtcatgtgcctgaaagagcctagagagctacggtgaactgcttggcaaatgtgagctctcatgacttatgtgcaaggcctggttctcagcagccttgatcctcggtaacatttggccagaggagggagactcccgggactgaactctaaatcagaactaggcggtttaagaggtcaccgagcccattcccctgtcttcaggcaagatgatccaggaacgctgggctcctgggaacataagatgaagaaagatcaaggggaaaagtatgatttggaataaggacctgaaa

SEQ ID NO: 541597 - DNA, 485 bp, Homo sapiens
gggcctgggctttcccacttccctcctgcacgcgtgcctggcacagactcacgtgtaagggggcagcgaggtggggcaggkagccctggagccctggccaggagcccatgggccaagctctttgcatctgtgggccttagtatctcatctggggtaacagtccctgtcccaccgagcagcgtcaggaacagcggaggtcatgtgcctgaaagagcctagagagctacggtgaactgcttggcaaatgtgagctctcatgacttatgtgcaaggcctggttctcagcagccttgatcctcggtaacatttggccagaggagggagactcccgggactgaactctaaatcagaactaggcggtttaagaggtcaccgagcccattcccctgtcttcaggcaagatgatccaggaacgctgggctcctgggaacataagatgaagaaagatcaaggggaaaagtatgatttggaataaggacctgaaa

SEQ ID NO: 541598 - DNA, 357 bp, Homo sapiens
ttttcttcctgggagctccacagcacccccgtgctggctagtcactaaggtcacctgcctcgagttctcctcgaygtttcattgtcctgggatgcactgcatccccccacccaaggctcccccacccaaggccccccctaagcaaccccacctatcattgaaggcccagttctctccccaggcagctcctgtgacccagatggaatcttcttttttctcgtcttctctctatattctcatcttgcctctttttcatcaatttctccaaacctttattgagcacctactatatgtcagatgctgatgaaacagaaataaggaagaaacagtgtacacttcttgagggcaggggccaca

SEQ ID NO: 541599 - DNA, 562 bp, Homo sapiens
tgccccgtaactggcctctccagcaagtatgtgttaaattcctactgtggaccagacacagtgacaagtgccaggtgttaaaagatgactgggggccaggtgtggtggctcacgcctgtaatcccagcactttgggaggcagaggtgggtggatcacgaggtcaggagatcgagaccatcctggctaacacggtgaaaccccgtctctactaaaaatacaaaaaattagcttggcatggtggcgggcgcctatagtcccagctactcgggaggctgaggcaggagaatggcgtgaatccaggaggtggagcttccagtgagccaagattgtgccactgcactccagcctgggtgacagagcaagactctgcctccaaaaaaaaaaaatgactkggctccctcttttaaggacctcacaattcaaggagacagacaggcgaacagaaaaacatcacgcagaggtggagagaggcagggggtcatgagagcagagagggtggttgggcacattgcttaccagcagtggtaacctggaagcattgtccagatccaggtgcaactc

SEQ ID NO: 541600 - DNA, 598 bp, Homo sapiens
aaaaggaccctctcagtgtgcatcaaaaatctaagtgcctgagaagaaaggaagcaaattaatgaactcatacatgcacgtgcacccacattcaaaccaactggtggtaccaagcaccagccatgcaaggccaagctgtggtgggtggcacactgccagcctgagagagggtttggtgacagcattttgaagatggagatgctgaggtccagggatgtttaataatttgcccaaacccacatgaaacttcctacctctaaattacgtgtaagggaaaggaactacatagaagctgtctaaaatggaagctygggaaggcaaaaattcttctctgtcttgttcatcacaatatccataacagccagaactgacacagagtgagctctccttgaatgaatgaatgaatgaatgagaatgaatgaatgaaattagaataaactcaaagataaaaacctgaatgactggaaggttaactacataaagctgacccatacctgaggctgacttatagttctgtaaaaggaaggacaaatgaaggtaggaggaagtcccattctcaaaccagcagagatctcagacctcagccctcatcttggcc

SEQ ID NO: 541601 - DNA, 557 bp, Homo sapiens
agggcctccatctagctctctggatagctagataaataattactaaataaataaataaatgaaaataaacaaagcctccaatgagtttgaattgctgccgtgctgagaggtaactggcagattcaatttaattataggatacagcgtcgtaatggggtatgtaaggctcaaggaggatttcagtaatgggaggacagcggggttccctgccttttccgctgggtcctctcctaaccccaccgcctactttccctccttgctgtgtgggctggggtgggtgggggaagcgggtagctgcctgggcttggctctgctgttggggagatctcaccagttcctcatcctctgctcctcaccagcctcagctcccaaggtggcccaagttacaatgccctagaggacagtcctctctgcggaaacgtgtgagggaggagagacagcaaggagagctggagagccctccctccttccaccccagtgaaggtgcgcagcattcctgggtgaacaggacccascccgcgaggcaacgcatgcccactggactgtgaaccaggcag

SEQ ID NO: 541602 - DNA, 636 bp, Homo sapiens
cacaccaaactgcctgccattaatttctgtttcttgtttgataggcttccagagaygtgctcgagtctactagcttcaggtgggaaggggttagtcttcagcaagcacacctgaactgttgtgactgggcaacttggggacaggacaggaaggccttctacaagcagccatccagatgcacttgatggcctcagaaatggtgaggtagcagaggctggtgcctatccgttgtcaccggctccatctgcagttacttgagggcacattaatgtctgaacagggcaaccaggcaaccagcaagtgctgtcctggccaatacggtcctcaccctggaagcaggaatgctaatggcatcccagcttgccgctgggtgccaggcatgcagacacgtaaccagccttctctccccaccttccctctttcctgtcacttgtggccgccactcccaacagatcttagccaccctggggtctccttagcagagtgtgatgctgctccctgcaggcagctttgtgctctgggggctgggttccagagaaccatggccagtggaaattgccaggcctcagagaagacccactcctccctgtcctgtctatattcatttgctagggctgctgttacaaagtaccacca

SEQ ID NO: 541603 - DNA, 310 bp, Homo sapiens
tataaatgctatgaaggcagagagtgtgccttacagagctggggtttataatcagggctcaatgaaatctggtcaaggaattatagaatggacctgtctaaacaccaacagtgctgctccccagagacccgggtttctgcaagaaattcagaggcaagtttttattccctctgagaaaaccctagcggctcccacgggcttcctccctcaggtgctcaacatctgctcaacaatcctggttctggccaggagcttctggtgagctccacgacagctgcagagggaggarggagcaagaagaaaagtagat

SEQ ID NO: 541604 - DNA, 600 bp, Homo sapiens
ggattacaggtgtgcaccatgcctggctaatttttgtatttttagtagagacagggttttgtcatgttggccaggctggtctagaactcctgagctcaggtgatccgcctgcctcggcttcccaaagtgctgtgactataggtgtgagccaccacatctggcctgatttttgtttatatatatattaaaaaatcaattcatctatcaatagctacatttgttgagagttcataatgtactaggcactgttgtaaatactttatatacattattgccccataatcctcagggtacagtttaactgatctctatactactaacctgttttaccaaaatcaggaaactgccttccgagaccaaacatctagtcccrtaaatcaaattacttattaacatcctggagtttaatggagtaggcgcaatattgctttccagacatcatcgataactcttcaccaaccagaagccacaatcggagaagagatacctaagacattttcgttatattgagacctgggacgaggacatgccttaaactctaattttttccttaaattctttgtattaagtggctttcagctaaaatcagcacaggatggt

SEQ ID NO: 541605 - DNA, 573 bp, Homo sapiens
tgttaacactcaccgcgaaggtctgtagcttcatttctgagtcagcgagaccacgaacccaccagaaagaagaaactccgaacacacccgaacctcagaaggaacaaattccggacacgccgcctttaagaactgtaacactcaccacaagggtccgcggcttcattcttgaagtcagtgagaccaagaacccactaattccggacacactttgaccagcagagcaggcagaagtaaagccacggttcacagaagtggtgaggggaatacgtgggtcctaggcggacgctgtctgtatctggtacagggacaaaagcacagaggtgttctccaattgccccaagccccgcaggagcaggcacagagggaagtgagggcttccagtcccctgggcccctaatttctgaatagttccccgatcccccacctcacgctcttcctgatgtctggtctttttctggttccgtgtctaggctgccccggctggacacaggctcaatcttgctggaatctgtcctcttactcccckaccccagcccagtgccccaccagcgtgctccactcagcatcctg

SEQ ID NO: 541606 - DNA, 603 bp, Homo sapiens
aacaatgaacacaacaacctcagtccctgtgagcacagatgtttccatgtgtgtgcagcgctgcatgcgtccacctgtgaacctgtgaccaatggacatggacccccacccggggtccctagtgtaggagtgcccagccacctccttcagccccggcttgtctcatccccgcagcctgctgtggtggtgagttgtcaaatgcgaacatcagctgcacagcatctttatgaggaggccaggacaggcaggtaatttatcaaacattacttaaaatagtcccccagcctctcgctccctctctcttgttgctgtctgattcttgattgtttcttctttctgtctcttgtttttctgcctggagattgacagccccctgctaatacagccttggagataccacatactggtggaaccgacacctcactctgcctcagcctccatcccagaactaactgctccrcgctgactccagcggcactgcagtgctcctgtctgcatgcccgtggggccggctgatggatgaggccacatccctcgcactgcagaaagctcaggaatcaggggcacatgcactgtgatctgctgagttatggactagctaat

SEQ ID NO: 541607 - DNA, 669 bp, Homo sapiens
ctggaagcaaccccaatgcccatcaatagcaggtgaatggataaataaatcctagcatagctatacaatcaatggaatattactcaggagaaaaaggaacaaactactaaatgcaacaaaatggatgaatttcaaaaaaaaatacaccaagtaaaagaagacagacacaaaagagtatatattatatgatttcatttatataaaactctagaaaagagaaatctaatctatagcgacaagaaagtacatcagtgattgcctgggaccatgagtcgtggggagattgagtaggactgagtaccagggaagccagggggtaatggaaatgtttatatcttgattgtggtggtggttacataagggaaaacatctgtcaaaactcactgagctctacacacataaaataggtctataaattatacttcagtcgagttggggaaatgccacgtataagactattacaaacaaccttaattttggatttagagaaacacctttaaattaataacatttaaatctaacccaaatttgkaattaaaagaacaaatgtcaaaaaaaagttaaaagaagaatacacacacacacacgcacacacacacacacacacacacacacaaagatgctattatgatggactccatcctggctacccaggaataactgaaaact

SEQ ID NO: 541608 - DNA, 522 bp, Homo sapiens
ttatttgctacattgaatttattactgtgtttggctgactttttttttttttttaactcaagacaygctgataacttttatgataaggaaggagaaggcaaaacaaaagcatgacagaaagtgtaaagattggactgcaggagaagatatgtgaatactttgattatcctgtttgatattgtcttacttttgggagaagaaaaggatgagtattaataagtccatcttacagagaaagaaatgaagggttgaaaaagagctcatacggctagtaagtggtggagtgaaacccaaatgccagtgttttaaaaggatatagccaatattccagagaaaaggaaatttctataataaggccaccaaacttttagtatattaagtaaggcactgctatattttctagaaattatccttttacaaatacttttcatatagatatctaattattgtatccgcaattgtcgaaaagactcaactctctcccattgaattgttttggtgccaaagtagaaatagatcaac

SEQ ID NO: 541609 - DNA, 522 bp, Homo sapiens
ttatttgctacattgaatttattactgtgtttggctgactttttttttttttttaactcaagacacgctgataacttttatgataaggaaggagaaggcaaaacaaaagcatgacagaaartgtaaagattggactgcaggagaagatatgtgaatactttgattatcctgtttgatattgtcttacttttgggagaagaaaaggatgagtattaataagtccatcttacagagaaagaaatgaagggttgaaaaagagctcatacggctagtaagtggtggagtgaaacccaaatgccagtgttttaaaaggatatagccaatattccagagaaaaggaaatttctataataaggccaccaaacttttagtatattaagtaaggcactgctatattttctagaaattatccttttacaaatacttttcatatagatatctaattattgtatccgcaattgtcgaaaagactcaactctctcccattgaattgttttggtgccaaagtagaaatagatcaac

SEQ ID NO: 541610 - DNA, 528 bp, Homo sapiens
ttgtcaaatcaataatctatagtttcaccttaataaactagaaaaagaagagcaaattaaatccaaaaaagaaatattaaagagaagagcaaaagggaataaaataaattgaaaaaccagaaaaacagtagaaaagatcaaacaaaaaatccagtgatttgagaagataaataatattgataaatctctagtcatactaataagaaaaaaatgtaacaggaaagaaagattggacatttacccagataatacaaaaaaaaaaaaaagagagagagagggagaaaagcagcatagttggttggagttaatgtcagattgaggctctgttcacraattagccagcataaattgtgacatggtcttagtctaatctgctgcctagtttaccttatatgaagaatgagaaagacactcatctctctttgcccagacacagtgagataatgagtgaaataatacaagtgctaatttccctcaatatctgttactaaaatgatcattggaaataggccttgtacagaatattgc

SEQ ID NO: 541611 - DNA, 362 bp, Homo sapiens
gtctgtctattcctttcaggcccggtgagggttggcatcattaagactactgctgagccagagaggtttggggcaagcacaagtaaaaatgccacaaagctttcctattttgaagtggctttttccttgattcagtgatctyttggttattctaaaccctttactgttttctggagtactgagaaagttgactctgagagattgtgcttgttttttgtgatttttggagggattgaagcttgtagccacctactttaccattttattgacaccatttggccatcttctttctcttttagttttttcttttcttcttatctccttgcttttttttttctgaaatgttctctctccttatgcct

SEQ ID NO: 541612 - DNA, 410 bp, Homo sapiens
gaaaatgttttcctgttgtcttttctagtacttgtataattttgagtcttatgtttgtctttaattccatcttgagctaatattttagtatggtgagagatagatatccagtttcattcttctgtatacgtcaatccaatttatccagtactatttattgaaaaaggtgtcctttctccaatgtatgttcttgtcagcttttgtaaaagattgattgtttttaaatatgtggctgtatttctgggttctgtattttgttccattgwtctatatatctagttttgcctccaagttagcctggtctccaggtctatgtttctcaccattatccatcaccttgtcttgacagagccacaagttaggaaaatacgttgaaagaatagggagctttattttgtatagctttttta

SEQ ID NO: 541613 - DNA, 412 bp, Homo sapiens
ttgtgaaaccagcactcaaattggcatcaggagatttgaagttcaaacctcgctctctgctcattttaactttggtggaggtgctttatctcactgagccttatcttcctgatgtgaaaatgtatataataacatccatgtaatggaatatattcagctctaaaaagaaatgatctatcaagccagaaaaaggcatgcaatcgtaaatgcataatgctaagtgaaagaagtcaatctgaaaaggctacatactgtatgagtccagctatgtgacattctggaatagacaaaactatagagacagtaaaagatcagtggttgccaggggttagcgggkagggagggatgaataggcagagcatggaagatttttaaggcagtgaatctattctttatgagactataatggtgg

SEQ ID NO: 541614 - DNA, 599 bp, Homo sapiens
tgcttatgcccctacttctctctctgtggattgtgattcagcacataaaattttccctttcatctcccaatttgcatgcttatattagacatggatttggttagacctgcatctgttgagatggctcaccaataatagaagccccacagggactagtgyggtctggtttcaggaatgggtctagcaagtgaggtctaagtcaggaagttattagccgcagagtcagggaatatatttagctgtcatcactttttaatgaaaaatagcctggtgacatgtacattccagcactctgatgtagacagttgagcaccacgcttcctccatgcactggctcctcccacagaaaaaggtaagtatcttctccatggtccaaggtctctggggtatgtccagagacgatgagaaatttcatcttcagaagggaacaggcactgtggtatcctggagctggctctcagcagctcatgcaaaccagttgtgtgtgtgatctcttcctaactccacctttagtaatggaaggttggtgagagtgtttgcaacacggaaatctgcaaatgctacaaatcaggactttttcttccctggagagcggcatg

SEQ ID NO: 541615 - DNA, 418 bp, Homo sapiens
ctgcttatgcccctacttctctctctgtggattgtgattcagcacataaaattttccctttcatctcccaatttgcatgcttatattagacatggatttggttagacctgcatctgttgagatggctcaccaataatagaagccccacagggactagtgcggtctggtttcaggaatgggtctagcaagtgaggtctaagtcaggaagttattagccgcagagtcagggaatatatttagctgtcatcactttttaatgaaaaatagcctggtgrcatgtacattccagcactctgatgtagacagttgagcaccacgcttcctccatgcactggctcctcccacagaaaaaggtaagtatcttctccatggtccaaggtctctggggtatgtccagagacgatgagaaatttcatct

SEQ ID NO: 541616 - DNA, 418 bp, Homo sapiens
ctgcttatgcccctacttctctctctgtggattgtgattcagcacataaaattttccctttcatctcccaatttgcatgcttatattagacatggatttggttagacctgcatctgttgagatggctcaccaataatagaagccccacagggactagtgcggtctggtttcaggaatgggtctagcaagtgaggtctaagtcaggaagttattagccgcagagtcagggaatatatttagctgtcatcactttttaatgaaaaatagcctggtgacatgtacatkccagcactctgatgtagacagttgagcaccacgcttcctccatgcactggctcctcccacagaaaaaggtaagtatcttctccatggtccaaggtctctggggtatgtccagagacgatgagaaatttcatct

SEQ ID NO: 541617 - DNA, 440 bp, Homo sapiens
ttgcagcttttctatactatcagaactactctcctcagagataacagcaccagccatacattactccttcccaaaggtcttcgtcacacctttgtgattcctctttttcaagtctctaagatttaataattccattctcattcatttttccctcaggactaggactggtagatatttatgtcctaccacctaccattatgatattcatgtcccttttgctttttgtgttctgtctacctagttaacaaaaacaatttttatattaaattttakgtgttaaaatagtcagcatggtttatgtcttgaatggtccctgactgaaacagaactacttttacccttgagatatttatagatccagtgaagacagcgtagctgtgctatgctttttccagccataaagaacaaagccataggcctgtcaaactttcgaactctgg

SEQ ID NO: 541618 - DNA, 563 bp, Homo sapiens
tttggtccacattgcagcttttctatactatcagaactactctcctcagagataacagcaccagccatacattactccttcccaaaggtcttcgtcacacctttgtgattcctctttttcaagtctctaagatttaataattccattctcattcatttttccctcaggactaggactggtagatatttatgtcctaccacctaccattatgatattcatgtcccttttgctttttgtgttctgtctacctagttaacaaaaacaatttttatattaaattttatgtgttaaaatagtcagcatggtttatgtcttgaatggtccctgactgaaacagaactacttttacccttgagatatttatagatccagtgaagacagcstagctgtgctatgctttttccagccataaagaacaaagccataggcctgtcaaactttcgaactctggtaaaataatccactttaatctgggacttagggatgtcctgtaagtaagttactccttgtattaggtcatctgtgtcatgtggaaaactttaaatctcaaactttgtttgtat

SEQ ID NO: 541619 - DNA, 443 bp, Homo sapiens
aaaatgagcggaaacagaattcgttctcataatacaccctagaggaggcagcaacgtgtgattggttccattctccagatggggagagtggtccaaatggtctagaggggaagagttggggagcaagagagtgaagcagccagggagtcccccactccagcagtgatgatttctcaggccccctgtgctggcgagccaggtcctcaggcccccaggcaaaggtccagggcccagtgcrcaggtggcggtgcatgccctgttcctgtgccctctccgctcacttcagccttggatctccttcccccagtgactcctccttcctgtcttccatctactccttagaatctctcgcccggaactgagatttttcaccacccagcctcttaccctccccaccccagccagcctccagcagcccagcttcctctctggaaggagggaga

SEQ ID NO: 541620 - DNA, 443 bp, Homo sapiens
aaaatgagcggaaacagaattcgttctcataatacaccctagaggaggcagcaacgtgtgattggttccattctccagatggggagagtggtccaaatggtctagaggggaagagttggggagcaagagagtgaagcagccagggagtcccccactccagcagtgatgatttctcaggccccctgtgctggcgagccaggtcctcaggcccccaggcaaaggtccagggcccagtgcgcaggtggcrgtgcatgccctgttcctgtgccctctccgctcacttcagccttggatctccttcccccagtgactcctccttcctgtcttccatctactccttagaatctctcgcccggaactgagatttttcaccacccagcctcttaccctccccaccccagccagcctccagcagcccagcttcctctctggaaggagggaga

SEQ ID NO: 541621 - DNA, 487 bp, Homo sapiens
acatcaaagtcaatgaaataaaacataactatctgaatggaaactgttccaagaaacattgggctgactcgtgatcccaaacctataccctattctgatcctcagagtcaaaagaagtaaaggaagggctattgcmaaaggagtccttagcacctccggctaagttccagctgagctgctgctgagaactgccaaaaaaaaaaaaagaaaaaggagttcctgttgaggtttgggaagaactttcttgagcattcagaggcaccaagatttttagagtttgaaagaagctcatggatctttagtggttcactcttttcattttacagactgcgagacagagggccagagaggctaaggaatgtgctcaagtcacacagcaaacaacagcagcagcaataatcttaagatgccaagaatcctgcgaaacacttcacacgcatccttcacgtgttcattctacaaatatgtattgagtgcctggcatggc

SEQ ID NO: 541622 - DNA, 487 bp, Homo sapiens
acatcaaagtcaatgaaataaaacataactatctgaatggaaactgttccaagaaacattgggctgactcgtgatcccaaacctataccctattctgatcctcagagtcaaaagaagtaaaggaagggctattgccaaaggagtccttagcacctccggctaagttccagctgagctgctgctgagaactgcmaaaaaaaaaaaaagaaaaaggagttcctgttgaggtttgggaagaactttcttgagcattcagaggcaccaagatttttagagtttgaaagaagctcatggatctttagtggttcactcttttcattttacagactgcgagacagagggccagagaggctaaggaatgtgctcaagtcacacagcaaacaacagcagcagcaataatcttaagatgccaagaatcctgcgaaacacttcacacgcatccttcacgtgttcattctacaaatatgtattgagtgcctggcatggc

SEQ ID NO: 541623 - DNA, 500 bp, Homo sapiens
gctgtgagatggacagaggctgaggaggaacataagagtgactgtggtgaggttgagcatcctggccaggcacggtgggtcatgcctgtaatcccagcactttgggagaccaaagcgggtggatcacctgaggtcaagagttcgagaccagtctggccaacacggcgaaactccatctctactaaaatacaaaaaaattagccgggcgtggtggtgcgcgcctgtagttccagctacccgggaggctgaggcaggagaattgcttgaacccgggtggtggaggttgcagtgagatcgtgccattgcactccagcctgggcgacagaacaagattccatctcaaaaaaaacaaaaaagagtgcctgtggtgaggctgagcatctttccatgtccttacttgttccagctacaacatggatgaaccttgaggacgtgaggccaagtgaaataagccagtcacagaaggacaagtacygtatgattccactcatatgaggcac

SEQ ID NO: 541624 - DNA, 584 bp, Homo sapiens
ttcccacaattccttatcctgtgcttctctccgtagcctgtctcatgacatagcagcttgctttttcaagccagcaagggagaaaattctcgagctccagcctgcaagattgagtcttatatgatataacaccatcatctgagagctgtccttttgccacttttgccacattctgttggttaaaagtrtgttgcagctcctgccagtattcaaaggaaagagattactcaaagcattgaacactagaaggctggaatgactggggatcgccgtagggtctcttgccataaaggtgaaatgaaaacatttccaaataaacagaaacagagtttctaacgaacagatcttcattaaagaaaattttgaaagatgttctttaggaataaagaaaatggcatgaaggatgactaacgttcaaaaacaatggtgaacaaatcagtacatatgttgtaaattcattatctattgctgcatagcaaattacttccaaactcagcagcctaaaacagcaaacgtttgatatttcacacagtttctgagggtatggaatcagggagaatcttcagtgggtggttctggctcaa

SEQ ID NO: 541625 - DNA, 584 bp, Homo sapiens
ttcccacaattccttatcctgtgcttctctccgtagcctgtctcatgacatagcagcttgctttttcaagccagcaagggagaaaattctcgagctccagcctgcaagattgagtcttatatgatataacaccatcatctgagagctgtccttttgccacttttgccacattctgttggttaaaagtgtgttgcagctcctgccagtattcaaaggaaagagattactcaaagcattgaacactagaaggctggaatgactggggatcgccgtagggtctcttgccayaaaggtgaaatgaaaacatttccaaataaacagaaacagagtttctaacgaacagatcttcattaaagaaaattttgaaagatgttctttaggaataaagaaaatggcatgaaggatgactaacgttcaaaaacaatggtgaacaaatcagtacatatgttgtaaattcattatctattgctgcatagcaaattacttccaaactcagcagcctaaaacagcaaacgtttgatatttcacacagtttctgagggtatggaatcagggagaatcttcagtgggtggttctggctcaa

SEQ ID NO: 541626 - DNA, 586 bp, Homo sapiens
cctctaagtataatactggtgtaatttagacgtattagcagttctttggaatttttatttcattttttgtttgtttatttttaattgcctcgtcatgtggaaaagtcattcttgtataatttatccacgatggcaaaaatacgtaagtattttatcttcatagcttgaagaatttgtgcctttgagaagtttctctgaagcttaatcggaatgggaaaatttcagaatggtaccttttaaataatcttaacaaagagcaagtttaacctgagtggtcaacttttgcagcagatgattgaaatgctaatatttctagactgtgtcctgtcttccaaagatacaataaccatgtttgtgaagttcatacctatttttccttttcctttgcagttttatttgccctctttccttcttttggagtctgattagggttttgttttggggkttttttttttttggttttttgttttttgagaaaagtgaataagagaggaattacctggagctaagattttaaaaataatttctgaaagactgataaattatttctttttttaggaagattccaaatttggcctcgaaggga

SEQ ID NO: 541627 - DNA, 471 bp, Homo sapiens
cttatcccaactgtccttgccgtawgttcctgtacgcggtagactttttggactatgaggaaatcaaaaaacaaagtgtagcaactggccagttgtggtggctcacacctgtaatcccagcactttgggaggctgaggctggaggatcgcttgaggtcaggagttcaagactagcttggtcaatatggcgaaaccccatctctactaaaaatacaaaaattagctggatacggtggtgcatgcctgtaatcccagctacttgggaggttgaggcaggagaattgcttgaacccaggaggtggaggtcgcagtgagctgagatctcaccactgcgctccagcctgagtgacagagcgagactctgtttcaaaaacaaacaacagacaaaccaaagtgtagcaactgacctcttatgaggtattttatattgtgaggggcaagcaagaaataaaagactaattatgaccgaat

SEQ ID NO: 541628 - DNA, 572 bp, Homo sapiens
ggtaccctcgtgtctgatattcactgccctggaagttcctccgtctgtgcctgtcaccgccggggaccgagcgtggagctgccatccaaatgggcagggccttgtccgctttgttcactgagctatccctagtgcttgcatagaacaggtgttaagtcaatatttgtcccatttaagggacctcaactcatgtttaacagacacttgttacagagataaattcagaggctgtggagggtgaagagcagccagaggggctgtgtggccttaggcttccgggaatggggtgtcccaggctccttggtgcgatcctctcctgtcctcagtgtccagcctcttggtgcccgcttgtgttgtcaaagtgaggctggcatcgtttgccccagggaggccatgggcaggcyccctgaggcaaacggtgcccccgcctgtgcacccctgacttccgcctaaagttggagagcagggagacccaagtggtgagggtgatagctgtgctacgctgcggggtgttgggagagaggacgcagatgcctgagtgctgagtcacagtgggcatctcgggaagggga

SEQ ID NO: 541629 - DNA, 653 bp, Homo sapiens
ttcgggaagctgaggtggaaggaatgcctgagccgaggagtttgaggttgcaggaaactatgattgtgccactgcactccagcctgcaagactgagtgagaccctgtctcaaaaaaggraaaaaaaaaaaaaaaaaagaaaatcttgtcatactatttggaaatccaactccattcaggacgctgtaagatattatttacaggatattgggtgtttcgttgttgttgttcttaagctttttatttcagtgaaaatgctgtacctgtgtatttggcaatattatccaacagaagtgggtacttagtaagcctttgcatttgagtgggaataatatccttcagttgaagacgacgacacagtggattactttcagcatcctaaaattaaagtgaaataagtgaatctgtaattcttatttgaacttatacatgtaccatgtattcaccgtgagggtttaatgcatcacagttctggttattaaatcaagatctttaaaaaatgccaagatatatcattgccacaatatacttctgctttctcctttaatcacataatgggggaagggagcctctattactaaatgaatggcttgttatctgtttaaggaaggactgaaagcatccataagcagctctacgtatcgcttccttgtg

SEQ ID NO: 541630 - DNA, 505 bp, Homo sapiens
gaccagataaggtccggtcagggcaccagggagatgcatctaggggtcccctcttcactcctggagacagcagatcatcagtccactcttcttgtgccagcaggtcgtttgtaactggatatttactggattgcagcatatggtgcccacacggggtgtactcagtcacccgtgaacagtggcgattttccttcggctgaggcaggagctttaggaccacttgctttcrggaaaagaaaatgagtaactctctcttcaggatggtgatggggcctggccagtccaaggaggctcctgggtggtcactgagtgggaggtcatcttcactgtttcctctcctccatggtaggaaatcactgaccaggacatgtttggagatgccagcacgagtctggttgtgccggagaaagtcaaaactcccatgaagtccagtaaaacggatctccagggctctgcctcccccaggtactgcagatggaaaggaagcagggggtacagcctgcag

SEQ ID NO: 541631 - DNA, 656 bp, Homo sapiens
gtgagcagagaatggagagacagaccccagaaaccaagmaggggacgatcctgagggcaggagaggagagagacagagactccagagacagagagggaagagaggggagcagagagaaagagacccctgcagccagagagagacggagtgagaccctggggacagtaaggggcaggaggaagagggcacaagacaggaagcaaaggggaaagtaagaaccttcagagaaggttccagagatggggtggggggaggcagggacaggggtagcaggggaaggatgtggtggaaagagaagtgtccctggcaagtgggaccagccatctcgatttcctgggattggcaggggtgttgagggtgtcccaggacatgggactttcagtgctgaaaccaagaaagtggtcagcaaacctggacgagttggttgccctgggtggtaggcctctggcagacaccacggggaccacagtgtccactccacaggcaccccttgcacaggtgaggaacctgtgaccctgagaagggctgctcctacactggggcaggaggcctgggcccttctagctctgacacgtgctctgggactccctttcttgtgggcagatggggccagatgttcaggtcaggcttctgccacgagagggaagtggggtccc

SEQ ID NO: 541632 - DNA, 647 bp, Homo sapiens
tcataccctgcccacctgcttctggtctttctccctccacagcccacagtggtccttccgagtgcaaacctgctcatgctaccctccgactagaagtcttcattggcctccactacttgaacagagctcagcagtcaggcctgtacgtgtccgaagcctgggtctgcctgtttctagccttatctctctatttgacccttcacaccccatagtcaagtggaaactcactgctttgagttcctgggaaaaactgcatgctgttgtactgggcctttttttttttttttagagatggagtcttgctctgttgccaggctggagtgcagtgaggtgatctcggatcactgcaacctctgcctycctggttcaagtgactctcctgcctcagcctcctgagtagctgggattacaggcacgtgccaccacaccaagctaatttttgtatttttagtagagacggggtttcaccatgttggccaggacggtctcgatctcctgaccttgtgatgcgcctgcctcggcctcccaaagtgctgggattacaggcgtgagccacagcactgtactgggtctttatatagggtatcttctgccttgaataaaaattttccccaaatccacttggtgaagttttattttaaaaaacc

SEQ ID NO: 541633 - DNA, 535 bp, Homo sapiens
tgggggaacatgggtctaagtctcagtgagaaatctgagctgcagggatttggtcgtcagcatacagcaagttcttcatgccacaggagaaggtgcaaccagcaaggcacaatgtgtgygatcagaagacgcccagggtcaccaaaggggcagatgaggagacccctacaaaggaggaggcaaaacccgaagtggtggagaaagagagttttagaagaaagccaagtactgccaaggagtaattgcactgatagtgccaagtactgccaagagatcacctaagaagaagaaaacagtcctctcagcagataatctctcaacctcctgcaggcttctattttattgtgttcttccaacttctctggacactgctttgtagtcctttagaacagtgcagacaccactccctccaggaagctttgtttatatctatttgcctgttctcatatctgtccccgcaatcagtctatgagcctcactagggcaggggctgcacatgtaacttatttacctagcacagtgctggttcacttga

SEQ ID NO: 541634 - DNA, 660 bp, Homo sapiens
attaaccagaaagtatctgccgcacagaaggttctaaaaatagtaactgttattattttatgattattatacagaattacagcagcttctttcttttataaacattttgcttaattgtagaagcagtattttagaaacaaaatactaatctttaccaaacgtttggacaatttagtgaaagtgttgtcatactgttgctttgatgttaaggtataataactttgctttagctttgctagcagtatatttctccaagtccagccatctttctgagtattatgcagaaaaacactgtcctcaaggttgaccttaatgacaacattgtggttcataccacttcaaaccctccctttttttgctccttgtaagtttctttttttatttaattgttcaaccaatcaacagctmtttataacctatatggaaagtattatattaggaattatgaaaaacagaagtattatatgatcctgcttacaaagaacttatactttatttgtcagaccagactaacgtataacatataaagcattattaggaaaatgaattgaaatttaataagaaatctgcctttttagcaaatattattccaatctttaaaatgggccaggcagtacacagaatatgcaaagatgattgaaatgatttgttcttcaagat

SEQ ID NO: 541635 - DNA, 660 bp, Homo sapiens
attaaccagaaagtatctgccgcacagaaggttctaaaaatagtaactgttattattttatgattattatacagaattacagcagcttctttcttttataaacattttgcttaattgtagaagcagtattttagaaacaaaatactaatctttaccaaacgtttggacaatttagtgaaagtgttgtcatactgttgctttgatgttaaggtataataactttgctttagctttgctagcagtatatttctccaagtccagccatctttctgagtattatgcagaaaaacactgtcctcaaggttgaccttaatgacaacattgtggttcataccacttcaaaccctccctttttttgctccttgtaagtttctttttttatttaattgttcaaccaatcaacagctatttataacctatatggaaagtattatattaggaattatgaaaaacagaagtattatatgatcctgcttacaaagaacttatactttatttgtcagaccagactaacgtataacatataaagcaytattaggaaaatgaattgaaatttaataagaaatctgcctttttagcaaatattattccaatctttaaaatgggccaggcagtacacagaatatgcaaagatgattgaaatgatttgttcttcaagat

SEQ ID NO: 541636 - DNA, 634 bp, Homo sapiens
cacagctgctgacttgtcatggaatcttgcacaagtctctaatactttcttgaatatagtgtatgaatctataaatattaaaccatctgacttgcttttaaaaacaaagctataaatgacagaattaaagtgttttagagctagaaaaagcccaagagattgttttttcctccttcttaccacaactctatttaaagctcacacaatcccacttaaagctgtcattcaaaaatattaawtgatttgacaaaggagcacaaatgattggttactgaaccaaggtttccttctttccattccagtcttattagaaaatcttacgtgttaagtacaatctgatgtaactcatatttagaatatactctagaatttacaaaacaattgtttaaatgccaatctttctacatgataagcattgccattctgactttttgcaggagagaacacagaatcagtgaacttagaatttaaactgacttatccacattcacaagagactgagctgggacttggactgtccatccgtctttacacttcctcctactttaagtagtaaagtacttgctgaattccattggttgtgttataattacatggactaatctttatgttgttgcttgcacataacatttag

SEQ ID NO: 541637 - DNA, 475 bp, Homo sapiens
cttcatgcattccccattgagtctccctatcacagtctcccaataaacacatgtgactttgacatccttatttgatagcccaaatctatgccagtgtttcctaaattttattgatycatgtatcactgctacgattttccatctctctgtatcaaaacataacacattttctgatttctgtcatattcatatactttactgtatcaacgttttctctgaatttttcatatttacttaaatgtttttgtaattatttgaaatgtgtatcagtttttcacttgtcagatatagaatataatgatacacataaatacatttccctttatcaaagaaaacacactgtagtccatcctttaccatacagagatgcaacacccaagaggggaaaacagtcaaaacaccaaacaaaaggataatcataaatattaatgtggatggtggaaagtaaaaattctaactcatgtaagctgtaact

SEQ ID NO: 541638 - DNA, 475 bp, Homo sapiens
cttcatgcattccccattgagtctccctatcacagtctcccaataaacacatgtgactttgacatccttatttgatagcccaaatctatgccagtgtttcctaaattttattgattcatgtatcactgctacgattttccatctctctgtatcaaaacataacacattttctgatttctgtcatattcatatactttactgtatcaacgttttctctgaatttttcatatttacttaaatgtwtttgtaattatttgaaatgtgtatcagtttttcacttgtcagatatagaatataatgatacacataaatacatttccctttatcaaagaaaacacactgtagtccatcctttaccatacagagatgcaacacccaagaggggaaaacagtcaaaacaccaaacaaaaggataatcataaatattaatgtggatggtggaaagtaaaaattctaactcatgtaagctgtaact

SEQ ID NO: 541639 - DNA, 636 bp, Homo sapiens
tgcttcccagttccagcgtcaagccrgtagatggagccccgggctgggaactcacagtctgggcctctcctttttgctgtggggcttccctgtcttcacctgtaaggcaggaaaatgggtgagggcagatggtataggaaccatagtcagtggggcatcctcacctcttttcttctccacaggctgttagagagtgccatgagtggaaaatacctgcacgatgacttcgccctgccctgcccaccggggctgaaaattcctgaggaagatggttacaccatcacccccaacaccctcaaggtactagggccaagactcaagctgcgggtagatgggactgtcctgtctgggggatggagttcttagtgtgtttctcagggtgacctgcggggtgaaggactgggaagacctgggtcccagcagtggtttcatagcattgctcctaccctgctagcctaactcttacaggacaggccttgtcgggggagggggcagagggaacagtttgggtgaaaaaggcagtccctagaaggaaaaagactttctgagctcattgtcctgggctgagaaaggctgtaggcttcgggaaacagtgcctcacgtaggtgcttgcctcggccccagaccctggtgctg

SEQ ID NO: 541640 - DNA, 625 bp, Homo sapiens
ctacctaactgcctctgctggccatcaattcatcagacccagaaaactgtcaaaatgaaggcactgcctatggaaccacacatatcaatttctctagcgaatctctgatttaaatggatgtggcaatgttcattttcccagcttggagaaaaaacctgatctcaggtaaaagaagtgatgacaaaacccatcaacctacctcaccacgtctacagccatcattcacatggaatawccaccactgccagtcactatgtcaccaggccacaaaggatagctccattgtaacttacaaatcctatatcatgatggaagaaaggagagagagcaatgcagtgtccccaggatgccagatcagaccaccaattcctctgacagtggaatggagttggatatccgttgtgcaaatgttccttaacaaatcaactcagggaaaggttaatatttaatcagacaataaccttcaatgctacagtctgaatggtttttgtctcccaaaagttctatgttgaaacttaatgaccaaggtactggtatctggaagcagggcttttggggaattattaagtaatgagtgtggaacccccataagtggaattagtgtccttataaaagagctcctagc

SEQ ID NO: 541641 - DNA, 643 bp, Homo sapiens
gaggggattgaatcctggcttgtgtttgttggcattggggcccagggctggcctcagcttgtagcagatgaattccctaattttgttgatcaggaagagatgcagctcagttcctgtctgaactgtgcagaagctacccttaagtgtgtcagctaggactgatttacagaaccacaaccracagctatttcagtggtagaaaatttaaaaaaggaagggttctatgaagagcaacctcacttgctcaaaactctgataagttccacatttgcaacaggtcattggctgaaattcctaagcactaacttcctagagctctctgtcccattgctacaaatttaaacctttgtgacaacactgaccacatatataggacgaaaagggaaactaaaggtctttctttaatagaatttatatttgatctctatgttgcttgatacctggaccactctcaaggactttggcttggagctccatggtttggctacctgatgaaatttctctctctctatctagcctcttaaaacctgatttctgccctttccttctaggcaaactggatccctgaattcagatatgtattttaccatccacatctctgtgatggaaaactcttacccaagtctattaccttaccttggag

SEQ ID NO: 541642 - DNA, 466 bp, Homo sapiens
tgggttgatcttatttggggcattagaaaatctttactcttcggttaattttggcaagtaaataaactgacagagacaggtaaataagtamaatatgtttaaagccaagaaaagagcagagcaaaggcatagaagtgtgaaataccacaaagcatagaaataagactgcaaataggcaaatcaaggagcttttcaaatcatgctaaggaggctggactttcttaaggaagaaatggagaaccactaaagaattttaagtgaggatatgatgtattaattcctgctcacattgctataaagaaatacttgagactgggcaatttataaagaaaagaggtttaattggctcatgattctgcagggtgtacaggaagcatggcaacatctgcttctgggaaagctacagggaacttttactcatggtagaaggcaaacggagcaagtatattacatagcaggagtggga

SEQ ID NO: 541643 - DNA, 466 bp, Homo sapiens
tgggttgatcttatttggggcattagaaaatctttactcttcggttaattttggcaagtaaataaactgacagagacaggtaaataagtaaaatatgtttaaagccaagaaaagagcagagcaaaggcatagaagtgtgaaataccacaaagcatagaaataagactgcaaataggcaaatcaaggagcttttcaaatcatgctaaggaggctggactttcttaaggaagaaatggagaaccactaaagaattttaagtgaggatatgatgtattaattcctsctcacattgctataaagaaatacttgagactgggcaatttataaagaaaagaggtttaattggctcatgattctgcagggtgtacaggaagcatggcaacatctgcttctgggaaagctacagggaacttttactcatggtagaaggcaaacggagcaagtatattacatagcaggagtggga

SEQ ID NO: 541644 - DNA, 639 bp, Homo sapiens
ctgtttaggagggggcacactattaaactctctgcactttagttkccacatctataaaaagggagcaataataaaggctatcatatagagttatggaaaataaatgaggaagaaaagttagaataagaccaggtatgacaatgactacaccaactgtgtttctaggaagagggaataacagtcaagaaagtcctcaaggagacatatgctaggcttggtcaagaagctgagcgaagagcaaggtggcagaacacggagagcaaggggttgcatgatgcgagaatggaaggagagatcattcggccccaccacgtaagagagcaggggctttttggaagctgcctagcaaaacaaaatgaccacctaggagccagcagctcccatttctcccacctgatctttagctgctcttgctgttggttatatgactaggttgttgtgtgaatactttgtaaagtatctggctactgattttgcttctcttttcctattaatttttatttaatttgagtaatgactagaccatcagaaataattcttgtcctcctaccctacggaattaaccttcgatcttcttgggcttgaatacttgttggtgtttcacctccctttctgcctttaccaagctcagctatacac

SEQ ID NO: 541645 - DNA, 639 bp, Homo sapiens
ctgtttaggagggggcacactattaaactctctgcactttagtttccacatctataaaaagggagcaataataaaggctatcatatagagttatggaaaataaatgaggaagaraagttagaataagaccaggtatgacaatgactacaccaactgtgtttctaggaagagggaataacagtcaagaaagtcctcaaggagacatatgctaggcttggtcaagaagctgagcgaagagcaaggtggcagaacacggagagcaaggggttgcatgatgcgagaatggaaggagagatcattcggccccaccacgtaagagagcaggggctttttggaagctgcctagcaaaacaaaatgaccacctaggagccagcagctcccatttctcccacctgatctttagctgctcttgctgttggttatatgactaggttgttgtgtgaatactttgtaaagtatctggctactgattttgcttctcttttcctattaatttttatttaatttgagtaatgactagaccatcagaaataattcttgtcctcctaccctacggaattaaccttcgatcttcttgggcttgaatacttgttggtgtttcacctccctttctgcctttaccaagctcagctatacac

SEQ ID NO: 541646 - DNA, 465 bp, Homo sapiens
gctgcactatcttacattcccatcagcagtgtgtgagggttcttattttaccacatccttgacaacacttgttattatctgtctatttgattgtagccatcctagtgagtgtgaaatggctaactcactgtcatttagtttgtgtttatggtgygccaaattgattttgtataatataatcagctttttaaagggttctgtctaaatgatgaagaggcatattttcatgctcctcttttctttatctcctttcatccagcagttttgttcactttttccatcttacacttagtacattctccactatcttttaccagtctatctgttaaaaaatgttgattgttactctcaaataatgagaatacggtaggctggaggtcatagaagaggtatatatgattgataaattaaaaatatttgtatcaaagcctaaagaaaagataatgagtaaaaatgcaaataatt

SEQ ID NO: 541647 - DNA, 617 bp, Homo sapiens
tgcactatcttacattcccatcagcagtgtgtgagggttcttattttaccacatccttgacaacacttgttattatctgtctatttgattgtagccatcctagtgagtgtgaaatggctaactcactgtcatttagtttgtgtttatggtgcgccaaattgattttgtataatataatcagctttttaaagggttctgtctaaatgatgaagaggcatattttcatgctcctcttttctttatctcctttcatccagcagttttgttcactttttccatcttacacttagtacattctccactatcttttaccagtctatctgttaaaaaatgttgattgttactctcaaataaygagaatacggtaggctggaggtcatagaagaggtatatatgattgataaattaaaaatatttgtatcaaagcctaaagaaaagataatgagtaaaaatgcaaataatttgaggctgcaggaggagggaattaattgttcctggatcagtagggaccatatttcagttatattgaagaatcagtcagacttaattggcaagactgtatcattttcaattcaaacactacaaataaatcagagaggtttggcaacatccatgaa

SEQ ID NO: 541648 - DNA, 579 bp, Homo sapiens
tatgtatgctcctttagagacctatttggagctattacctactttttttttcctttttkgggtgttatattttgatgtgaacaaaagaatttttacatttattttgtcagaaaaatattttgatatgaaaaagaaccaatgcaaagaaggtcttgacatctataagaagttcctaactaggatgacaagaatctcagagttcctcaaagttgcagaggtaaactgtctttaagtgactgtctcctaacttgcctttttgtctgtaagtatggattttgaagtcatcactcactatccaaataaaataaatgtcttcaatttagtattcaatcattattatgctgtattgaattctgtggcaagatatgaatatgataaagtagtgaataaaatacatgctgtaaatttaattcaatagcgagtattgaaaagttacctgtttttacattgtttacttctctataaaattaagtaggtgacatacagtagtgccagagatttttatggttggaatgaaccatatatttgagaatgtttattgttaaatgtggtagagaatatccagtatcagtgcaggtt

SEQ ID NO: 541649 - DNA, 567 bp, Homo sapiens
gctgggcgtggtagctcaggcctgtaatcccagcactctgggaggctgaggcgggtggatcacttgaggtcagcagttcaagaccagcctggccaacataataaaacccagtctctactaaaaatttaaaaattagctggacctggtggtgggcacctgtaatcccagctactcgggaggctaaggcaggagaatcacttgaacctgggaggcagaggttgcagtgagctgaggtcgcgccactgcaatgtagcctgggcaaaagagcaagactccgtcacaaaaaaaaaaaaaatacaaaataataaaattagtgatggcaatgaacactgtctgaaagaaaacaaaamcaacaccaaaaaaacactgccttaaaaaggtagctaaatctcaatattactttccatttatgaagtcttaagctatataataaaatgcacaaattttaacaaacatactatttttagctcagtcctactaattttaacatatcattaacccacggaaaacagggcagtgctctggaagtggctataaggacaaccgcagcctctaacagtaacagga

SEQ ID NO: 541650 - DNA, 598 bp, Homo sapiens
ttggcagctgtcctgtcctctggataaacaagtattgagttaccgtgcctctgactgggaccctagggaaggaaatatcaagtagccccccactgcccaccacttaggctatctaggaagtcagatttctttaaacttttaagaacactacatggaagcattaagcacaccacactggcactgccagctagcttagtgcctgtgtaaggcacaaaatattaaatctgcatctctgatcatttttgtcctaagaagggtagtagtgttagtctgttcttggggttgctataaatacctgaggttaggtaatttacaaagaaaagaggtttaattggctcatggcaggctgcatggcactggcttctggtgaggcttcaggaagcttttactcatagccaaagacaaagtagagagcaggcctgtttacaaacaggaattcatacttaagaataagaggtcagattaatgggatgtrtcaccccttgagaccaaacctgcagcacaaaagagccttggtctcacaggtcacaaatagacattcagtgcagatttttattgctatcatcccaggttagagcccagtctacactacctgata

SEQ ID NO: 541651 - DNA, 599 bp, Homo sapiens
gtgttttagggttttactatctgctctgtgccccaccttattcaacaaacatttacaaactacttgtcggaacaaaatattttaaaacctgccttcacagagcttactttctaggatatagttccttcaaaaaaataatttaaaatgttcttaaattcaaatcattaaaataaaatgaaaaaaagctttgtttatatactrtaaaaactcattagaataattaacttatcttgctatgagagataagcctatcacttcagaactgcttaagggcagcaaacattcttattggtacaaggggaaaattctttgactagcaaaatctttcaggtcttaattaaaaaaacatttaaaacatttatgtcttgaccataaagctggtcgagacaattatggtcacaacatgttccctgtgtgataataccatctgagttttattagaactatatcatatacttaacacaaagataagttattcccccaaagttaaaaaaaaaaaattctacaccaaaatcgaaataaccaccatgcattttctggttatggaataaaaattcaacattaaaagaataatctcatagttaaaaacacacttggtc

SEQ ID NO: 541652 - DNA, 599 bp, Homo sapiens
gtgttttagggttttactatctgctctgtgccccaccttattcaacaaacatttacaaactacttgtcggaacaaaatattttaaaacctgccttcacagagcttactttctaggatatagttccttcaaaaaaataatttaaaatgttcttaaattcaaatcattaaaataaaatgaaaaaaagctttgtttatatactataaaaactcattagaataattaacttatcttgctatgagagataagcctatcacttcagaactgcttaagggcagcaaacattcttattggtacaaggggaaaattctttgactagcaaaatctttcaggtcttaattaaaaaaacatttaaaacatttatgtcttgaccataaagctggtcgagacaattatggtcacaacatgttccctgtgtgataataccatctgagttttattagaactatatcatatacttaacacaaagataagttattccccmaaagttaaaaaaaaaaaattctacaccaaaatcgaaataaccaccatgcattttctggttatggaataaaaattcaacattaaaagaataatctcatagttaaaaacacacttggtc

SEQ ID NO: 541653 - DNA, 374 bp, Homo sapiens
gaaggttctagtgtcctcttaacaaagaatgaaaatgagattcagagaggtcaaaatgaggaggaccaaggtcacacaagggctgagtaggtatcctaaactgcctcttcttggctccagataccaactccctttctctgtgccaagctacctgaaaattttctgaaaatgctctatgaragttgtctttaaacagctgaattttccatttgaaagatggaaaacagcaaagggaggacatatggtatatttctcatggcaaaggtaacattacactttttgaaaaatagaaaaagaaataaactttaaattataattactagggtttcttacactaatgggaaacatcaagttcagcatttctcacaaatgta

SEQ ID NO: 541654 - DNA, 563 bp, Homo sapiens
aattagcacaaatgaaatatttaagaaaggaagagaatcaggaatgttcagtgrgaactggctagcagttataggacataatataatgtttatgagtatatgttgataaaattgtaatattaattaagatattctcttctccccaagttgtgttaatatcttaaaatatactttattataaatggaaaaaatgaaggaagttatcaatattattccacaaacttaaaaagtagaacctaataggagattgttgaaattttttacctaaatgaataaacaattattgtgcttagaagtttatcaagaaaaacatcataagctaaaaatataccttcatgtgattctgcaataaagaaaatgagatgaaacacataagtcatttatagtatacatttattatattattataaaaattattatcatagtatacattattatagtagcagtagaagtatcattattactactatcttctaggcagtggggcaggagcagtaatgatctccgactttgtgtgtgttttaaattaaaagatagtgtaggatagttacctaaatttattg

SEQ ID NO: 541655 - DNA, 483 bp, Homo sapiens
agaggagacattatttcaggatcattggaagtatgtctgagaaatatcagagagggtcaaatcattgaaaaaatgatgttaattacctgaggattttgcagcatgatgtaaagcgaggctggtgtataagatcaggtgtggaaggctggactccaaatctaagataaaagtgtcagtaaaaaagatgaaatgtgaagatgaggggaagaaaaccaaaataatgtatataaaattatttacagttgaggtctgtttgggggtttaaacctgtcaggggatactataatattgcatattaatggctcttttgtgacttgttaaaaatggagttatttgcaatacaaataactaaggattcccagaagttcagaatgtaaagaaagtcctttaagatgctcaaagctgtgaaagcagtgcctgttaggaaaaaatgygcaagtaaaatcatcaccttcataagctacatatgtctttaaagtgcaa

SEQ ID NO: 541656 - DNA, 562 bp, Homo sapiens
gattctgtctcaaaaaaaaaaagaaagacattatcaaattgttatgcggaaaaaaaagtctggtcatttacacccccaccttagccttctcacattggatagtatatgttctcttcacttttgccaatcttacrggtaatacatagtacctcactggcactttaatttttccttattaatgaagctgaatatctttgtttattgactatttgtatttcttctgctgttacctattaattcatttcctttggctagttttagttttcaaatatccctttctttatttacagaaactgtattatggatagtagcccattgctttccatctgtgttacaatgttttgtttataatttgtcttttaattttgtttttgatgtcctttgttttctgaagtgtaaaatatctttttaaattgtaaaagtaattcatgctgttttgttatgtcatataaaaatataaaatgaaagttctccaatacccccacataatacacttccatttttaggacataacctctcaaactttccctagtaactaaaaaacacaaatacataaattata

SEQ ID NO: 541657 - DNA, 562 bp, Homo sapiens
gattctgtctcaaaaaaaaaaagaaagacattatcaaattgttatgcggaaaaaaaagtctggtcatttacacccccaccttagccttctcacattggatagtatatgttctcttcacttttgccaatcttacgggtaatayatagtacctcactggcactttaatttttccttattaatgaagctgaatatctttgtttattgactatttgtatttcttctgctgttacctattaattcatttcctttggctagttttagttttcaaatatccctttctttatttacagaaactgtattatggatagtagcccattgctttccatctgtgttacaatgttttgtttataatttgtcttttaattttgtttttgatgtcctttgttttctgaagtgtaaaatatctttttaaattgtaaaagtaattcatgctgttttgttatgtcatataaaaatataaaatgaaagttctccaatacccccacataatacacttccatttttaggacataacctctcaaactttccctagtaactaaaaaacacaaatacataaattata

SEQ ID NO: 541658 - DNA, 649 bp, Homo sapiens
tggagtttgattcctgttctgtcaccaaaagcccctgggaccttcagcaggtcacgcaggcccccagggactcattttctcctgtaaaaggacgcctctctagttaactcaagaggccccttccagctctgacattccatgaccctaagttaaaggccagcctgctttccgtaataaatctgtggaacttaccatccatataggaggtgaaaatgcagctatgctgcactgagtcctttctacatggcaggcactgcggcacatgcattcactgaattttcacggaagataactgtcatgattacagcacctacccattttacagatgaggaaatggaggcccagagaagttaagtaaacttgctcaaggttgcacagccagtaaatagcratgtcaagacttaaagcctggtggtccagcagctagtccacacagctgtctttctaggtactgactagaatgacgaaaacaacatgggtcagttcatagcaggtaaaacgttgagtggagcaaaccctggacgaggcaccagcagccctgggttctaccctaggctgtgccatttaagtggcaccctgttacctccagcaagtcactcttcctctctttgtctcagttctctcatctgtaaaaataagaagttaaccg

SEQ ID NO: 541659 - DNA, 649 bp, Homo sapiens
tggagtttgattcctgttctgtcaccaaaagcccctgggaccttcagcaggtcacgcaggcccccagggactcattttctcctgtaaaaggacgcctctctagttaactcaagaggccccttccagctctgacattccatgaccctaagttaaaggccagcctgctttccgtaataaatctgtggaacttaccatccatataggaggtgaaaatgcagctatgctgcactgagtcctttctacatggcaggcactgcggcacatgcattcactgaattttcacggaagataactgtcatgattacagcacctacccattttacagatgaggaaatggaggcccagagaagttaagtaaacttgctcaaggttgcacagccagtaaatagcaatgtcaagacttaaagcctggtggtccagcagctagtccacacagctgtctttctaggtactgactagaatgacgaaaacaacatgggtcagttcatagcaggtaaaacgttgagtggagcaaaccctggacgaggcaccagcagccctgggttctaccctaggctgtgccatttmagtggcaccctgttacctccagcaagtcactcttcctctctttgtctcagttctctcatctgtaaaaataagaagttaaccg

SEQ ID NO: 541660 - DNA, 603 bp, Homo sapiens
tgcagacctctcccttaggtctggacattgccaactgcctgctggtcacagcacccgcatgtttccatttatcttgtccaaagctgggctcaccgtcatcttcctggaatctctcatcctccctcttagtgaataagtccaccctccacctcgtcacccarggacagtcccagaaggcccctagcgtccagctctgtctggcccaaagcatggtggcgacaagccatgccacatccagctccctggtttgtctgggtgctattccttcagtagctcgacctccaccctgtcccccaccgtctcttacctggaccacccaggagacatttctcctggtctcctttcctccagttatacccctctatagtctcctctccccaaagaagccaacacgctcttcctaaaaacacagatttcaccacatcactccttccaaacatgcgagatgtggggtcctcaagagaaaggccaacctacctagtttgtcaggaaatgcatgtcaccacctggacaagcccttcactctaactcaccccacctgctcctcccgttctaactgcatcctctaccatagcctgccccagcaccaccaagcccaagacc

SEQ ID NO: 541661 - DNA, 609 bp, Homo sapiens
tctcccttaggtctggacattgccaactgcctgctggtcacagcacccgcatgtttccatttatcttgtccaaagctgggctcaccgtcatcttcctggaatctctcatcctccctcttagtgaataagtccaccctccacctcgtcacccagggacagtcccagaaggcccctagcgtccagctctgtctggcccaaagcatggtggcgacaagccatgccacatccagctccctggtttgtctgggtgctattccttcagtagctcgacctccaccctgtcccccaccgtctcttaccyggaccacccaggagacatttctcctggtctcctttcctccagttatacccctctatagtctcctctccccaaagaagccaacacgctcttcctaaaaacacagatttcaccacatcactccttccaaacatgcgagatgtggggtcctcaagagaaaggccaacctacctagtttgtcaggaaatgcatgtcaccacctggacaagcccttcactctaactcaccccacctgctcctcccgttctaactgcatcctctaccatagcctgccccagcaccaccaagcccaagaccttcttagccctgag

SEQ ID NO: 541662 - DNA, 609 bp, Homo sapiens
tctcccttaggtctggacattgccaactgcctgctggtcacagcacccgcatgtttccatttatcttgtccaaagctgggctcaccgtcatcttcctggaatctctcatcctccctcttagtgaataagtccaccctccacctcgtcacccagggacagtcccagaaggcccctagcgtccagctctgtctggcccaaagcatggtggcgacaagccatgccacatccagctccctggtttgtctgggtgctattccttcagtagctcgacctccaccctgtcccccaccgtctcttacctggaccacccaggagacatttctcctggtctcctttcctccarttatacccctctatagtctcctctccccaaagaagccaacacgctcttcctaaaaacacagatttcaccacatcactccttccaaacatgcgagatgtggggtcctcaagagaaaggccaacctacctagtttgtcaggaaatgcatgtcaccacctggacaagcccttcactctaactcaccccacctgctcctcccgttctaactgcatcctctaccatagcctgccccagcaccaccaagcccaagaccttcttagccctgag

SEQ ID NO: 541663 - DNA, 603 bp, Homo sapiens
tgcagacctctcccttaggtctggacattgccaactgcctgctggtcacagcacccgcatgtttccatttatcttgtccaaagctgggctcaccgtcatcttcctggaatctctcatcctccctcttagtgaataagtccaccctccacctcgtcacccagggacagtcccagaaggcccctagcgtccagctctgtctggcccaaagcatggtggcgacaagccatgccacatccagctccctggtttgtctgggtgctattccttcagtagctcgacctccaccctgtcccccaccgtctcttacctggaccacccaggagacatttctcctggtctcctttcctccagttatacccctctatagtctcctctccccaaagaagccaacaygctcttcctaaaaacacagatttcaccacatcactccttccaaacatgcgagatgtggggtcctcaagagaaaggccaacctacctagtttgtcaggaaatgcatgtcaccacctggacaagcccttcactctaactcaccccacctgctcctcccgttctaactgcatcctctaccatagcctgccccagcaccaccaagcccaagacc

SEQ ID NO: 541664 - DNA, 603 bp, Homo sapiens
tgcagacctctcccttaggtctggacattgccaactgcctgctggtcacagcacccgcatgtttccatttatcttgtccaaagctgggctcaccgtcatcttcctggaatctctcatcctccctcttagtgaataagtccaccctccacctcgtcacccagggacagtcccagaaggcccctagcgtccagctctgtctggcccaaagcatggtggcgacaagccatgccacatccagctccctggtttgtctgggtgctattccttcagtagctcgacctccaccctgtcccccaccgtctcttacctggaccacccaggagacatttctcctggtctcctttcctccagttatacccctctatagtctcctctccccaaagaagccaacacgctcytcctaaaaacacagatttcaccacatcactccttccaaacatgcgagatgtggggtcctcaagagaaaggccaacctacctagtttgtcaggaaatgcatgtcaccacctggacaagcccttcactctaactcaccccacctgctcctcccgttctaactgcatcctctaccatagcctgccccagcaccaccaagcccaagacc

SEQ ID NO: 541665 - DNA, 485 bp, Homo sapiens
ccagagagatggctggctagtggctgggagattattttgatgtcatggaaagagtcctgcacttaagtcagaaggcttggactgaagattcagctctrattcctactgaccatgagaacttggacaagccaaatgacctctttgaacctcattttggtgaggaggttaaattagataatcttgtaagatctctaccatctctaaagagtcattgggtccagaagatcagcatcaaggtcattcaagaacccctgatctggacagggagatcaaggcaggagaattatgcctattagctggccacctgttggcctggatgagtcagggaagcctcccaggtcctccctctcaagactgtggctgttgccaggaaggacaccctagcagagcctggagccttcacaccatgggctggggttggcaaggaggctgtagcagtgccagaaacctctgagcataccacacaacttcccctctgcagaggc

SEQ ID NO: 541666 - DNA, 485 bp, Homo sapiens
ccagagagatggctggctagtggctgggagattattttgatgtcatggaaagagtcctgcacttaagtcagaaggcttggactgaagattcagctctaattcctactgaccatgagaacttggacaagccaaatgacctctttgaacctcattttggtgaggaggttarattagataatcttgtaagatctctaccatctctaaagagtcattgggtccagaagatcagcatcaaggtcattcaagaacccctgatctggacagggagatcaaggcaggagaattatgcctattagctggccacctgttggcctggatgagtcagggaagcctcccaggtcctccctctcaagactgtggctgttgccaggaaggacaccctagcagagcctggagccttcacaccatgggctggggttggcaaggaggctgtagcagtgccagaaacctctgagcataccacacaacttcccctctgcagaggc

SEQ ID NO: 541667 - DNA, 485 bp, Homo sapiens
ccagagagatggctggctagtggctgggagattattttgatgtcatggaaagagtcctgcacttaagtcagaaggcttggactgaagattcagctctaattcctactgaccatgagaacttggacaagccaaatgacctctttgaacctcattttggtgaggaggttaaattagataatcttgtaagatctctaccatctctaaagagtcattgggtccagaagatcagcatcaaggtcattcaagaacccctgatctggacagggagatcaaggcaggagaattatgcctattagctggccacctgttggcctggatgagtcagggaagcctcccasgtcctccctctcaagactgtggctgttgccaggaaggacaccctagcagagcctggagccttcacaccatgggctggggttggcaaggaggctgtagcagtgccagaaacctctgagcataccacacaacttcccctctgcagaggc

SEQ ID NO: 541668 - DNA, 594 bp, Homo sapiens
atttcttagttgtggtggccaggggggtggggtgttgccatcttctcacctcaccttaaccctggtgggctaggagtcatctagggattgtggtatttccacggtggctgtcaagggagaaatccccgcctctcctctcctccccacaccctttctctgtcttctctcaccctcccgctccagccctccctttccctgccttcttaatctcttctctctttgctcccccacccccgcttagccttgccctcatcctcatgggtgtctgtcgctttgtgtgagagcccacattgtccctctcactgccagataggtaggctgatccgccctgctctctgagcctagcttgcctatttccatcggcttctgtccgctcctgctctgaacttcttgtgtctgacctggatgtgctctcggcccagtgctcctggctcaggttggtttctggcctggttcagaggccccttatccttctcagggagctgctatgtggtttgaaattgttcytgcccctttccccctctccacactcagtggagcctcctggcctgaggcctctgccttctctcctggcctctggcagccaggccctgg

SEQ ID NO: 541669 - DNA, 624 bp, Homo sapiens
tgtgtagggaagcaacattctcttgcaatttccttgaagttaagacaaccctgccagggcgccttggtggctgctatgctattacttgacatcaggcctggccccaccctgctctaccccagcacccgcgctgacctgaccctgtcacattgagcatgtcrtgataggagaaggagcccttgacctgggaaggggcccttgacatgggaccagaaaagcgggtccatgtcccagctccatctcttaggaggtgggatgagtctctaaccttctctgacaggtctcaggtgtccttgtttgcaaagtgagagggtagaccagtaatcacttaggaactttcagaaagtagaatcattcgcccctttcaggtggaatgatgtgttcatctctgacccatgcctgctggacacttccgttaggacaccatgctgctttgcttggaggagatggtgtttctcactgttgaagtgtgtgaagtggtttatgttgcaagagtgtagtgttagggccccacaacaccttcttcaaggggaactcttgagtgatggcttgtcagagagctctctaggaagcaaggtaacttgtgtttgattgttcttagagcaaaagacctgttgggcaggt

SEQ ID NO: 541670 - DNA, 624 bp, Homo sapiens
tgggcctcccggactgatttgccttctaagtattgggagggtgaagggtcaaagtgtcacgtgaccctgctgcaggggcactaggcacctcctagtctaactgggtggcactgcctgrgtatcactcctgcaccacgtggcggtctgtggaggggcagtcctgaggagagagagtggggtctgcatggtggtgccctcagttacaaagcaggtggcctgctggagtctgggcaagctcccgtcctccaccctatggtgggtggagaagaggaggggcaggagcaccggagacaaaagacctcatggaatacccaggccaggtgggtggagccttgttcctgtgattgacaagagcaggggctgcctccctcctgcccctgcccatgcccagggatccaccaggtaggagtgtgtgggtgtatgtgcatgtgagtgtatgagagagtgtgtgtgtgttagtgtatgagagtgtgagtatgagagtgtgtgtgtgcacgcttgtatgtgtgtgtgtgggggcaaggggttcaggcctgctgctggccaggtgtgcatccatatttatcaggggagagtccctggaaggcagccggatgctgagcacttgaggcaatctgcttggac

SEQ ID NO: 541671 - DNA, 568 bp, Homo sapiens
tcagttaaggactcataatgtcctggggagactgtctttatcctacctaagctttagaatggggctggagatttggtctcatgttcaggggtggatataagccagtctcttcaaagtgaattctaggaatcattgccaggatctctttctagctggatgtgactatgaaarcaagttgtctaggagtcactggcaactgtcctggggccatgagggcaattagtcttggtatgaagctaacacaaagacaggcagtgtggcaggaccaaaagggatttcttaacaatattgtgagctgagctacaggatcagatctcttgaagctagctttactgatgtacttttaagttataatcaccactatgagtatatattccctttgttgagcaagtcagtttgagtcatcagtttaactgctgtattttcagactgggtgggcacttaatgtaggcatactatgtgttaagtatttactgtgccagatactttcatatgcatgagagcatagcttatactgggaaataaacttatctcatttatatcttcccaaccgcctgtgagacaggaa

SEQ ID NO: 541672 - DNA, 648 bp, Homo sapiens
tttttgaaatggtctgtactattatctttaccgtataggtgaggactctggctagaaaggttaggtaacttactaacagatggcacagtcacaataatagctgaggtctaagaccacagcacctgttctcttaaatctcatatccactgcttctaagcacttgcggcaacaggtaacataaaacattagtgtctgttttcacttcctcacatcccattctctcctttaatgacttcaatcaggcttcccactacaattgttcttatcaaggtaaatgaaaacattgtcactcacaaaatcaatatccggtgcacagttttcagtttattcaaccattcccagcatttggcagaatcaattacaacttccctgaatcgatcattgtctctgtttggttatcaagacccccttggtttttctcctacttcactaatctatccttctasgtctcctttgctgggcgcttctctgctttctgatattttaaatttgagtgtccccaagtttgtcattagacttcttttttatactcgctcccaaggctagccatccggtatcaagactaaaatgccatctgtagatcaaaggctaccacatgtagatctccagtctcaatctgtgctctaagctccagactcttatatccag

SEQ ID NO: 541673 - DNA, 601 bp, Homo sapiens
acaaaattatctttctactataataatgtggaatagcctcaggaygtttccctagcagggcaatgctgactatctctcaacttcaaattaagtaagttgatttgttgaacaccaaattacagaaacttccttgtatactcagcattatgtgatgtggcccctaggcctctccaggcttacctatcaagctggctcacttgttctctgggacccagtcatactagacttctttcccttccctaccacgacaggttatcccagtgtctgtgctcttcctgttgttttgtcctgaatgccttgtatatacacacatttcaagccttttcaagcctttcattaagtatcatcttctctatgatactccttccacatcaaccacttcctttgtatgtcccggtataactgatgttgacttctttcatagcgtccctaattccatacagccttctttgttcatcttcccttaatgggctgagagctttctgtgtacaaggactatgtcttattcttcctcaatttcctttgtttaacccaaagattgacctgaagtggcccctaaatgatggtttaatggatggatgaatgaatacaaagatagatg

SEQ ID NO: 541674 - DNA, 596 bp, Homo sapiens
tgaaggggaggtgtgttaccaaaagaacagaagaaattagagcttttccttccttctttccctttctctttccctccctcccttccttccttcctctctctctctctctctcactctgtttcatatctgaaagcctattaaatagagggagagaatttgttctatataggagataaaaaaggattcagatagtgactcaaaatgggaaacaaactaagctgtttgggcaaggaacactaaattcctactcaagactggcttttgtctgaaaggtgttcttttcacatcctcttgcgtccagataaatccaaaatgtgccaaatagaaacctgctgtttctgctatagttctccactgaaccgagctagcttgataagctcttgtgtatctgttagtttattctaaaatcaatcaaacmtaagtagattgtatcaaagaggataatttcttaaattgagttatagaaaccagctctgttttggttaaaataaataggaaaattgttgaaatgcgatgattcctggctcttggatttaaagcatgaataccattctcgagcaagtcccacaaaattcaggcacagactaaaggagatg

SEQ ID NO: 541675 - DNA, 583 bp, Homo sapiens
cctacatttggaggaaaagtacaagaacatggagagttgagagtcaaagctagattaaaggtggatgttaatgtgagcttgtgttggaggagtgggttggggatggtggtggaaattctattcagtctaaaatgtctgtttctcaaaataagaaataaagggctgattaaggagccactaaaaactggagtgatccaggctactcccaagacagaggattaggttatatatgtccaatttctgcaccttaactttccaatctgttaattcattccattgctgacgtagaatgatcagggattttcttccacagggaaggtaaagtcaagagggggaaaaaactatttcccaccaataaaacagggtcctcgattgtaactatacttaagaataagtcctccktaaatcattttccccctgtgtattagtccattctcacattgctataaggaaatatctgagactgggtaatttattaagaaaagagaattaattggctcacagctccacaggcagtagagaaagcatgatgctggcatctgctcagcttctagggaaacctcaggaaacttacaaccatggc

SEQ ID NO: 541676 - DNA, 424 bp, Homo sapiens
cacacttttaaataaccagatcttgtgataactctatgagaacagcaccaagagcattgtgctaaaccattcacaagaaatcgcccccatgatccagtcacctcctaccgggccccacctccaacattgggggttccaattcaacatgagatttgggtggggacatagagccaaaccatatcactctgcatctgacaccatayatgaataccccttttttgttctagcagaggctatttggaggacaaaacccacccatccaggactcagaggggttagtggtgagctatttagtgcctgctccctgtctcttgtgctctacctgtgcatgctgcatcccatggaccttcagatcctggcactgacagtcatttgtaaggagactgcaagtaaagagtctctgtaagttctgcaagtgaagagt

SEQ ID NO: 541677 - DNA, 603 bp, Homo sapiens
ctaacgtatacatggcagtgagaattattctagggcattgctcttcaaagtattgctcaccaaccagcagtacagacatcacctggaatttgttagaaatgcagaatctcaggccacacgacagacctactcaattgagatctgcattttaagagaatcctcaagtgattcacatgtgtactaaactttgagaagcactggtccagtttgtactctcaggaatgaaaatactgctttctaaggtatacatatatttgattacactaactaccacctgattgctcaacaaaatgactgtcctgatttatccttccaccagtacaagcagataattgttagcccatatacttaaaagcatattcaattttaatagttgatccactgtcgagttctctgttgtttttattttttaaayagatttattgtggcataattcatatacaaaaattgtacatatttaatgtatacaatttgatagtttggacacatgcatacacccatgaaaccatcaccataatcaaggtaataaacatatccatcacttccaaaagattccttgtaccctttcatcttttattggttggttgttttattttgtgttgt

SEQ ID NO: 541678 - DNA, 554 bp, Homo sapiens
aagtaatgcctggttagtaaaagtcagataaaccccccttttcatagtcatcactgccactttgcacatgcttctcccctgctgcctgttagctgacttctctcgtccccaaccttcttctattcaggtctctggatatggtcttgcttctcataccatggctatcatattacttaagggaggagggagatctgctgtcctcaacatattcaagattgccctaagcctccacatccatttggcagatgtgtgggaagtttttatgggtccaggctgaagtggcaaatatcatttacttacacgttccactggccttccatgtggtcacacctcactgcaaggagactaggaaatgtagtcgagagaaaaaggaaacagattttgtgaacagccagtcagatactgcaacattactccctctagtttccactttagcttcccccttggtgttgactttctgactacccacttggtgtaattcagcaaagtgctgttattggaaacaacctccaayagagtaagcctaaatctgcatgatcaacttgaattcagga

SEQ ID NO: 541679 - DNA, 136 bp, Homo sapiens
agaaagtagaggagacccagaagatctcaagtgcacgcaggagttgaggctgggagkttcaggtgaaaggcaggaaccacctggcatgctgaaagaatagaccacgagctacacacactgaacgttctagaagcag

SEQ ID NO: 541680 - DNA, 681 bp, Homo sapiens
cttccacaaggtcaacacgcaatgcatatatctgggcactgatctcacaaccaactgaagtggcatatcttgaagctggaaataaaagtatttttatttgtacttttaaaagtgcactttcaacctttccaagatctgataacatattcaatgtgtaccttctcatcagctgccataaccaatgccagaataaatgttgaattctcttcatttaggtcctgccaagcaatgccaacgaaggagaatttggttttgttcatattcagtgtgtaccctctcatcagctgccataaccaatgccagaataaatgttgaattcccttcatttaggtcctgcccagcaatgccaacgaagaagaatttggccttattcttcccaagttccactgtatagttagttatcaatgtttatgttccctccaagggcaggataaggaggtttgttgacatggctccagttgactgacactcagatygtatcatagagctgaaagattgctaaagcatctgcaaggtaactacaaatgattaatatatgggttgattcctaaggaatgcaccagttctgaaatgtcctctcttctttgctctctccctccaataagtttatattgatgtcattattatctaacttgtgtaggcatggatagatattaaacagattaactatgaaagctaaat

SEQ ID NO: 541681 - DNA, 554 bp, Homo sapiens
tgcaggtctgttggagtttgctggaggtccactccagaccctgtttgcctgggtatcacagcagaggctgcagaacagcaaatattgcagaatggcaaatgttgctgcctgatccttcctctggaagcttcgtctcagaggggcacccggtcgtatgaggtgtcagttggcccctattgggaggtgtctcccagttaggctactcgggggtcagggacccacttgaggaggcagtctgtccgttctcagatctcaaactccgtgctgggagacccactactctcttcaaagctgtcagacagggacgtttamgtctgcagaagtttctgttgccttttgttccagggctcttgagaattaagtgaactgtttcatgtagagatgaggcactcagtaaatgttgactaccgtgcatcttccgtgctctgcctgcactggcattgtccttgagatttaactgtattgacacatgtcgccaaggtcatggtggtccctgacacttgacacctatcgaataaaggcatggtctgactgccttctctgctgcattagta

SEQ ID NO: 541682 - DNA, 555 bp, Homo sapiens
cctaagtcacagggctgctaagtgatagatctggatctagaaatcaagtcccaggggcttttgtttcattgtagtggctgagcgccttgacttgagtgttaccctcggggtaagtccccagggacaccacctttctccttcctcggctgcatatattggggcagaggccctttgccacgactccccccaccacacgctgtgaaccagcttcagctctttagctggccgcctcaacagcccagtgcctcccctgggccatccaatcccatgtggggtgggcctggaacttcccctcgagctcagaacagttccaccccctgcagcttcactcccacttcacagactcaaactccctcccaagggtgcagggaggatctgcagtcctggtctttgcagtcctctctgtctctgggccaccaccaagtgggatctccagggtcctcaggagcactcctcctgccagcgggtacaagtaagtggtggggaactcggtggagctcgaggaggcagccaggatgcggcccgccccccmacctgccagccaccagttgccag

SEQ ID NO: 541683 - DNA, 604 bp, Homo sapiens
caccgtccaggtcactcttgggagtgcagggccctggcctcgggtggcatggtcctgcactggcagggttggctcttggtgccagggacatttcagtgggccattcattctcttttcactcaaacatttatggggcctggaacacgtgccatgcactggggatacagcgtgacaaaggtggacaaggtacctcctcccacgaggcttacccaccagagcgagagcagaggacccaacaacgaacgccccgtccctggtggcatcaggtgggctggggcccctgcggttgaatgtgtatggtagatacggccacagggtaacagggcaggagggcagtgggaagcttgtgcagggaacagaccctgccccacagcaggctgagccgcagggctgagtccagcccccagaatggagtgtggcagaaggatggaagcactggccctgaggtccagggtcccctgcagatgacccaaacagatgatagagtggggaggtcacaggtgccrgagtcagccagccccaatactgaggactgtgtggcttcgggcaagtggctctctgagcccatttccttttctgcagaatggatgttaagaatccccac

SEQ ID NO: 541684 - DNA, 511 bp, Homo sapiens
gctggagaagtgaggcaagacttcgaggacatctgggctggctctgcaaggaagggtaggatttcaacacgtggagatgggaagaggctttccaggcagaacaaatggcaggacccaaggcctggcagcaggaagagccagggcatgtctgggagtagaggggtctgcctggcccagcctccatcgcatcactttctcctctctcctcattcagcaccttctgctcaggacttccagccttctgaaatcttccctccttccctggagagcttccaactcacccagctaggccctcccaagttgtggatgcattcccagaattctgccatcatgtccccactccctccttctctgaaaaagccaccctagaaagcggaagattcagatcgrgaaaaggcatggaccaatagcatgtttctggagtgaataagggaaaaaatgaataaagaaatgcagaaaagattgagtcaatgaaggagagagtgagtgagcaaatgactgaaagcagcca

SEQ ID NO: 541685 - DNA, 498 bp, Homo sapiens
tgtagcacgtgaggcccatgtagtctcacttgggacaccctggcagagaccaacrtttcctctctgctccatctccctgtacccatgaagccctggcatcatattgtatgggtgaaatattgtgtcacaagcagcagcggtccctgcagcacgtgctgagatgctgtagctgccccaccttcaccccttctcatttgggggcaggctggctggacttgatctgccagcatctgcttctctgcctgatgcctttctctgaccactggggctactttgccctgtacaaggcgctgaagtgctgggaaattaatgcccctcagtcaaccaagggctaatggaagctgatgtaaaataatcgagctctcctaatttaggataactccgtggcattttcccccacattaagcctcagttactcaccgtggtgacatgcttgataatgtctcacttccccactcccataatagtagttcctgggatcccttcctaaaggaatga

SEQ ID NO: 541686 - DNA, 498 bp, Homo sapiens
tgtagcacgtgaggcccatgtagtctcacttgggacaccctggcagagaccaacgtttcctctctgctccatctccctgtacccatgaagccctggcatcatattgtatgggtgaaatattgtgtcacaagcagcagcggtccctgcagcaygtgctgagatgctgtagctgccccaccttcaccccttctcatttgggggcaggctggctggacttgatctgccagcatctgcttctctgcctgatgcctttctctgaccactggggctactttgccctgtacaaggcgctgaagtgctgggaaattaatgcccctcagtcaaccaagggctaatggaagctgatgtaaaataatcgagctctcctaatttaggataactccgtggcattttcccccacattaagcctcagttactcaccgtggtgacatgcttgataatgtctcacttccccactcccataatagtagttcctgggatcccttcctaaaggaatga

SEQ ID NO: 541687 - DNA, 642 bp, Homo sapiens
gtgacatggatgaagctggaagccatcattctgagcaaactatcacaaggacagaaaaccaaacacygcatgttctcactcataggtgggaattgaacaatgagaacacttggacacagggtggggaacatcacacagtggggcctgtcggggggtagggcgatggggtagggataacattaggagaactatctaatgtaaatgactagttaatgggtgcagcaaacaaacacggcacatgtatacatatgtaacaaacctgcacgttgtgcacatgtaccctagaacttaaagtataatttaaaaaaaagaaaatatgtgtaccatcattaaccatcagagaaatgcaattcaaagctacaatgatatacaacataaggacggcaatccttgtcatcaacatcatcaacatgatgtaaacttgctgaagacagggtttcttttctttcccttgctgtaaccacagttcatagaacacttcctggcacatgactgttgactaaagcagagccatccaggccagagagaattactagaggtatgcattgagggtagaaatagtagcagcagggagctaggtatgaaggttagcaggagtgggtgaaagtcatgcctaaatgaaaccaacattgcctccagcag

SEQ ID NO: 541688 - DNA, 642 bp, Homo sapiens
gtgacatggatgaagctggaagccatcattctgagcaaactatcacaaggacagaaaaccaaacactgcatgttctcactcataggtgggaattgaacaatgagaacacttggacacagggtggggaacatcacacagtggggcctgtcggggggtagggygatggggtagggataacattaggagaactatctaatgtaaatgactagttaatgggtgcagcaaacaaacacggcacatgtatacatatgtaacaaacctgcacgttgtgcacatgtaccctagaacttaaagtataatttaaaaaaaagaaaatatgtgtaccatcattaaccatcagagaaatgcaattcaaagctacaatgatatacaacataaggacggcaatccttgtcatcaacatcatcaacatgatgtaaacttgctgaagacagggtttcttttctttcccttgctgtaaccacagttcatagaacacttcctggcacatgactgttgactaaagcagagccatccaggccagagagaattactagaggtatgcattgagggtagaaatagtagcagcagggagctaggtatgaaggttagcaggagtgggtgaaagtcatgcctaaatgaaaccaacattgcctccagcag

SEQ ID NO: 541689 - DNA, 642 bp, Homo sapiens
gtgacatggatgaagctggaagccatcattctgagcaaactatcacaaggacagaaaaccaaacactgcatgttctcactcataggtgggaattgaacaatgagaacacttggacacagggtggggaacatcacacagtggggcctgtcggggggtagggcgatggggtagggatarcattaggagaactatctaatgtaaatgactagttaatgggtgcagcaaacaaacacggcacatgtatacatatgtaacaaacctgcacgttgtgcacatgtaccctagaacttaaagtataatttaaaaaaaagaaaatatgtgtaccatcattaaccatcagagaaatgcaattcaaagctacaatgatatacaacataaggacggcaatccttgtcatcaacatcatcaacatgatgtaaacttgctgaagacagggtttcttttctttcccttgctgtaaccacagttcatagaacacttcctggcacatgactgttgactaaagcagagccatccaggccagagagaattactagaggtatgcattgagggtagaaatagtagcagcagggagctaggtatgaaggttagcaggagtgggtgaaagtcatgcctaaatgaaaccaacattgcctccagcag

SEQ ID NO: 541690 - DNA, 642 bp, Homo sapiens
gtgacatggatgaagctggaagccatcattctgagcaaactatcacaaggacagaaaaccaaacactgcatgttctcactcataggtgggaattgaacaatgagaacacttggacacagggtggggaacatcacacagtggggcctgtcggggggtagggcgatggggtagggataacattaggagaactatctaatgtaaatgactagttaatgggtgcagcaaacaaacacggcacatgtatacatatgtaacaaacctgcacgttgtgcacatgtaccctagaacttaaagtataatttaaaaaaaagaaaatatgtgtaccatcattaaccatcagagaaatgcaattcaaagctacaatgatatacaacataaggayggcaatccttgtcatcaacatcatcaacatgatgtaaacttgctgaagacagggtttcttttctttcccttgctgtaaccacagttcatagaacacttcctggcacatgactgttgactaaagcagagccatccaggccagagagaattactagaggtatgcattgagggtagaaatagtagcagcagggagctaggtatgaaggttagcaggagtgggtgaaagtcatgcctaaatgaaaccaacattgcctccagcag

SEQ ID NO: 541691 - DNA, 553 bp, Homo sapiens
tcaggaggctaaggcaggacaactgcttgaaccctggaggtggaggttgcagtgagcaacctcctgtcttctaaaacaaaaccactctcttgatttttgttataatcatcccttgcttcaaaaaatagtttaccatctacttctgtacagctagataatatcttattcagtttttaaactttatataaatggagtyataataaatgcattcttccatgatttgctttttttcctcttaatattatgttcacaagatacttttgtatcttaatatgtaatatatatatatatatatatatatgtttcttaagtaattgattaatttacaatcccattagcactgtgtgctccccaccttggttaacaattgataattttatactacataatttttgcaatatgataggtaatcatattttcaacaaaataagtgaaattttagcatagttttaaatttagagaaaaattgccagaatggtatgggaagtcctgtatacccctcagccagtttctcctattgttaaaatctttacattattatgatatatttgtc

SEQ ID NO: 541692 - DNA, 615 bp, Homo sapiens
gacgatttaatggagtgaagcygatctactatcttgggtggaaagagtatgatgtggttggcagtgccttccacattccagttagccgagtgctgtaaaatattaacaccaacactgtaataaagtagaaggtgatacggctctggttggctatttatttacttatttggtaagttccagtattgtgcttagaatgtacaggtaaaaggatctgtgtagattgtgcaggctaatggtgttctgtggacgtgtgttcatttctgaataagtttttgtttgctaaaggaactgaaaaaaataagattcatgcaagggatttaccaaaccgttaaatttattcacttttcaaggaccatcgcttactctgaggttatgttcgtctcaatgctttcaggctaaaaaatattttttttcatgaaagatggtaatagtaggcagtagttttgatttttaatgtacttacacagaaaaatgaaatatagcaaatccatgtccgcttccatactataagatgtaaaagtctgaggaccactcaactgactatccatttcattgtatttttagggaaactgaggcagagtggctaactgcttgcatgcagtcacccagctagtc

SEQ ID NO: 541693 - DNA, 423 bp, Homo sapiens
ctttgtacaatatcatttccctacaattctcattgaatgccagcatttctctcgctctctctctctgtttctctctctgcctgtctcttcctctctgtctctctytctctgtctctctctctctgtctgtctctctctctctctctctctctcacacacacacacacacacacacagacacacacacacaccccacattatgaaggactttcaggctgtgggaagccccagggattgcaagaacatgctagactacaaactcccaactgaattgagtcgagtcagttttctgcaaatagccaactgaatttaagaggatagtgtgatcatgtttgtttagctaattttaaagaaagtggttattttcgttaagttacatagttttcttattgtttccttattttcttgttttcttattgtttc

SEQ ID NO: 541694 - DNA, 618 bp, Homo sapiens
ctggttttaataataattttttaagtggtgggaatatttttctgtgtgtatattatggaatgagagactcttccaacaagaatttaacaccagcagaacacatgtgtacagatggaaaaacatgagtagttctctttcatatgttttccagcctctcgatatgtagaacaccacacactgaatcagagccaaagtgcctttcaaatgggcatgcaccctttttgccagttgccatggatgataagattcyacttccttcctaatatcgttctcctccttgcaccccatcatgatcgtttttggcatttacaagccatctcttgccaggttcttgcctatgcaaacatactactcctctttcccttttacagaggggctctgggacccaggggctgtcggggagatgtgtcccagagcacttggacacaagactacagctatcaaccacaaatatcttggaggaaatgtttcaccaccaaaggaagagcctcaaatgtagagtatattttttctctttctaccatgacaggaagcaagaaagaagaaaaagcattctaaacaaaatggttttgtaaataagaaaccagagggaggagctgattttcagtgggacagagt

SEQ ID NO: 541695 - DNA, 592 bp, Homo sapiens
ccgtgtgccacacccacccatcactggagtttgtcagagacgccaggccgacaagtgcccctgggttgtcactcctcccaygtccttgggatgctggctgggaaagccctgctctgctgacccctcactcctaaggggctcgcggaagaggccgagggtctgagagctggctccttggcccaaggcagggctgtccaaatcctaaggtccctctgctcccataggaaggcttccagaagcctctctctggggccagggcatctgggaagatgtcccggccctaactatgattgggaaatggggcaagatggagaaaaatggcgtttgtgaaagggctcccggggatatagtctgtatcacaggcagacaggggcctgcaggactgggctagggggctggctggggcaaggcagcaggtggggcagccacacctccactgggctgctcccccagagctggtctgaagacaggcaaggggtatggctgtgaccaaccctctcctggcaccccacccccagcaacccctgatattggggtcacagctcagcctcttccacttactcacgcatgcataccacatatatttactgag

SEQ ID NO: 541696 - DNA, 451 bp, Homo sapiens
gttatttgggagtatttgatggttttgtgagtatttgatggttttgtgaagcctgagctgactcctcttgtacccatctgcttgactggtacaatcatctccctcacacagatgcagaggtgagccccgaagacattgagccttgcctctcccatcacacgacaaatgaatggcaggaggattgcttcaacagggcatgccagaatcatcccactcagcctggtagcttcattggcacrgttgagctggcaacaggacactcatgcagggcaactgaataatcagaagcagtgaagcctgaactctaaccactatcattttaaagattattatgtgcagttatttcagctaattaaaccttgaatgcctgccagctcagcttccagctcagagaggaaatgcaggcatgcatggcctcagcttcccttccagcctctgtctgcctttcagg

SEQ ID NO: 541697 - DNA, 560 bp, Homo sapiens
gcagaaggggtaactggaaaaagatcccactaccccagagatcttagagcagagttctggaatgagtagcctcagcagtcacactgcttggtgggtgtagagatggagtttgaaaggttctgggtgtggtcagcagtatatamaaatggtgccatagattccttccctctctgctcttgctccacaactcctcacatcaagaagttaggtctttttttcctccccttcaacttggggtggccttttgatttgctctagtgactgaaatatgacagaagtgacactgtgaccattctgaacccagaccaaagaggactagcagctctgctacctctttcttgaaagctagccaccatgtaaaagtctagttaccttgggtccaccatgctgcaaggaagcccaaggtagctatggacagggacatacggagagagagggaagccaagtggaagagtaccaaggtaccagatacatgcatgaagccttcttaggctttccatcccaggcccagcttccagataaatgcaactgagtgagtgactagagcagaagaaccaccc

SEQ ID NO: 541698 - DNA, 517 bp, Homo sapiens
cacaaacttgtagattaaacaatacaaatttataactgtagatcagaagtctgacatgggtctcactgggctaaaatcaagatgttggcagagtgcatttctttctggagactttaggggaaaatccctttttgtgcctttttcagccaagaaaggccgtctgcattcctttccttgtagccccctcctccatcttcaaagacagtgacggtggacagagtgcttctcacactgacttttgtttggttttctggactcatgtgattaggttggaccaccctgaaaaacctrtgataatctacccatctcaaagtcatttatcttaattataactgcaaagtccttttttgccatgtggagaaatatactcacaatgttctgagaattaggccatggggcatcttcaggggccattattctgcagccaccatggatgcctgagagtgtagactgtcttagaaagaaaaagaaagcccagtgtaactgtgccaaggccaagagcgagggagagagtaca

SEQ ID NO: 541699 - DNA, 488 bp, Homo sapiens
atctgggctgtgattgttgatatttgcctctatcaattktggggtgatggtttgccctgcaacctcagttctttgatgggtcaaaaaaaagtcattgattttcagtttgttctacttttttcttgttgtaaagacaggagtgatgacttctagtttctttatatgtcacagctaaaactgctccattcttttaatgtatccacgtcactatattaaaatgagtttcttgtaaagaacatctacttggatcttattttttatccaatctgataatctctgttttttaattagtgtgttaaacgatttgcattttgtaattcttgatttggctgggttctaccattttattgtttgttttctttttctccttccctctttcctgtcttttttggagtttttgaaattttttagtattccatttaagtttatctattggctttttgactaaatctctgtgtatcatttaaataaaaactggttgttctaag

SEQ ID NO: 541700 - DNA, 564 bp, Homo sapiens
aaaggcagactctggattcaaattcagattcgtgtgactcacatctactcttagctactgttatactgccttctgttggaatctatttggattgtgtgtaaaacaaagccccatcatttttaggcctcgaagatgaaaggcttccttccaagaaaagcagcaatcaagtgaataggtgctcgtagataccaccaagtggcctgagaaggaattggtggcggggtgtggtagctcatgcctgtaatcccagcactttgggaggctgaggaggcagatcatttgaggccaggagttcgagaccagcctagccaacatggcaaaaccctgttgctactaaaaatacaaaaattagctggacatggtagtgcgcgcctgtaatcccagctactcaggaggctgaggcatgagaattgcttgaactytgtgggcaaaggtttcagtgagctgagatcacaccactgcactccagcctgggcgacagagcaagactccatttccaaaagaaaatagaattggcatttagaggcaatggagtgcagggaacattggacttaatatcagaag

SEQ ID NO: 541701 - DNA, 564 bp, Homo sapiens
aaaggcagactctggattcaaattcagattcgtgtgactcacatctactcttagctactgttatactgccttctgttggaatctatttggattgtgtgtaaaacaaagccccatcatttttaggcctcgaagatgaaaggcttccttccaagaaaagcagcaatcaagtgaataggtgctcgtagataccaccaagtggcctgagaaggaattggtggcggggtgtggtagctcatgcctgtaatcccagcactttgggaggctgaggaggcagatcatttgaggccaggagttcgagaccagcctagccaacatggcaaaaccctgttgctactaaaaatacaaaaattagctggacatggtagtgcgcgcctgtaatcccagctactcaggaggctgaggcatgagaattgcttgaacttwgtgggcaaaggtttcagtgagctgagatcacaccactgcactccagcctgggcgacagagcaagactccatttccaaaagaaaatagaattggcatttagaggcaatggagtgcagggaacattggacttaatatcagaag

SEQ ID NO: 541702 - DNA, 557 bp, Homo sapiens
gtgaggagatgttgggcagtagccagccactccctgccaccataggcagcaacctcctaaacacactcctgttttcaaatatcctcttctgttatcagaccacatgtctggattttcgattcagatattgtcatatagctcgaaatcctcactaggaaaatgtggctgtgcctttggtccctttgtggaagggagggataaagaaaaccatgggtttttcctttgaggccctaacacattgggtagtcagagggtatgaagcccttctgtgtcctctgtatgtcctcaagctgggatgagactccggttctccaattctgatctgtagatgagatggaggaatgagatgaccaggcaygtcacggaggcagtgcagggtcagagctgaaactcaggcctctgacctgaaatctcgaccagtttctaacagacctattacatctctgcagcagcctcattctttttaaggtctctccctctcagcacatcactgtggtcaagcctgttcccccacccagcctggtgcctcttccctccacaatctgaccacagagatt

SEQ ID NO: 541703 - DNA, 616 bp, Homo sapiens
tggccccagcatgctaatgtgcctagatgttattattattattatcattattactattttagaggccaagtcttgctagctctgtctcccaggctggggtgcagtggcatgaacatggctcactgcagtcttcaactcccaggctcaagcaatccttccaccccagcctgccgagtagctgggaccacaggtgtgcaccaccacacccagctaaattttttttttttttttagaaatggggtctccctttgttgcccaggctggtcttgagctcctcggctcaagcgaccctcccaccttggcctcccaaagtgctgggattacaggcatggcccasccctgttatcttctaaaacagctctagtcaagtctcttcccaagttacagtctcttgaagtcttcctataatgtcatagaatacagtccaaagttttctgcctgccacacaaggccttactacatgaaactgacttccccagcagaaagctcttcctgaggcctttacacagttttcctttctggggctcgtgctccccaaatctcccatgcacattcattcctgcaacttcgtgcatgttgtgctctccactttctcttcatttcccttctatatgat

SEQ ID NO: 541704 - DNA, 572 bp, Homo sapiens
tgagtagcataaaaatatctctgatgtccagaaggggtgtctatcttccagcacagcagccagacattctgcttataggtctggttttctgtgccacggccttttctctttgatatccatcaagaaggagtgtttacactgaaaatggggtgtgagtgggacraaaacactcctgggggatctgtgggtgatgtgtccagaatagggcattcgaaacatcaatgtgggagaatagaacacgtggaaaaacaaatataaagttttgacagtcctagaaacctagggtcaatggacagcttaaggaaccttctcaggacactggggaatgggaataggagatgctcctatagaagtgttttgagcagtaaagaaattggactaatgagaggtcattgatactttggttccagagaacccatgtgctggccataaactgaaactatttgcataagaggcacgatgttttggaaggactttacatgagaagaagggatttgaagagtagaaaagcatttcttcaattgaatcaatcagattccattatttgcaagttaatatacagtcagtttctg

SEQ ID NO: 541705 - DNA, 603 bp, Homo sapiens
cagaaaggtgagaatgtcaagaagggttactaatgaagaggatcaaaatatgctaacccaaaatatgccacgtggcatagagatgattttgagctgaaaacaattgagcaacagcagatggaaaaaaaagcctcccacccgctaacccmagcacgtttgcgtaaaagcaggcttagacccttaataacccgagataactcgactcctatcagctcagaaatgacgccaagcagaatctatataacaaatcttactgaaataacttgtatctttaattacttttccccacatatttatctcctcacagtttgtcaccccaaaaagcctgatcctcttttcctctgtcttgtcacttccctatacatttattgttctttgttaagatgttatagaagctcaagtcccaagcacccttttgtcccttatcactgggttccttcccacgtgtttgcatgctgcctctgtaaatacatttttatgggtttgtcctctttgtctttattttgtccgtataatttgccaggtcccaggcaatgaacctaagtgggtagaagaaaaagtttttttcctccctaactagtattctggaacaaactttgtaaa

SEQ ID NO: 541706 - DNA, 639 bp, Homo sapiens
cctgcctgccctctgggcatctgctgttctccctcgccaagagtgctgttttccctgctggaatcccacacaaccctcacagccctctccacaaaaccttccccagtgccctaggtggaagggatctccccctcttcaggcaccccacaaccctctgaacatttaaagcagccatcaccctccttctcaagctgccagccaatgccctcttctgcaaaagccaggtaaatggctccctcctccaggaagccctccccaactaccctcagcctgggtcaggggcctcctctgggtttccacagcctctgtgctccctgcaatgtttcatggaacaaggtgttgtrgaggcctatgttgtgtcatatcatctgtcttccccacctgtctggggccttttcatgggctgggaccagccatatgcaccaatgggccctgggatctggggggcagcacaacagggctgggtataaaacatacctccaaaatgttggatttgggagtgtcctttggacctctgtcaggacaagtaaatggggaaaccagaccaaggacccagaatggctctcagaaagggtggccacatgatataactgctaccatttattgtgcacctgctgtgtgaccttctaaacacagtgg

SEQ ID NO: 541707 - DNA, 639 bp, Homo sapiens
cctgcctgccctctgggcatctgctgttctccctcgccaagagtgctgttttccctgctggaatcccacacaaccctcacagccctctccacaaaaccttccccagtgccctaggtggaagggatctccccctcttcaggcaccccacaaccctctgaacatttaaagcagccatcaccctccttctcaagctgccagccaatgccctcttctgcaaaagccaggtaaatggctccctcctccaggaagccctccccaactaccctcagcctgggtcaggggcctcctctgggtttccacagcctctgtgctccctgcaatgtttcatggaacaaggtgttgtggaggcctrtgttgtgtcatatcatctgtcttccccacctgtctggggccttttcatgggctgggaccagccatatgcaccaatgggccctgggatctggggggcagcacaacagggctgggtataaaacatacctccaaaatgttggatttgggagtgtcctttggacctctgtcaggacaagtaaatggggaaaccagaccaaggacccagaatggctctcagaaagggtggccacatgatataactgctaccatttattgtgcacctgctgtgtgaccttctaaacacagtgg

SEQ ID NO: 541708 - DNA, 614 bp, Homo sapiens
atctcatcatgaagttgccacttcagtcccactttatgctgcctgccttgttcacatctcctcatttagccctgggtctccttactttatggtatcacagagcttagaaatgttctggtcagctattcttagacccagaactgccattccaagcaagagagactgttatcatgtcttcttgggatttatacatcagttttggagagctgtataatacctgaaactcttctcacctttctcccttagctaggtcaaatatttatcatattcattaactcttctttatagtttgtgtgtttgggggtttggaactattttttaattttatggaaaatgtattttgtttttgttctcttactaccttttgattggtttaagggaagatcaagrcaaaattgcttttatttatattttattttattttttggtgacagggtctcgctctgttgccaggctggagtgcagtggcacgatgtcttttctaaatggattcttaccaaattaaaaatgcgtggcatgttcttggtcctaaggtgtttattccttcttaggcttaggctttcagttgatatattctccttaattcttccgtttcttttcattttttttttagg

SEQ ID NO: 541709 - DNA, 614 bp, Homo sapiens
atctcatcatgaagttgccacttcagtcccactttatgctgcctgccttgttcacatctcctcatttagccctgggtctccttactttatggtatcacagagcttagaaatgttctggtcagctattcttagacccagaactgccattccaagcaagagagactgttatcatgtcttcttgggatttatacatcagttttggagagctgtataatacctgaaactcttctcacctttctcccttagctaggtcaaatatttatcatattcattaactcttctttatagtttgtgtgtttgggggtttggaactattttttaattttatggaaaatgtattttgtttttgttctcttactaccttttgattggtttaagggaagatcaaggcaaaattgcttttatttatattttattttattttttggtgacagggtctcgctctgttgccaggctggagtgcagtggcacgatgtcttttctaaatggattcttaycaaattaaaaatgcgtggcatgttcttggtcctaaggtgtttattccttcttaggcttaggctttcagttgatatattctccttaattcttccgtttcttttcattttttttttagg

SEQ ID NO: 541710 - DNA, 465 bp, Homo sapiens
ctcagttcattaaaaaaaagtatagtgggtgcttagatgaaaatgagacttctaaatttgccagtctaattaagacgtctgtaccttgtgcagcgtaaatcatgttggttaaatacgtgcaggcttttaaaaaatgtgttttatgatgtaattttgtttttagaatttctagaatttggaatcgagtgcattttctgacatttgagtacagtacccaggggttcttggagaagaacctggtcccagaggagcttgactgaccataaaaatgagtactgcagatgcactgtaagcacctgacttctggaatcccttrttatttggggtttctaaagctcgtcaactgtgatcacagtaaaagaaaacttatttaataagcagtaaataaggaacctgtttatgaacagaaatattagtcatcaaaaagggtatttggaatgttttaaatatttatctgtttgttaa

SEQ ID NO: 541711 - DNA, 581 bp, Homo sapiens
atgataacaagaaacagaagggcragtatattttctaaagttgagtggttaccagtaaaattaaaaacacagcctgtcaatagtgactgctttcaggacatgaaactgggaagctgtctttgggatgaaagagttcattctatggactcacgttttcgttggggaaaaaaataccacattacatttattttaatgtttttcataaagttatcattagaaattataaaccattgaaagaattgagacaccatttccacattctccaaatcctcaccacccatgagaattacctaaggaaggcaaaaatcaatctattctctgccaaacaaggggtcttttgtaacaaaagaaatcccggaaagaagagcatatcctgctgtgtgtcaggggcttttccaggtgctctggataaaacagttaataaacaacaaaaatcctgccctcatagagcttaccttcttcccttagcatataaagccatagttattactttgcaattaataggctcagtgtcgttttaactgaggagtatttctcaggtgagaatagaccatatgatattcagaagaaaaaaattaact

SEQ ID NO: 541712 - DNA, 451 bp, Homo sapiens
gggtctgaggagcagggcacaggaaacccaaaaactcttacaatgcatcattcattctagctaattaagacctgagcttagtaatactccaggggaaacaaaacttatttccctagatwacaaatttataacctataattggagattgaaaattaagtttctagttacaaaagagattcagtgattacttaagaagaaaaaatgtacaaaactaatcattggcaggaagtggacataacattagttagtggacataacattgcccggaaagtgaggagacccgtgtgatcttttcctctcattccctggcccccagacttcaagatcctcagctgtaaaaccaggttggcttgagtgagcctcatgtttccttacaacttggcagttccatgatcccaaatgacccagcatctaacactcctgtctggcattgcctaaatgttcctgggaa

SEQ ID NO: 541713 - DNA, 499 bp, Homo sapiens
actcgcacactgcatagggatggaggaacagtttctgtttgcttttggtcaatcatgaactcctacgtatcttgtaaacatgtgagatgtaacttcaggtatactggagaatgaaaagatccatccaggtctcaaagacttatgatctaattagatcacaggcagaggagataaaaagacagagatgctcgagaggttaacaaagcagctttgaagcagatgtgaaataacatctcgagcaaactgggagttagaattagcatgtctcagtgtgtgtttatcagcaaaagctgctaaaaagtgctgcagaaaatgaaaaggaaggaatgaagattttatttccctattatccaaagagcctgaaggcagatggaagttatggtcagaacrtgggttaaatgagtcacagtgtggaggaagccacaaatttccatgtaacccactcccatccctcaagtgtcgtcttttccaaatgtgggtaaccctgccatgggatacg

SEQ ID NO: 541714 - DNA, 602 bp, Homo sapiens
atataaatttgtactgaaaaactttatgcatttcttatctgattgattggttctttctacctagaaggcgattctttcttgttcaaacccagcccagatactcgcacactgcatagggatggaggaacagtttctgtttgcttttggtcaatcatgaactcctacgtatcttgtaaacatgtgagatgtaacttcaggtatactggagaatgaaaagatccatccaggtctcaaagacttatgatctaattagatcacaggcagaggagataaaaagacagagatgctcgagaggttaacaaagcagctttgaagcagatgtgaaataacatctcgagcaaactgggagttagaattagcatgtctcagtgtgtgtttatcagcaaaagctgctaaaaagtgctgcagaaaatgaaaaggaaggaatgaagattttatttccctattatccaaagagcctgaaggcagatggaagttatggtcagaacgtgggttaaatgagtcacagtgtggaggaagccacaaayttccatgtaacccactcccatccctcaagtgtcgtcttttccaaatgtgggtaaccctgccatgggatacgccct

SEQ ID NO: 541715 - DNA, 609 bp, Homo sapiens
ccattcatttcagctcagttttgcccatgctgtcttttgtccctcctgaggcctgcattctaggaacacaagtgactcacatgagatctccttgaagcaaatttgtccttgcagtgctcacgtccagcagtagcctaaaaatcctgacagttttacttctctggyggctagaggcggaaagtcacattctaagaatatgaagattgaggaagtgaagcaagctcaaattgcctccaggcccctcagcaggatcaaggtggtggagagctccattaacttcaaccggcaaaagtagtggcggcctgagagagccttaaccttcatgtgagctataactttatttaaaacttgttagttttacttacattttgatctgttctacgtgttagagtaaaaataaccatgttctctcagtctacaaaaggtcctcataggcagtctcttttattttattttattttatttttatttatttatttgagacagagtcttgctctgtttcccaggctggagtgcagctgcccaatctccactcactgcaccctccgcctcccaggttcaagtgattctcgtgcctcagcctcccaaatagctgggattacaggcacg

SEQ ID NO: 541716 - DNA, 609 bp, Homo sapiens
ccattcatttcagctcagttttgcccatgctgtcttttgtccctcctgaggcctgcattctaggaacacaagtgactcacatgagatctccttgaagcaaatttgtccttgcagtgctcacgtccagcagtagcctaaaaatcctgacagttttacttctctggcggctagaggcggaaagtcacattctaagaatatgaagattgaggaagtgaagcaagctcaaattgcctccaggcccctcagcaggatcaaggtggtggagagctccattaacttcaaccggcaaaagtagtggcggmctgagagagccttaaccttcatgtgagctataactttatttaaaacttgttagttttacttacattttgatctgttctacgtgttagagtaaaaataaccatgttctctcagtctacaaaaggtcctcataggcagtctcttttattttattttattttatttttatttatttatttgagacagagtcttgctctgtttcccaggctggagtgcagctgcccaatctccactcactgcaccctccgcctcccaggttcaagtgattctcgtgcctcagcctcccaaatagctgggattacaggcacg

SEQ ID NO: 541717 - DNA, 617 bp, Homo sapiens
ctgctaggaatgctgttaccagatagccttcagccttcagctctcaccccctccaggaattatgtagctgctgagggctgtcttacccctggccacacccctctcccagggtgtggcccacttctgatcacctacccagcaggaatgtgaagccctgtgcagggtcagccaaagctgtctctaagcctgcatcacagctcagctttgcccttggcccaatcttctttctcccaaaaacacttcttaataaatattccgcacactcaactctacctcaaattttgctttkgctttctgtgttacccaatctgtggaatttatctaaacctgatcaagttctattacttcttttagcgttttatttgggataatgaaaaaaataagtaatatcatagcaagattttactaactttaaaaactttttaaattaagtcaaaattccagttatacttttatcagtgatatgcacaatgacttagttaacccaaaatatctggtgagtaggggctagggctgggagatcactgaatatttactttgaaaaggcttctgatgcttgattagtgttactccctcattctggtcgcaattgaccaaacttcatgaattataataaa

SEQ ID NO: 541718 - DNA, 644 bp, Homo sapiens
ttcaggatgatttcaaacaaattctcactatatycttatacttcttgaagggtggaaaaggtcagacaaaattaaggcaccctgcaaggaatgacttgaaatcagcttttaaaaggaacctctgttcttcaaacttcgccagtcatctctaaacctttgctgtctaacatagtaaccagtagccactggtaatattacatgtaaattactaaaattaaaacaacaaaaaattgagttgcacgagctattttttcaagtgctcagtagcagcatgtggttagtggtaacatttgcacagtgtagacttagatttttctgtaataaagatttactaatcgacagtgttgctacatcaggataaacacaattgttaaccagacagtagctaaatatcataaacattcatgttgatcttaaagtggttctaacctttatttttaattttctaaattttaactcttattttagatccagggagtacatatataggtttgttacataagtacattgcatgattctgaggtttgagatactattgaccctgctatccaggtactgggcatagtccccagtaggtaattttctcattttccccactcccgcccccacattccttttcctcactgtcacggaaggaaagattt

SEQ ID NO: 541719 - DNA, 540 bp, Homo sapiens
aagtccagcaagtagcttggcctgagtggagggaggcagagcttcccttgggaacacatcccaaggtgtgctcagctctgctggacaggtagagtgccctggaattttccagtggatacccagaagacaccaccaactcctctgcggtagagaaggagccaggcacagtggctcatgcctgtaatcccagcattttgggaggctgaggctggaggatcgctgagcctaggagttcaagaccagcctgggcaacatattgagaccccgtctctaccaaaatagtaaagccagcctgggcaatgtaatgagatctcatctctacaataatttttttaaaaattagccaggcatggtggcacatgcctgtagtcccaactactcgggaggctgaggtgggagratcacttgagtttgggaggcagaggttgccgtgagctgtgatcacaacactgcactcctgtctgagcaacagagcaagaccctgtctctgaatgaatgaatgaacggtacctagcactaacctaggcaagaggcaggttt

SEQ ID NO: 541720 - DNA, 270 bp, Homo sapiens
tgaactcatccttcctttccctccctcaactctggcccttactgtccttcccttgaggaagcggcaggaccacaactctgctgtcgtaatgccttcccttgtactccagccctacatatgaccagccccaaagtcctgcggagttttccctccttaatatttatctcacccagcccctccgtacacaccactgcctggatccaggctgtcaccacgcctcgcctgggtgacacaacatcytcaccgttcttgctgcttcctgtgtgaccc

SEQ ID NO: 541721 - DNA, 593 bp, Homo sapiens
ggaatctcaggggtgggtccaggaatctgtgctttacaagctccttggatgagtttgctatatgctgaatatacctatactagagacatccctgagggaagcttatttcccaggccaggccaacaataataagaccatattactatagtaatattataatacatattacagttttgagtcagaagttttgagatcctgtccaggtcagttcttgaatgcctgggtcccctgagggacagggaggtactcagagctctcatatacctctgggcagaagagctaatggcatctggatagcttcttctgtttttgtttttgtttttgtttttgagacagtctcgctctgtcgcccacgctggagtgcagtggcaccatctcggctcactgcaatctctgcctcctggattcaagcaattctcgtgcctcagccttctgagtagctgggattacaggtgcccaccagcaaacacagctamtttttgtatttttagtagagacgggggtttccaccatgttggccaggctgatcttgaactcctgacctcaggtgatctgcctgcctcagccccactggataacttcttgctgtgggg

SEQ ID NO: 541722 - DNA, 666 bp, Homo sapiens
tcacatgggctctttgtctgccaaggcctgggtccaggctatgagtgttcaaaatagaacaggaagttcagaaaaaagcagaagccaagagaaggttacagcatgggagggcaggcttgggagagaggatttatcttgtggggaggacctcccagtttaggagagaagcacctgctctaggcacaggaagacatcacaaacaggtgatgaacagcagccgggaagcaagggtcctgttgtgtttccatgttacatcctgattccaggatgagcaagactaggaaacagaccagtttacagtggccaccagcctcacagactgtacctattaaaatggaatgattcttctgtccttttgtgagcaggagccgaagaacaggtaaatgaagggaagcaaaggaaagagaaagaggcctggatgggtgaggggagcatttgtgatcttggcccactcagcgcccatcccccttcttctcttcttccagtaacagcaccttgattttcctcctgggagcaccctcctccacattcagtctgggaggctcccacagagtagcccccgccctacaggktctagttcaaggaccctcatgaagtcctctcaaggggatgtgggtagttgataaaatcattatcccagatatttgtgtaaggccttatagtgta

SEQ ID NO: 541723 - DNA, 661 bp, Homo sapiens
tgtcactaatgagctatgtgaccttgggcatgtcattcaatatcaaatgaagaaagtagattagatcagaggttcatgaaactcagaatcagaaaatacacattcctggatcaagtgaattataattcccagcactgggcctgaggaatcagcgttttcaacaagttccctagggatccttgtgtagccgcctggccctggtattggggatcagtcggcaacatgacctctaggtcttttcctctactattccatgatcttagagaaggagaattttgccccaggttctaaaagcaatgataaatatgtgttggyataggttcaaacatttcatttaaacattcaacagttcaaacatttttgactgcactggaacctgctgtaagaaatataagtacttttcatgaagactatatactgtatatatagctccacacctttcccttactgtgatccactctgtttccttcttttattttcaaatgtaccactctgctgatttcatgatacactagtgggttgagataatttgtaaaacctggtgcagacaatctctgaatcaagaacaaagtcagggccagaaagccagaatctgtgtcacctagcagaggccagacagcaccatgctgacctgtccaacccataaggaacccaaggggca

SEQ ID NO: 541724 - DNA, 567 bp, Homo sapiens
taatacagtttttcaggactgaatttgttatgcatgtcccacagtaggtcttcaaaaaatattggatggctggatgggtggatggatgaatgacaaataccaaacttaggttaatgtgaaattgtaattcagaagtgtctctgcttgagaccatttttcctgaacttgaactgccagaaatttctgcttaagaagagctctctctactcccaaatttctggacttttcagtatccccatggccttcacaaaacagactctgccattctcttggggctgtcttgcctgcaactttttctcttatttctgtgtgtgtgtttgtgtgtgtgtgtgtgtgtgtgtgtgtgtgtgttgtatattatgttatwtatatattttagattgcctgatatttcttatgtttgaattccttttcagatcattttagcttcttgtcttagtctgctcaggctgctacaacaaaacatcatagaccagccagcttataaatataaatttatttcccctagtcctggaatctggagtccaaggtcaaggcactcttacgtttggcgtctagtgggggccc

SEQ ID NO: 541725 - DNA, 646 bp, Homo sapiens
aacttaacccacttacaaacggaaagaattgtgacagaaataaatggtagttttaagccacttagttgtgtgagtatgttaggcagaagtagataactgacaaatggggaagatacattcccacgaaataggagtttgtattattccagtctcacattgctataaagaactacctgagactaggcaatttataaagaaaagaggtttaattggctcayggttctacagactgtacaggaagcatggctgggaggcttcaggaatttacaatcatggcagaaggcaaagaggaaacaagcacatcttctcatggtcagcaggagagagagagtgaaggggtaagtgtcacacgcttttaaaccatcagatcttgtgagaactcattcattatcacaagaacagcaaggaggaaatccacccccatgatccaatcacctcccatcaggtccctccccaacattgggaattaaaattcattatgagatttgggtggggcacagagccaaaccctatcagaggtttatggtttccatgacagaggggcaatgggaatatgtcagagatactataacaagtagtattttattatagacaaagaaaactaaatcccataccttactttctgcaatctacaacagtggaatct

SEQ ID NO: 541726 - DNA, 497 bp, Homo sapiens
tgttttacaggacttcctgtctctgggcaatttggtggagagaatgctacacagaggagctttatacatgatcatcattaaaaatgaacaaagtacataagagcataaagaagaaaaaataatcacatatccagccatcatgtaaagtcagacataattaagcattttcacagtattctgtttcgtgttgttacattgtgtgtgtgtgtgttttgttttgtttggagacagagtctcacgctgtcacccaggatggagtgcagtggtgcaatctcagctcactccatgctctgtctccagcgttcaagtgattctactgcctcggcctcccaagtaactgggactacaggcgtgcgcygctatgcctggctaatttttgtatttttagtggagatgaggtttcaccacgttggccacgctagtctccaacttctcaaagtgctggaattaaaggcaggagccaagctagcctgcattgtgtttttatataggagatt

SEQ ID NO: 541727 - DNA, 375 bp, Homo sapiens
gttatgtgagtttacttatgtaacgagccttcatgtgtacctccaaacctagaataaaagttttttttaaaaaagaaaagtttttgtataatagaatcttggaattagccataaagaagacctgggttcaaatcccagctctgcccattactgcctggggwattgttgcaaagatggtgtgttgaaggatttggcacaaagttcagcacatacaaagtctcatagatgctttttgaaaatttttttcactaacttgctttgttaccttaaacaagtcagctaacgctgttgggcctcaattgtcttatttataaaatgggagcaatagtatctgccttgagtatctttaaagctgctggtaaagagaaaactatt

SEQ ID NO: 541728 - DNA, 375 bp, Homo sapiens
gttatgtgagtttacttatgtaacgagccttcatgtgtacctccaaacctagaataaaagttttttttaaaaaagaaaagtttttgtataatagaatcttggaattagccataaagaagacctgggttcaaatcccagctctgcccattactgcctggggtattgttgcaaagatggtgtgttgaaggatttggcacaaagttcagcacatacaaagtctcatagatgctttttgaaaatttttttcactaacttgctttgttaccttaaacaagtcagctaacgctgttgggcctcaattgtcttatwtataaaatgggagcaatagtatctgccttgagtatctttaaagctgctggtaaagagaaaactatt

SEQ ID NO: 541729 - DNA, 572 bp, Homo sapiens
gagtgcccccaaggctcagtcctgggctgtctgccctatctatcctctctcccaaatgaaattatccattcccaaggctttaaattccgcttatgttttcatcacttttyctggttttgatttttttacctgtttattgtaaaataaaacatagatacagaaaaccacacacacaatataaatggtttactgaatcattataaggtgaacacctcataataactatgcaggttaagatatagaaatttgccaaccacccagaaagccccccatgtcctcatcccaaccgtagcctctacctcctctccaaaagtaacaacttccctgacttttagagtaatcacttccttgtggttttttttcttttatgatttatcacccaagtgcattcctagacactagtcttgcctagtttttgaaactttatgtcttctaactctcttttaatttacggattcctccttcatctctttcctttccttacaatttatttgttcgtttgcccaatggaatttctcccagtctggattctgtggcctgcatacttccgtgcagttcaacacgttgaactg

SEQ ID NO: 541730 - DNA, 476 bp, Homo sapiens
ggttgaacacattgaacccttccattctgaagggacaatgatttacttcttggaaaagaaagatattctggattaagattttcttttcttcttaacataattttgtcacctatcatctgtggtctaaataaatgcgttatacatcattttgacagtccwcacaacgtgtttcttatcaaatatttcactttacagaagagaattaaaacaatgagcccatatccatggagtcattggtcatatcatgtgactatcatccagaaatagatggccttatagaacataaatgtgaactctttgtaaacatcagagccagttgtaggacaatcttgtgagattagagtacattgtgtaaggcaaattgtatgctttgaataagcaacaaatatatggtgctatttcttccactaatatactccccaggttgaaaataaagatgtgaagtggagtggcaaggggttgtacaaggctcacag

SEQ ID NO: 541731 - DNA, 591 bp, Homo sapiens
ctgggtgccatctgcaactttgatagcaagctttctccatgatttaggcagacatttgtgatggtcaagtttcagcagactactgttttgcataggctattgttaaaatgagcttgtatccctttgcatatattattcaatgaaaggaaattagtaggccagtgaaccaatggttgagctaccaactgcagagaaggtgacatgttaaaactttgaattggctctattttactttttgtattgctcctgaaaggtgaaaggggatagcagaaaaatcctttcttgtgctggagaaattgtttgttcttgtttgaggactaatagatgtctaacaggtatcattggaacttgcacataaccaaagccaaacttttattttccctcccmatcagcttctccctaagctgcctcatctcagaaaatgacactttcattcttccatttgctcagtccataaaaccttggtgtcattttcacttctacttttttttttcccactccaaatgcaaattattagcaaattttttcagctcaaccttcagaaaatatccaggacttcatcatgttttcatcaccccaactgccaccacc

SEQ ID NO: 541732 - DNA, 451 bp, Homo sapiens
cagtctccccacaactcccgagaaaaggcactatcttctgaatcatctggcagaacacaaatatgaattgttctgaccaatgcattctctgttctgctttcaaccctcataaaagcatagtggggaaagtctctgccttgggagctgacagggaagagttgatgcctgacacctacgatcaaacctctctgattcaagcaatatctggaggcccattgttatcgcatatttattgaagtcatatcctcaaagtaacccttaccaataatcaaggtgataggtttgacctttgtcttctgtctcctggaaggaagagagtgaggttggaagagagrgaatattttgtgggctgtagaacctcacctctattccgataggcctaatttgatccacaggaagtcactgtcccctaatctttctcttcttttctcctctttcccagggaacaaga

SEQ ID NO: 541733 - DNA, 652 bp, Homo sapiens
gcctccaggatattttgtagagaaatatcaccacactttcacttactgagaatactctgcctacttcagtatccacagtatatactcttatactgatatattcctttaaaaaattaaatttccatttctctattctgttatccctgacatgactcatgaattccctcacacttaggatcaggtcagtctgaccccaaaacccatttttaaaaaacttattttatcatctgttttcccaagaacccaatgacaaacttcagtttaggatgatatgtctgtcatttagaaagggtaaggtgtgccttcctaagtttatgtaggcctggtttcatggaatcactacaaccaatgactgcaagcctctagctgattcacttataaatactgacagtgacaggtgatgagaatgaaatgaatgtttagaagaattacatgcatctctgtttatttgctctttttgaaattaatcttagagtgtttacaacatataatgctaaacacatgtcacttattctgaacttaacacagtgcatggaaatgtttataagaattagaggcacttcagagtctgtcacagggatagactattgacacaatckgtttatgccttctgaaacctgtatttagtcacggaaaactctgtgttgctctt

SEQ ID NO: 541734 - DNA, 480 bp, Homo sapiens
tatggcaaagtcctatgtaaacattaacagaatgcatatttacattttataaatattgaatactgtgatttagctccattttataataaatatttatttcttattttatgtgatataaacctgatgactattacataggcatatagtgatgattatcactgatatgaaagcagtacccttgaactatgacctctaaatatgacgtggtctacacatmttatctagaatgaaatataatttatatatttaactttctttttactcaattatatcttcttggtgattttgtttaactacacttgaagctcttcagtgtttacttcacacatgaaaagtccttctgtaaactaagatatccattacaattttgctcaaggatggatgtcaacacaatggaatatttaataatataaatagatgttaatatgtgcaaccaacttcaggaaacgaatgcaagatttcatcagctcagttaactga

SEQ ID NO: 541735 - DNA, 652 bp, Homo sapiens
tcggtccagagtaggcttgcaggaccgccttctctacatgtcgcagtagataacctctgcaaagccagagagtaattgcctccaccaaaccttctgtcggcaggagcaatcatgagtttgctcacatcctgcattcataataaacagtctgctgtttgatcatatagcctccagtggaatgctgagttggtcatgttccatgggccctcggctccctgcatatccccctttctgtttatgaattaattgaaagaatgtaaggccaggctgggcagctctttctccgattggcagtccatccgattttacagactataaacagaagacagagacaaaacaacattattccaagaactacatataagctgttaatgtggtgccttagataggtccaagggttgaggctccccaggccttgctggaatttggtccggtcttctaaagaaggctgaaactctkgagtttgcctatttaaatcaagaattttgttttgttttataattcaccaatatcaaaggtgatgttggatgtgaaagctccccgcaaatgggctttcacgaggtcccatggatactcactttggttatattctaagttggctacacaaatatgggtgtgattaaaatgacaacgcaattgctgctgcaagtgc

SEQ ID NO: 541736 - DNA, 357 bp, Homo sapiens
catggattcctctttaataagggatttcaagatttgatactctctttgggtatcagagagtgcagacactaaaaaaacttcagaaggtcacataggcagacaatgaaagggcaaaaaagactagtagaaactgtaataatycttcataggaaaggaaatacaataatcgtataccacttggctcctcagtgaacaatatttacttgttcatcataatgtaaaaagtacagttttcaactttttaaactataatcactgataacttaattatggataaagaacaaaatgtagatgttattgacatcaataatataaaaattttaaaaacaaatgttaacaattggaagaagaatgaca

SEQ ID NO: 541737 - DNA, 508 bp, Homo sapiens
acattctattagtagacatgtagctgaaaattatataaaaatcaaattttgtgtactgccagaggtccttgttagattaaagaaacccaactgtggtatattttttaaagcagataattttggaaagacacacttgtaatgactttggataaggataaaaggggcatagctgagatgttagaaataacaaagcaaccagcaagggtggatgatggatcccaaatggtagacgacggagagagagaaagctctttaaagttataagcttgagggaatgaaataaatatgcagacactggagaattcacacaactttaggtgagagttgaaggagactttgaaggaagaatttatctccgctgagaggaagggttgatgaggtaagtatgtgtgttccmtgtttgggaggtgaatggaggaatcccagttaaagagactaggaagactcaaagatggtagtaatctatatttttatatgttcagtggagagaaaaacaccatgagttatg

SEQ ID NO: 541738 - DNA, 577 bp, Homo sapiens
ggtaattctcagttctgctcatgtcataacctgttagcattaagagatgacctcttaactctgaagaaatatttttgctagttctacttaagagrtattattttctgaactatagtgatatttttagactttggctaaaaaaactagacatgctgctgagaataaaaggaaaaataaaagtggatgtaaagtaaatactctctgagcaactgttatgctattttacttaagccgatatttataaagtaaaaaccaaatgaccagttgatgtaattacccagataacttaggaagaaagaaaccaccttcatactgcacaaaagtatcaatactgaatgcttaaaatgtgcatatacactgtttgattcactagataactttataatgctatagtgcaaagcaactcagaaaggtaggcatgatttgacaaagaaactaaggtattatatagacaccttttttccatctcgagacaactttctaggaaacattaattcatagatttggtttagtatgagtcaaatccacacctcctggtaatttaggaataaacagtgcatccctccatcataaaaga

SEQ ID NO: 541739 - DNA, 577 bp, Homo sapiens
ggtaattctcagttctgctcatgtcataacctgttagcattaagagatgacctcttaactctgaagaaatatttttgctagttctacttaagaggtattattttctgaactatagtgatatttttagactttggctaaaaaaactagacatgctgctgagaataaaaggaaaaataaaagtggatgtaaagtaaatactctctgagcaactgttatgctattttacttaagccgatatttataaagtaaaaaccaaatgaccagttgatgtaattacccagataacttaggaagaaagaaaccaccttcatactgcacaaaagtatcaatactgaatgcttaaaatgtgcatatacactgtttgattcactagataactttataatgctatagtgcaaagcaactcagaaaggtaggcatgatttgacaaagaaacyaaggtattatatagacaccttttttccatctcgagacaactttctaggaaacattaattcatagatttggtttagtatgagtcaaatccacacctcctggtaatttaggaataaacagtgcatccctccatcataaaaga

SEQ ID NO: 541740 - DNA, 577 bp, Homo sapiens
ggtaattctcagttctgctcatgtcataacctgttagcattaagagatgacctcttaactctgaagaaatatttttgctagttctacttaagaggtattattttctgaactatagtgatatttttagactttggctaaaaaaactagacatgctgctgagaataaaaggaaaaataaaagtggatgtaaagtaaatactctctgagcaactgttatgctattttacttaagccgatatttataaagtaaaaaccaaatgaccagttgatgtaattacccagataacttaggaagaaagaaaccaccttcatactgcacaaaagtatcaatactgaatgcttaaaatgtgcatatacactgtttgattcactagataactttataatgctatagtgcaaagcaactcagaaaggtaggcatgatttgacaaagaaactaaggtattatatagacaccttttttccatctcgagacaactttctaggaaacattaattcatagatttggtttagtrtgagtcaaatccacacctcctggtaatttaggaataaacagtgcatccctccatcataaaaga

SEQ ID NO: 541741 - DNA, 481 bp, Homo sapiens
tttgagcaatactcaagggtgagtggctgctaaccaggaagtcaagaactttcaaggcagataaaataaatcatgccaaggtgtaggakgagcaggactgcatgacagatgccagaaactaagcatgaccttgaacaactacacaagttacaagtggccagcagttaggttcaaaagtagacaacatctaagaaaggatgggcctcttctgtcaggctaaggaggttgcatttaacctatagacagcaaagactcatcaagggtttttgaacagtaggattgtcagacaagaccagtgcttacaggagcactccgacctacgtatggcacatgggttggagaggtaggctgtggaagcagggaggtcaatgagaagagtactatgatagggcagttaagagacagaaagcagtggtggtgcaggaggcagagctcagagattcatagaatgaagaactgggagaacttggtgcttaattag

SEQ ID NO: 541742 - DNA, 650 bp, Homo sapiens
ctgacctcaggggaggctgcagggggaggctatccagagaactgagggaaggccagtggaacaacagggtgtggtggagagggagagccgaaggtgtagtggtggtgggaggggccggccatggtgaggaatttgcttttattctcattgcagtgggactgtgtcagggcaagagcgggcactctgccttcatcccaggagagagatctcacttggccctgggagagatgtatttgggaggggagatgtaaagactgggtgaagtaggggtgctggagaggtaggtggcatgaatggcccccagattcctggcctgatctctggatgggcgaagaagaggggaggcagaggagctggaaacatggggcagggtccacagctctgttctggtcctgctgagttttgagatgcttgtgagtcatccaagtggaggtgcccgaacccgggagtctgcagctcagacaggatgtctggcctggagacagaggcttggggttatacagggggcatctacgacagcgggaaagggtgggcttactatggagagaagagagcccagggtgcccagggagatcactgttcccgggtcaggragaggaggcggagtcaggcagggagaggaggcggagtcaggcgaaagaccagaaaga

SEQ ID NO: 541743 - DNA, 622 bp, Homo sapiens
ccgcaggcttcttggaacagaggcagccagctccgttccatctgagggagcagaggaaggaggaaaggcacagaacattggaaagggagcgggcgtcagctaccaaggagttgttataaaatatagaagcaaaacattaaaaatgcactgttatttttcaataaaaccatcccatgtctttgcagaagggtttagttcctgcattcacactctgtgtggtgtctgggaaaggtacttgactttctgtgcagaaccataacgggagacaggaagatgagtttttttcccaagacaaagctaggttgtttttctttgctgtctgctggacagctgggctttctgaattgatagcaagtcactcaagaggcatttgaaagaaaacactttaatcctaagtgaaagaagggttttcgtgtgtacagttcatggttcaaataagtagaaaccactttacttttgattcccaggttgtatgtaccagacagrctgcactttctggagtctgacaccagaacttgtgcaggaggtgatcagattatattctgggcagtggaggctttttgtagtcgaccagaattgctttttctgtgtaaaatgatggttgcagtgcttcctggagtat

SEQ ID NO: 541744 - DNA, 598 bp, Homo sapiens
gtgtccatagccctgtcttctccccctgtctcccaccatttcctccccatcccagggagaataacacccttcctctcaccagggttctggtcttctgcgggcacagcctagtgtaagggtattaaattgctgtgaattaaacagtaaagagtaacggatgctgtgcccactggactccacatggcttacagaaagcattcagcttcaccctggatgtgatgccatacaccgcktttgcagtctagatctgggtggaggccaccattttgtaacatctggtgagcatgctccttggttctgtgttaagaaaatggaaatcctgaggtaataaatggtaaggctgatgctagaacctaatgtgggtgtttacctttccacaagacactatgaagtatctttgaatgggaaaagtccttgctcagtgcttgaggaagatttaagctcctttctgaataaaagtggtttccctcactccaagggtagcttttggttgtacctttcatcaggaaagcaattacagtggaattcgtggacctgaggtccttcctgtcatccctggccctgggggctatttgctgcctcgagctgttcccagcta

SEQ ID NO: 541745 - DNA, 492 bp, Homo sapiens
aggccacagcttctcctgagactccagaaggaaacagccctgctgacgccttcggttttagcctggtgaggcaccttttacctttcgaatttcagaactgtaagataataaattcgtttagttttaagccgctgtgtttctggcagtttgttacaacagagataaaggtaaatataaccacactagacaatttgagaagacttttctttttttgagtgtggactaaacgcagatcccaacatataaactaaacataggtagaaggcatgactcaaacgactattgcaccgtattctgtgatgaagagtcgtgctctctttttataaacaggctcaaatagtaattagattatttaawtaaaaataaacagaatatagctagacatttccaggtagttttcaaagtaaacaaactagagtagcactcatggctctctcaataaatggccggaaaggcctgtgttcttgaataggagcacggacagacaaacat

SEQ ID NO: 541746 - DNA, 492 bp, Homo sapiens
aggccacagcttctcctgagactccagaaggaaacagccctgctgacgccttcggttttagcctggtgaggcaccttttacctttcgaatttcagaactgtaagataataaattcgtttagttttaagccgctgtgtttctggcagtttgttacaacagagataaaggtaaatataaccacactagacaatttgagaagacttttctttttttgagtgtggactaaacgcagatcccaacatataaactaaacataggtagaaggcatgactcaaacgactattgcaccgtattctgtgatgaagagtcgtgctctctttttataaacaggctcaaatagtaattagattatttaattaaaaataaacagaatatagctagacatttccaggtagttttcaaagtaaacaaactagagtagcactcatggctctctcaataaatgrccggaaaggcctgtgttcttgaataggagcacggacagacaaacat

SEQ ID NO: 541747 - DNA, 533 bp, Homo sapiens
ccttgggttctgggccagtcgggagctgggactacagggaccaagggcctggaaggaggtggctcctgggactggaattcctccctatagatgcaggctcagcccaggcctcttctcctgggctccaggtacagatggggaggggcagtgctgggagattggggcagggagaagttttatgaagaggctgctgcttgtgagagaatcagagaggtgacagggaraggtgagaatgagctctgacaagaggcagaatggctttgccctgaggcagcctcagctctgcaagtccatcgagctcaaaaggtggggaaaaagcagaaatggctgtgctctttgcccaggaggaacctgcagcagagtcttcacagaaatggtccgtctcactgtctccctctcctctcagagctagggtggccgcaacctggagagccgtggggggagcgggtggacaggaggagcctaggccctaagcagaaaacctgtgagcagcggggagcagcgtgtgccagtaatgccaggcagacacagct

SEQ ID NO: 541748 - DNA, 579 bp, Homo sapiens
cttcttcttttaataacagcactaggtgttattggaaaaatccgtgggcagcacataatactaaatagattgcttcttgagggtgytcacttttttaaataatgagttatgtggtaagaattttacattcctgcatgaatttttatacagagagaatttttggttgatgctttttttgttgtttttctataagcactttgaatatggcatcccaagggcccctggcctctgtgttttataatgaaaaattagttgtttatcatattgaggatcccttgcatataacaagtcttttttattgtcttggctcttgacagcttgagcatagtttgcctaggtgtggatctttttatgttttattctgcttcaagtttgttgatcttcttgaatgtggggaatcgtgtccttcatttagttttggaagtttctggccattgttacttcaaatatttttctgccccgtgtttttccttctcttcctcctagacctaccattatgaatagaatgggtgctacacatgcttctttcctcctagacctaccattatgaatagaatgggtgctacacatgcctctttc

SEQ ID NO: 541749 - DNA, 594 bp, Homo sapiens
agagggctgtatttcagtttctacagcctcaatcggatgaactagctgagatctatgggactctgggctggcttttgctgactgccacaaactctttcaggtctcacatgcctccacatctctgagttcgtttttcttcctctttgctacagcactgagaaaaagatgctggatcactgtcttacacaataacagcatggctcaacaggttttccaaaggcattctgaagccttctttggaagcacagcatttctacccctttataaagtgtttaagataaacagaaaactaaaacacagtcccagtattgagggggcaggtgagttattatcttctccaggaaaggctacaaaaggacccttaactgtccctcctaccacacacatggcaggctgggctgtatctgcttcatgagtggctgttttccttatttctctgaggttccttcygggctatctgggccatggtcgtgcatgtaaggggctcctggaacaccatggagtccaagcagatgggggaggaggggtgaagttggagaagagaaacagtccttctgccttacctcccaggtgtttccattcaggagtgagtgt

SEQ ID NO: 541750 - DNA, 574 bp, Homo sapiens
catgcttggcaacaaaagtcaattttgagtaaggaaaagaagggaawtaggagcctaaatcccaagtggcctgaccactaggctgtcagcagaagcctatggaaatgcagagttcaacccatgtgagtaagttacctgctgctaaaatcaagtggcaccatgtgacacattacctcaaaagttaatgacttacaacaagagacattttattacacgtcatgattttgtcaggcattcgagccgtgcttggtgaggccctgctttgatccacatggctttgacagaggtccctggaggcatgaagtggaggatggtctggaatggggctcagggcggctccactcatgtgcctggtgcctggtgaggatagaaggctgggcccgggggactcaatcccagagcctgcctgtggccttcacgtgagtcttgggcttctcagagcattgtactcccagggagaaaaagagtgatcctgaggaaacattctgagagcaatcaccgtaacagccagaagtggaagccaaaggaacagcgggaggaatctgacataggtgactccatcttgcttctgatc

SEQ ID NO: 541751 - DNA, 574 bp, Homo sapiens
catgcttggcaacaaaagtcaattttgagtaaggaaaagaagggaaataggagcctaaatcccaagtggcctgaccactaggctgtcagcagaagccyatggaaatgcagagttcaacccatgtgagtaagttacctgctgctaaaatcaagtggcaccatgtgacacattacctcaaaagttaatgacttacaacaagagacattttattacacgtcatgattttgtcaggcattcgagccgtgcttggtgaggccctgctttgatccacatggctttgacagaggtccctggaggcatgaagtggaggatggtctggaatggggctcagggcggctccactcatgtgcctggtgcctggtgaggatagaaggctgggcccgggggactcaatcccagagcctgcctgtggccttcacgtgagtcttgggcttctcagagcattgtactcccagggagaaaaagagtgatcctgaggaaacattctgagagcaatcaccgtaacagccagaagtggaagccaaaggaacagcgggaggaatctgacataggtgactccatcttgcttctgatc

SEQ ID NO: 541752 - DNA, 630 bp, Homo sapiens
aactgctctccacagaaatgctatggcatgcttggcaacaaaagtcaattttgagtaaggaaaagaagggaaataggagcctaaatcccaagtggcctgaccactaggctgtcagcagaagcctatggaaatgcagagttcaacccatgtgagtaagttacctgctgctaaaatcaagtggcaccatgtgacacattacctcaaaagttaatgacttacaacaagagacattttattacacgtcatgattttgtcaggcattcgagccgtgcttggtgaggccctgctttgatccacatggctttgacagaggtccctggaggcatgaagtggaggatggtctggaatggggctcagggcggctccmctcatgtgcctggtgcctggtgaggatagaaggctgggcccgggggactcaatcccagagcctgcctgtggccttcacgtgagtcttgggcttctcagagcattgtactcccagggagaaaaagagtgatcctgaggaaacattctgagagcaatcaccgtaacagccagaagtggaagccaaaggaacagcgggaggaatctgacataggtgactccatcttgcttctgatctcacaagccactgcctttgctcattcctgc

SEQ ID NO: 541753 - DNA, 503 bp, Homo sapiens
tgaaatgctgacctaaatttttataactgtaataattatgttcacttgagttttctgctatatgtttgctcacagtgacatttcttgcactgccaagctaagttgaccctttggaagccgagacccaccaattctctgaaatggtgaatatcctattagtatcaccagtgccttgggccttgaaaagcatgcctttgtgttcaacctttatgaccccacatttatactctgtggagtacacacagcttgatggcagttttttgaagttcttgtagaaacctaaacataggatctggaaggcaagtcctcaagaatctcttctctccttatcttttcatctccagatgcctttcatgggtcttttgttttgcaggggttttccaagactagataggtrtatatatagtgctgctttattggggcagattggagcaggaaggagaaataatgagaatgtcataataaagggtcctgacctggacagaggcagccccatctggttc

SEQ ID NO: 541754 - DNA, 517 bp, Homo sapiens
tcccttgtcaggggcctctaattattctctccctggagtcaggccacaaatctggacatgctcattaaagtgtcagcgagttgaggagcatggtgctaagtgggatgaattgatgacatagctctctgctgtcttgcacctgggtggtgacttatatcagcagaggagcaatttctcctatgcctacttagtctccatacccagggagctttgtcaaggagttggtcacatcttgsccgggctctgcaagtggaaaagaggaaagaagagggccaaaagcagacagggctaccaccccagtgtcctggaggctctggcactctgcactgaccacagctggctgcagctgcagtcccagcagtcaagttctcagcctgtgtttgttctctgtggaattcctgcctgtctcctgttgagttcacattgatttcaagatgatttttctgaacaaaggagaaacatttctctgccctagcattttgtattcacagaaaggacagaaatttggcctgggtgg

SEQ ID NO: 541755 - DNA, 511 bp, Homo sapiens
tggccttgctgctccacatgctcctcaggctctgggctgtctccatgcttactcataaacagaaatgcgaggtcaaaaactcatcttcgtttgggcacagtagctcatgcctgtaatcccagcactttgggaggctgatgtggctagatcacttgaggccaggagttcsagaccagcctggccaacatggtgaaacctcgtctctactaaaaatacaaaaattagccaggcgtggtggtgcatgcctatggtcccagctacttgggtggctgaggcatgagaatcacttgaacccgggaggcagaggttgcagtgagctgaggtcacacaactgtactccaacttgaatgacagcatgagaccctatctcaaaaaagcaaaaacaaaaaaacagactatttctcttctccttacggttcccaactgctctcctgaggtgtgcttggattgtttgtaatgtatcactacctctcaaatgcccttgcttgtttttgggaagcagatccctccc

SEQ ID NO: 541756 - DNA, 618 bp, Homo sapiens
ttgctgctccacatgctcctcaggctctgggctgtctccatgcttactcataaacagaaatgcgaggtcaaaaactcatcttcgtttgggcacagtagctcatgcctgtaatcccagcactttgggaggctgatgtggctagatcacttgaggccaggagttccagaccagcctggccaacatggtgaaacctcgtctctactaaaaatacaaaaattagccaggcgtggtggtgcatgcctatggtcccagctacttgggtggctgaggcatgagaatcacttgaacccgggaggcagaggttgcagtgagctgaggtcacacaactgtactccaacttgaatgacagcatgagaccctatctcaaaaaagcaaaaacaaaaaaacagactatttctcttctccttacggttcccaactgctctcctgaggtgtgcttggattgtttgtaatgtatcactacctctcaaatgcccttgcttgtytttgggaagcagatccctccctttctggggtggggttgatgcagaactgagtggaggagtcaggaggaggagggctgtggctgacttcaccttggtcttgcaccttcaggctccaagaagcacattgaaaatg

SEQ ID NO: 541757 - DNA, 618 bp, Homo sapiens
ttgctgctccacatgctcctcaggctctgggctgtctccatgcttactcataaacagaaatgcgaggtcaaaaactcatcttcgtttgggcacagtagctcatgcctgtaatcccagcactttgggaggctgatgtggctagatcacttgaggccaggagttccagaccagcctggccaacatggtgaaacctcgtctctactaaaaatacaaaaattagccaggcgtggtggtgcatgcctatggtcccagctacttgggtggctgaggcatgagaatcacttgaacccgggaggcagaggttgcagtgagctgaggtcacacaactgtactccaacttgaatgacagcatgagaccctatctcaaaaaagcaaaaacaaaaaaacagactatttctcttctccttacggttcccaactgctctcctgaggtgtgcttggattgtttgtaatgtatcactacctctcaaatgcccttgcttgtttttgggaagcagatccctccctttctggggtggggttgatgcagaactgagtggaggagtcaggaggaggagggctgtggctgacttcacsttggtcttgcaccttcaggctccaagaagcacattgaaaatg

SEQ ID NO: 541758 - DNA, 572 bp, Homo sapiens
actgacacacccattttaaagctctttgccaccactttgcctcaygggctgggaagtttcattccccatcaatttctgcagcaaaagcttccttttgatcctcctcgtcttttattgtctccttattagtgacatccatatgaatgaaatgtatgatgctgcaggaggctcatcataatttaacaggaattaatgtcctcttattataaaggaccctacaagccgctgcttaatagtcagcaacaactggaattaatacgtgtcagatgaacatcaagaaaaatccatttatgaccccaaagtcatgaaatttagcataattacacatgctcttgtttgggtaattttttctctcctcattaaattaggtgcctacattagatttcagtctgatcggtcttgactagttacatttatgtaatcaagggcatttcctctcaaatcaacccaaagttacacaggcaaactacagtaaatgcatgaactgaagcaaaggtacaagtgctgaaaagcttagaaaattcattcttaatatttattcatgttacccctcaacaaatatttatagaaca

SEQ ID NO: 541759 - DNA, 632 bp, Homo sapiens
tttgtgaataaaaattaattaaaacaaatatgtgtttcatgctggaattaaataattaaagttcagtctgtgcacagttctgccaaaacaaacatacaaataaataaatactttctgtgtatctacttattcatttaaatattaagatgcccagagaattttgggtctgctcctgcctttattatacagcaaataaagataaaaacagaaaagaacaattttgtaaacataagcatacctcaaaaacaaagaacataaaaaatccaaactgtatttctaatgaattttgaaaatgacatttttataaacatcagggtaaaatttgagcatctcaacataatccaccttgagcatttcagtgataggtaaaaatgtgagggataggatacattgctgtctgggatattcacttgagtccttttcactgagcagtactacctgaaacatgctagaagctcattgtagatggtttattttttaaatgaggtgttcttaatcactcatttctactcccactcagcatgcacttatgaatggacagaggtcctatcctattgaatcagagacagagatcagagtgaasaaagaacctatatggcacacgaggaaggaattcttagactggagaagaa

SEQ ID NO: 541760 - DNA, 393 bp, Homo sapiens
gcaacagtctgccttcatcctccttgctaggggtcactgtcaatgaggaacatgaacaccccaagcaaggcaatttccatttcactactaccttactttcccggamtaggagttctttgagtgctggatccactagcctcatggtggattaactaagccatagttaatccattatgagatgagacactcttctcctctgatcagcatcctctgaagttcaaccctctcaatccacagtgatggttcttcttttttttttttttgagacggagtctagctctgtcgcccaggctggagtgcagtggcgcgatctcggctcactgcaagctccgcctcccgggttcacgccattctcctgcctcagctctcccgagtagctgggactacaggtgc

SEQ ID NO: 541761 - DNA, 393 bp, Homo sapiens
gcaacagtctgccttcatcctccttgctaggggtcactgtcaatgaggaacatgaacaccccaagcaaggcaatttccatttcactactaccttactttcccggaataggagttctttgagtgctggatccactagcctcatggtggattaactaagccatagttaatccattatgagatgagacactcttctcctctgatcagcatcctctgaagttcaaccctctcaatccacagtgatggttcttcttttttttttttttgagacggagtctagctctgtcgcccaggctggagtgcagtggcgcgatctcggctcactgcaarctccgcctcccgggttcacgccattctcctgcctcagctctcccgagtagctgggactacaggtgc

SEQ ID NO: 541762 - DNA, 649 bp, Homo sapiens
tgattacaaggcactgccctaggctctacagagaatgtcatgcatatgttatatatgtgacttctcctatgtcatatgctcactcccaattgcctttctaaaattctgaattccaaaatacatctgrccccagtggttttgatatagggctatggacctgtgttaatatttgtattttactttcttcttacaggatagaagaaggaagttaatgctgcagtcctaggattggagaaacaatggcacttcagaaaaaatgttcaaaaacagaaatgctattgcctccatattagaagaacatggcataagctcagccctcagcaacacccatcatcaagtaagtggtttgttctgggtgctatacagagcaggtggcacaggcacagctttaagggactggggatgcatgacagaccaacaccaagaaacaaaattgtgagtaataagccctggacatatgcagacatgataaaactatttaaattatgtataggcccaaggataagggcatttgagtactgacaagtgggctaatcacgggtttctgtctttacacaaagtagggactgaagaagggctaacaaaaaaaggcaagataataagtagagtccccagtgtgtgtttgtgtgttcacaaagaggagaattac

SEQ ID NO: 541763 - DNA, 478 bp, Homo sapiens
tgtggtcactggattctatttcttgagaagaagaaatggacataaacttcagcacaacagatttcagttagatatctagaaatattttctgacgataatggtcagtgaacacagaaatagctatctgaaggaagctgaagtttatttctattcttgcttcagagatagatacatagataaacagacaagcagataggtagaagatagatgaatcttttgaacagcagaaacttttggagcattcaaactaattactaggcaaatctctgcatttaaaaaatcaacacttcactgtagaagaaaatatgaaatataaatatgtttttaaagtgctgattatgtcatgatccagagataataactgttggtgtctttgttgcattgcctttgttctatattattttcaccccaaagcagtatatttatcygtagttttatttaggtgcaaaagtaactgcagtttttaccattccttaat

SEQ ID NO: 541764 - DNA, 586 bp, Homo sapiens
gcacaggaagcactccagagcatgccaggaaggctggcagaggatcatcacagctacctcgcctgaccaggaacaagtgctggtggcccgttgtacagcccacccccagggaggcctgccccacctccagaagaaccttcacttatggtggtgagaggggccttcaagctcctctagtctgatctttcacccggtgtagaaatcacctctgcaacatccctgagaggcgatcatccaacctctgcttgaatacagccagtgatggggacctcactacmctctctggcatcccagatccttgttggatacctcaaacagttgagaatattctaaagaacctccccatgtgaattctgcctgttggtgctggtgctgcccttgggagctcaggaacatgcccaacccacactgagagattctttgaaatacttgaggcgagctcttgcaggtctccctgcctgtctttgttctgtctctctcacttgcttaagccctcatcttctctttaaaaggctgaatgtgtcccgtctcatcctcctacagcacccgtctgagaacactccctgtgtggtgagggtccttcaaa

SEQ ID NO: 541765 - DNA, 586 bp, Homo sapiens
gcacaggaagcactccagagcatgccaggaaggctggcagaggatcatcacagctacctcgcctgaccaggaacaagtgctggtggcccgttgtacagcccacccccagggaggcctgccccacctccagaagaaccttcacttatggtggtgagaggggccttcaagctcctctagtctgatctttcacccggtgtagaaatcacctctgcaacatccctgagaggcgatcatccaacctctgcttgaatacagccagtgatggggacctcactacactctctggcatcccagatccttgttggatacctcaaacagttgagaatattctaaagaacctccccatgtgaattctgcctgttggtgctggtgctgcccttgggagctcaggaacatgcccaacccacactgagagattctttgaaatacttgaggcgagctcttgcaggtctccctgcctgtctttgttctgtctctctcacttgcttaagccctcatcttctctttaaaaggctgaatgtgtcccgtctcatcctcctacagcacccrtctgagaacactccctgtgtggtgagggtccttcaaa

SEQ ID NO: 541766 - DNA, 586 bp, Homo sapiens
gcacaggaagcactccagagcatgccaggaaggctggcagaggatcatcacagctacctcgcctgaccaggaacaagtgctggtggcccgttgtacagcccacccccagggaggcctgccccacctccagaagaaccttcacttatggtggtgagaggggccttcaagctcctctagtctgatctttcacccggtgtagaaatcacctctgcaacatccctgagaggcgatcatccaacctctgcttgaatacagccagtgatggggacctcactacactctctggcatcccagatccttgttggatacctcaaacagttgagaatattctaaagaacctccccatgtgaattctgcctgttggtgctggtgctgcccttgggagctcaggaacatgcccaacccacactgagagattctttgaaatacttgaggcgagctcttgcaggtctccctgcctgtctttgttctgtctctctcacttgcttaagccctcatcttctctttaaaaggctgaatgtgtcccgtctcatcctcctacagcacccgtctgagaacrctccctgtgtggtgagggtccttcaaa

SEQ ID NO: 541767 - DNA, 622 bp, Homo sapiens
gtaaattttttccagaacattgaagtagttggaaaaatattgaaacatttaaaagcaggtgtattaaaatccccaacattatgttacacttaaatattttatttacagcaaaaacagaatgtatttcattttactttcctggctgtaatggaarataactcaccagtaatagtaatcatctacttctttgcttatctcattttcgactgagagaattggcattttgaccatttctcttgaccaagtgaccatcttaaacaattcttaattaactgcagctccctaatcctgtctttacttaaaattgtgatattttcctcatcgtggatatttttacattcattctgatttgtttaatttgcattaagatattatttatttccattactggggttttgagtacacccttaaagtttgtgcccgagacaagagcctcactcacctccccactaattccagccttgagtcagagaggtggtgctggacggcctgcacccagcctgaaccaggaaaggatggttccgggacccagaaccagccttgaaggaagggagaagtaggaatgaagcagctctgggccagcgactgccctgtcaccatgtgtttgcccaggcggggccag

SEQ ID NO: 541768 - DNA, 622 bp, Homo sapiens
gtaaattttttccagaacattgaagtagttggaaaaatattgaaacatttaaaagcaggtgtattaaaatccccaacattatgttacacttaaatattttatttacagcaaaaacagaatgtatttcattttactttcctggctgtaatggaaaataactcaccagtaatagtaatcatctacttctttgcttatctcattttcgactgagagaattggcattttgaccatttctcttgaccaagtgaccatcttaaacaattcttaattaactgcagctccctaatcctgtctttacttaaaattgtgatattttcctcatcgtggatatttttacattcrttctgatttgtttaatttgcattaagatattatttatttccattactggggttttgagtacacccttaaagtttgtgcccgagacaagagcctcactcacctccccactaattccagccttgagtcagagaggtggtgctggacggcctgcacccagcctgaaccaggaaaggatggttccgggacccagaaccagccttgaaggaagggagaagtaggaatgaagcagctctgggccagcgactgccctgtcaccatgtgtttgcccaggcggggccag

SEQ ID NO: 541769 - DNA, 547 bp, Homo sapiens
ccagctgactgcgtgggcgggaaaggcgggttcaggagacccagcctccctgggctgtcaccacctctgcacatccagccccattgatcaagggttcaatttttggggtcctgttgggaggccaggagactctctccaggcacttcttccaggtctttgtgttagggtgtgtgtgtgtgtgtgtgtgtgtgtgtgtgtrttgtttgttttattatatatatatatatatttatatatatatatatatatttatttattttgagacgcagtctcgctctgttgcccaggctggagggtggtggcatgatctcggctcactgcaagctccgcctcccgggttcacgccattctcctgcctcagtcttcctgagtagccggattacaggcgcacgcaccatgcctggctaattattttgtttttttagtagagacagggtttcgccacgttgcccaggctggtcttgaatccctggcctcaagcgatccgcccgcctcagcctcccaaagtgctgggattacaggcgtgagccaccgtgcccgcccagcc

SEQ ID NO: 541770 - DNA, 547 bp, Homo sapiens
ccagctgactgcgtgggcgggaaaggcgggttcaggagacccagcctccctgggctgtcaccacctctgcacatccagccccattgatcaagggttcaatttttggggtcctgttgggaggccaggagactctctccaggcacttcttccaggtctttgtgttagggtgtgtgtgtgtgtgtgtgtgtgtgtgtgtgtgttgtttgttttattatatatatatatwtatttatatatatatatatatatttatttattttgagacgcagtctcgctctgttgcccaggctggagggtggtggcatgatctcggctcactgcaagctccgcctcccgggttcacgccattctcctgcctcagtcttcctgagtagccggattacaggcgcacgcaccatgcctggctaattattttgtttttttagtagagacagggtttcgccacgttgcccaggctggtcttgaatccctggcctcaagcgatccgcccgcctcagcctcccaaagtgctgggattacaggcgtgagccaccgtgcccgcccagcc

SEQ ID NO: 541771 - DNA, 547 bp, Homo sapiens
ccagctgactgcgtgggcgggaaaggcgggttcaggagacccagcctccctgggctgtcaccacctctgcacatccagccccattgatcaagggttcaatttttggggtcctgttgggaggccaggagactctctccaggcacttcttccaggtctttgtgttagggtgtgtgtgtgtgtgtgtgtgtgtgtgtgtgtgttgtttgttttattatatatatatatatatttatwtatatatatatatatttatttattttgagacgcagtctcgctctgttgcccaggctggagggtggtggcatgatctcggctcactgcaagctccgcctcccgggttcacgccattctcctgcctcagtcttcctgagtagccggattacaggcgcacgcaccatgcctggctaattattttgtttttttagtagagacagggtttcgccacgttgcccaggctggtcttgaatccctggcctcaagcgatccgcccgcctcagcctcccaaagtgctgggattacaggcgtgagccaccgtgcccgcccagcc

SEQ ID NO: 541772 - DNA, 557 bp, Homo sapiens
gctgtaccattttgcattcccaccaatagtgcgcaagagttccagtttctccacatccttattgacacttatttcctgttttttttycttcttttcctatagtagccatcctaatggatgtgatgtgttacttcacttttttgttttctgttcttgagaaatctgaaactattcagatttttggttatggaagacctaggctcttctttgtgccaggtcatgccgtttaacagtgatgttccttggtatgggtctgttttaagtaacggttttgagaattatttatctgatttcctctcttctgtttttttgttctttctttttttttttttaaaacccctgtttggttggatgttggaaaacgttgctaaaatgttccattttaggcttccaattttctttcctgttttctgatggtcttttcctctaacttgcatttttctgtttgtttggctgctttttatggtagaggctttctggaggtgtctggtaatccttggttttcattcatatttaaaagtcagggatacacaacagagttggagcatatgaaattg

SEQ ID NO: 541773 - DNA, 557 bp, Homo sapiens
gctgtaccattttgcattcccaccaatagtgcgcaagagttccagtttctccacatccttattgacacttatttcctgtttttttttcttcttttcctatagtagccatcctaatggatgtgatgtgttacttcacttttttgttttctgttcttgagaaatctgaaactattcagatttttggttatggaagacctaggctcttctttgtgccaggtcatgccgtttaacagtgatgttccttggtatgggtctgttttaagtaacggttttgagaattatttatctgatttcctctcttctgtttttttgttctttctttttttttttttaaaacccctgtttggttggatgttggaaaacgttgctaaaatgttccattttaggcttycaattttctttcctgttttctgatggtcttttcctctaacttgcatttttctgtttgtttggctgctttttatggtagaggctttctggaggtgtctggtaatccttggttttcattcatatttaaaagtcagggatacacaacagagttggagcatatgaaattg

SEQ ID NO: 541774 - DNA, 505 bp, Homo sapiens
gcccacggcacaggcccgtcagactgggaacttgcccagcagaggaggcgacccttggtggcccccaccactgccttcaggcctcaagcctgacctggcacgraggtgccaaagggcacaggcagtcccttgaggaagcccccttctccccccaacagacttctctcccgactgcagccataagagaggagctctcagcccaggtccctctgcagcgaaggagtggccatgtccccagacacaatgactcattgctacttcctatctgaactcagctcccttcctgcctgaatcagacagcctttcaggagccactgcctctggaaagtcttccctgactgtcttggcctcctatcccctaggccctatatccgtgactgtacaggtcatgctatttgaggagcatgtgggatgttgtcatgtacatgtgtgtgcacatgacatgtgtgcatatgtgaacatcactcctcctcagccagacagtaagctgccagggaacaggacc

SEQ ID NO: 541775 - DNA, 640 bp, Homo sapiens
ttgggcagtagaacaggtaatgccaagagaagcagctcccacacccagggttgccaaaaccacacgcagggtctgcatttctggagaaaggaagaccacagggcctcaggaaatctgagctgaaggaatcagcatctcccaaggtagaagtgaaaaggactgctttggaggtgtttccaggggtaaaatgtactgtaggaaaactgcatagaggcaaagaatgtgcagtggctaatagctgagaaatgtgattggcctacatattgtgacttaaatagtgaataaaaggatctgagtgatgcttcaattctcactatatatcagggtatgccatagcagaaaagggaacattagagctaaagagtttttttttkgtctcacttatctatctgggaacacctctgccctccttgcagaaaacaggagtgtcatgtgggcaatactagggagtgtaagactcatccatgtcctcatagattttaaaacccagatatatacacaatattgacatggggctatgtttgcaaaaggcagtcataaaaggacagggttcctatgttaaaggacagattggacagtattaatgtttcaaggatgaagaataaggacatttattggagaaaaatatcagactttggaa

SEQ ID NO: 541776 - DNA, 518 bp, Homo sapiens
agactgtttcaggaggatatataagaaaaatacataacttttaaagtcagacaatcccctccagcccccaaattctggaattctgactgctattacttttgtgacstaggttactgcattttttgagcctctgtgtagcaatgcaatagagaaaaatctctattcatacagtttagtgatatgattaaatgagacaacacatataaagagctgaaaacagtgcccagctatagtgagcactcaataaataccatttagagtcctgtctttctgctctcccctcaccccaactctgttcttcatgctctgtgatctgttctaattgggcttaatcagaaattaaaactgttgaactaaacttgaaacctttctgtgcctgccaactgtatattatgaatactgtgcattcactgatttaataggtagggcgaagtcaggaccttgaattgatctatatataacacccaccaggtgtatgtggtctttttcttctcagcaaattggtcccctagggattt

SEQ ID NO: 541777 - DNA, 518 bp, Homo sapiens
agactgtttcaggaggatatataagaaaaatacataacttttaaagtcagacaatcccctccagcccccaaattctggaattctgactgctattacttttgtgacctaggttactgcattttttgagcctctgtgtagcaatgcaatagagaaaaatctctattcatacagtttagtgatatgattaaatgagacaacacatataaagagctgaaaacagtgcccagctatagtragcactcaataaataccatttagagtcctgtctttctgctctcccctcaccccaactctgttcttcatgctctgtgatctgttctaattgggcttaatcagaaattaaaactgttgaactaaacttgaaacctttctgtgcctgccaactgtatattatgaatactgtgcattcactgatttaataggtagggcgaagtcaggaccttgaattgatctatatataacacccaccaggtgtatgtggtctttttcttctcagcaaattggtcccctagggattt

SEQ ID NO: 541778 - DNA, 542 bp, Homo sapiens
ctgaagccctcatggcccaggggmctgcctcaggtagcaggtctcactcctgcagtggaggggccataaagttcagttcatgatcagcccccaagccaggggcagcggatgacagggcaggagttccatctagaggagctcctgtgttcaggcgttcctagacacctgcctgcccttctcccatcagcactggggtataaagaaggaaagaggcctgaggtttccagaggcctctacctgctgaggtcttaagaggactcaaccctctgggaaatacaaataaaatcctcaaccctccaaacaactgaatggacacctcttggccaaagagaccccggaaaaactttaaaatccaagtttcctggccgtgatgataggtcactcacacctcagcacacctgcttcctcacgaaccgttaccaggcttctttcccaagagctaaacagaaaccagccctgaaaaccaagaacaggagactccttcactgatttcaatttcaaccaattccgagactcccttccctttcctgattttgacatga

SEQ ID NO: 541779 - DNA, 555 bp, Homo sapiens
ggaagctgacatgagccaaggagtttgagaccagcctaggcaacatagtgagaccccatctctacaaaaatactttatattagccaggcatggtggcatgtgcctgaattccagctcctcgggaggctgaggtgggaggattatttgagcycaggatgttgaggctgcagtgagctatgatcacaccactgcgctccagcctggtcaacagagcaagaccctgtctcaaataaataaatgaataaatagggcggaaagcaccaatattgtaattgcctccgtccccaggtgggagctcctcaagggccctccccaggaagtgttcctctggatgacctacctggggcagaggagccagaatatggaggagatggctgtggtggggagagacttagtcctgtgtcttccccacccagtgcagtccctggaagaagaatgcctgctgcacggccagcaccagccaggagctgcacaaggacacctcccgcctgtacaactttaactgggatcactgtggtaagatggaacccacctgcaagcgccactttatccagg

SEQ ID NO: 541780 - DNA, 543 bp, Homo sapiens
ccactgcactccaacctgggcgatagagtgaaactgtgtctgaaaaaaaaaaaagaaagaaagaaaaaaaaggaaaagaaaaaagaaaagaaagaaagaaagctctcctttctaaatgtaaagatcttgtgattttaagccaatataattgaagacaagagtaggatccacagagcagcccaggctccccgcagcgtgagtgaatgcactggtggctggtggagccattgacagctcagttgtctccctgacagctttgggaggaaggtgggtaagctctccctgatctaagatctcctggttttaggttgacatttcagagacttcattttttttctctgatcctctccatccagaccctgcaagggctatctttgctgtgtygggtttctagtgggggaggttgggggcagttcagcctgactcatccggcccatcaggtttggtgaggatgcttgccctctagtggcactcgcagggacgtctttaagtaaatgctgttatggggaacctaggttctaaggggacagacagtccctgacc

SEQ ID NO: 541781 - DNA, 543 bp, Homo sapiens
ccactgcactccaacctgggcgatagagtgaaactgtgtctgaaaaaaaaaaaagaaagaaagaaaaaaaaggaaaagaaaaaagaaaagaaagaaagaaagctctcctttctaaatgtaaagatcttgtgattttaagccaatataattgaagacaagagtaggatccacagagcagcccaggctccccgcagcgtgagtgaatgcactggtggctggtggagccattgacagctcagttgtctccctgacagctttgggaggaaggtgggtaagctctccctgatctaagatctcctggttttaggttgacatttcagagacttcattttttttctctgatcctctccatccagaccctgcaagggctatctttgctgtgttrggtttctagtgggggaggttgggggcagttcagcctgactcatccggcccatcaggtttggtgaggatgcttgccctctagtggcactcgcagggacgtctttaagtaaatgctgttatggggaacctaggttctaaggggacagacagtccctgacc

SEQ ID NO: 541782 - DNA, 581 bp, Homo sapiens
aaaatttagatgtaagaatttttccctagagctgctgctgtctcttgactaccatgtagcttctagtccatgaagcaaatgatcaggaaatcctagattctgcgaacaactaaatcgagcacactaaasccacataaaaaataaagggagtaataattactctttgttttcagggaatcagtaaagaaaaattagtggcttgtttgatggtttgtatatgccattttgtttttccttgtgggaatgaattttaatttcattctcttttggatcattggcattcttagaggcaaaggaattcaagacacaattctttctcaattactagtaaattcccgtttattactgttttgccaaaaaaaatccatgtaattgatgatgagatcagttatttgacaataaacgaactgtgaaagtgaacagcaccaaatactgcatgtttaatacatttgaaattagttacaattgcctttggtttggactccagaggaaggggctgcaggatggtaaaatgagaggtttatttagcgtctgggagaagcttataaagagcttaagtcctcattccttctaacatctta

SEQ ID NO: 541783 - DNA, 581 bp, Homo sapiens
aaaatttagatgtaagaatttttccctagagctgctgctgtctcttgactaccatgtagcttctagtccatgaagcaaatgatcaggaaatcctagattctgcgaacaactaaatcgagcacactaaacccacataaaaaataaagggagtaataattactctttgttttcagggaatcagtaaagaaaarttagtggcttgtttgatggtttgtatatgccattttgtttttccttgtgggaatgaattttaatttcattctcttttggatcattggcattcttagaggcaaaggaattcaagacacaattctttctcaattactagtaaattcccgtttattactgttttgccaaaaaaaatccatgtaattgatgatgagatcagttatttgacaataaacgaactgtgaaagtgaacagcaccaaatactgcatgtttaatacatttgaaattagttacaattgcctttggtttggactccagaggaaggggctgcaggatggtaaaatgagaggtttatttagcgtctgggagaagcttataaagagcttaagtcctcattccttctaacatctta

SEQ ID NO: 541784 - DNA, 581 bp, Homo sapiens
aaaatttagatgtaagaatttttccctagagctgctgctgtctcttgactaccatgtagcttctagtccatgaagcaaatgatcaggaaatcctagattctgcgaacaactaaatcgagcacactaaacccacataaaaaataaagggagtaataattactctttgttttcagggaatcagtaaagaaaaattagtggcttgtttgatggtttgtatatgccattttgtttttccttgtgggaatgaattttaatttcattctcttttggatcattggcattcttagaggcaaaggaattcaagacacaattctttctcaattactagtaaattcccgtttattactgttttgccaaaaaaaatccatgtaattgatgatgagatcasttatttgacaataaacgaactgtgaaagtgaacagcaccaaatactgcatgtttaatacatttgaaattagttacaattgcctttggtttggactccagaggaaggggctgcaggatggtaaaatgagaggtttatttagcgtctgggagaagcttataaagagcttaagtcctcattccttctaacatctta

SEQ ID NO: 541785 - DNA, 590 bp, Homo sapiens
tgtcctgggcctagggcacagcccaggtgccagcgtcctacacacagttgcgggtcccaggcgcgcactgccttacccaaggtggccctggtggggctcttcccgctgtggtgtgtataaaacatcactgtataatgtatattcatagaattcacaatgagtccccatgtaacaacctgcagagcccccaaatatgcccttccaggtcccccccgcccatggtcagcacagttctgagtgttaaggtaatcacttcctctcctttctctgggatttactaccccgtacactttcccaaacagtctgcgagcattttgtctggctttcttgttattaatgtaaatggaatcacggtgccgtgtctggytgagtctcatgcagttgatggagccgaagcttcttcactcttgttcactgctgtatagtgaagagaacacttggggttattatgagcgctgttattatgagcactgttgggattataatgagtattgtaatgcacagattctactgcagggtgcttctccagcaggggctgtcaggtcatggagtggtggacctaacactggaccaggccacatggtgtgcct

SEQ ID NO: 541786 - DNA, 612 bp, Homo sapiens
gtactccttagaattttctttgaatttaccttcaccaggacagtaattttaggatttgacactgttggctatttattttttcttgaaatattttattattttgactttttagtgttgtctcttgttttttcttggtttatttctgaaatcagttaagcttcctttcctttcctgatcctcctcatctgctcatccagtaatgttgattgtccttgttattctcttccacagcagctttttctgcaactgccttgggggttatctcatcccttcataatatcacctacaccttcataatgaccagagctacatttccagactactgagttttaaatgtgtatttccaactatacattagacatttgcatttaattgtctctgaggaactcaaacccaacatgtctaaattattttctttttcttattccaagtctcctttattttctgtttcactggaggcatctttctttgggcatcaatactaaaaacatrtgggttgtcttagactcttccctgtttacttgtcatatcaatttgcaaatattctttatatttgtcttctatctttaatgccaatttcttttcatttctcatctgacttttttaatgtat

SEQ ID NO: 541787 - DNA, 562 bp, Homo sapiens
aacagagaacctcactttgttctcactttttctgtgttattttgtgtatgctgtttggtctgtgtctagttgtttcatcatacttttttttttttaaactttatgtgacatttaaggtcccatccacctccatccacttataaggacattagcatttatcttctattttgatagagatggtttgttattgtggaccccaaaggatttttcttatatttagctgaaagcgacagatttcattctattggtgtgtgttatcaaarttgttaccttgtttaattatattgtgtgtgcatgtatgtgtgtgcatgtagtgttgtgtgtttctttgtaggtatttaaggtaattaaatactccctaatgtcatgaaacttaactaagaacataaagtgcctctaactttgggacttcagaatggtggggaggcggtttgtcatgcggtgtaatacatcttcacagcaagtactgacggaaaaaattagcaagtacctaatttaatctatgaggacggtcatggttaacagtccctcgtgaaattcacactgagtctcaaattgctta

SEQ ID NO: 541788 - DNA, 617 bp, Homo sapiens
aaaagaaggatctcagatagctcttaatgaacagaaaattacaataacaagttccttatcctctgcagtcacctgaattcagtgcacatgagtaaccrgtagacttcatttctgtctccaaagtctgtaattgtctaaccagacccaagttaagccacatcctaattttgtggcagcagaaggtacaggggtagcagtagtaaagactcctttccaagtttcacactttaaaaaaatctaatatatttttctacttgttttaatttttttcagcagtgagatctataaattatagatcaacccatatattctattacctaagatgattccctttctctctctctctctctctgtctctctcatttttcctgtagattgtgaagggaggaaggcagtgaaagccaagataaaaagtgaagggcaaaatgtgtgcacttacatggcaaacagagaacataattggctgttacttgtgaatgttgtcttcctttccttccccagcagaaggaaggtttgtgcctaaatccccatcagcctagagtctacaagtagatgacttgaattcttttttttttcaatcactttcaaatagaatgccacaaatctaaatatgcaca

SEQ ID NO: 541789 - DNA, 617 bp, Homo sapiens
aaaagaaggatctcagatagctcttaatgaacagaaaattacaataacaagttccttatcctctgcagtcacctgaattcagtgcacatgagtaaccagtagacttcatttctgtctccaaagtctgtaattgtctaaccagacccaagttaagccacatcctaattttgtggcagcagaaggtacaggggtagcagtagtaaagactcctttccaagtttcacactttaaaaaaatctaatatatttttctacttgttttaatttttttcagcagtgagatctataaattatagatcaacccatatattctattacctaagatgattccctttctctctctctctctctctgtctctctcatttttcctgtagattgtgaagggaggaaggcagtgaaagccaagataaaaagtgaagggcaaaatgtgtgcacttacatggcaaacagagaacataattggctgttacttgtgaatgttgtcttcctttccttccccagcagaaggaaggtttgtgcctaaatccccatcagcctagagtctacaagtagrtgacttgaattcttttttttttcaatcactttcaaatagaatgccacaaatctaaatatgcaca

SEQ ID NO: 541790 - DNA, 615 bp, Homo sapiens
acttagctaagaaggagagggaattaaattactaaaaattactgctttagctctatgagccagcattgtgatgtacttaatagatattacatcatgctgccaatatccacatgaggggaggtgggaggtgtattattcagaaccaaaagggaggaaactgaggctcagggagttcaagtaataggccaatgccctacagcgagtaagaagtgtttctgggaattcaactcaggtctgcattccccacagtctctaaagtatgctgctgaaggaattccgtcagtaactcacaagctagagagaaatgaaggagaaatcaacttctccatcgggattatggaagagacaccatttgagagcagtccagattgaagagtttagtagaggtttatcaacmattcttggtcccacagcacagtgtgtttgagaagccacaactcagtttcatacacgggcatgtgaacagaaaggcctgcaggatctggtgataaagattcttacccgatatgctataatgtttgtacttcatcctccaggctgtgaagagtcaccagtgagcaatgtaatcagatggtgttttaaaaatatgttataatatgaatcagtgtggacagg

SEQ ID NO: 541791 - DNA, 480 bp, Homo sapiens
ggcccacactgatgaaccccaccatctccagggctgaggtatctgcacaagccagcttcagcatgactgggatatcacagaaataatagtccacctcattggggacacagtaaggcaattggaaggtgagagtggtcagaaaggtggcctgaatgcagccaaagaatgaggtccccatggctaggatgatacatgctctgtggctcatgattatggtgtagcgtagagggtgacaaatggcaacaaagcggtcgtaggccatcaccgtgtacaggaaacactcagtgcagcccaggaaatggtagaagaagagctgggatgcacagcctgcataggagatggctcggctgttccctgaaagatagcacagcatcttaggggaactcacagaagggaaaaataggtcaaaaacagacagcttgcacaggaagaagtacatgggygtgtgaagccgagcagaggagacaatagccagcaaga

SEQ ID NO: 541792 - DNA, 504 bp, Homo sapiens
attttcatatctcaccattaaggatgtctgtttgttacatcacttagtaataaaaactggtttatgtgcaaaacaaacaaacccaaacttttaactttggatagaccacaatagaaaaaagaatgttttctacctctgaaattccaaaaagtacagttctgtaaatgaagggtcagtgaagtgtggagatttggtagatcagactacatggaggccagtttcaactataacatgcaaagagtttggaaaccatcactctcaccattaccacaagaaaaagctgaacaaacatgatatggtttggatttgtgtccccacccaaatctcaggtcgaattgtaatcccagtgtgggaggtaggcctggtgggaggtgattggatgatgggggtggatttccccatttggtgctgttcttgygacagagttctcacgagtcctggttgtttaaaagtgggtagcacctccttcctctttctcgtcttcctgctttggccacatgaaga

SEQ ID NO: 541793 - DNA, 587 bp, Homo sapiens
ggcctgctgggagccagtgggtcatactacactagtgaatcaggagaaatgttgtctggtgctggcatcacagagggtcttggggcatagggactgcattattttataacctcacctttgggcagagagagcctctccctgtgcaaagaaaggatagttggtcctcccacagaatcatagtatccaatgtgggaggcttcatggtgtggaggaaaaagcatattctagttctaccactgattaatcatgttggcttgagcaaacgacattcccacttagagactgagtgccctcttcaataaaatgagtggagaaagttaaaaaaaaaaaacaggtattgtaaaagacccaatgagacaacgtataagaaaaacatttcagaaactaaagtctatataatggaagggattattctgcttgaagctgatttctatgactttcaagttatatctgtcatcctcttcaaatttaatgtggctgtgacttttacacactccctccatgttttagcagcagatccacggtgactccgtggaggtwtggtacataagagggtgacttgttctgtaggagggctactggctggg

SEQ ID NO: 541794 - DNA, 506 bp, Homo sapiens
aaaaaaaaaagagaatctgttaagaaagagagtgaagaaatttaaaagtcagtatttctttatatagtatcaactgtagccagttcccattttttctacaaaatcttcccggggtgaatagaaggtagatggccactctctctgatctaatggtttcccatttcttttttttggcacaaagttatgaacaataaaattcctcagtatctagtgaaaccatttattcacttgttatgtcagcctataaatttgctaggaagttaattagtgatttaggtgctctgaccattacaaaagccataaatctctctatagatccataaaggtacrtctctacctcttaccctatttccttctttggtagaaaataaaaggggggcatatgatgtactttgttgtttgtttattgcaaagattaaatgagacaatgtatgtgaaaaccctaatcattacttagcacaccaaacagttcaatgcatgctattttcactttttttctttagatg

SEQ ID NO: 541795 - DNA, 543 bp, Homo sapiens
aaggcacttggacattgtgtgtaatttttttccagttgaggtgtaacataktaatatcacaagtgtacagctaatgtatactaagtgaacagctagatgaattgttacatatgcacatgtctgtggtaaccagtacccagatggagatatagaacatttccttggccttagaaagctccctggtgcccatcccaggcagccctccctcttgctagcaggcagcagctattctgaagagttggaatagatgagttttgcctgttcgtgaactgtatgaacatggactcctacagtatgtagtcttatgttggagttcttgcactgctcaataatgagcattgtaatagacataagcctgtgagatttattcatgttattgaataacatttatttatgtatacagtactaattcatgctttgtaaattgttgtagagtcttttgtgcggtttgaaattcataataattcattttattggcacattggatacacagtctttgggggaaaaaagaaaataacacttcttcctacattactagaaaat

SEQ ID NO: 541796 - DNA, 580 bp, Homo sapiens
tcttgcctttgccagcttagttgtaatttcttgtatccatcttggtcctcttcagtgcccagccagagcgctggcagacaggcactgggtacgttttgttgaatgaattgggagcgaacgtcgtttagtgaaacagctagttttggactgacctagagtcctttctcttttgcagactggcatcgtgctgaatcggccggttttgagaggggaagatggggacaaagccgctccacctcccatgtcggcacaggtagggagattcttctgttttttaagattccatctgctgatccttttgtagttcatgagcatgatgattgggtgttcacgtgcatgtgtgagatgtgrcacccttgcacattactcgcctgacctgagtggggaaaaaaaaagattccatatgttcagggtagcccttcctctcacttgcagttgttgggcagggaggtactgccatgacagaattgtgagctcttcagttctctctttgatgctgacacttgcctccttttccactgtctgcttctccaaaagcagcttgtggccgggtgcagtggcgcatgcctgtaatcccacc

SEQ ID NO: 541797 - DNA, 657 bp, Homo sapiens
ccgtcaagtgcagggtctgcaaaatatctcaagcactgatcttaggttttataatagtgatgttatccccaggagcaatttggraaggttcagactcttggaaccagagattgtatgacccctaaactgtaatttccaatcttgtagctaagttagtccagcaaaggcagactggtccccaggcaagaagggggtctttttgggaaagggctgttatcaattttgtttcagagtcaaaccatgaactgaattccttctcaaagttagtttgacctgtgcccaggaatgaacaaggacagcttaaaggttagaagcaagacagagacagttagatctgatttctttcactgtcatcatttcctcagttataattttgcaaaagtggtttcaatagtgttggtatttgccccaggatactttgtttctagacgttcttgcttccactgctgccacctcctggtcaaaggtgcctgatacactgaaaagaatttgtattttctttgggtcctagatttttgtctttaacaatttgtccctaattttttgtttcctgaattctttgccaaggcttgtctaaccacctcacctcacctcaccccaatttccttgggtttgattaaaaccaattaatgtgaagtcactgctaaccacctcacc

SEQ ID NO: 541798 - DNA, 529 bp, Homo sapiens
tttagacttctatcttcattaccgacagggtataaacacaaatgtaaaatttccttactactatttcagaaataattcaatttctaaattgcttattctacattacaaagcttaaatgaaacagtaatacacaaaataccttgctaaatcaaattgtcacatacctgacacagtgtaaaacataatattcaatgacagaaaatactaataaaagctgttattcattttactaatgttattttatacattaagctaatactacttactattcacattatacaatattttatgttagtgccacaacaggtaaatttcatttgtctaaagggcgagagaaaaagggtaaaaagataggaggtagrtctctcatgcttgaaagcaaaatatcaagcatgaatatacaaaatctctttttaaagaattcatataagaatgtgccagtgccctgcattcatcaaaacacaaactggccgggcgcggtggctcatgcctgtaatcccagcactttgggaagccaggaaaggtgggt

SEQ ID NO: 541799 - DNA, 351 bp, Homo sapiens
cctgcttgggaagagtgagaatgattccagggccaattgcaaaaagcttgcagattggtaggcttcaactgcactgattttaaagaataatcttaaacagtggtattttctagattttgasgtcttctttgagctccacggttgctgtggcttggttcagcatcttcctcagcattcagaatgattttgaatgtgattaaggatttttttttctcctgcattcttatcattgtattgtctccaacaggctatttaatgcatgaatttcataagttttggatcgaagaggaccccatggacataatggaatttaatcgtgtgagggagaaattccgcaagaggatcatcaaa

SEQ ID NO: 541800 - DNA, 351 bp, Homo sapiens
cctgcttgggaagagtgagaatgattccagggccaattgcaaaaagcttgcagattggtaggcttcaactgcactgattttaaagaataatcttaaacagtggtattttctagattttgacgtcttctttgagctccacggttgctgtggcttggttcagcatcttcctcagcattcagaatgattttgaatgtgattaaggatttttttttctcctgcattcttatcattgtattgtctccaacaggctatttratgcatgaatttcataagttttggatcgaagaggaccccatggacataatggaatttaatcgtgtgagggagaaattccgcaagaggatcatcaaa

SEQ ID NO: 541801 - DNA, 550 bp, Homo sapiens
tcagaaatctccacatctaataatcaccccaagaaattatgaagcaggtggtctcaggatcacaccgtagaaaacagcagagtagaggtcaaacacagggactttggagctgaaacactcatatcctggctcttccatttattagccaygtgacacaggacaagccatttaaccccactctgcttctcaactcttacagtattttacataaattatatagacaattataaagataatcacaataactggcacacagtataataaatacacaaaaactagctattgtttttattattcatagaatattaataattaataatctaagaagaaataaatattaaatgcacctttaaagtaatgtaacatactgggattagaggctgattaataaagagacaatcaaaaaaaaaggaacattttcggcaacttttcctaagttatgctcaaatattattctgaatagcaacctataatgacaaaatatccaagaaaatgcttgtgccctaggaacccatcaaaaaccaaagacttcagtctaaaaatagcagca

SEQ ID NO: 541802 - DNA, 630 bp, Homo sapiens
cagctagaacaaaagcttagggtttcatttttgtaatatattttactaactttaattcagttgatgtgtatarcagagaagtctgaaaacttgtgctgaagatcatttccctcgttgggatttagttattgaggttatattttttaaagttatcagaacatgattaattttggaaattaataaaggaaaattttaaagtcacccatgtaaatcattgcttccaactgttccagtctcagaatctcagtttcttggccctgcatctcacctcgttattttccttcctccagcagaaaagaggaaaggaaaatatctgccaagctcaaacctctgtgggaggaactgagcaatacagcagacttatcccatgtcccaactttgaggcaatcaagggaaaaaactatttttctagtatgattaggtaaataagggcttacaattagcaaaaataactacaaattggatttttaagtcattcatacttgattaatatcttggtccactaattcatttagtgtgcattcattgctaataatgcaagtatttattccactttcattctctcttcatagcaaatgtaattaagtaagacataacatcccattttacaaaggaggacaaggaggctta

SEQ ID NO: 541803 - DNA, 630 bp, Homo sapiens
cagctagaacaaaagcttagggtttcatttttgtaatatattttactaactttaattcagttgatgtgtatagcagagaagtctgaaaacttgtgctgaagatcatttccctcgttgggatttagttattgaggttatattttttaaagttatcagaacatgattaattttggaaattaataaaggaaaattttaaagtcacccatgtaaatcattgcttccaactgttccagtctcagaatctcagtttcttggccctgcatctcacctcgttattttccttcctccagcagaaaagaggaaaggaaaatatctgccaagctcaaacctctgtgggaggaactgagcaatacagcagacttatcccatgtcccaactttgaggcaatcaagggaaaaaactatttttctagtatgattaggtaaataagggcttacaattagcaaaaataactacaaattggatttttaagtcattcatacttgattaatatcttggtccactaaktcatttagtgtgcattcattgctaataatgcaagtatttattccactttcattctctcttcatagcaaatgtaattaagtaagacataacatcccattttacaaaggaggacaaggaggctta

SEQ ID NO: 541804 - DNA, 596 bp, Homo sapiens
caaagacactgtcaagcactgtacatacaaggcacagaactggccaacaggaggccctggaaaaagtcaggcccaggaatataagaaacaggactttcacaaactggcagaaataaactccctccaggcctacaaagagggacagagtttggaaagtgacttctagtccctgggagctgcagagtgccagctttccttattcttctccacactctgaagataaaagacacaaaccacacacttgcaccacgcatggtttaaacatttgctctctttcctggattctcctcttgcctacgttctgcccacccttccccctgtcagcaaacagaggctttatcctaggcctttgggctcagcatggtcttatttcctagtcccaggcagcctgtgtagaagaccaagtgcaacaaatctttcttgttcacagaacttctgagcratggtgtctcgttaaaaatgatgagcacgccaatctggaaggaaaacatgataaagagcaaaccaaaaaaatcaccaccacaactgccactgccctcacacaatacaatctctaaattttttaagctgtaattcaatttctaagacacacttta

SEQ ID NO: 541805 - DNA, 597 bp, Homo sapiens
tttcgtatgtatgtacatatatatgtatatatcagatctgcgtgcatgcatatgtgtgtatgcgcctgtgcctatgtgcatgctcayagtgggctgcaacgtacaatgcattttttactgtaggttgaagttttaaaaaaagtttgaaaaacactcatgcagtgtcaagaattaggagttccgagagaaagtaggagaagcccaagccacatttttagcttcctggaaatgctccccatctccacccacccaagcaccctgtaaaatgtttgcaggggcctcaaccatgaacactgtgttctgtactgccagtcctagcacataagtatgagtattggctcatccaatcagtagcagcaatctatagggtgggagagaaaggaggtcttggaggtgatggtgtagattcaggacattatccattaaacaaaatgtttttgcccatttcacacctgataaaagttatacttcttttctctctgatgccgttcccaggcctctgtcttcctgccatggccccttcttgtgtttatagacagtttcccctgtcagctctcagctctaggcttctgtcctgtaactatccagacccaagtt

SEQ ID NO: 541806 - DNA, 597 bp, Homo sapiens
tttcgtatgtatgtacatatatatgtatatatcagatctgcgtgcatgcatatgtgtgtatgcgcctgtgcctatgtgcatgctcacagtgggctgcaacgtacaatgcattttttactgtaggttgaagttttaaaaaaagtttgaaaaacactcatgcagtgtcaagaattaggagttccgagagaaagtaggagaagcccaagccacatttttagcttcctggaaatgctccccatctccacccacccaagcaccctgtaaaatgtttgcaggggcctcaaccatgaacactgtgttctgtactgccagtcctagcacataagtatgagtattggctcatccaatcagtagcagcaatctatagggtgggagagaaaggaggtcttggaggtgatggtgtagattcaggacattatccattaaacaaaatgtttttgcccatttcacacctgataaaagttayacttcttttctctctgatgccgttcccaggcctctgtcttcctgccatggccccttcttgtgtttatagacagtttcccctgtcagctctcagctctaggcttctgtcctgtaactatccagacccaagtt

SEQ ID NO: 541807 - DNA, 597 bp, Homo sapiens
tttcgtatgtatgtacatatatatgtatatatcagatctgcgtgcatgcatatgtgtgtatgcgcctgtgcctatgtgcatgctcacagtgggctgcaacgtacaatgcattttttactgtaggttgaagttttaaaaaaagtttgaaaaacactcatgcagtgtcaagaattaggagttccgagagaaagtaggagaagcccaagccacatttttagcttcctggaaatgctccccatctccacccacccaagcaccctgtaaaatgtttgcaggggcctcaaccatgaacactgtgttctgtactgccagtcctagcacataagtatgagtattggctcatccaatcagtagcagcaatctatagggtgggagagaaaggaggtcttggaggtgatggtgtagattcaggacattatccattaaacaaaatgtttttgcccatttcacacctgataaaagttatacttcttttctctctgatgccgttcccaggcstctgtcttcctgccatggccccttcttgtgtttatagacagtttcccctgtcagctctcagctctaggcttctgtcctgtaactatccagacccaagtt

SEQ ID NO: 541808 - DNA, 477 bp, Homo sapiens
actgcagtcttcgacctcctgggctcaagaagtcctctcacctcagcctcccaagtagctgcaactacaggcataagccaccamacctgactaattttttaaaaaattttttgtagagacacgatcctactttgttgcccagggtggagaatctgcattttaaatcaactctctaggtaacttatttgcctattaaagttcaagaagcattgtcctaggattagatgaggccctgatgtcatagacaacaacagtcacctcattgtataattgaggcaactgagaaaaagaaattttttgacttccatgaagctattgttttaatttgtgggtagaccgtgattggaacccagaacacctgattcccattcaaaggcttgctctctaaaccacagcgcagcttgtcatttccaggcttcccaggattaagctctggtcagatttttacttctctagtctgcatcagtttggcatcag

SEQ ID NO: 541809 - DNA, 477 bp, Homo sapiens
actgcagtcttcgacctcctgggctcaagaagtcctctcacctcagcctcccaagtagctgcaactacaggcataagccaccacacctgactaattttttaaaaaattttttgtagagacacgatcctactttgttgcccagggtggagaatctgcattttaaatcaactctctaggtaacttatttgcctattaaagttcaagaagcattgtcctaggattagatgaggccctgatgtcatagacaacaacagtcacctcattgtataattgaggcaactgagaaaaagaaatttttygacttccatgaagctattgttttaatttgtgggtagaccgtgattggaacccagaacacctgattcccattcaaaggcttgctctctaaaccacagcgcagcttgtcatttccaggcttcccaggattaagctctggtcagatttttacttctctagtctgcatcagtttggcatcag

SEQ ID NO: 541810 - DNA, 670 bp, Homo sapiens
ttgctttgaacagacccgtatcccaaccagtttgtacagyggtggtctggattggaggtgaagttatgttcaagtgcaaagaggaagttgctttcacttggatacaacaaaaggcctataggcctataggtaaatatggaactaaatatttagaaaaggaactttcaaaacctcttcattcattcataattaaattgcacttcaaaatttctcataggctgaaatgaaatactccaaatagttaacatagattaatttgagtaatacgatggctggcatttttccatcactctacttttctacatttcctacattttcgtacccagaatacatacatttaaatttttttaattaaatgagaattttgttatgaagaggtcaaatttattttaccactaatgcacaggaaactaagaagggactctcatatttggttaaataaataggatattatcttattctatctgtttttaactctcaaggttcacgttctttaatgtagtgtccattttgtgagtagaaataatatctaaaacttcctgcttttttaaaactcatttttttgtcttctagttgtaagtaaatgtcctaagggactgttttttttttttttctttaagttcaaagtttggaaattaatcctgagggaaatgtactgagccaaagtgaa

SEQ ID NO: 541811 - DNA, 670 bp, Homo sapiens
ttgctttgaacagacccgtatcccaaccagtttgtacagcggtggtctggattggagrtgaagttatgttcaagtgcaaagaggaagttgctttcacttggatacaacaaaaggcctataggcctataggtaaatatggaactaaatatttagaaaaggaactttcaaaacctcttcattcattcataattaaattgcacttcaaaatttctcataggctgaaatgaaatactccaaatagttaacatagattaatttgagtaatacgatggctggcatttttccatcactctacttttctacatttcctacattttcgtacccagaatacatacatttaaatttttttaattaaatgagaattttgttatgaagaggtcaaatttattttaccactaatgcacaggaaactaagaagggactctcatatttggttaaataaataggatattatcttattctatctgtttttaactctcaaggttcacgttctttaatgtagtgtccattttgtgagtagaaataatatctaaaacttcctgcttttttaaaactcatttttttgtcttctagttgtaagtaaatgtcctaagggactgttttttttttttttctttaagttcaaagtttggaaattaatcctgagggaaatgtactgagccaaagtgaa

SEQ ID NO: 541812 - DNA, 670 bp, Homo sapiens
ttgctttgaacagacccgtatcccaaccagtttgtacagcggtggtctggattggaggtgaagttatgttcaagtgcaaagaggaagttgctttcacttggatacaacaaaaggcctataggcctataggtaaatatggaactaaatatttagaaaaggaactttcaaaacctcttcattcattcataattaaattgcacttcaaaatttctcataggctgaaatgaaatactccaaatagttaacatagattaatttgagtaatacgatggctggcatttttccatcactctacttttctacatttcctacattttcgtacccagaatacatacatttaaatttttttaattaaatgagaattttgttatgaagaggtcaaatttattttaccactaatgcacaggaaactaagaagggactctcatatttggttaaataaataggatattatcttattctatctgtttttaactctcaaggttcacgttctttaatgtagtgtccattttgtgagtagaaataatatctaaaacttcctgctttttwaaaactcatttttttgtcttctagttgtaagtaaatgtcctaagggactgttttttttttttttctttaagttcaaagtttggaaattaatcctgagggaaatgtactgagccaaagtgaa

SEQ ID NO: 541813 - DNA, 461 bp, Homo sapiens
gacggttcctattaatcattttagatgacacctcaaaaagaaataatgagtgtctcgcccttagattatgcttttgtgtctaaaacctaccttctacaagttctgtgcagtatctaatatgtatcatatatctggctgatcatttgagagcaccgtatatagtgtgataacatcagagaggcacaaattatatacaggaaggcaacatagaggtaattcacctcacttcatttactttgtcagycgacattgtgaaactgtacttcaagatcatctagtttgttctttgtcccacaatgtgagaaatgattattttgcagagacctccccattttaggtaaaaaccagcccatgctttaactctgaccttggtgctttatttatctagatatcacttagcacctccttaataaatccttaatagataagttagcatctcctccactctttgctactgatcg

SEQ ID NO: 541814 - DNA, 576 bp, Homo sapiens
ggaacatcaaccccaatggagggtcattctgtttatggaggatcattctgtttcaaaaggcagggaggctgtgttcttcaaaaatgcccatatcagaaaagacaaagaaaactaagtcattgttccagattaaaggagactaaagagacacgacaatgaaatgcaacgtgtgattctaaattaggtctgtactgagttccccatcctggcaccccaaaagaaccrtaaagaacattgctcagtcaactgacaaaattggaatatggatgttaaattactatatcaatgttaaatttcctaaggttgaaaactgtactgtggttatgtatataaatgcccctactctaaggaaatacatactgaagttttacgggtaatgaggcatgaagtctgcaactcactctcacatgaagggcagggagggaggaaggaagagacagggaaagggagggaatgataaaacaaatgaacaaatgttattaataggttaatctgggcaatgagtttacaggtgttctcttatgtagttttgaaattatttcaaaataagaagctaagaaaataagcaaacaggag

SEQ ID NO: 541815 - DNA, 626 bp, Homo sapiens
aataaataaatctctgccaatgtggcaatgagaataaaaacacatcccttccagtttgtggatgcgtattttattatctccttgggcagtactgtgttggcttttgttttccaaactagacttcaggtgacataaaatgcaygttgcatccccgttctgcaacaattagctgtgggaccttcacttacccttttagtaagtgtcttcatgtgaaatgaggagttgcactagataattctcaatattccttctagagctaaggatctataagtctgggtgcctaatgatgggtttttcagagcaagtcagaggggtgggagtcaccccttacatcaccccacatagactggcatgtataggtaggggagttagtagggtgcaagggttaagagcgcagattctggagccagccaggcaggtgtgaatctcccttcacggttaggtgtccctgtggaagttacttagcctctctgctcctcagctttctcatctgtaaaatgaggatcataagatgaagtgtgatactgcttataaggggcttagaatagtgcttggcacatagtaagtgttctgtaagtatttgctattccggagagctagtcctgctctatctaattggagaaatc

SEQ ID NO: 541816 - DNA, 516 bp, Homo sapiens
ctccgatgagggtagtagatagtaaatgatgaactcaagacactttgarggaagtacatcaaatattttgcagattgactcactgcctggctacaataatagcctcttagttggtgagctcctgtcaccaggcctttctcccatacgactctgaatagactgccagagttcatcttcctaaaatacttgtgcctaaaatgtgcacttgctccattttgcctatgtcatggtgcttttcattcttattcttcttcatgaaattatttctttcttgctctgtcacccaggctggagtgcagtggcacaatctcagctcactgcaacctccacctcacaggcaaaagtgatcctcccccctcagcctcccagtgaaattatttctaactcttgctacggtaaacatgcatgggactatctgtcctaaactccctccaacttctagtaactgccctccttcctgtgtccacagcctcttctcccacactggcttcctccacttggcaggggacaagccac

SEQ ID NO: 541817 - DNA, 485 bp, Homo sapiens
tgcatcattggactttttattccctcatgagtgctgaaaataatctctcactgtccttttttttctccatttaaaaaatatttactaagtacttaccatgtgactagcagtgttgttggtgcagttaatagaagtgaacaaagttcctaccttcatggagctcatattctaatgggatttctcactcgcctttacttcattccccmagaatcaaaaatctgcatgggaccaactggctatgtttaggacatgtattcataccccatctcaagatatagggaggtggattatctgctccattttagcttctgcaggtggggtaaaatcttgtttcctctgatcttgggactttcactcaaataggaacaattcagaaaaaaaaaatagtaagtgttactgtcttctactaggactcttcaatatctacgcatacattttccccatagttatatttttaaaaattattcttatctgccctaatgcat

SEQ ID NO: 541818 - DNA, 514 bp, Homo sapiens
tagcttagcaataaggaaaattaaaaattgaagttatccttcagcattcccacacttaatatgttttgtaattagccttctaggcaaaatgcaagttgcttttcaaggcaatagcctctgaagtgctttgaaacaaaaacttacatgccatacttttccttaacactgttattcatttggataatctgaacaggctcaaggattctaaagtggtaacagctcttcagtcttcacactgaccttccctcttaaccagaccaccaactctctcccaaggagatgacttgacatttaggtatcagaaaaactgaaggaaagggcatagagaggcaggaatggctatctggctggctttcttagagtgagcacagacgccaagcactagaatcttctattaacaatgaaacacctgccctttcctctgtctagcacctgaagagacaagagaagtggcctgcrtgtccccagacttacaagccacttgtagaagttgctgctgtctctgccctccaca

SEQ ID NO: 541819 - DNA, 541 bp, Homo sapiens
aaacaagcagatccacagtcctcatcarcaaagggtctgcaagaagggtttggggaggggcaagggctccaggctgcaggaacagattcatcacagactatttgggtaaactgtcatgtctccatggaaccagaagagaacaggaagaaagatagagaaaaggaagaaagcagtaactcttcagactgcagcagtggagaagaaatagaagttgatgtctgagggcagtggctctagtgcagcttccctttttttttttttttgtttgtttgttttcttttcttccttcctcccgcaaagtaggacaggttgggaagaaagaagcaacttggtgcagcactctcctacatcaagattatgaacctgggaggaactctttgggaagaataaatataagtttgagccaatactggccttatccttaaaaaaacaaacaaacaaatatcatccctttcccgaggaactttatgcaattaaggcttctgaaatgaagagatgattacgttgtggggtacacactgtattagactgaatatttctg

SEQ ID NO: 541820 - DNA, 541 bp, Homo sapiens
aaacaagcagatccacagtcctcatcagcaaagggtctgcaagaagggtttggggaggggcaagggctccaggctgcaggaacagattcatcacagactatttgggtaaactgtcatgtctccatggaaccagaagagaacaggaagaaagatagagaaaaggaagaaagcagtaactcttcagactgcagcagtggagaagaaatagaagttgatgtctgagggcagtggctctagtgcagcttccctttttttttttttttgtttgtttgttttcttttcttccttccycccgcaaagtaggacaggttgggaagaaagaagcaacttggtgcagcactctcctacatcaagattatgaacctgggaggaactctttgggaagaataaatataagtttgagccaatactggccttatccttaaaaaaacaaacaaacaaatatcatccctttcccgaggaactttatgcaattaaggcttctgaaatgaagagatgattacgttgtggggtacacactgtattagactgaatatttctg

SEQ ID NO: 541821 - DNA, 541 bp, Homo sapiens
aaacaagcagatccacagtcctcatcagcaaagggtctgcaagaagggtttggggaggggcaagggctccaggctgcaggaacagattcatcacagactatttgggtaaactgtcatgtctccatggaaccagaagagaacaggaagaaagatagagaaaaggaagaaagcagtaactcttcagactgcagcagtggagaagaaatagaagttgatgtctgagggcagtggctctagtgcagcttccctttttttttttttttgtttgtttgttttcttttcttccttcctcccgcaaagtaggacaggttgggaagaaagaagcaacttggtgcagcactctcctacatcaagattatgaacctgggaggaactctttgggaagaataaatayaagtttgagccaatactggccttatccttaaaaaaacaaacaaacaaatatcatccctttcccgaggaactttatgcaattaaggcttctgaaatgaagagatgattacgttgtggggtacacactgtattagactgaatatttctg

SEQ ID NO: 541822 - DNA, 615 bp, Homo sapiens
ctattttcatacttcgttctcatgaatattagcatcacagaactagttgtattctttttgtataaaaaccattgaataatgagtgtttattttgtccctagatatcttaggaaaattttacttataagttttttctaaataaataataagtttcagagaataatggcaatgtttaccatttttatacctctaatttctaaatgtgttggattaaaatatccagaagaatgttaagtaacaacaataatctgttcttggcttgcttctgacttttaacctaatgcttacagaatttaaaatcatgaaaattatgctgatgtgtacatttgaaataaattattaaaaataagaaaattgctatttacttttattattatttgcttttaatttttaatgcatatcgatttttaacaaatttattttatcatatatttatgtaattttttcttactgtattagtcatcatcctgcagagaaacagaaccaccaacatagatagagaaacaaagtgacagagagagtratagaatagtagagaggagagagacaaagagactaattttattatgaagaattggctcacaaaattgtggaggcaaaaaatatcatgatctg

SEQ ID NO: 541823 - DNA, 630 bp, Homo sapiens
tagaattaatttggctagcttgtgtgggcttctctgtttgcaattcctgttatatcaattgaaatcactacattttcttgggatgaaatcactatcttttaactggtagtttgaatttagctaaaaagtataagccaactttgtgtttatttgcgtaaaaacaaaggaaacattttcattcttaccactaatgaacaaaatttgctagtttcctgatttagattgtttcgtgtctcttgattgattttccataaatagtccatttcctttataagtttctcctgcaaaagaagcaagaagcttagcaatgatgaagacagtagatttcatccccttatcaataaaaaaaaaggctgtaattgaaagaaacataaattaagttagagtgaagcggtcagatttttccaagttaaacgaatatgattctaataatttggatgtgaaaaatgatagaaacataatagagagttttaagggacccttcagataatatcatcaattttctgagaaactggcttttayataacctgactttgaaaagtgttcttggtgctggccaccagctccacagctccattctatatgtttgaacaatgtttttaaggaaacctcctttagcgaagtctcaac

SEQ ID NO: 541824 - DNA, 522 bp, Homo sapiens
aaggcacgtgctaagatgcccagctacttttttttttgttccatatttgtagtagagatggtgtttcaccatgttgcccaggttggtctcaaactccaggcctcaagtgatccrcctgcctcagcctcccaaagtgctgggattacaggcatgagccactgggtctggccccagatactctatttctataaaactaatttttcaaaaaattagcagcatcatggcacacgtctatggttgcagctacttgggaggctgaggtgggatgatcacttgaaccttggagtttgaagctgcagtgagccatgactgttccactgcatcccattctgggcaacagaactagagcttttctcaaaacaaacaaacaaaaaggtattttatttcaccacaatgttttatttgcatatatttgcttgtgcacatatatgtgtgtgttgtggtgtagagtagaagacgagtttaaagtcacgacatgggtgacagtttgagcttatatcctcaaactctagcatgtgtcag

SEQ ID NO: 541825 - DNA, 522 bp, Homo sapiens
aaggcacgtgctaagatgcccagctacttttttttttgttccatatttgtagtagagatggtgtttcaccatgttgcccaggttggtctcaaactccaggcctcaagtgatccgcctgcctcagcctcccaaagtgctgggattacaggcatgagccactgggtctggccccagatactctatttctataaaactaatttttcaaaaaattagcagcatcatggcacacgtctatggttgcagctacttgggaggctgaggtgggatgatcacttgaaccttggaktttgaagctgcagtgagccatgactgttccactgcatcccattctgggcaacagaactagagcttttctcaaaacaaacaaacaaaaaggtattttatttcaccacaatgttttatttgcatatatttgcttgtgcacatatatgtgtgtgttgtggtgtagagtagaagacgagtttaaagtcacgacatgggtgacagtttgagcttatatcctcaaactctagcatgtgtcag

SEQ ID NO: 541826 - DNA, 614 bp, Homo sapiens
gggcatggtggctcacgcctgtaatcccagcactttggaaggccgactcaggctgatcgcctgaggttgggagttcgagaccagcctgatcaacattgggagaaaccctgtctctactgaaaatataaaactagccaggcgtggtggcgcacgcctgcaatcccagctactcaggaggctgaggcaggaaaatcacttgaaccccgggaggcggaggttgtggtgagctgagatggcgccactgcactccagcctgggcaacgagagcaaaactctgtctgaaaaaacacagcaaaacaaaacaagacaaaaaacaaacaacaacaaaaaaagtaagggccctgacagacgggatcctctctgtcttgttcaccattgactttaaggtcccagaacagggcctgagccacaagctaagcattcgggaatactgcttgcaygagcagatgaagttacctgcaattgggaaatgtctgccatatgatagcgattcaaggaaggaagagattaattatggctctttttaaaaagctccgggaagaggccagctgtacagcattgtgttatattctgctactttgacaggagtgggacacctgaggacagagagctaa

SEQ ID NO: 541827 - DNA, 497 bp, Homo sapiens
tcattgctttcaggccactttagtggaaaaagctgaggtgtgtatgagtgtgtgtgtgtgtgtgcatgtgtgtgcacatgtgtatatgcaygtgagagagaaagcgagctcatattgttagttacatacatatttgtaccccttttaattaaaaatcttttattataatatcgatttatttactttatgttacaatataatgaactagtttcaactgtacaatatatatactcaataaggtttaatatttagtgcaatatatgcactaacaataaatgcaccgaataaggtttaatgttattaaacattaaacatactaacatactaaggatatgcaatcagattattttgcccgtaattagttgaacttattctgttctctatgattatattatcaagttgatatattgttgagttcatacatatgcctgtattcaattttagagttttcattttgattccttttaattttaaatgtattttgaatatataaagca

SEQ ID NO: 541828 - DNA, 657 bp, Homo sapiens
agctgcggcctcccaaagtgctgggattacaggcatgagccaccatgcccggcccaaacattgtatttttatggtgctcaagaccactccttttattcaatttatgtatcttggtattycttctttcaggcaaaagagttaatttaaatgtttgacatgtaaagacagatcaacatctaaacactacaattaaaattcagagagtatctaaaatgataagttaaaaaatagataaataaaaaagtaaagtaagtgagtttcttacaggcaacctataattactctttttctctttaaaagcctggctttattagctttagatgtttttagctcatgcaaagtctcaaaataatattatattaaacatttacagcagagttgttgtagatcaaaattttacttaaaatattcagaagcatttccccctctcttagaaagccaatctagttgttcctcaaaatccattatataaaagagtgaaatacacacacacacacacacacacacacacacaaacacacacacttctccattagattttctaatctaagcattgtagatacaaaacaaggacagcaggattatcagtaaattgataaaattataagtgcaaaatttgtttagaagccatggaatgttataattaaaaatgaaacc

SEQ ID NO: 541829 - DNA, 654 bp, Homo sapiens
gccaaatgaaggggatagaaaaccctgataaaatctgctgcagccaggccaggcatggcggtcacacttgtaatcctagcactttggcagtctgaggtgggaggatcagttgaggctaggagttcaagaccagcctgggcaacatagtgagaccttgtctgtactaaaaatttaaaaattagccaggcatggtggtgtgtgcctgtggtctcagctacttgagaggctgaggcaagaggatcacttgagcccaggcgtttgaggttgcagtgagctacgactgtgccactgcactccagcctaggcaagagcgagatcctgtctttaaaaaaaaaaaaagccaagtgcagtggctcacacctgcagtcctagcactttgggaggctgaggcaggaggatcacttgaggtcagcctagacaacatagggagaccctacctctataaaataaaaattwaaaaaaaaaaaaacctagccaggcatgatggcacacacctgtggtctgtcccggctacttgggaggctgaggtagcaggattgcttgcagatcgaggctacagtgagccccaatcacaccactgcactccagcctgggtaacagagcgagacctgtctcaaaaaaaaatattgctgaagccatggaaaggcagcaggt

SEQ ID NO: 541830 - DNA, 646 bp, Homo sapiens
gtgttgggatcacccagggtgctggggcagaagaccatgagagcttgtctctttatatctacagtctctgtgaattcacagccaaatatctggcagtaggtctagcgttgctgttggtcagcagagctggcaaaaaggagcaacagctaaacacaaagcaagtatgaggacatggagcagggaaaagagcaaggagaaaccagaaccttctgccacrtctacgtctgtcgctcatcaccactaacgatgatgatcttcagattgtaatgcctgctgcttcacttcctaggggagaaaaaatgttctttttcctttactcatcttaggttcattggctagagcgtagcaaattagactgacaaaaaacagattaacaagagaaaaacaatttgtcagtgcatgcagtgcacatcgcaaggcagaaaattcagtggtgaacaacccaaagggatggttagcacttggacttatatcacatcttagcaaagaacaatacatttatagataagagttaagacaaagaaaaagggctttaggcttgaacgggcagaaaactatgggaagataaatgtatgggggaaactaatggaagataaggattatttatgcaggtccagctcaactgactttccctcttcttcatggt

SEQ ID NO: 541831 - DNA, 646 bp, Homo sapiens
gtgttgggatcacccagggtgctggggcagaagaccatgagagcttgtctctttatatctacagtctctgtgaattcacagccaaatatctggcagtaggtctagcgttgctgttggtcagcagagctggcaaaaaggagcaacagctaaacacaaagcaagtatgaggacatggagcagggaaaagagcaaggagaaaccagaaccttctgccacatctacgtctgtcgctcatcaccactaacgatgatgatcttcagattgtaatgcctgctgcttcacttcctaggggagaaaaaatgttctttttcctttactcatcttaggttcattggctagagcgtagcaaattagactgacaaaaaacagattaacaagagaaaaacaatttgtcagtgcatgcagtgcacatckcaaggcagaaaattcagtggtgaacaacccaaagggatggttagcacttggacttatatcacatcttagcaaagaacaatacatttatagataagagttaagacaaagaaaaagggctttaggcttgaacgggcagaaaactatgggaagataaatgtatgggggaaactaatggaagataaggattatttatgcaggtccagctcaactgactttccctcttcttcatggt

SEQ ID NO: 541832 - DNA, 543 bp, Homo sapiens
tggcttcagggttcctgccggtacgcagcagcaaagctctccagtcctcctgtggctccccaaggcagaaaggaaaaatgtgcataggcgctggagtggaggccgtggaggggtaactattgattgcctctcccgacccctcagagactagacagagtctctgctgttgctgttgcatttttaaaaaattataggctgggcgcagtggctcacgcctgtaatcccagcactctgggaggctgaggcggatggatcacctgaaatcaggagttcaagaccagcctggtcaacatggtgaaaccccatctctactaaaaatacaaaaattagccaggtgtggtggcacatgcctgtaattccagctacttgggaggctgaggtaggagaatcacttgarcctggggaagttgaggttgcagtgagctgtgatcgcgccactgcactccagcctggatgacaagagtgaaactccatctcaaaaaaaaaattataataacaacaaaacaaaatcaagcaattttgaagtgaattttaaaagtgcag

SEQ ID NO: 541833 - DNA, 543 bp, Homo sapiens
tggcttcagggttcctgccggtacgcagcagcaaagctctccagtcctcctgtggctccccaaggcagaaaggaaaaatgtgcataggcgctggagtggaggccgtggaggggtaactattgattgcctctcccgacccctcagagactagacagagtctctgctgttgctgttgcatttttaaaaaattataggctgggcgcagtggctcacgcctgtaatcccagcactctgggaggctgaggcggatggatcacctgaaatcaggagttcaagaccagcctggtcaacatggtgaaaccccatctctactaaaaatacaaaaattagccaggtgtggtggcacatgcctgtaattccagctacttgggaggctgaggtaggagaatcacttgagcctggggaagttgaggttgcagtgagcwgtgatcgcgccactgcactccagcctggatgacaagagtgaaactccatctcaaaaaaaaaattataataacaacaaaacaaaatcaagcaattttgaagtgaattttaaaagtgcag

SEQ ID NO: 541834 - DNA, 543 bp, Homo sapiens
tggcttcagggttcctgccggtacgcagcagcaaagctctccagtcctcctgtggctccccaaggcagaaaggaaaaatgtgcataggcgctggagtggaggccgtggaggggtaactattgattgcctctcccgacccctcagagactagacagagtctctgctgttgctgttgcatttttaaaaaattataggctgggcgcagtggctcacgcctgtaatcccagcactctgggaggctgaggcggatggatcacctgaaatcaggagttcaagaccagcctggtcaacatggtgaaaccccatctctactaaaaatacaaaaattagccaggtgtggtggcacatgcctgtaattccagctacttgggaggctgaggtaggagaatcacttgagcctggggaagttgaggttgcagtgagctgwgatcgcgccactgcactccagcctggatgacaagagtgaaactccatctcaaaaaaaaaattataataacaacaaaacaaaatcaagcaattttgaagtgaattttaaaagtgcag

SEQ ID NO: 541835 - DNA, 543 bp, Homo sapiens
tggcttcagggttcctgccggtacgcagcagcaaagctctccagtcctcctgtggctccccaaggcagaaaggaaaaatgtgcataggcgctggagtggaggccgtggaggggtaactattgattgcctctcccgacccctcagagactagacagagtctctgctgttgctgttgcatttttaaaaaattataggctgggcgcagtggctcacgcctgtaatcccagcactctgggaggctgaggcggatggatcacctgaaatcaggagttcaagaccagcctggtcaacatggtgaaaccccatctctactaaaaatacaaaaattagccaggtgtggtggcacatgcctgtaattccagctacttgggaggctgaggtaggagaatcacttgagcctggggaagttgaggttgcagtgagctgtgatcgcgccactgcaytccagcctggatgacaagagtgaaactccatctcaaaaaaaaaattataataacaacaaaacaaaatcaagcaattttgaagtgaattttaaaagtgcag

SEQ ID NO: 541836 - DNA, 625 bp, Homo sapiens
ttcttagttacctcaagtgaaaattatgttgacacttttccacagtcccacttaacataaatgtartagttgctggggagttaaagatgacccggcactcacacttacaatttgtgtgatacaactgaaggtatgtagagggctctgggaaccctctatgctatagagtcactggggctcatgaggcaaaccattaatctctgaggagacaaaaaggggatggggaggaactttagaccagtcaggctcttctgtaataccctcatccacaattgtgtcttaattagtgtatggcatctaaaagtgatactaaaacatttacagtagtcccttcatatccatagtttcgcttcctgctgtttcagttacctgtggtctgaaaatattaaatggaaaattccagaaataatccataagttttaaattgtatgctgttctgagtaacgaggtgaaatcttgcaatcttacgctgcttctgtcctgggcatgaatcatccctttatgcagtgtagatacatactgtggatatagtagtgtatctacaccgtctacactacccaccggttagtcacctagtagtcatcttgattcttagatcaactgttggcagtcttgcagtgcctgt
